United States Patent Application Publication US 2006/0134663 A1 - sequence listing, part 120

SEQ ID NO: 373419 - DNA, 551 bp, Homo Sapiens
ctgtttatcgatgccaccccgtaactctcaaattcctgtagacctgaaatttcctagggcagaaaaagcagaacacaaggaagacactatttttcctaacccacacatcagctgtacatttcagggagtgctggaatagaccgagcctctggtggaggccatggcactactgttaatgacctcaggaaaactctcacttcaagttctgaagaaggttccgagtttagggaaacaacatgcttgtcgaggccaaagcaactccatcttggatgctcatctgtcatgttgacttatgattaaccctagtcctgggaaggcttctaagacttccagtttatctactgtttactgtaaatcctgccctgaggtcaaaacaaccttaaattgactgtacttcaattgtcctacacatctcttctgaatcacaaatactctttccctgctacgtatagcacctggtcctaggtcgggtaactggtacagcgattcaccatctcatccagccaccacctgagacattccaatcataggtggtgacatccgataaatat

SEQ ID NO: 373420 - DNA, 592 bp, Homo Sapiens
atccccggtgtttatcgaatgccacgcccaatccttctcagatacatgggcagtggctgctatgccatgtacctcggagaggaggacactaccttgggggcttctgccaggcttgagacatgctcaggtgtagagcgcggctactcactcaaaagtccaggctcagcaagtcatagaatatctaggcagggcaggacttctaccatggccaaggccacttgagaggtaagaaaggaaactggtgcccagggagggtaagcagcttgcacaaggctacccaaggagatgatggccaagtcagagttgggaccacagagaaaaggatgacacaggctctgtccgtaaggtgtcatggtctggttggaggagagaggcgaggtaatcagctatgaaagctcagggttaccgagtgtaccagtagaggtgaaggaagcttggggagcctggaaaggggcaccctaccccgccaggagctgtaggagaaagagggaatgagggaggaggcgtctagctgaaaccatggtgcaggagtggagtcagtgggaatatgaaccagcggggtaagcagacttagatcatggtggcatcgtaa

SEQ ID NO: 373421 - DNA, 410 bp, Homo Sapiens
tgtttatcgatgccacaaatgagaattaggaaaacttagtaaagaggaaatcacactcaagaattaggaaacaaaggaaaatcattctggaaatgactttactagaaggcacacgagggagataaactcaaaggcagctacacatggcataacatctcagccaatgatagtccgcgtaagtgacagcagtcccacaggattgcaaaagtgcattttcactgccccttttctatgcttcagtgtgttgggatacacaaatcctcaccaccgtgtaacggttgcctactctcttcagtacagtcacacgctgtccaggtttgtatccccggagccatgggctgtgccatactgctaggcgtgcaataggctatgccacccaggtttgcaaacatgggtggcatcgataaaca

SEQ ID NO: 373422 - DNA, 510 bp, Homo Sapiens
gtacccgctgtttatcgatgccaccgctaagcagcccttctgggcttccctgtgttaccgacattttcaacagtcgttttaacaattcctattcctggaattaacaagtaaggaaagaacaatactcaacaaattaagagaagaacacaaaataagtaatgaaatgattctgactgtattcattaaacagacaccctcctcatcactaccactttctcggtgtcctaaacctgattatgggtcctccccagacaagaacctgacatgtaggtacatcagctcttgctgaagacagtgaatgcgagagagcaaaagaagagatcgcagattatgagggtccacaaaggcacctccctctgcctctctccgaagaccagcaggcaaggcctccagacccaatactgaaaataatgcttttttgtcgcatttcgcgagaggcggagcctgggccatagccacataggatcatctccgatcgattctatgtgcatcgataaacaccgggtaccg

SEQ ID NO: 373423 - DNA, 465 bp, Homo Sapiens
tgtttatcgatgcactcccagccagatgggggctaggagtggctgggactctggcctagcttctccatggcagcgttagtcccagacgtacaccacttctgcaaggctgtgtgggtaggagcccctggggctgagggggcacattgtgcaatctgctaagcagaatgtagagttttaaaatagctacctttctccaagacactatctgcttgccgctttgtgggatgtttacctgggattaataatagctgagtgccaccccactgccagtatggaatagcaaacagcgatctgggctaggactcaggcaggagaggaatggagtaataaccatcgtatcagctcacatagttcttttcatacttgcgggctcatttggtcctcacacaaccctgagagggtaggtggcatcgataaacaccactagtccacggttggctttgtatatcatgggtggcatcgatc

SEQ ID NO: 373424 - DNA, 536 bp, Homo Sapiens
atgtcaccacccattgcgcctcgattatcacccgctgtttatcgatgccactatgaatcactttcctccctttgttgtctttgttgaagtcatcacaaagttctgagtggaagaattcttccagggactgccaaggagtgacactgtagccaggtgggttcagctctcactttgctcaggatatgggtgtccagtggcgacagatcaggaaaatagccccatactaaatggtgcctggacaaggcccatacacacttggatatgctgtcctgaacacaaggcacaagacacaacacgggaggacctttcatctcatgtctcttacagccagggactgaaggtgtaggacagtaggagaaaatagagtttcacataaaacaccccaaggacatcaaagaaggctagctgccaagaggtaggaagaactagattcttagggaccttatccttggggattgataccacccctgccaggcatccacctctggggtgactcagagccaagaaaacaaaggcagggtggcaatcgataaaca

SEQ ID NO: 373425 - DNA, 198 bp, Homo Sapiens
  misc_feature (95)..(106): n is a, c, g, or t
tgtttatcgatgccacccacttggcttcccaaggtgctagcattacaggcatgagccaccacgcccagcctgttctattaaaaacatcttgaccnnnnnnnnnnnnaaggtttatgatataaaaacagtcggggggctttccctcaggtgggatatctgaagtggtgggagcagatgtagctccattttccatttaaa

SEQ ID NO: 373426 - DNA, 453 bp, Homo Sapiens
agctcggtacccggtgtttatcgatgccactcacataatgtgagtggctaggaagtgaagagcaggtgaactaatgatgctgggagacccaaatcacaagtgtgaattagccaagcaccaaaggttatgttggattgagtagcaaggggagattgaaaccaaggttaatatgccagtgatttaggctcgtgtctgcccttaactggtgtgttcatgggcaatttacttaacctttcttggtctccattgcctgactcatctgtaaaatagggtgttaggtgagatcacccaagtggtgatctcaggcaggttccatttgctaggtccctcgctctccatatgtgtttgaaatttactgatatttttgtctgtgctactccctgcttttggacttactgccattatcttctcttttccaccagcacgccaaaagatcttgtgcatcgataaaca

SEQ ID NO: 373427 - DNA, 788 bp, Homo Sapiens
  misc_feature (49)..(49): n is a, c, g, or t
  misc_feature (205)..(205): n is a, c, g, or t
  misc_feature (643)..(643): n is a, c, g, or t
  misc_feature (672)..(672): n is a, c, g, or t
  misc_feature (687)..(687): n is a, c, g, or t
tgtcaaggtcaacccccaatcaaaacacgtcaaatcctccgaaactcgnccccggagggaagggtgggaagatggaccctaatgcaaaactattggttaaaagacctccccttccccacccctgcccttttgtgtgccatgccctgtgtcctgccgtggctttgtttcattgaatcgggtgagccaagtgtgtggtggctctgtncaggccagtatggcccaggtgtagagttcagtgagccatagtagggtcccttgggccagaatgcttcgtgtggtctgataggttagattggtttggtggcttccagcaagctggcatacttcggtgatgtctgatggatcagaatgttttggtgtgctcaccaggggctctggagaactagaatgttctgatggagtctgacaagccaggcggccttgagagttggtttaggagtggctccctgagtgctgtggctgtggtcagctctaaggacctgttggcagactgagatttcagggcctgacaaccatgtagactaggatagctgaggcctccctctacccccacccatctccctctcttccttggagaccacctccactttctccaacccaaagcagggcgcccagtgccctggttccatcatcagcatctctnggggaggggcgccccatgcccaccctctncccccatttgtccgnctcctaggtcttccaaacccttttcttctctatgactttgggggaaatccagcctccttgtctctctcctaaaaaaggagggaagaaaagccacagagaca

SEQ ID NO: 373428 - DNA, 416 bp, Homo Sapiens
cggtgtttatcgatgccactttacactcctatctatcctccactgcctgttaactcaacccccctcccctgttcaaaccctcagcaggaaccacttccaggttcctccttctctcccatccacacttgctcaggcgccacctttagcccatgccccactcttacttcagcggctgtgctacagtgcccccttcaggaagtggcagaaactgaacatgttgttagagttcacgttcccttctccctcactgatatctctcaaattaacaaaaagactcagttcatttccagaagaccctacctcttatattagagtttcagtacctcacccagtgttatgaactaacttggcatgacctctacattatcctctctgccaccctctcccccgaaacgaagggtggcagtcgataaaca

SEQ ID NO: 373429 - DNA, 402 bp, Homo Sapiens
gatgagccggaccaacaaccggacaggagatagcagaatccagccccagctggacaggttgattataccaaggcttgggaagagtactacaagaaaatgggtcaggcagttcctgctccgactggggctcctccaggtggtcagccagattatagtgcagcctgggctgagtattatagacaacaagcagcctattatgcccagacaagtccccagggaatgccacagcatcctccagcacctcaggtataatgtaattgctaatttgttgatttctactccagtctgttttctgcatgtttactgtttgtctgtttgggagtgtttgccttttaaatttttatctggcaaagtataataactatttaaatgaagtactacggtgtattgtccggggttgtt

SEQ ID NO: 373430 - DNA, 420 bp, Homo Sapiens
tgtttatcgatgcacagagaataaagatttgtagaaaaggtgctgaactgccaagggaaggcatttcttgtgccgggtctggaaccgtgtatccttactacatcactgaacgacaccaagcaccccatgcacttctgggcccaaccctggcccctggagaaagacactgaaattgggcatgcagtctacttccgttagtgggatttcttttatcaatgtataggcaacttgaaaaatggccttacaaccaaatcacacttgtccacccaagggaaaggatcataaaggagaagaatggttaagtccacctgggaacacacacccactgactcccggtaaggacaagcttatgggtgactgaagaattcagaatcagaataagacctaggagtcagtgggtggcatcgataaacaccgggt

SEQ ID NO: 373431 - DNA, 687 bp, Homo Sapiens
ccggtgttatcgatgcacagcaccagaggaactaagattggggcctagctgtgctcctccaagcagctgtagtcctctgcctatgatttccctttgacttcctagacctgtgtgaccggtgtgcctccctaaaaaaaatgaatctcaagaaaaactaagtaattgggcaagcccactttaatggggggtatgctagatggaaccctatattctgctattatggcccatgctaaagcatttactcttagaaaaacggttcccgttaacctctgaaactaaaatcctcttattaattaagtactgttctaattggaaacagactaagtttcttaaaagaatgtagggactgaagggccgttctcctgctgttgggacagcatcagaactaaaattgggctatggaggacattttactcctaactgctgaaggcagaactttcctgttcacagagggggcttagagcctgatttctggtggcgcaaaaggaaaggtgcactgtaaggcaaaggaaggacccgcaacatgcctcatgaagaggatttctatttctactaggaggcgctttttggcttagaaataccatgtgcctcgccagataaatggtagcagcagagactgcctactaagatctactgcctcccacgttcccgatctctttctaaccgactactggcattccgataaca

SEQ ID NO: 373432 - DNA, 576 bp, Homo Sapiens
tgtttatcggattgccacatcttcgaatgacaatgacccctataataacaagttccaatgcaatctgaggtggataacaatagatgatgcggagaagagggacggggacatgtcttgatccttttctccatgacaacgtatgcacaccagggctatttcacataccaaaggaccatggaattccaccaattctgcctaccctaaagagcacgaaggcagtactagcatagatatgaaacaacatgtaataagactgttcattattcctttgtctctcataatgaaaaacttaccaataatctaaatgtctatcaaaagcagacagggttaaattacagcacctccatgctataatatactgcagaaatgttaaaatcaatgaggtagatgtacacatacccacatgattatcaatgatctccaaggcagtctcttaaatgcaaaaaattaagctcccaaataatatatgatctaagacatattttaaaaaatgtaataatacggcggggcgtggtggctcacaacctgtcatctcagtacttagggaaggcgaggtgggcagatcacaaagtcggg

SEQ ID NO: 373433 - DNA, 459 bp, Homo Sapiens
  misc_feature (72)..(72): n is a, c, g, or t
ttatcgatgccaccctagaacagctgagccagaaagctgctctgtggtgaatctccttgaatttctcatctnccgtcttcctccacccaccacacgctgtccactgcagcctgttaactgaaggacacgtccgaagtgggctgccacctagaaactcggcttttccttagaaagccgttgtttgccttgtgggttgatcccgtggacaccttttgggtttggagctgtgtgtcccaaatggccatgaagatctggagaaaggtgcttctctgtagaaagctgtgtcttggtaattcatggaaatgttgaaaacaaaatggaacaccaaagtcaaaccttgatttaatcgatctgagaggaattgaaggtgccacatcagtccagggaaaaggaactgcactgatgtggcatcgataaacccggtgtttatcgatgccaccgtgaccacactggactagt

SEQ ID NO: 373434 - DNA, 362 bp, Homo Sapiens
tcagtcacagtcccatgcctcagctttgtacctgttttcaaaagcacaactgaggtgtgcgggctggagctgtcttgcagtgattctggccttctggctcatggttcagtccagcagcctgtgctgacccactatttctcctctgcttcagaggaaacccaggaaatgcccttcactgccaggctgagtctccaccccatgctggtttggtgctggctaggctgagggggccaccacttttcctggctagaagctacttgacctttgatgtttgagttctgtaagtcttcgtgttctgacttactgcttcagagggattggcctgtcccctttccctttctcagctatgggaaggaaggatt

SEQ ID NO: 373435 - DNA, 801 bp, Homo Sapiens
  misc_feature (670)..(670): n is a, c, g, or t
aagatcggtgttatcgatgcaccactgcttgcagttgcgagatgacatcgtcggagggctgccctgctcctttgttaccctggccttgctgggctcctacactgtccagtcagagctcggagactatgacccagatgaatgtgggagcgattacattagtgagttccgctttgcaccaaaccacactaaagaactggaagacaaagtgatcgagctgcacaagagccacagaggaatgacgccagcagaagcagagatgcatttcttggaaaatgccaaaaaaattatcaaggtatggggtagatttacatcatgctaaggactcagaaggggtagaaattatgttaggagtttgtgcaagtggtctgttgatatatcgcgaccggctgcgaataaacagatttgcctggcccaaggttctaaagatttcatacaaacggaacaacttttacattaagatccggccgggagagtttgaacaatttgaaagcaccattgggtttaagctgccaaaccatcgagctgccaagcgtttatggaaagtatgtgttgagcatcatacatttttcagactactgttaccagaagcacctcccaagaaattcctaaccttgggttccaagtttcgttatagtggcaggacacaagcgcaaacgagaagagccagtgncgttgatagatcgcccagcaccttactctgaacgctcatccagcaaacgttataccatgtctcgcagcttggatggagcatcagtgaatgaacaccatgaaatatacacgaagggggatgacacggatcct

SEQ ID NO: 373436 - DNA, 919 bp, Homo Sapiens
acgtgtatccatatgaagtccaagatccctcctatgcaaatggcttagctcctcttttgaagatattttagaaagcaccataagctatacatattctggtctctcctaagcttttaaaaaaattttaacgggatttacccggggaacataaattcatctacaagagaaattagagacgtttcaaggaataattatatctcaaattcaaaaaaactgctagtaatttatcctacctcacttaaaaacaatctttgaaccaagtagtatcatgagcacaaatctcatgaataccaattcaagcagactatttcagaaagtggattctcattggccacaggtaagacaaaactaatgctgcaaaatgtctctacccttgagacagtagggtaatggaccatttatacctctacaataacacaccttggagaccaactgtaagagaccagctctcaaaatgggcacttctgtggttccaacatgctatatttccttaagcaaattctccagaaattcaactcttaacacactaaattacacaaaagcaaaacacgaaaagtaccctcaagtagtctgcaattaaaatttggcgtatttctagttatgaatgaaaaaagtatttttgtgcctttctgttcatttgaagaccataatttgttaaaatttctatgaaaagaagagtgggtccctacaagatcacttaactcagtgcaatttaaagcgcattttaaataactgctatttttatcccacgattcatcccacttaatcaccattataactaaaccatacgtaacgtgcctcttctaatccagacttaaggggatacagagagggaaacgggagggagaccagaatttaaataagtaatatctcatcagatccatctgatttttaactagcgaaaaagggtggcatcgat

SEQ ID NO: 373437 - DNA, 282 bp, Homo Sapiens
acgcctgacagtcccgactagcccgacagtccccgactagcccgacagtagtgacctcatataataagtactgtcattatcccatttcagagatgagtatttgatgctaccttccagactgacagtgtccaggaaagcagctgcagtggaggtggaagggcagtaggattccctgattggtaagggcagtggaatgtcatggggaagactttgtccttgttggtgtcttgggaagagagcagaacagtgccctgtcgggctagtcgggggggtaccgagctc

SEQ ID NO: 373438 - DNA, 208 bp, Homo Sapiens
cccgactagcccgacaggttgctggctgttagtcgagggacatcaggccaatgtctgtctgacccctagatcaaaattcgcatcctactgatagaaggccttgggtctcgagccttttggttgcaggtgtggggatggtttccaggtctggaggctgccaactatggcaacccgttgtgctgtcgggctagtcgggggggtaccgagc

SEQ ID NO: 373439 - DNA, 644 bp, Homo Sapiens
  misc_feature (283)..(283): n is a, c, g, or t
  misc_feature (606)..(606): n is a, c, g, or t
tcacaaaagaaaatggcctgcctgggtgaaatgtaaatatatacttagtaaaataaaattgagcaggtattttatcctcagttttaacggacagatttttttgcaaaaatattgcaagttcagtttatttttgtaggtttgtgtacaatataccaaagacagatatggggttttatcactttaatcacgactggccatttcagtgagagaagaagccagccaaacccccttaaaagaagtctctagttatgtgcctgcatttattttttcaactttatgtcangtgacatatagatgcagcttcagtgtaataaagcctatttacccttttagcctaataaaatgaaatcacagattttcaaaagcatgtgctaacttttctaaagtggaaataaattagcttgggcctttggactagtaaacgtttccttaaacgatgttttacaggatgtttagttaatttccttgaatataacatataaggcagatatccccaagacccgtacatcttagtacttttttgcagttttgctttttcggttttgtcatagctgtgaagtcagaccctaagtgaatgccaccccgttgcaggtcacagtaaacggnacaatcagaaaaacacagggttgccgacgggtgccgct

SEQ ID NO: 373440 - DNA, 203 bp, Homo Sapiens
ttcgagcctcggacccccccgactagcccgacagcaacatgacaggcctcactaggactcctccacctctcactcctgccttggcctcacctggccctgctgggaagcagactccagctccaggcgtggcccccacttcccagtgccttgtttccactgtcagtaagggcagtgcttgtgaccctcctgtcgggctagtcggg

SEQ ID NO: 373441 - DNA, 542 bp, Homo Sapiens
ccccgactagctagacggtagtggcgggattctgtgcttaccatagcacggtcgctgcaggacttgtcaaagagggcgccatctccacacggagcagtgctgatatacagatggaatgacacagtcttttttatttggagcttttctcctcccttagcaggttcaaatatactatccttcgcagtctgggagttgtatttcattaactcactgtagagaaacctgatgaagcctctccgggagattatttctgcatggcagtcattgacagtttctccttttaggctgagagaatctcctttcacacagcgattccctgttcccaagctgacgacgacacccatgtcctcagagtcttttttcataatgatggcggccagaatcttgcggccgagcaaggagggctggaagctgttagtcagagtgttgaagcaccggtggctcagcatggctatctggtcatggaaggtgctgccagtgagagggagtgtcttaggctgtgcttctggggactgtcgggctagtcgggggggtaccgagct

SEQ ID NO: 373442 - DNA, 204 bp, Homo Sapiens
cccgactagcccgacagcagagagtcttccccggggagtctgccctggggtgccgcctcgaggccagacgtcgtcccgcctggacctgaacctgagtttgggacgggcgatttcccaacctcaggaattggaattgagacaccaaagcctagacgcgtttcctggacgcacggcttcctgtcgggctagtcgggggggtaccga

SEQ ID NO: 373443 - DNA, 222 bp, Homo Sapiens
cactcctagccccagacggccactcatagaccagatggccacccctagccccagacagccacacacagccctggacagacactcctagccccagacagccactcaactcacagccctgggcagccactcacagtcctggctggccactcacagccatgatggccactcacagccaagagggccactcaactcacagccctggagagccactcacagccctgg

SEQ ID NO: 373444 - DNA, 617 bp, Homo Sapiens
  misc_feature (295)..(295): n is a, c, g, or t
  misc_feature (567)..(567): n is a, c, g, or t
cccgactagcccgacagatcgctccccttcctcctactcatctgacgagctgtccccaggcgagcccttgacttcgccgccctgggcccctctgggcgcccccgagcggcccgagcatcttctgaaccgggttctggagcggcttgctggaggggctaccaggggcagcgccgcctcagatatcctgctggatgacattgtccttacccattctctcttcctcccgacggagaaatttctgcaggagctacaccagtactttgttcgggcaggaggcatggagggccctgaaggnttgggccggaagcaagcctgtctagccatgcttctccatttcttggacacctaccaggggctgcttcaagaggaagagggggccggccacatcatcaaggatctatacctgctaattatgaaggacgagtccctttaccagggcctccgagaggacactctgaggctgcaccagctggtggaagacggtggaactgaaagattccagaggagaaccagccacccagcaagcaggtgaagccacttttccgccatttccgccggattagattnctgttttgcagacccgggttggctttccggggttttgatgagattttctt

SEQ ID NO: 373445 - DNA, 323 bp, Homo Sapiens
tcaggctgcatgtcgtgtggacaggatgtcatgcgagtctggcccgccagtgaatacttttagacatgatccctccccggtctatatcgcagtccatcagtggacaggaaataacgcctgttccacttgtactgccccatccttgaatcctttatccctttcctctttcattcccccaacttctgtcgcatgcagtgcctgtactggtgcctaccatacacggaaagcaaaacagaaaaacagaagacaaaaaatagagatcagcaagaaaacacacgccctgcccggcctaccaaactggggccttagtgtcctccggccta

SEQ ID NO: 373446 - DNA, 963 bp, Homo Sapiens
  misc_feature (39)..(39): n is a, c, g, or t
  misc_feature (63)..(63): n is a, c, g, or t
  misc_feature (83)..(83): n is a, c, g, or t
  misc_feature (89)..(89): n is a, c, g, or t
  misc_feature (228)..(228): n is a, c, g, or t
  misc_feature (579)..(579): n is a, c, g, or t
tccccccttcaacaacaactccccccaactccaaaacancctttaaacttaatggtcccttgnaacccaaatcaacccacgangtccangcctggctggcccgtcctgggtgaaccgtcaggcaacatcaacaggcccgatgtggcccagtcagcttgccgacaggctggaacctgctaagctccccagatgcggaacgccattgcccgaggcggcgtacagcatggntccgaagggctgagggcgatctggttgatctgatgctcgccctgagcactggtgatggcacgggtggatgtggcggcacaggcatcccctgagatcacctggcccgaggacgtgagagtccgaatgcacttggctgagtcccggatgtcccacaccttgatgtaggaggtggacacggagaacacaagccccgagtggctgcagtacttgatggagaaccacgttgttggggtggccctttagagctgcgatctcctgtcccgtaaccaagttccacatcttgcagcttcggtctttggaccctgtgaatagcaactcatctgtggcatccaggcagaggatgggcttggnttgcgtcggccatggagacacactgcagtggggccgtccgtgcacccttggctcctccaaccggggagatgatgcccctcaggacctccgacaaagaggagtcgctgtcatcagacttgtccagcgctgacccctggctctgattactggtgagacgagagaagacattgcggtcattgcggggccgagtgggaggggatgatgggggtgtgaatcccacatctgtggacctaatgggctgccctcggacgtaggacttccttctcgtcagcggggacgtctctgtggctcgagattgcctagggaaagtgctgccccgggtaggcagactgacggtgcgcgagaccctgtcccggtaataggggtctcggacagagaagccca

SEQ ID NO: 373447 - DNA, 377 bp, Homo Sapiens
  misc_feature (229)..(229): n is a, c, g, or t
ccccgactagcccgacaggtcagtttgggcactgaaactgacctgtccttgggtgtctgtttgcaatttcttaacttttagtctcttctagttacactacatttatgaaccagaggacaatgtaatgcccatgtaattcttcacctaatcaaaaacgtaaggggaggattaatcaacaggaaatccatttataattggtttttttaatacctctaccatttactgactnataaaatatattccacgttaaatacttgattctgaaaagttagcattaaaattgagtttaaatgtgtgtatacacatgattgcctttaaaatatttaaatttataaggtgggttattttccagaatacaaattcttgagtttgtcgtc

SEQ ID NO: 373448 - DNA, 285 bp, Homo Sapiens
  misc_feature (195)..(195): n is a, c, g, or t
  misc_feature (213)..(213): n is a, c, g, or t
agctcggtacccccccgactagcccgacaggcaggggttggccaaccacggcctgtgggccacatctcacccactcacccacagcttattttggtaaataaagttttattgggaacacagccacacccggctcatattaccttgtggctactttcccactggtggtagcccatcgaaactgaaaatatttaccantatctcgactttgcaaangagtttttcaggcctggctttaagggtcccctgagctaggatgcttgcttgtcggggctaagtccggggggg

SEQ ID NO: 373449 - DNA, 581 bp, Homo Sapiens
aaagcttaaaaattaatgactgttcttttggtagatcaggtctcttatcacaatataatatatttctctttgtttaatgtttctttgaccgagagcttatagtgtttcatgaggtaattctacccttggtttcttttggctaacaaatatttctccatccgcttgtctctaaccttttcaggccgggttctttgaggctcagctctggaaaccgcggggtgctggtttgtttggccttttctgtgggaatttcagccgctgcggttcagtttgatcaccggcctgcccgggcctgtcctgcccatgtgagttgggttgtgtgcgccttattgccacccacgacctctccattctctctctcagtgggttggaggctgaagacaggccgcactggtgagggcagggctgccccttggcccagcccattctctgctctccatctgtgcagggggtacagctgaggtggtttgcctggggcctgaagtctgctggctgcctcctctgccctgtccgctgtcatctttccctgccgtgtctgcccttccgcccggaggtcccttgggaggcaggaccccttgtgc

SEQ ID NO: 373450 - DNA, 568 bp, Homo Sapiens
  misc_feature (19)..(19): n is a, c, g, or t
  misc_feature (47)..(48): n is a, c, g, or t
ggcggctcctgcagcacanggataatgatacatctgggtacatttcnnttcacagcatttgatagtggctccaaggtgcttacaaaatgcacatcgttctgtgctccctgagacaacagctttgtccacgttcactaacaatggttcttccatctggcatactcctagtgaccactccacacaacggtgatgagcccaacaagtgcctgtagaatcaaataaggcttggatatcaatggcatctggaagcccaaccagactgagttcatcccacagtttaccagcttgatcatctgaagctgtctgggtgcttacacttacacaagatacctatattctgctgaggagatcggttcttttctctgtcctccttggtttcgtggtgctgagttttgcaatttcccataggttccattgctgttgtcatcaatgtccttcttgttagaaggttggtttctccatggcaagataaatccaggcgttattctgaattgttttaagtctccttgtcctaaggaacttttttccccacagtaacaaaagcgcagagctgtcgggctagtcgggg

SEQ ID NO: 373451 - DNA, 516 bp, Homo Sapiens
cccgactagcccgacaggggtcatacaagcctcacagtgggttgggaaatgataaagagtaggaataaactcatgtccctggtggcaaatataattagatctttctccaacgggctccacgggaaattctggttccttcttactttctccttcattggcatacagaatctggaatatccttggaatttctttagcatctgctctatacacatctgtctgtgtaactggtcggacatgaaataacttgtctatatctaaaaccatgtaaggatgggatggtcctttatcttgttcacggtcatagaaaagaatcttcttactgcttacaatcacatactttttaacccatccaaatttcttagtgttgtttcgtacaggcaatgaaagccatccttctaatcttgattctggaaacccatcatctgcctcagcatcccctggtccactgcctatactggaactatccataccaatatgcaaggcttggagttgtgaccgcagctgctcaatgtcact

SEQ ID NO: 373452 - DNA, 447 bp, Homo Sapiens
  misc_feature (48)..(48): n is a, c, g, or t
  misc_feature (51)..(51): n is a, c, g, or t
  misc_feature (359)..(359): n is a, c, g, or t
aagaccaagattgactaatgatgagtctgcatcaagaactaggcattnctnctgagttgacggactctttaggaaaggagaatctaagtgaagcactgattttagctctgagaacaaacaaattaaggtacagcatagttagccttggtagaggtatgacttggatttcctgtatcctttaaaatagtatctgggcatttattttattgaaggtgactacatttaattagatatatctgaaggaatctaggtagaatcaacttctactgattacaggttgaattactgtcactttgtagagaaacgaatagactggacactgtgtggtccactgtttagatttgcccatgggtctgttntaaatctatgtcatggatcctgcagcacacaaatcataattaagacaggtctagagacaggcagaagcagaaataagttgcaccaggc

SEQ ID NO: 373453 - DNA, 740 bp, Homo Sapiens
tcggctctactcatgtcgtcttggaagctaagcagggttgggctggttagtacttagatgggagaaatttatattatggccagtggtggtatctgatcacagtttcctctgtgctgtggtgtggtactcacctagaccacatactgtaagtcaaaacacaattctgaaaatagattaggaaaaaaccacatctgttgatccaccaatggtaacatcatttatgtacggttaaatatgaacattgtattctatcccatccatttaaaaagtattgttgccagataaggaaagtatcatttgaataaacatattttcaaaggcagtctggagtggtttgatgaagaaacattgtgagggttcagaaaaaaagggctttgagtttggagattaaattactgattttagtgatgtggttagtcttttaaaattaaccatttcacaaatcagactcaagtcttgtagtatccacagtgtctttcatttttgagttcaggtcagatagctcaggtagttcttctctcaagaatccattgtaatatgctgaagatggtcatttgaccaacccacttgaccaaaaatcaacatgatactcaagtgactagtactcgcccaactattgcatttcaccatcacgccttatcttattcaccagcatccctattaatgtgaagcccataaatcaatagactcactctgatctccaccactctatgaagttgtaacaacaaggtagagccgag

SEQ ID NO: 373454 - DNA, 472 bp, Homo Sapiens
  misc_feature (20)..(20): n is a, c, g, or t
ctcggctctacctttggtcngtttatactcatgggtagtatatatacagacagatgaattagacacaggcgtaagaagtagggcttatgttgaaagcctcaaatatgggtggagctcttagtgcctcgtgatttattcacatcatgaatagtgaattctatccatgatgactaatttttttctaaattgccttaaaactgcctttaaaataccaacatcattgaaacggtttgtgataagtacaggtatagggttcatagggtgtgaagtttaagcatggaatgaaggaagatagctactatttattgggccattatttaccagatactgcgctaagtgctttttgtagatgtttatttaatctcaataataaccttacgaggtaggggatatcgtcctgattttacagatgaggggacagtttgaggtaggataagtgatttgactaagacaaggtagagccgaggggtac

SEQ ID NO: 373455 - DNA, 684 bp, Homo Sapiens
atataatcgacacggcagtccaaacctgtgttgtccaggttcaatgccaataagttttaattagaaaaaatatagcaatgtggagaagcccttgaaggaatttaagcacagaggtgattgataggtgtaaccgccgggtccagacaggccagaacttgaactcaagttgtgctggtcaagggaggtaaaagaatcaaaccttgatgaccagaagacactggagtaaaaggcaagagtgaaaaaaaccttgattggttacacggtgaaaagcagcagaagaaaaatggcaccccgaatcatcgatgtcactacccttggttggtcaggtaggccatgagaaccaaccagagatcaaacagagcaaaatcgaatatgcgataatttggttcatttccattccaccattcgccctcagtgtttatcccatggtaattaaaaccaactgtagctattgaacaatggaatttgctggtcaagctcttcagagcccaatgtcatcagccttggggtggcccctgcaagtccttgctgtgtccattctgttctcactgaatgcagaaggtgcagcccagctcagggatgagttacagctggcctcaaaagtgccaatgcctcggcctaagcatctgggaccagacactgaggaatgtttgatgagcccttaataaacaaggtagagccgag

SEQ ID NO: 373456 - DNA, 581 bp, Homo Sapiens
tgcatggtggtcagtaaggaggctcttgcatgttggtgcaaggcagatacctcgtggaggtaggactcccaggacaaggtgagatgtggatgccttgccagatctgggtatgaagttatgacttttctccctctaacttccccaaagtcacctgaaacagagacccgtaagcacagaaacagaaaggacaagttattagaatgggaagtttctgattgtgagggaagccccgtggcaaaccgagacacgtccaccaagtgctctccgggaagaatggtctgccaaggccgtaccatcccaggcacagcagcagcatggggtagcgcacgcctagcatagtcactggagaaaaggaggcgggattaatgctttctttcctgaagctgtgaagatgagagtcaaaaatgagacgggaggaagaaagtttaggaagtgtacccaagtgtatattttgatattttactctcaaaaagttgtatgttaaaaactttggaaaccctgccagcttattagttcactatttctttaaagagttctatttaaaaagaaagtacctcagaactgagtaggaagacaaggta

SEQ ID NO: 373457 - DNA, 728 bp, Homo Sapiens
  misc_feature (592)..(592): n is a, c, g, or t
ctcggctctaccttgttctgtagccctcattgggacctggttctgggctacagacgagtccagcatggcagatgaagccagcatagagtccagtctacaagtggaggatgagtccataattgggagttggttctggactgaagaagaggccagtatggggactggggctagcagtaaatccagaccaaggactgatggggagcgtattggtgattccttatttggggctagggaaaagaccagtatgaaaactggggctgaggccacctctgaatctatactagcagctgatgatgaacaggtcattattggttcctggttctgggctggtgaagaggtcaaccaagaggctgaggaagagaccatttttgggtcgtggttctgggtcattgatgcggccagtgtggaatctggtgttggggtcagctgtgagtccaggacaaggtctgaggaagaagaggtcattggtccctggtttaggtctggagaacaagttgatatagaggctggaatcggagaagaggccaggccaggagctgaagaagagacaatattcgggtcctggttttgggctgaaaaccagacctatatngattgtagggctgaaactagctgtgacaccatgcaaggggctgaggaggaggagcccattattgggtcctggttttggaccagagtagaagcttgtgtggagggtgatgtcaacagcaagtctagcctggaggaca

SEQ ID NO: 373458 - DNA, 763 bp, Homo Sapiens
ctcggctctaccgttgtcgctgccacaggacctgcccgcacaatactgtgcctaaagacagagctgccctgtccactgccaccaccacagcccacacacactgtcaagggggcctaagcactagcccaccctactcaccattgccaatgcccaagtacactgccaatgcccaagtacattgccaatgcccaagtggcctgagaacccacccattgtttcctgtcacctacctcggccacagctggcaccaaacatgctgaccagggacccaagaactgacctgcctggaccctaaccaccaccctaacccatgttaccaccaggaatcccaagaactggcacaaatggctcatccctaccatgactggtgctcatacatgccacccaggggtccaaagactattgtacctgtccccagtaaagccttgccacagtctccgttagaaaccacagattcacttcctgctgacgagtctttctggtgatgacttggaagtaacaggacaccctcggatatgttttttatttttatggtctagagagatgactttattccttaggcttctttcccactgcaaagggagagtccagcgttctgagcttctgaatttggacagtggtgattgaacatggacatcctctggttttgcatttaacatctttcttatcggatgaagatggccgtcgcccgagctttctcttgtccatcttctcccgctgctgaaatttcagttgcaggagaagataacaaggtagaaccgag

SEQ ID NO: 373459 - DNA, 837 bp, Homo Sapiens
cctcggctctaccttgtctgaagcagtccagtgcttcagacttggtgtccaagagctcctctttaaagggagagaagaccaaaggtgctgagttccaagagctcagagggatctgcacataatgtggcttaccctggaattcctaaactggccccacaggttcataacacaacatctagagaactgaatgttagtaaaatcggctcctttgctgaaccctcttcagtgtcgttttcttctaaagaggccctctccttcccacacctcatgccaggattctcaaagtaacaactatcagaatcttccagtacaggacagaaacctaatgcttccagatggccccaaacctcaggaggatggctcttttaaaaggaggtatccccgtcgcagtgcccgtgcacgttctaacatgttttttgggcttaccccactctatggagtaagatcctatggtgaagaagacattccattctacagcagctcaactgggaagaagcgaggcaagagatcagctgaaggacaggtggatggggccgatgacttaagcacttcagatgaagacgacttatactattacaacttcactagaacagtgatttcttcaggtggagaggaacgactggcatcccataatttatttcgggaggaggaacagtgtgatcttccaaaaatctcacagttggatggtgttgatgatgggacagagagtgatactagtgtcacagccacaacaaggaaaagcagccagattccaaaaaggaatggtaaagaaaatggaacagagaacttaaagattgatagacctgaagatgctggggagaaagaacatgtcactaa

SEQ ID NO: 373460 - DNA, 908 bp, Homo Sapiens
acaattcctggtgtgaagccatgaagaagctccgggagaaggccccatcatcaaagagatcagtgacctcatgctggcccggtttgatggccctgcccgagaggaactccagcaagtggctgcacagttctgttcctatcagtcaatagccctagagctaatcaagaccaagcaacgcaaggagagtcgattccagctcttcatgcaggaggctgagagccaccctcagtgtcggcggctgcagctgagagacctcatcatctctgagatgcagcggctcaccaagtacccgctgctgctggagagcatcatcaagcacacagagggtggcacctctgagcatgagaagctgtgccgggcccgggaccagtgccgggagattctcaagtatgtgaatgaagcggtaaaacaaacagagaaccgccaccgtttagagggctaccagaaacgcctggatgccaccgccctggagagggccagcaaccccctggcagcagagttcaagagcctggatcttacaaccagaaaaatgatccatgagggacccctgacctggaggatcagcaaggataagaccttggacctccacgtgctgctgctggaggacctcctagtgctgctacagaaacaggatgagaagctattgctgaagtgccacagcaagactgctgtgggctcctcagacagcaagcagaccttcagccccgtgctcaagcccaatgctgtgctcatccgctctgtggccacagataaacgggccttcttcatcatctgcacctccaagctgggcccaccccagatctatgagctggttgcattgacgtcatcagacaagaacacatggatggagctcttagaagaggccgtgcggaatgccaccaggcaccccggagctgccccaatgcccg

SEQ ID NO: 373461 - DNA, 632 bp, Homo Sapiens
tagctgtcgaagttaaatgagtaaatatagggctattagaggttcattgtcactttaagtttaatatgtatgaaatttacgctctatacaatgtagtggggaatgaattctttgggtcagcttttctagtgaacaatttgattcataaaaattttatttttgtgcagttttctaagagtttagctgctgtataaggtaagatgtaccttattacttatagctttcagcagaattctttgtgtcagtgaaatgtggatatggtataattattatatggccaagtaaccgcttctcaccatagagtcataaatccagtttagccaagtgggttcagcagttattcctattagcagctgattctagtagtaagatgactttctttcaggtttcagggaaggggttccagatagcctgaagttgctttgtagatgctgtgtttattgaagtagtttatcttcccatttgcttatttatgggcttatttcctcataggtggatgtctctttgtgccctcattgggtattgggtgctgaaactaagcatggtgctaccatccaagaagagtttaaaaattggggtattttgactgcagtattcatgacatattcatgaatacgatttcatctctccgt

SEQ ID NO: 373462 - DNA, 703 bp, Homo Sapiens
ctcggctctgtcagtttacagaatacaaacctggagaaagaagtagtactgcaggtatatacgatgtacaactgtgcgtttcttgggtctgtattcagtagtcatagcacatgttgattgaatgcctactatgtgccagacactgatttaggcattagtggcaatgtagcaaacacaacaaagttcttcctttcatggactttacattaagcaggcaacatcactaaacatcattgcatcagtcaatagtcactcatggctctaagtgctttacaaatattaactcatttaatctttataatgatcttcacagagtaacattattctcagtttagcaaatggggaaactgttataccagagtttaagtcaacttgaccaaggttgttccagcttatgtgccagagccaaactcgtgtagacttggccagtgtgaatgactagatgcagctctcaccagaatctttgaaataaggtaaaaggggaggaactcatcagcagaaacagagttagtgaatggtcacctattgcagtttagaacagtaggcaggagtctcttcagcagggctaggtatcagtctccaaaagatagactaacttttgggctgtgaccttttaagtagcatgcttagggaatattgtgccgagtcaaaagcatgcatatgagagtactatctagctgcatatgattagcagattctggtc

SEQ ID NO: 373463 - DNA, 590 bp, Homo Sapiens
  misc_feature (482)..(482): n is a, c, g, or t
ctcggctctaccttgtctccattcccctttgcgcctttcctccccatgacaacagatcccctgctctctgctctcacccgcacagcccacttcctctgagtcactgggcccttctctgggcctcactcctccacctgagtccttgagtctgggaccgaggcgttggaaaccccagctgcaccaccgtggtcccattgccttttcagctacatccatttgttagctgtcatccttgtcctggtctgtcaggaactgtgttctaacacctgacagtcttgaccctgatgcctccatcagccctgccacacatgcatcttcccctctcactccacatgtctgcccggctctccatcctcccgtgtccaccagtgattctcacccgaggatgcaggaccccaaggcggcctatcagaagcatcttttgggctcggtttcttcttttgctattgtctatgttccttttagagatcgcattttttttnccccttactttttctgagctgaacactgctcacccattcagatgattggataggcctgcctgggggtccatgcccccagccctccctccgggtgaaacccacccctcc

SEQ ID NO: 373464 - DNA, 753 bp, Homo Sapiens
  misc_feature (474)..(474): n is a, c, g, or t
accccgcagacctcatgtggcacaacgcatgacctcttgcacaacgctaacctattcctctgtctccctcattatgttatggattctctctctcttcacatcgcctgcactcaccagcacactcttcaaagcccgaagaccgaagtcataatgactttgggaagagagactgctcatcgacatagtttaaaaaacgggacgattttgttggcaagcacttcagcagtgcggaaaccctgtgagtacagcatgacctgggcgattaaatgccgctcgggcttggtcatggccaagctccggaacagcttcttcaagttgtcaggaaggttagaccggcccgcgtagccagggttcatggtgatgaagatggccatgtccgggctcaccttgacttgtttgttcagcagctcacaagtaatgggggcagaggtcttgtcgtagttggggttggaatgttcacgcagtgctgtcctngtatgcactgcacctgctgggacacagccgagagcatccgctcctccaggcggttgaactcgtcaaagcagccccaggcacccacctggcaaaggcccacaaagatccggcccattgcctggaaatcaaaggtttcatcacagttgaaaactaaaacaaaccgtccaagctgatggccaagagctttgacagactctgttttcccagttccagcaggtccaaatggggaacccccagcctggcctccaggcttgtgtcattgtcaatagcagcggtcag

SEQ ID NO: 373465 - DNA, 655 bp, Homo Sapiens
  misc_feature (553)..(553): n is a, c, g, or t
  misc_feature (567)..(567): n is a, c, g, or t
  misc_feature (597)..(597): n is a, c, g, or t
  misc_feature (619)..(619): n is a, c, g, or t
accgatatcacaaattaaatcttcagcatattcataagttcttaaatgagaaagatttctaatgacagataaaggctcccatcggcaaattaaatctgataactcaatctttcccaactaacaactgaacatagcctctggaatcaaatgtaaagatcactcaatcatgacgatgtaagatgaagtatagatgaacaatacatatgaaaaaattttgtaaaccgctgcagttctaaaacagatttatattacaaagcaatgtaaataaatactgggctagtacaaaagctcttatttacagttttacaaatgaaattgtattcagtgtaaatgctgtgttttaaagaacacagtattgtattagtaaaattagttctgttgagggcattacagtttgttagaatcaatgcataacatataaaaggttcaagttaactctgtttataatttagtacagacaacccagtttaacctgggaatgggcatctgttaaagtgctggaaaaaacagggaaatatttaggaaaacactggtacattatttaaaggctttntccaaggtcaggantgtttaaacttcgtttcacatttttatccntttggccacggcctgtggggcnaggatggattttttttccggccaagggtgttaaacg

SEQ ID NO: 373466 - DNA, 381 bp, Homo Sapiens
gcaggacttcgcccaggtgacgctgtgtgacccctgcggcaggcggtacggaagaagaagaatgtcctcatcagcgtcctacaggcaattcgaaagaccatctgtgactgggagggagggcgagaccctatatgacccatgcttgagaggggagaaggaccccaaaggtggatttgatatcaaggtgccccggcgtgctgtggggccatccagcacacagctgtacatggtgcggaccatgcttgaatcactcattgcagacaaaagcggctccaagaagaccctgaggagcagcctggatggacccattgtcctcgccatagaggactttcacaaacagtgccttcttcttcacacatctgctcaacatcagtgaagccc

SEQ ID NO: 373467 - DNA, 386 bp, Homo Sapiens
gtgctgccggacacacacagtccagcagggactaacaggatctccctccaggagacatgcagaaaggggagcagaaaacatcccacgggactgtcacagctacttccttgagccccctttcagactgctgtctagacctgtcgcagcccaaacatcaccaccctgatatgcagaagctggcatccttacctgaaattcaacaccaagaaatgatctcttctactcaacactgatagaaatacctctaagcaatgtcctcattggcaggggtggagtgggggagtttcttaaaaagtgaggcctctgcctaccacctagagaacctggaaatttccatctgtgccacaaagtccaaatcactggccactgcccttggtgtgcggctg

SEQ ID NO: 373468 - DNA, 520 bp, Homo Sapiens
gtttcccactgctgaaagaaattcaggaatggctacagagagttagaggcacagtgacatttatatgggctggtttcagtcaaacacttgcttagtcctgagaataggatccccaaattgagtcagtcctctagacgctattgatggtttctagaaaaaacaactgggattataacataaaggaaagcttcagtaccgcccctcatgcttaccaaacagggctgccttacagaccttgctgagtcaagaaaccccaacccagacaaagttgtaaaaattaaggacacaagagtctctccgtttcttttaagcagcctctgtgaaattcctaatgtcctttttcttcaacaaagcttgtgagaggtaagagtcagaagactacctctatttctggacagaagtgacatgttctaaacgcaacaaaacttacatgacaactaaatgcaatgcatgatcttgtgtttggggaaaaaagtcactataaagacactgctgggaccagctaagaacatgattacag

SEQ ID NO: 373469 - DNA, 589 bp, Homo Sapiens
tgtgcccagtcattacttgactttcatgaatcagaatataccacagcaaacggaatccctatgaaaccagtacaggactaacctgctttcttgttcttaccggaaaaggcaggggacacactcaccctcccttggggctccacgttcggatagtgtcttccccagctgcaccaccttattaaatcttaggttcaggtcagacagggagggagactcccagccggcctgctgtctctcaatttcggttcttgagcagctgcctcccaaggtgttacaaatccagcagccacttgttcctgctcattcattctcgttcctctccaccccccacacaaaatctggcaaccaggcaggaacacagttccagctctgagtcactgccccactgtggccaaggggagcagtggctagaggtaatcaaccaggcaagcacttcatgtctctagaatccaattcttccgttctttgagaccgtggggtgggctgcccttctagaatcaggacataaagaaacacccctatctacagctctggagtcagaacaaattgctcattcaggtttgccctaccagacaaggtagagccgagg

SEQ ID NO: 373470 - DNA, 526 bp, Homo Sapiens
aacatggatggagatcttccgaactattatcgacaggaccgttcctcctgagactctgcacatagatgaggatgatagaccagaactggtatggtggaagtgtaatgaagtgggcactgcatatcgtagctcggctctttgaacgatatggaagcccaggaaatgtcacaaaagaatactttgaattttctgaattcttttagaaaacctatgcagtgggcattcagcaggtgctactaaaaattttagatcaatatagacagaaagaatatgtagctccccgtgttctccagcaagcattcaactatctcaaccaaggggtggttcattctataacctggaagcagatgaagccacacatacagaatatctctgaagatgtgattttttctgtgatgtgttataaagatgaggatgaagagctgtggcaagaagatccatatgagtatataaggatgaaatttgatatttttgaagattatgcttctcccaccacagcagcccagactctcttatatactgctgc

SEQ ID NO: 373471 - DNA, 1141 bp, Homo Sapiens
  misc_feature (558)..(558): n is a, c, g, or t
gaatcgagctcggtaccgtattctaacattacccacaaatctctaggatctcttaagctttgtttatgcaatatggaacactgacaattgcactgacgacactgtactttaatgctttcaaaagtcattctcacatgatcacaattggctactctcctcttgctccactgtccataatggtcgatacttagaagtaacccttcatctccctccaaacttttgttaatgcagcaaagaataccctgaggtagtatatggaatcacagaatgtgaacaaataaaataacttacgctgtagaaggctgtctgattaggtctgagatttgtttagatagttggtgagaacttcgaaccatcatgctatgtaaggtggcagggtgctgaagaatgttgatactgatagctcctactttgaacacagcagcattgtttgtcttcagccctctttgggcactgtagagggcttgggacttggcaatactacatttcactacagttagaaactcttgtttggctgtacttgtaggagatgtaggaaaatcctccagttgtatattnggtgtaatcccttcaagcagcacaatattaaccccaccaatatgagcagtagcacaagtctcagtcatcttttgatgtaaaacatctttcattctttccttaagagtaaaactgccatggatcctcttcagttctgattccattgttagtccaccaatatctgcctctaggtgtgtgcggttcaccatgccaatcccaaacactattagagtaacatgctgaggttcagaagttaccaagctacgtttcctctgagtcttagtcaaactgctgtcgtcttgttcattctcaaacacaactttacatgttggctctgtagggctccgaactcctgctggtccaaatgtttctgaagacttttccaatattcctgttggatcggagataagtgaatagaagttaagcaatttatacatattctgccagcactcagctgaaggctcactttgttctgacactgtaattgaatcagagtcatccatatgaatagtcatgtgatccaccacatcttttgaacctttcctagacacttttgatgttcttctttcacgatcctttcctacatgaattccttgtttcgatg

SEQ ID NO: 373472 - DNA, 521 bp, Homo Sapiens
ctactgtcgcatgctctgcgacgctccagagtgtcttctcgttccacgcgagtgcaggttggacagcagctctgagaagatgaactccttggtcagcctgctctgccgacgcctccacgagtgtcttctcgttcccacgcgagtacaggttggacagcagcactgagaagatgaactccttggtctgcctgctctaccgacgcctccacgagtgtcttctcgttcgcacgtcgagtgcaggttggacagacagctctgagaagcagccatctcatcggcacgcgctgtgcctgcgctgccgactcctccacaagtgtctgcaggttccgacgcgagtacaggttggacagcagctccgagaagatgaactccttggtctgcctgctctgccgactcctccaggagtgtcttcttcttcccacgcgagtctcgtcacaccgcttgtgcctgctcggccgactcctccaatgagtgtcttctcgttcccacgcgagtgcaggttgggaagagtcagcgttgtg

SEQ ID NO: 373473 - DNA, 573 bp, Homo Sapiens
  misc_feature (12)..(12): n is a, c, g, or t
gctgtccccccngctgctctcccacccacccttaaatgtttgccttgttccttttgagccaacatttaatgaacacccctcccccaagcgtccagcccacccatgcctaggcaccttaccccaagagatgggtaagacatggttccttgtcctttgaggaaaaatgcctaggggagatggatacataaataggccatggtatactataggtaaaggtcaataataataatgtttaaaacgtgccagaaagcacagaggagtgtgtgacctattatgttgtgtctggtgaggagtatggaaggaaggtcatcaaagctggtatggaggggataatttttgcactcggtcgagaagagtgacctgaagaaaagagaagaacagctggaaaaaaaactagtgagtggaggtccagcactatgagagaaactgtttagttggggagccagagatggagtagctgatgggccacttgggggaatgagactgaaatgtgaggcttccagctgggagaccatcagaagagtcaaggagagcacagctctgagacaaggtagagccgaggggtaccgagct

SEQ ID NO: 373474 - DNA, 952 bp, Homo Sapiens
  misc_feature (881)..(881): n is a, c, g, or t
  misc_feature (930)..(930): n is a, c, g, or t
tgagccatcggcgggcctgagtcgggtgatgtctaagcagagaatgtatcagttatgtggaaacctttgccagaaatacatataccttgtatattaaatctgagtctcagatttaatcatcgaagcgtagctgggttaagaaacagtctgatcgtaaggatgtggtcgatactgacccatggatgaccacaagaaaaagatatttatttctgcctggataatggagagttgactaactttggaagtcagaattcccaggaattagagtaactgctctggaaagttaaagtgtgaagttttttagatagtttcataaaaacaattctggtttctttttgcttgtgctgactttcttggattttaatctacctcatcttgtcttttaagagttacttcaacttgtcaactttaacatggtgcttgactttggtagttttctaagatggagtttttcctgttcatagacagcttgtactcttgcctttacattctgatcctcatttcatctaacatcatctcatattgctcctctgtcaagagaaatgttttaaaatagtttaaagtcttgttttatgggaagaaagtgatcctccaatgctatttgtttctgaggtcagtaagagaaggagttaaaacaaggcagtggggaagggaatgaatcctgcactggaggcaaaagctgacaaggaaagagccattaattaagacaatttcaaagtcaactgattgtgatcattaatgtcacaatagatcaaaacctaattatcacagcctaggtaagagccatcagtattaatcgggaaaatctaatagggaaactattatccaaggaaattagggccaaattggaattgcagtggaactttttatcctgggcttcntctatttttttgtggtgtcccctgggctttggcggtgttgaccctaacngttcgtttcagggccagtggtt

SEQ ID NO: 373475 - DNA, 439 bp, Homo Sapiens
gcgtctccccgactccacctgagggactggctcctgggcccatgaaacccctgaaggccaccgccaccacctcccagcccgtgctcaccatccagcagatcgagaccatcttctacaagatccaggacatctatgagatccacaaggagttctatgacaacctgtgcccaaggtgcaacagtgggacagccaggtcaccatgggccacctcttccagacagctggccagccagctcggtgtgtacaaagcgtttgtcgataactataaagtcgctctggagacagctgagaagtgcagccagtccaacaaccagttccagaagatctcagaggaactcaaagtgaaaggtcccaaggactccaaggacagccacacgtctgccaccatggacgtctgctctacaagcccattgaccgggccactcggagcacctcagtc

SEQ ID NO: 373476 - DNA, 294 bp, Homo Sapiens
aggcaaactgctttcggatggctgagactggatgctgttctggagatcccaggatttactgagcatccatgctctgccaattccgtctagtgggagggagctgcctcccgtggaaagagtctgcccttctttagggaccagggctctgcccttcctgggaatttaccacatcctcttccaggttcccttcacccatcatgcggggtgggaggaatatatcatggttcccccttgaggtgcaaccctgcgtgggtcacttctcccgctcaccaggcaacacgagcatcttcttgg

SEQ ID NO: 373477 - DNA, 210 bp, Homo Sapiens
ctcggcactgcttggatggtgtaatttactaagagctaatagaaaggctaggaccaaacctatgggtctgctgagattcctggtgcagggctcttgggggaaggagcatgggggctcaggtcaaacatacccgaggttaagtctgggtccagccagagaggacctttaaccctgcccactgcgcttcctctccttgagcctcagtttccc

SEQ ID NO: 373478 - DNA, 512 bp, Homo Sapiens
tccgtactggcttcggactgaccggaccgtctggacgcagctgaaggccaagcagctgacacaggatgatgatactgatgcggttgagattgctatcgacaacacggcttttatggacgagttcttttctgagattgaggaaactcggcttaacatggacaagatctcagaacatgtagaggaggctaagaaactctacagtatcattctctctgcaccgagtccagagccaaaaaccaaggatgacctagagcagctcacgactgagattaagaaaagggccaacaacgtccggaacaaactgaagagcatggagaagcatatggaagaagatgaggtcaggtcatcggcagaccttcggattcggaaatcccagcactctgtcctttctcggaagttggtggaggtgatgaccaaatacaatgaagctcaagtggacttccgagaacgcagcaaagggcgaatccagcggcagctcgaaattacgggcaaaaagacatccgaagcagtcg

SEQ ID NO: 373479 - DNA, 433 bp, Homo Sapiens
tatggataggtgagttgacagcctcggctggccttgctgggcctctattaacagaccacaggggaatgtgttccccgggtccatgattttcaatttttccactggaaaaggcagttgggaagagaggggcaagaggctagacataattgttaatgcttatgtcagcattattctattcaccctcccatctagttacccacacatccttccacctgtcccttcagttgccatttcatttattcacccaagcatccacccacctatccatacatccacccttccacctaaccatataccaatttacccacccacctagccagtaaaccacacagccagcaatccatccacccttctacctacccatccatccaaccccgctgttcatccattcaccaatccatccgaagcagtgccggggtcctctaagtcacct

SEQ ID NO: 373480 - DNA, 863 bp, Homo Sapiens
  misc_feature (490)..(490): n is a, c, g, or t
ccctgtgcactgctcggatgggggaaggcaggctccatttgaggaacgattggagacccatcgctgtagaaagtgggataaagctgccagtgcatttggggcccggcttgaggaggagagccaccccaggctggtgatggaagcatcttccctctcacaagggatgccggtctgcagagtcctggagctgaaattagccaccagggtatgcggatatggataactcatgaacctcttttgaaagagcacttcttcgggggcgtgtagaatacgcacaattggatcaagtgctctgtgaggaagatgtggagggaaagtgaccttcctgggcaaagaaagccattgagatgtgtaaggcagccgaaataactaaaaatcaaatgactctaatgtgtgaggatgaggacaaaactgtgcccactgtgataaagaagaggaacgcccagggttccaaatccaaaagcgcctacggaatctaaaagactccccnagtggcaaggcaaaaacctcaacagaataaaaaactcagggaggaagtgatcacaaccaagcaaatagtacacagggagaagtcgcccagagaaaggggcctgcacactcgggagacccccgatctgggccatgctttctagttgaccctgagttacagagactcagaagctggggtgcattggacaccaaagtggggtgacattggacttcgatgttgcatcaagtttggtgtcaataaccagcccagatctggtgcgggcattcttattaggaaggcatggtgtgcctcttagagagagtgatcagggttttgactctatttgctactctaacctttgtggggccgcccaaacagaaagcagaatgctcac

SEQ ID NO: 373481 - DNA, 249 bp, Homo Sapiens
actggttatgacagggaactgaacgcttcactctgagctgtagtgctgatcagaaacatagtcatggctttgggagattccagttggagacagaatctattttcctgagtgagatttcactgaagcagggctgaatgggtataacgaaatctcacccaaggtgaatagagtttgattactgccggaacccccctgagccaggatcaaatttctgatcagccttactgctgcgaatcacctggatggtgg

SEQ ID NO: 373482 - DNA, 383 bp, Homo Sapiens
tgctctagacgatcgcttatgactacgggggaagaatccacacaacatgtaaagagaccatggtgagtatgttctgagaactgaattccattgcctcgggggcctgtccgctgctgccaatttgcttctcatggcagaaccctgtgtgtcagaaccctgactaggctctgccgatggttgtttggaaaagagtccagctggagatgaaaggagttcttcaaagcaatgactccttggaggctatcactttagaattgggaatgattacttatcaaaaaacgacttcactctggaatatactacgggcaagaagctggcctgacctctcgggtattctgttagagtcggcctgagccggagaggccagcttccccggtagtcag

SEQ ID NO: 373483 - DNA, 505 bp, Homo Sapiens
  misc_feature (93)..(93): n is a, c, g, or t
  misc_feature (168)..(168): n is a, c, g, or t
aaaggggatcacctccaagttccccctcccaaaacggctggttaactgcctaataaattcaaaacttctggccctcggaggaaaaatgccccnggaaagaaagagactaagaaatccctcaaacgccccgtagaacaagacccgggaagaaagtgcccaagtgggcgncggccgtcggcgaggtcagtttagcctgtactggaccgtggaaccctgagcgctgaggctgtggggtcgcgggattcctactgggcctcgccagcttcccacagtctgctgcggtctgtggaatggggaaggataaaatacagactttggtttattttaaaaaatggtattctgcctgaactaccaggtccatggtttgcttttggcgcttgcagaagcaccaggacgatctttccaaaaatttctgcagtagtttaactaaccaatgaaataaatgaaggttaaaaaaccaaaacagatcattttctcctcttgccctttatattatatttgttaa

SEQ ID NO: 373484 - DNA, 437 bp, Homo Sapiens
  misc_feature (265)..(355): n is a, c, g, or t
gcctatcgtgctgagtcagtaggtggtcgcatgtatgtataggagcagctgccagaccttcttagcaaatggttgagccatttacacttccaccaacactgtgtgagagttctgttgctgtacatccttaccaacatttggtatagtcattctctttaatttttagccattctgggtaggtgtgtagtcatcttagtcatttggagttttaatatgcctttgtctggtgactggtgatgagcacagagctcttttcagcgtgcannnnnnnnnnnnnnnnnnnnnnnnnnnnnnnnnnnnnnnnnnnnnnnnnnnnnnnnnnnnnnnnnnnnnnnnnnnnnnnnnnnnnnnnnnnacgggattgggggactacgccgtccgtgtgtgtgtactgtgtgttatagggattgggggagtaggcagtctgtgtgtgtgta

SEQ ID NO: 373485 - DNA, 662 bp, Homo Sapiens
gaggatctgagtcatcccccttcgtgcgcggacagtttccccagcgagcacatccagagccccagacggaaattctctcacccaggctctctagtcccagccagggcctagccatccaggacccatgaacctctcccctcctgtggccctgtgagaagggatcccatcatcccagcttccagcaagtatggcatgagcatgtggagctaggtaaggcccggcacctgccttcccacacagcacgacagggctttttctcgttggctgggttgatgtcatttttctcctgggacatcactcagggaggcaccttgcttctgaagccttcccatctgccacccactctgctgaaaggctgtttcgttagtctcaggtgccaagtttccggaagcttctctggtgcatttggaggaccttcgccaagccagacctgggactattttaatctgtggcttataatttgtggggactggtaaacaagaatctcaagcttcgtacgtgtgagtgcctaaaaccagaccaagacaggtgtcaagcacctggcttttgtgcatgtatacttggctactataacttctggttgcttagaagctgtcttctcttcctagttttcaagatactcactacgtacgataggggtatgacacgcgatcctctagagt

SEQ ID NO: 373486 - DNA, 446 bp, Homo Sapiens
tttccttgcggcagtgcccaaagttctacagtatttctcatagaatgtataaaagatagacaacgacaccatgctcggggtgttgtgttagatttcactgaatgcagctggaaattcagaattccttctttatgcccaaatggctataggcaagaaaatttgagaaaggaagagatttcacaatgatgagatgattcagaagaggaaggcatagagacagaacagcactctagattccaaagataatggtgacactgatcgtatcagctgaagcgcttgatgactgaatgatatatttctaaggataaaaaaggaaatttggtattttcattcagttagtcatccaacaggaaggacctgatcatgcggtatatggtgatggactatctaattttgctaaaaggacacatgagacgaagggggatgacacgggatcctctagacga

SEQ ID NO: 373487 - DNA, 423 bp, Homo Sapiens
gtgtcatcccccttcgtggcctgggtatattcaccaacccaacattcttgaaacattctccatctcccttgcctctttaccaaaaactgaaactgtcgagggtggactcaggtctctgatcctttcctcaccattgctgataaaagtagtagtagtagaaggtacccttacccttgatccagcacagataatatgccaggaaccatgttaagcatataacaaacctggttgcaaactatctggggctatttagttaggatattcctcctctcttccatcactcaaacaggtaggtatataggaccctctttgtctctgaactctaggaggaaaaggaatagagctagcggacgggatgaagccaagcatggcagaaagacaattctgtctgtaagaagcttttgcttttccaaaagctggttg

SEQ ID NO: 373488 - DNA, 328 bp, Homo Sapiens
ctgtttcaggctagttcctctctaatgatactgcattcccagaacatttaaaaattattcttgagaactacaaccaagaaatggtgctcgggggaagaactaggtcagtccagagtcacatggagaagtgtcttctagacactttttggaatatcttgatggctcacaatgaacccattaactggtcccctcagctatggcagagctgtgtacaacgtcccccatcctccctctggccagtgactggactggaaataggctgctgactcaagctgagcagagtcccttccacgaagggggatgacacggtatcctctagagtcacctc

SEQ ID NO: 373489 - DNA, 396 bp, Homo Sapiens
cgacctaaggacccgtgtcatcccccttcgtggacagcctcctggttacttggtcttccggagtatctctttttccattcctaatgagctatcgctctcaaggctacacacagtgtcctttatcatcacccataactgctccatctccaaaatcatcaacatctcagcttcactctctcatgggcttgttcaattatttcaactataaatgtgttaataacgtcttagtcttcctgtagtggagtcctcagttcatcattcagtaacacaccttgcaataccttagacttctttttccctctgacttttcataactgtcaaaatgccaactccaataaagccaattatggacttagttcttacctaaacccaagtcgccaaatacatacagaaagt

SEQ ID NO: 373490 - DNA, 224 bp, Homo Sapiens
gtagaaacgacatctcacatttaaagaacaccaggcgtttctacacagcgggggaaggaaatccgtcctgattttaaactttggcacagctgtgaaaccgagggtagtgaactctgaggagaggactcttttctggacatacatttaacatccgtgaaagcctcagaccccctgagcacacctgcctaaccgtgttgtggacgaagggggatgacataagctcc

SEQ ID NO: 373491 - DNA, 760 bp, Homo Sapiens
tctgggtactctaaggatcccgtgtcatcccccttcgtagctgggcctcgctccaccctgccagggaaaccagctgaccaggttaagggaggaagcgtgcactgctacaagggggggcagtagcaaagagatacaaggctgaggagaagctcctcgagcttgagacgagcatctgttgagcaccaggtactatgctaggctcaggaaggtgcaaaggggccagagttgctgcttccaggagctcagagccgggatgatccttacagccaccttagggagtaatggccagaggccatgcagagcatggggagccattctgcttgggcaggtcagggaaaggcacagagaaaagatgacagctgagtttgactgagaaagataaaaatatttctcagttgcagggagagggccaggtattccagagtatcctttcatttcctgcttttgctgcatgcaaataggaagaagccaagaaaagatagtgagggcaaccaaagagttgagagcgatgcaattaccaccttggctactgatccaactcacttttctgctaagaaaagataactatgaggaactgacttcacgctgatacaaaggctaccaggtcctgactagatgctgatagggctgagatcaacagggtcagcttctactcagcctgagatatcatcccagaatagatgaaaatgtagttgagcttttaagaatgaaagagattctgtacgaagggggatgacacgggatcctctagatcctccac

SEQ ID NO: 373492 - DNA, 411 bp, Homo Sapiens
gtgagtactctaaggatcccgtgtcatcccccttcgtgtgctctccccaagagcttcacagctagaaggggtggggcttgccccctgcacaaatcctctgtggcacacacactcgggcaaagctcccttgggcacctgctccggtgccagcatccctggccctggcctcggtgagggcacagagggaagccccaagtaccactccccgatgtgagtgaatcctggtataactcttgagcaccaggcttgtgccaggtgccgtcacacccttcctcaccttcagtagcatacattaacccgggaagtgactgctgctctcaccagggcgagggaggtaacacacttaacccaaggaccacccacccacagatagttagtggcagagcctggatttgaacccaggtagtctga

SEQ ID NO: 373493 - DNA, 333 bp, Homo Sapiens
catcgctcctccctggctttggtgatcacacctgagagcatgtcataaacttatctgtttgctcactgcttatttgcccacactagagcaaaagtttggtgacagcaggaactttgtcatattctccacactatcccccgaattttgcacagtatctggcaaacggtcggtgcttgtttggtgaataaatgaatgagtgaatgtctagcacacatgcacagatgtatgtgctccacaagtttctgctaatttattattgttggaaggggcttaaccaaagaaaatggtaagtgctgtggaaatccaaagaatactgactggtcacgaagggga

SEQ ID NO: 373494 - DNA, 904 bp, Homo Sapiens
  misc_feature (697)..(697): n is a, c, g, or t
  misc_feature (705)..(705): n is a, c, g, or t
  misc_feature (806)..(806): n is a, c, g, or t
  misc_feature (810)..(810): n is a, c, g, or t
  misc_feature (862)..(864): n is a, c, g, or t
tttaggatggggtgtgtgtgttgggaagagggaacattagacttatctgaaagtttagaaaatactacagaaagacacatccttattgattgacagatattctcctgcaaacactctgtcttctccccattgtgtagactctgaaaagttattgtaattgttgatttcaggtcagcctctactctactgcagcttggtctctggttttcaaattctgtagaaatttttacagctgtttgacttccttagacatgagacatgtactagatggcaatagcaggggacgtatcccctacactcctgtcctggtccaatgcctaacccatggggaacactcaatacatttatttgaactgaaatgaacctggttggtgggcgaggccgctaggggtagaggcagttggggaggaaggtgggcagccatgtgcatgtcggagatctgtgcgtagctttaggtctctggcacccaaacagcccagtgcagagggtagagatgcacaacttgtatactctgacatcagagggtggaacataatcttgtgccctagcatgctgcgcagcctgaggcgacggtccggacagccaggctcagccaagcccctgagagcatctcgcaggaggtaccgttctgtccccagctgagaggcactaaggctttcccagcagaggttcagccctaccagagccgctcaggggnatgtgcanaaggaggacaagggaagcaactacctgacatcactctgccctgcttgtcaagacaaaacaacatgaatattaatttctcaggcataataaggtgtggaggngcanggagtggcagggccattgtgtgggaggctgctccttcctgccatttgtcacnnngcaggagtgatagatggttcttccaggcagcttcccaatt

SEQ ID NO: 373495 - DNA, 1191 bp, Homo Sapiens
  misc_feature (219)..(219): n is a, c, g, or t
  misc_feature (1063)..(1063): n is a, c, g, or t
  misc_feature (1080)..(1080): n is a, c, g, or t
  misc_feature (1159)..(1159): n is a, c, g, or t
aaaaactgacggaatagccccactccagatcagaattcccagtgggctggggtctcggccagtgtattctccagtaatctcgccaggtgtttgaaacacccagtgctatctgaaaactatcagtaccccaaccctttgctttatagattaagaaactagcagaagatggttaaattacttgcctattgtctcagaacggttaattagtggcagagcaanggctagaattcaagtctcttgactttatggttgtggggtctttccaccatacctgctgccatgtgagacactgcaaaaaagtggctcagacccgacaatcagcctgtgtggtgctgcacactttctaaaagcacatgctcctgacacttttgacctttaaggggctttgaatgtggagtaatgggaacacaagccaagcaagcactcagtagaattcagtccatttaaaaaattcaatggggtcattctttgggacagacctcagcaacacagcaatgtgcactttgtagtaaagaaataccaacttgagtttttaaaaaacctagttagtcctacattcccttttctttaaaaaaactttattgttcacattattttaatgactatgagataatgtatatgacagcactttgagaaaatatcaactgtaatataactataaggttgtagtatggtctgtttaaaagataagacagttgattcaatgtggatggaccctgtggggtacctgaaaatgtagatacgtaagaatcacctctgtcatttatcacatttagaaatatgaaactgcttaacaggtatgagcaggtatagcaagtgtttgctaaagttgtagttcagagctgaattacttcaggaaactagggaccaactttttggtttaattccgatctttaaaaagtaagaatgtgtactcactccagaacacagaagctcttccaaggaccttgactcaagaaggatgaggtcctcttactcttctccatttatccactatatgcttggccatttatcctaaatgtggtgggaacagacttgttatctgttgatgttgacagtggcntttttaacctatggccngcatagttttggtaaggttacaaggggaagtggatggccataaaccagtgcactttgggaatacctttccaggattccnaccagttataatgacattggacatttggcacc

SEQ ID NO: 373496 - DNA, 420 bp, Homo Sapiens
tcatccccttcgggtccacagtccgtttcgtggttatgtactcactcaactggaaactccttgaggacagtggtcttatctgactagctttcgcatttccatggtatccaaataaagccttgtacacagtaggtgctcgatgaatgcttgttgtgtacctatgtgagcaagtgggtgagtgagtaatggagtgctttgttcaccttatgggacattgaatgggatgggagggacatgcgcaaagttggaaaatgccgaatgctgtccagatgccctggaacccttgtctagaggttgctgttggggtcatgggattggtgaggctttgagtggaactcctccgaccaggctgtgtgcctggctccagctcctggtcatcctcaaagccaggaatccagcctcctcagtaccagcatcccg

SEQ ID NO: 373497 - DNA, 677 bp, Homo Sapiens
  misc_feature (629)..(629): n is a, c, g, or t
  misc_feature (665)..(665): n is a, c, g, or t
gctgtccagaaagttcaacagagagaccagaagcagcactgaagtcgagcgaggactcggcagctcccttagttggtcgtgtgtggtcatgatgttccaaagctgggccaaagctttgttccttgtctctagatttgatgcaatttcacagagtcgaattgctaaccagccttccaagagaaattgtgtttgcatgttgtatttatttgcgacaagtaacattcctctcagtggagcaggatgttctcgttgggtggtgacccttctttgtactcaggagagttgcataataaaccagtttcataactggaagattgcgtttggaccagagtgtggaactggggtaagagaaatgaactgggtggccttcgtagctggtggtgtggacgaagcctggcctgtctgtactgatggggttggagttcttggctctgttgtgtgttgtgctaggtcgtcttactgcctgcttgaccactctccttttgtcaacagggaattgtaaaacaaacagttgactggctggaatttgggatgttttgagtctcctcaggcacccactttagggtttgctggtcagggtgcttttctcatagtttaggggatagcttgctgggtgagcctgggttccnaaggatacggttatacccaaaaacaaactggtaggntcagccagactt

SEQ ID NO: 373498 - DNA, 288 bp, Homo Sapiens
  misc_feature (241)..(241): n is a, c, g, or t
ggacaactttaaaaggtcagtggcctccaaataccccaaggactgtagtgaggtcgagcgcacctacctgaaaaccaaatcaagctcccctagagacaagatctacactatagatggtgagaaggagcctggtttccacttagatccaccccagtttgttgaaaatgtgaccctgcccgagaacgtggacttcccggacccctaccaggagtcccagtgaaaacttccgcaagggggactncacgctgccaatgaaccggaaccccttgcataatgaagaggggcttt

SEQ ID NO: 373499 - DNA, 551 bp, Homo Sapiens
atacagacgtataggggtaggggaaaggaggtatacaatgcatacatggaggtaaatggattaagctgaatgtctgggaagacgaggattgctgggtggaggtgtgaggcccaggactcggggataccatcagattacttgctcctcaagttttgggagctaataatacctgtgcttgcatttccctgcaaagcaaggggatacctttctgggataagtcccgaggggaatcactcataacttatttcttgcttccctcccacttatttaacataaatatagggcctagttaggggttaaattcagattttacacatttatgtctctgtcacatttcttgccaacaacttactgaagtctgaaatttctttaacaagaggaagtattccatcccatagttagaaatgtaagaatatcaatcacctgtgtgtttaacacagcgaatgagattaggctaaacttaacagtaattggaaacgtattctgtacctgctaataactagaaaaacaacacagacaacaagtaagccttcttgtaactcttgagacgt

SEQ ID NO: 373500 - DNA, 779 bp, Homo Sapiens
ttgtccatgcccttcgtgattctatgaatcctgattctatcagttactagctgcatgaccttgtgaagtatctttctctctgaacttatttcttcaactacaaaatggagataaagtagttaagtcacagggttattttgaagtttagagcctacccagctcagtgcctgatatataataggtgctcaacaaatggtagctgtcatttattattccagctagatcctcagattgtcctctgttttccgtatccgccacatagctatttcagttgccaagccctgaagactaacaactgcctcttgcattttttaaatactggctttaattgcaaataacagagtctggccacagaagaggcacattccctgcctttccattgattcccaggtttcaggagcaaaagcaatgtatggagtcataattacagtatcctgtaggtgcaaccctagtcatggctccccatgctgagggaaagaggtaaagttgcaggaagatggctctatgctgtcttttgcaaagccctctgatctgcttcaggcccgaaacctgcctccatgggtgcttgtctgctatatctggtagatgttgtggagctcaaggactcgctgaaactgaatgatctggctcgtccagggaatctctttacagccaggtcatctactgaagagccaaggcaagagcaagtttctgttagcaaggttccctggaacaattaaccaagactgacacaggtctcttcccccaaagaaggggctgcatggttcggtggcctggga

SEQ ID NO: 373501 - DNA, 593 bp, Homo Sapiens
ccctaggagagtaagtcattgatgtacagatgaaagctcggggatccgtgcctctctctaatatgctcccttttgtttcgccttcaagcctcgcagagaaatctggaaatagcctgtgtcttaatggttcagccacaatgggaatgagtgagagggttttgtgagtaaatacagaggaaaaggggatagccacatttgcttggattattaagttttctgtgctccaaacggaatacaaactggcacctcccatcgtgactaatgagggctgcatcgggagaacagaagggctgacagccagcgaggcctagttggcaggcctcagcccaggcctcgccgcattcatcatccgctaaaccaatccaccaattccgcaccaccatttgtcattaattatgctaatcagcacaccattactctctgatgacactgtagctgttattagctagttatggctttcaaaagcataacttattgtgcatgcacgggctgtgcctgcattagcctacagggaagaaatgtccaattatcaaaagcagaaatttgctattatctttttataacaaaccaatttagtaattagaaaagtctct

SEQ ID NO: 373502 - DNA, 471 bp, Homo Sapiens
ttactgcttaggaaattcagagccagaaaaggcaagatattttctcaatatttcagtgtttaataaatgagagaacccagaaccaaagctagaaataataacagtgaatctctgagtaagcacagtaacatttcttccatgaatcttggtgtgttatactttttaataatgcaaatgttctcctgggggaggtaatggtactgtcaaatatttttgctaacagaagatgtggaatgagaagagcacacagtgacacataggtcaccatcatcagatgctccaaataggtctatatgtgtgttacagtagaaaaacaggagctctaactacaaaatggcttccagatcagtcacattttcctgtgtaccacatagtttcagttgttatgatgaagcaccttacccacgaccagaaataagcatggagaaggcaaatagggaattgacatgttaaaaagtgttaaaaatgcca

SEQ ID NO: 373503 - DNA, 472 bp, Homo Sapiens
  misc_feature (320)..(344): n is a, c, g, or t
cctagcaggatcttcagtcgcaagctcattgaaaatttcaggatattagtatttttctgagtttaaaagcataacctaaagttaacttgtagggggtttctggctaatgctttttactgagtggtaaagatgagcaaccttttttttgtttaatagccagatactttttatactccgaatacaaatattgaaaaaaatgaaaggaaaaccccctagatcaaacttggtcaatccatggcctctgggctgtatgtggcccaggatgactttgaatgcagcccaacacaaattcataaactttcttaaaacgttgtgagatnnnnnnnnnnnnnnnnnnnnnnnnncaattatatcctacaccagttatcgtaagtgtaagtgtaatctcatgtgtgtcccagggcatttctcctcccaatgtggccaagaaaagtgacaatatgggacatccttggcctatatggtgaaaaac

SEQ ID NO: 373504 - DNA, 644 bp, Homo Sapiens
ggatccctcataagtttcctttgcgataacccccggggacccccggccaggttgtggaggttcctggcattcgatggggaagtgactcagggtgtttgctcgcctcctgaaggcctgctggggcgacagcggagctggctcttctgggagatgactctccgagtcactggacaggtcctccgaggagccgaggagcttaaaggagctctcagagatgggcaaggcctccttttcacacacagatggctctttgctggtgttacttaatgtactagacagggagctatccagatccacactgatggagtgttcctgcaggcctctggctttattaccccgggacaaaatactttctaaagactctgttaaagatctctttgctttgtttttcagcatatctagcctaaatcgagtggcactgggtggtaattcacttccaatattctctgctgccatctgcgatgtctgcttcatctccccaatatggatgtgttctttctgtttctcttcatataaacatctcagaaaagaaataatcaattcattctctcgctgctcatttctcggtctcaatttctgaacctcttcaaaaatagtcgcctgctcctgatgagctgtgcgacgtgaggatccgctagagtcta

SEQ ID NO: 373505 - DNA, 819 bp, Homo Sapiens
tcacaggatctccagtcgcaagctcattctcaacaagttaaaagataaataaataaaacaaagtgttacaatataacctttattttgtagctgttggtcatattacttatatacctgttttttgatattttattttagtgttgtgtattttgcttttcatttgttgtaataaagtgacctaattttcagttgcatatctcacatggatgcactgtgcccttaagagttttctagaagtagaacaggttagagttgtttgaagtatctaatataccatatgtaatggctgcagcctactcttcccttacacccaaatcaccttgcctgactcctagacctctcagtcctctggatctagtatctgttctagaacatccttcaggtctcagcttactcagagacttatgttcttagagatacattccctgattccctggactatgttaggttccctctactgtgtatgcctactgtgctctgtactctgtttcattgtacaattttatacctatattaacttgtctctcatgctagacagtaatttccatgagaacaggaaaaagtttgttcctaaatctccagtattgatgaacgagtgaacaaaattgaataaatgaaggtctgttctctatttgttgaaggaatttactcagtttgacacaggttataaaataatgataactaacatttatatgatataatgctttcaagtgtatacttttagtagaattgtccagcatgaaccaatttgtatgtaaatgtatatgctgagtccaatatattattctgatcttgtcaaagatataaaagactatacaa

SEQ ID NO: 373506 - DNA, 1071 bp, Homo Sapiens
  misc_feature (228)..(385): n is a, c, g, or t
agcagaggagttgccagattcaggctcgtgtcctgccctgccaccttcaagccatgtgacttggggcagagccacttcctctctatgggcctcacagattcatctgtaaaaaaggacccttgccccaatcccacacagaacctatgaagctaatggagtagaaaaggttttgcaaaccaaaatacataggataaatagggggggcataagctggctatttagaatatnnnnnnnnnnnnnnnnnnnnnnnnnnnnnnnnnnnnnnnnnnnnnnnnnnnnnnnnnnnnnnnnnnnnnnnnnnnnnnnnnnnnnnnnnnnnnnnnnnnnnnnnnnnnnnnnnnnnnnnnnnnnnnnnnnnnnnnnnnnnnnnnnnnnnnnnnnnnnnagttcagtctcccagcaagttagtggtagagctggaacttaactccatgttgtcggactccaagtccaacacactgtgcacgccactctgcccttgggaatctttcccttcagacagctctcttggccctaccttaaattctaattgctagatcttcctggaattgtcccctgacttactgcccccgatctggcgccagggcccagctgcctgcttctacctcctactttctgcaccatctcagggctcagccttgtctgtccaggggcccagaactgtgtccattctgcaggtcctcagtggcctgacctctgattctggtccaggcatggcactagatctggacttctgcctaccaagggacaggtgagaaaagaaactcgctgactttcccctgccgctcccacacctgcatcctgctgaggctgccagcagcctggttccttggtactgcaccacaaggcacgttcccagatgcacctgcagttccagaatgtggcccagcagcaggcttcccaagggcagcttccgggctcaatgcttcctttccccttaacagccactaacccctatgaatcctagcatcattctgggaagttctcccttaaagcctcttattctctcattgttctgtcaatcccagggcaaagcctcacctccaccttcaatgagctttgctgcgtggg

SEQ ID NO: 373507 - DNA, 868 bp, Homo Sapiens
gttgaaggtgagtaaaatctgtgctacttataaacagtgatcagacatcccaaagaacatactgcaagtaatctgctacttcggagcgtaatgatatgtagcttactacaaatagcagtcagtttgtcaggtgatttgtttttaactagggtgataagatcataaattactaattatctttattttaaacctgtcaacactttgcttatttaaagttggtgtgctaaatcccagcggaaccagtatctatctgtgctttagaatcctacaactgtagctacagtttcccggtgacatttttttcaatgtcagaagagactctaatggagaaaatgaatattctcttcctgaagctttctaaactaaaatgtgattgttttactctgctgacactttccggcactgctgctctatagattgccaaaatgctacttacatttttcagttaataaactctggaggaggcatttttggaaacggtttaatctagtattgctctactgtaagactaatacacgttatgaacatatcactatgcaaagtagcctccattttcacatagcccattgtgggaacaatgcgaatgatgttggttaaggcaagtgtgtgaggcatctcttacacaaacagccagaacgaatggcatgttgctgtatataggtcagtgttggaaatagcagtgtagctcatagactggacagacacatggaggctggagttaacagtattcacctcttgcagcctaatgcatggttatatttcagacattgaaagatgagtaccatagtggagtttcatctaattagactattttaagtaacattgtatcccttaattgagctgaatgctaccaaaataaattggatta

SEQ ID NO: 373508 - DNA, 892 bp, Homo Sapiens
  misc_feature (496)..(506): n is a, c, g, or t
ccgcaaagctcattatcagttgagatactaacaacactatatacagttccactcaccaatctatcgtgcataacatgggagtagatctttctgtgttgcaattttgatcatgtcacttccaacataaggtcactcagtgatcctcctcccagggcctacagagcaagtttaatctccttggtattgttgaaatgtgggtttggggcttttttaacctgctgcatacctccctgttttaagtcttctaaaataaacttcccatcaattactctatatgccaccacatacaataaatttgtaattcatcagccttgccatatgtataaaaatgtgtgctctcaacgcatgaggattcctcttcttgaaatgccctttttcttcagctatgtacatagttttgtcaaattctaacacattctttgcagctcagatttcatttatttttctttgagaagcagttattcccattagtatttaattattattttgcttagcnnnnnnnnnnnaaatcacagcttgtaaatactcatgctataatattcattccattgctccctctggctaatgggcttgaagtgaacagacactatgtcttacttgtgcctctgtttccagctgctagctcagttcccaatgcattacaggtggttggcatacatgtagaccaatggacattattgttcatctcctcatgttattaaaaaggccattatggattaaaagatttataggtataagttagccaaatgaagttactcattattcaattatatcgcacagagctatctgtgatttacattttgaagcaataagcaagcattcacgtaagcaaagcctacacagggaaatataaagtagcttacatagacattcataaaatctgtttaattca

SEQ ID NO: 373509 - DNA, 688 bp, Homo Sapiens
gggtgatctacaggatctcccacgtcgcaagctcattgaaagccaaaagcaatgttaagtgtacaagctttaaataacttacaaagttaatgtcatgaatgtaagtgctatctgaaacccatcactcagtgtttgctgcagccccaagctgtgataaaacaccactcataaatttatattaaaactctgctcgatagcaattatttaccaacaaagatttatcgactgcattagagactgggggtcttaaccaggcaaatcagtctttgttttgagtctcagggaccaaatggtgccggcctctgctcgcacagggatcatcgttacacagagggaacatttcatggctaagctcctacggggtgatggagcaacagtctcaacgcaggcggcgccatgtcaagatcagattatcaacaggcacgtccacaaccactcgcctttgctctgcgggcagcattcctcatcggctttaacagacaccgggggccgtgcatgcatctgactgaatgtaaaggacggtgcacgtgtgatttcgcaatgagatcaaatgaatcctcttgctgctgcaggagcactaatagtttcctaattaccaagttttttaaaaaacgttttttctggcttaaaacatccatgcagttcaaaatgttctctttctaaaacaagtgtgtgggacccggggtta

SEQ ID NO: 373510 - DNA, 550 bp, Homo Sapiens
ctcaataacatatagttgaaaggcttagagcctagaggtggctcttaggttggagtaaggatatttagtctcggcgagtgggcattactattccactctgtgactccagggatgtgggggttgtaattgcaagctggtgaaatgatccagcccagtgaggccactccaatgtttctgctgtcccagaagggggagactaatgtcatgactatcttgaagggaatgacttgcaaaacatgaaactccaaaatggtaaaaggaagaaaaatcactaattttaataaaacccaatagaccacaatgtgtagttagcaggagctccccaggtgactcagctcatttgttaagactttggtactgctgcagcaaaggagaaactgacatttgcatcatgactattcctaagtggtcctcaagcttttctgctgaggggggagcctgagacacaagtgagaacaggctgctgcccgagtgagtcactgtgatggagtgctggccgcatggtatccacagcctatatcatttcagggccagctactcctgcctaatg

SEQ ID NO: 373511 - DNA, 511 bp, Homo Sapiens
atgttttgcatattagaaagttacatttggtggctatatgcagaatcgtgtatggggagagtacaggtgcggaggtcactcatgaggctaatgtctattcaaatgggagaagaggaaggtctgaaaggcaatcactattggaatacatgcaagtacatctagcattgttctgtctttctgaagatgtggaaatgaagctctctcagaattaaatgacaacatgccatggctgtttgttagagggaatggaagtagagattgaaggtcttgatttccagctgatcatcctttttatggtaccataccactcacccagcctgttgaactggaaaagatgaacatcaggcattaacctaccaaagtaaagcaaaacaaaaacgctgaacttctccatatttttaaaaatatgtgacacatatatgtttattggaaattaaaatacagtaaaggctctttaactgtcattcaataaatatttttgaatgagcttgcgactggagactcctgcaga

SEQ ID NO: 373512 - DNA, 486 bp, Homo Sapiens
gggtgctctgaggactccacgtcgcaagctcattatcctcacctaatttggcataaaatgcttatgttacaaagctgtgcaagctttgcatcctagaactttactatggtgtataaagttgtaaacagaaagctcttctatcagtttttggccgttttcagatagtgaaagtgctctgaaatgctgacgttaccttggaggagaaaatattagatgtcaccattttagtttaaattattggacacactaatttcaccagaatgtccttatagaaatagttattggttaagacagtatgagagtgtgtaatgcatagaacgggtgcttgaaagtgaatgccctaactaaatcctttgctaagcacagagaaaatctaatagcactgtttctgctggcacacaattaggattctgatgttgctgtcaattttcagcacagcccattcataaatgtaatgggatctcttttctcacaatctaggccagg

SEQ ID NO: 373513 - DNA, 714 bp, Homo Sapiens
  misc_feature (574)..(588): n is a, c, g, or t
gcaagctcatttcatcctgtcttcccagcatctaagcactcttcatattcagagagaatccaagatggatggcaggcactttccactgctgatgccaaaggggaactaacactctctccccaaccctttaaagggggcgatttcagcccacccaaaacagatactccgaagatatttagtgttaagaatgagacgcaaaggtgcacgacctgtcttccagtgaattccacagagataagagcccagtgctgtggagcaagtatgggcaatagactccaaaggtaagctgaagagagcccagcaacagcggtgtcaacaaaagagattctaacatacagtattctatctcaagtttttgtcttctgtggttcaggtccagcttggattctccaaactcctcatcgattctttaagccaccttaaatccttcaattaatattgattctgcttaatcaggtatagatagatcccatttttgtaaccctaaacctcaactgttaagcctgagatcaaatagtggtgagcaacatatagctttaagtaaaaataaaagcttcaagtaattagtatgcgnnnnnnnnnnnnnnnttatgacagatgattattactcaatatttcaccattatagtactaacagaattgaggttaaaaaagagcagttaatgcctgattcaagggtagactcctagcaggaaggaccacactgtgtacaga

SEQ ID NO: 373514 - DNA, 653 bp, Homo Sapiens
tgcgcaaagctcacttagcaactacttatgtaaacagtgtgaaggtttttatacttctgccagaggacaacgtaatatgagacaccgaggtttatttgtctctacagagagtagtagtgtctttcaggctgggggaagggagatttcttatactttattccctaaggatagttatttgaatataaatacttaaaatcttttcatttctgactttgccactatgtgacctcagcaaagcccttgattttacataatttccacatcaaagtcagggataataccctttgcttcttatcttaaaatattattttaagtattaaataagaaaagtacatatcaaagtagttagaattactattttaaaaagatttgcattagtgaatatttggtagacaattcagctaaccgttacttagagtctaatgtggtgagggaaaaaactacacttgatactcagctgtttatagaacagagctatcctgatgattaattataaaacatatccccaatgacagtgtgctagcattatattcccacagcagaaagtttatgtatgcttgggattttagttcttgcaatacatctggggcgtatttggaataataatgatatgtatttgagcatttgatagcatgtctagaaatcagattttg

SEQ ID NO: 373515 - DNA, 126 bp, Homo Sapiens
tcgaggatcccacgtgcaagctcattcacacagtcttacagactaagtctatttgtctctgtatcctctacaactatcacgtgtcgagcacatggcaggtgctcagtaaaacagttctaaatgggg

SEQ ID NO: 373516 - DNA, 734 bp, Homo Sapiens
gcaagctcattactaacagcacaatggacattcgaaagggatgggcccaatttttcataagccaaaaaaagctagaggatcggagagaaaagaagggacggatactcagaaacggcttcaagggtgtcctttggcaccccattcttccagattgttccaaatgcctgctgcagtaataacagccccaaaagaacacaccactttgtcaggacttgtaggtgaaatgtgttggagcagctgtcagcttggggaaaatcactcatcaggtagtcagccgagtgaggctgccttcagctggacaaacactgcatccacacagggaacaagcgggtgctttcctgtccttcccttaggggccaaaccagccctcttttaccttcttgtccaacccagtgggcctctctccctcaaatgcatacctccttctctttcctccagctccctaagctgttgttcagggcacagacagctcttcaggctgccagagcaagagagttaggaaataacgacccctccacatgcattcccacctcccggaagcaggggacacagctggccactctgtgacggagggtgggtaacctctctacctgggtctatcattttagaataaatcattcgtggctgactcttaaatgggaaggcacaattacagatatctctgagaacaactctacctgagggagggggaatccctcccataaacaacggtgggcagataaatctgcatcccg

SEQ ID NO: 373517 - DNA, 631 bp, Homo Sapiens
  misc_feature (559)..(571): n is a, c, g, or t
  misc_feature (608)..(608): n is a, c, g, or t
  misc_feature (615)..(615): n is a, c, g, or t
agagtattcacaaaacatgaaaaaatgagcatttcccaattgttgacagcagagcaaggcttctgtaactagaacatgtcctgtgtattgaaaccctgcaatgcctcctagaaaaggttcctttatcatcatgtgtgttggcatgtgtagaaaataactatacaagcctaaaagcaactgtgtacttcagatgtcttgctcatactaacagactgactgctttagggcatgcatgtaacacagcctccaaaagccttttttagaagagggcaacagctcttcgaatctgcttgcgttgcttttaaagtctggccctccatgtctgctgctctcggcaaattcacataaccagatgcatttctccttacaaacaagcgaagcagggtggctcacagagtaatacccacattcaaattgccatcaatgactgacctatcagtgttggtaggatctcccctagcttgtgctgaaggaggaacaagacatgtgagctgaggactccaaaaacacaaatccccacttcttactaggaaattgaaccatactgagtcatgatacnnnnnnnnnnnnngtaacaaaacacccataactaaagtataaattcaacnatccttnaaatcagagttttaaa

SEQ ID NO: 373518 - DNA, 793 bp, Homo Sapiens
  misc_feature (33)..(33): n is a, c, g, or t
  misc_feature (143)..(143): n is a, c, g, or t
  misc_feature (148)..(148): n is a, c, g, or t
  misc_feature (400)..(412): n is a, c, g, or t
aatgtcttcttttaagcagtagttggaaacatntcaattacagtgtaacaccttagagctaaaaacatttgttcaacacaaactagaatcacaccttctcactagatatcaccaagggaatgtggttttaaaaataaaaaganaacantataacgtatcatggcaaccagagcttcccatattattgacaagtagggatcattaggttctggtttgaacattctgaatgtgaacaaaatgaaatagtagttaagaggtgttttcccactgtgtttaaagagaacactagtaattctggtttttctttctaactgctttactgtttcaagggtattcttttaaaactctgatttcaaaggatcagttgaatttatactttagttatgggtgttttgttacnnnnnnnnnnnnngtatcatgactcagtatggttcaatttcctagtaagaagtggggatttgtgtttttggagtcctcagctcacatgtcttgttcctccttcagcacaagctaggggagatcctaccaacactgataggtcagtcattgatggcaatttgaatgtgggtattactctgtgagccaccctgcttcgcttgtttgtaaggagaaatgcatctggttatgtgaatttcccgagagcagcagacatgggagggccagactttaaaaggcaacgcaaggcaggattcgaagagctgttgccctctttcttaaaaaaggcttttgggagggctgtgtttacatggcatgccctaaaagcagtccagtctgtttagtattgagccaggac

SEQ ID NO: 373519 - DNA, 382 bp, Homo Sapiens
  misc_feature (200)..(217): n is a, c, g, or t
aaactctgctcaaaaacaatcatgaccttccagaaaatctttccacaccccagcactccccggcctcccatctttttaaatgttttccccaaaacaaaccacaaaggccacttaggtttattgtttgtctttcccaaaaaaacaaggcttcggttttttgctccccccagcttgggcaacaaaattagactccgtctccnnnnnnnnnnnnnnnnnnttggtcagtcagtccatccgtctatctgcccaggctctggtttcttaacctccatgttttctcatgagaaaactcctgttaatcttattgagaaaatctgattttctttaagtatttggtttcctttagccaaccgtggactagtggggatcctaaagagtcgag

SEQ ID NO: 373520 - DNA, 212 bp, Homo Sapiens
acaagattaacataatctaaagagaagcttggtggtccttgaattccatagtgcctgacttgttgccagggtagccaggcttttagggtgagatagttgcagtctgggtggaggtgcttgttccctgggatttgctgtggcattttgcttcagggagatgtatgaccatgtacaatataattgcctttccagctccgggaagcagtttgttc

SEQ ID NO: 373521 - DNA, 899 bp, Homo Sapiens
  misc_feature (198)..(198): n is a, c, g, or t
  misc_feature (615)..(738): n is a, c, g, or t
ggccggtacccgggtcagtacggatgtgttgggggagagatggacaggctggagctgcctagggaagcagagttctgcacagctcagctcttggtctctgcctattggagtttccagctgcctcagatgacagggaggtcagggcagtgctcttatgtaccccaaatagtgccccactcaaagcagaccacctgggcncggagggagctgcaggggcaggacagcaggcatgggtggagagcgctgggtctcccccaaaatcaccagtgtcacggctgacatttactgagcccctatgtgtcaggcactgtgctaagcccctgacaaacacttagatcatttcataaactgcaaccccaaggaataggtactgcatcacactgcattcctgatgaggaagttgacgcagaggtgaccgcctagagtccacggcaagtcagtgtggagtcagtgctggagtccaagtctacctaacggcaaagcctgcgtcccagaaatggggtgggttgcagggtccttcctcctggaacatgaggctgggatggggtaggaaagggaaccagatagggaataataacgaacacctgctacgtgacaggccctgggctaagtacnnnnnnnnnnnnnnnnnnnnnnnnnnnnnnnnnnnnnnnnnnnnnnnnnnnnnnnnnnnnnnnnnnnnnnnnnnnnnnnnnnnnnnnnnnnnnnnnnnnnnnnnnnnnnnnnnnnnnnnnnnnncagcggcattcgggacactgaacccgggtcttcccgacctggcgcctgctttgtgtcaggggaagaggagcactgaaggcccaactgccccctgccgtcagggcaccgccgcctcagctcactgatggagcctgtgactgcacatccgtaaggcccggacg

SEQ ID NO: 373522 - DNA, 570 bp, Homo Sapiens
cgtcagtacaaggggctcacactggatgtggatggccgtaccaccaagaagctcatcacgcacctcaagccccacaccttctacaactttgtgctgaccaatcgcggcagcagcctgggcggcctccagcagacggtcaccgcctggactgccttcaacctgctcaacggcaagcccagcgtcgcccccaagcctgatgctgacggcttcatcatggtgtatcttcctgacggccagagccccgtgcctgtccagagctatttcattgtgatggtgccactgcgcaagtctcgtggaggccaattcctgaccccgctgggtagcccagaggacatggatctggaagagctcatccaggacatctcacggctacagaggcgcagcctgcggcactcgcgtcagctggaggtgccccggccctatattgcagctcgcttctctgtgctgccacccacgttccatcccggcgaccagaagcagtatggcggcttcgataaccggggcctggagcccggccaccgctatgtcctcttcgtgcttgccgtgcttcagaagagcgagcctaccttt

SEQ ID NO: 373523 - DNA, 756 bp, Homo Sapiens
ccgggcagtcggattgcgggccgatgtgggtggccccgttctggcaggcctggactcacatgggttcacgtgatcctggcacaggctgccttggaatccaggggggcagtggcagaaataggaggggccgctgtcgacacagaggcctccattgtggcaaagggaagagacgtctatgccttggctcagtgcagccttctggcaggaggacagtggaaggttgcagagaggcccggtccatccctggaggcacaagcagtggaaggagggcccagtctggaggcagtgggaattgcgtgggcagggcttctgggcacataagtccatcagagtctgtctgcacagctggggcggagctttccctcacagcgcgggccctggaagcccatggcacagaggcaggagaaggtgccaggcctgttcacacaggtacccccattgaagcacggggcagacacacagtagtcagtgctgctttggcactggggccctgtgtggcttggagggcaggtgcagtagtagcctccagggctagggttgcaggagccgccattgagacatggccctgagtgacaagctgtcatctcctcactacaggtgggtcctgtgtagcctgtagggcaggtgcagttgtagccagagggctgggggtagcaggtccccccatgggcacagggtgcagagatcagccccctagctctgcctcacactctgaccccgtccaacccacggatacaaccccgaacacagataggg

SEQ ID NO: 373524 - DNA, 769 bp, Homo Sapiens
ggtacccgggtcaggacggatgtggattggaggggagcatgggcagcatcttttaaaaatgcaaacatgatgatagtgcttcatgaaatgctaccagagccaccgtacctcctggccggtccattcctctagaggttgcactcctctgggcctcagggcctttgcacaggcagctcctgcttggagtgcctcctctccctctccccttgaccttgtcattgatcccgacccagtcttcagagctcagctcaaatgtcactcccttaaggaaagacttccttaactgtccccacttaggggtcccagttagctgttcttatacccccacatgccccctgaagtttggaccccagctgagtgcagtcactgtggggcactgcgtgacatctgtctgtcttctgtaaggtcaggggcccttcgacctgagtcaccgtggggtcccaggacctgccgtggcgctcactctctaaagactaaacagttgcagagaccagtgaatgaaagtgtcagggcctttcacacacatcagcttactgcatcctcaaagcatccctgtgaaagagggccctgctttaccaggaggaagctgaggcttggggaggccagggtcatgtgtcgatgaagagccactggtccacactgcccagtccccagcactccctcccctgcagcgcccagtgctgacttggtacggctttcattgcttgttttccatgtgtttggatctttcatccttgatgtggcccgcacatccgtactgcccgggtac

SEQ ID NO: 373525 - DNA, 513 bp, Homo Sapiens
cagtacggatgtgcagtggagggcagtcagcagggagcaggtgcagagatgcccttcttatgtttcattctaggaaatgagactccaggaaatgttctgtaaagcaggagtgtggagtgtgagagatgggtgggagatcccagcctgaggaaatgatcccatgatgatgccattagccaacagggaacattctggataggaaacccagaagggccaaggaatccccactcactattgacaaatcccatctcctctttaataactcgctccaaacactgattgctacaggctcacaccccgcctcacctagacgttgctgcaggcccacatcctacttcacctagaccttgctacaggtccacatcccacctcacctagaccttgctacaggcttacatcccgcctcaccttgaccttgctacaggtccacatcccgcctcacctagaccttgctataggtccataccctgcctcacctagacattgctacaggcccacatccgtactggcccg

SEQ ID NO: 373526 - DNA, 591 bp, Homo Sapiens
agccggtaccgggcctgtacggatgtgacagggaggcctgcctctgtttgaggggcagcttcttgctgatttgagacagcagggagagcgtgaggtgagtgttttgcttagtcccataccctgatgggctctgggcctgggcctgcggttctatgtaattccatccagtcagttgcctggggcagctccgttcacaactggggcttgcggccagcggagtgaccactgacagccacatgactggaaagtggcagacccgaggggtcagtcagggcatctgatttaatccatgggttagccttctccctatggggctggggtcccagagatggttcccacttgctgtgggaaggaggcgggagcacagcccgctgccaagtgagagcactgctgagtgggtgagggggcaggtgagcagcttggggaagtcagggcaaaggagggttccctctgagccttctgcttctccccacgtctttgttcctggggagaaaaattaaagcaacttggggttatgttactgtcttagtctactcaggccaccctaacaaaatgccacagactgggtgattccaaatgacaggaaaagga

SEQ ID NO: 373527 - DNA, 511 bp, Homo Sapiens
atgagccactgtgcctggccagtctttctttcatactcaattgctacaaggctctggggggactaaagcagtcatgtgtatcacaggtccagcaccccatattcccttaacttactgccatgactgactgactgcaggaccataatatctaagactgttccatattaacaatcacgaactctagtattctcttctcatcttcctgtttctttcatctcttcctctgccttattcttctatacttaatccctgatctcatgaagacgctgtcccttgatgactattttgtcatcatcagcctctacctacattgactttcttccttgtctagcccacactccttgttttattatttacccacatcagtatccacaatttctttgccttttgtgtttcttccacttttgtccagcatacctattctagtttagtctagccatttgctttctctcctcatatagaaagggtattgtattagcgaaaatcatgtgaacagattattggcatgatg

SEQ ID NO: 373528 - DNA, 685 bp, Homo Sapiens
  misc_feature (176)..(176): n is a, c, g, or t
  misc_feature (318)..(318): n is a, c, g, or t
  misc_feature (662)..(662): n is a, c, g, or t
  misc_feature (669)..(669): n is a, c, g, or t
cggcttcggtaccgacgctctctctgtggggttgatcatgagtggcagctccataggggtggcgcccatagcggaataaatagttttgacagctctccccccgggcagtgattcagctatgcgaagcacggcatgcaccgtcagcccaaagagcccctcgcccttcagatactcangggacgagtcgcagcatgtcagcctcttttctcatggcagccacaggctcaatgatgcgattccacacggcctggggaaaggcgtcagtgaaagacccaggtcctcccaggccctgctcgatgactttgattacaaactccnggccgcccgttgttctcaccaatagaacagcgatagcagcagcgacgattgttggtgcggaggctccaatagatgcgcgtggcctcgtagcccacgggatagagggcagtggcactatgaaagtcagccatctggtgaggcagcagctgtccgatggcgtggaacacaaggccccccacacggaacatgtgcagccgttctccccgctgaatgatgctagcgatttgcttcacctcgtcccgctcaatgtagacccgccggaagacagcaaaagagctcagctcttgctcacagggccccttgatcttatgcattggacacagcatggtcttgtccttgaagcnacatgcnacttggcacggatggc

SEQ ID NO: 373529 - DNA, 683 bp, Homo Sapiens
gaggatccccgacgctctctctgtggggtagagaaccctgggctgtaactgaggcagccactctgtaatggggactgagtttgggaaagtccactctctgtcttgatggctggcaacatcacacccaaatcgtaagtgggcaagctgtagggctgtcctgtctgtgagtaggctgtgtagacggctggctgctgcatccccgaatactgagtctggcctgcataggcagacattgcttgagctgctggtgtagaaagaatgtgtggatagggcctaaatatcagaaaaatagcattactgtggcaacaaagactgtgtattaatttagacagcctagattcagtgaaaccctataatatccaggaagtaatcctctttatccacaatataattttaacaatataggaaaaagcaacagtctgaatgtcaggagctcaggctctgctacaagccaatctagtgaccatagacaaatgatttaaactccctatgtctataccacacctgtaaaagtagaaatttgatttagattttacacctgtgtctcttccaggtctacaattcttgctcatatctgaaatagcactccagttaatacacagatgaggaaaatggagcacacactagctaattaatatgctcatgagcaaattcacactcaccatgagtgacttaatgctatg

SEQ ID NO: 373530 - DNA, 563 bp, Homo Sapiens
tcagtcggtaccgacgctctctctgtggggactacagtgatgagcgcgactgcccaggtgtgaaacgccccagtatgccctctgaattacttcgcctgccctagtgggcgctgcatccccatgagctggacgtgtgacaaagaggatgactgtgaacatggcgaggacgagacccactgcaacaagttctgctcagaggcccagtttgagtgccagaaccatcgctgcatctccaagcagtggctgtgtgacggcagcgatgactgtggggatggctcagacgaggctgctcactgtgaaggcaagacgtgcggcccctcctccttctcctgccctggcacccacgtgtgcgtccccgagcgctggctctgtgacggtgacaaagactgtgctgatggtgcagacgagagcatcgcagctggttgcttgtacaacagcacttgtgacgaccgtgagttcatgtgccagaaccgccagtgcatccccaagcacttcgtgtgtgaccacgaccgtgactgtgcagatggctctgatgagtcccccgagtgtgagtcccgaactgg

SEQ ID NO: 373531 - DNA, 523 bp, Homo Sapiens
ctgttcccttgatgtagtattctccccctttcctgtgagctgagctgtagtgattgctatctctcttctgggtctaacctccacagcacatctacccggcttcaagctggcagtgggggttgtctgcacagagtcctgtgatgtgaaccatctatgggtctctcagccggggataccagcacctattccagtggaggtggcagaagggtgaaaaggactctgtgagggttcttagctttggtggtttaacgctctatttttgtgctggttggcctcctgacaggaagtggcgatttccagaaagcatcagctgtagtagcatgcggagggaacaggtgatgggcagggcccaagaactcccaagagtatatgccctttgtcttcagctaccagagtggatagggaaggaccatcaggtgggggcagggctaggcacgtctgagctcagactctccttgggtgggtcttgctgtggctgctgtgggggatgggggtgaggtcccaggtcaatggagtggggaac

SEQ ID NO: 373532 - DNA, 482 bp, Homo Sapiens
tgtaactgcacaaccagtttgacactggaaaatgctgactttgggggacaggatgaggccctacattctaagcccccagttggcagacaggcattgtccctgttccacatttatgtcgggacaggagatgaccttttcctctgtgtttttcctgtgtttgcacgttgaaatgaagctgacaacctggcaggacgctcagccgcttcaatttacttggattgtgtttcttgttagcgaaaagaccttcccgcatgactgtcttgggaagatgatcgagatagcacgcttcctagctggcagaatgctaaatgggaccgaattccaccaccaggcttgacttgtccaaaattaaccaaaaggcttctcaaactgactgcagagcatgtcagactcaaggggtgacctttcttcccaaggaaggcctgtccctcacagaagaaaaggaattgcaatgaaagcctcatagaagttgaaagcatata

SEQ ID NO: 373533 - DNA, 926 bp, Homo Sapiens
  misc_feature (465)..(465): n is a, c, g, or t
gagctcggtaccgacgctctctctgtggggtttgaggaagcacaaactcacccactgctgataaattcattacaaaagatccactgagaaagtatggaaggtaggtgaagaatgtgcagacgctctctctgccgggtgatttagcacaaaaatacaattgatagtgaaggtataaagtgtaatcatcaggtaaacctctcctctctcatagcgtccctgcttcaggactgcaatggaaaaggaaattcttactgtgtagaatttcattaagatggctgggtagatgtttgtgtggcacccttgaactagccgttatgattttattctttgttgagttaattagaataaagtgattttcctcaaaaaacaaacaaacaaatatgtgcccttgtcagactgttccatcgtgatacccccacgataaaccatgcctgttaaaacatatggttccgtgattcaccaacnacagaaaacagatgcattcaaggaacttgtgaggaagcacaaactcaaaccccactgctgataaattcattacaaaagatccactgagaaagtatggaaggtaggtgaagaatgtgcaatccacctactcatctagataatctgaaacagatccttaaatcagcctagagatctaagtactcggatcacattattttgcaggccagagaaatgcttttacggaatgttttcgatgttatcgtcaccgtcttacaccaaaagccgatagggagttttactaacacacaaagtcaaacctcgacacccagccctttgaaacgcatgctggaaagtctttggaaatcccatagcagaaatgagctctttctgtcgtatcggtcactgacccatgtaactgattatatttcgtcgtctgtaatgggcatactcaaacatccaagtaagagagtctccgtcgaact

SEQ ID NO: 373534 - DNA, 573 bp, Homo Sapiens
tggtgttctagaggatccctgccatttactccatggcgaagcagtggcagaaatggagaaaagagttgggtgcaggaatgtcagtgatgtaaaagtcaaagacttgactgctgaaggaatgtagggaatcagtgcccttggaatgtcaatggcctggtctacattgagaatgaagactgagaaagggcttcctgagggacagagagctgcaggtgatcaaggacactcaatgggtctctgagggaaaagaagaccaaagaattagggagtagctagcagaaaatggaggcatgacactaaacacagactgaaaaagagtgctgattagaaagagaaaggagcccaaaggcagatgggaaaaccagccaaggatggagagacgtctgttcattagtttgtagttgggacctcacctatcttaccaatgtggtattatgctctagtaaaaagtcagcgatggccgggcatggtggctcatgcccgtaatctcagcctccccaagtatctacatttttttctctgtccctctttccaactgaatatagacttcaccaggccatggagtaaatggtc

SEQ ID NO: 373535 - DNA, 557 bp, Homo Sapiens
atcctgaactcctatgaggttgggcatgttgatgagccatctcccctctggactaagaggcccatgaggatggcggagaccacagtgcaaatgtggccctcaatacatgttggatgaggcaagttctatgtcaccaggagctcagtggggtttagcatccttggacatggctccacattagaacagtgataacagaacaattattgtgagctcctattgagacaggaaaatagggcctagaaacagggaacttaaggccactctgtgctaacttcctaaaagagaaaacaccagggtctggaggcaggaaatctaaggccaattcactctgacttcccaaagctggatcaaaaggaaaataccggggtctgggggcaggaaacctaaggctgattaacacaaacttcctaatagctaaaccaaaagacaaaaaccccatctttccatgctgagtaacaaaggttcagaggctactctccctacaaccatccctcttccaccacatctcagatggaaagggaggggagggtgccttgttgaccatgggccaagcaggg

SEQ ID NO: 373536 - DNA, 579 bp, Homo Sapiens
gcgttctagaggtccctgccgtttatccatggtaaagcgggcgatcaagacaagtgggaggtgaaggagcaagtcaactgaaaaggcagaagcaggtgggactcaaggtacaggagcagatttctacctcaaacagaaataggatggaaatgtccatgtgaccaagagacagagtttttattgggaaaaaaggacacaaggctgactagagaaatgaatgggatttgggcagtattgaggctccatccaatggggtctggagagtatgaacttgctgtggcaccagtgtaagtggttgtgtttttctctggaaacacaagggttaaaaatggggagatcacacaggtggattaatcctggcttgttatctcccgttggggtttatgaggagaacaatgaagggttagcaagaaagcagttgagaaataagactattaggtctttaacgtaataagaggagctagaaagaaagaaaactatgcttagagtgtgggatatttgagtttaagattctgagcttggttggagcagttctggctgatgacaagttccgagtgtgccatggacgtaactggccgg

SEQ ID NO: 373537 - DNA, 427 bp, Homo Sapiens
agaggatcccgtccatttactccatggccttcttctaaggagtgtaggttcctgtcttagtctgttttgtgttgctataaaggaatacctgaggctgagtaatttataaagataaaaggtttatttggctaatgactctgaatggttggaaagttcaaggttgggcatctgcatctggtgagggcctcaggctgcctctactcatggaggaaggtgaaggagaactggagtgtgcagagattacatggcaagagagtaagcaagagagaaaggagggaggtcaaggatggtttctaaccaccagctctggaggaacccactcacccctgagggagggcattcatctattcataaggatctggccctgcaacctaaacaccacccattaagccccactccaacattggtgatcacatttcaacttgag

SEQ ID NO: 373538 - DNA, 479 bp, Homo Sapiens
gggtgatctagaggatccctgccatttactccatggctttgacaacagatgtatttcctgctcatgctacagtgtccagtgcaggtgggcagtggggaagaagggggctctgttcagtgcagtcacttgagacctagctaatcacctagaacatggccacttgctattccagaaggaaaaaaaggaatgctagaaggtcccacactgaaagttcaatgctctggctccaaaatgacagctatttccactcactcctcatgggccagcacttagcatgtggtcctcagccaaccccaaagggactcaggaaggaccatcccaccatatggctggaaatatttgatggcagcattaatggggaacagtgttccaggcagtggaagtctttgagcccttggaagaaagacaaggcgatctctagagcacatccttcccaatattaatgaatttaacaaatgagcaagccatcctcccccact

SEQ ID NO: 373539 - DNA, 497 bp, Homo Sapiens
gcgttctagaggatccctgcatttactccatggcttgctcaccatacaggtcaaggtccactacaggtgcattatactggcatgagggaatattccttgctacggcagacagaaatagactaacaacctggttaagcagaccattagagataccagagattctatccaccggtgtcaggcagatgctgagagtcttgacccttctctctgtccttcgaaaggcacaagcatttgcaatggcagaaaataaacaggcaggtgagtatgtgctaagagccggaatgtactgggccattcccaatctgtgaatttaaaagagaactgcagcagaacaggaaatgggctgaagtttagtcatttcattttccctccctctgagactattatggttctctctctatctgtaacatgaaagatagcctgtgctttcattataaaccactttcctcatctggatttctgaagtccttatctgtggcttgccacaccttacatga

SEQ ID NO: 373540 - DNA, 484 bp, Homo Sapiens
tggcatctactccatggctaacacaagttatgcccgtctccataataatacaccaacataaaatcatcctcagggctacattaaagttaattacctccaaattatatgctgtgttcataagacatgacgtgtgcatttagacagagcttacctgttaaggggctctgaacactgcctgtgtgtatgttctatatatgtgtatacatcactgcatgcaaaaagagacagccttttatttcaaaggtatctatgttctgattagcactaaaaacttagactccttaagatcataaatttcataatcaatcatagtaccattctatagcagctcattattcagtctttcaccagtaccaacacacagcaactcattttatgaaaagccattcatttattcaatctactgctagtgctaaagaaagctgtaaaagtaaatctaagccagctctgcatttggggatgtcacagctcaactgggaagaga

SEQ ID NO: 373541 - DNA, 377 bp, Homo Sapiens
aataactcggtaatcggcagtgcagtgggccatacagttcactagcatgcaacacatgtgtcacataagcaaaagctccttatgcacaggtccaccacttactacccaggatttctagagactgggacagcagaagtgagactgacagtatgtcttagctcaggatgtgtagagtcccatccagcatcatttcagatttcccgagaaatgtgtaaaggaagatcaagaatccatgtcccatttctccctttgcgtccctgggaaagaccattctctgttcttagaggaattgattccaagaacatatactcatgcatgaatgtttcttgcccgagactcttcaaagcatgctatagttgtagaagaggctctccact

SEQ ID NO: 373542 - DNA, 505 bp, Homo Sapiens
cagagttggtggtacctgaactgtatgcagctgtggccggcatcagagtggagagcctcttctacaactatagcatgctttgaagagtctcgggcaagaaacattcatgcatgagtatatgttcttggaaatcaattccctcctaagaacagagaatggtctttccccagggacacaaagggagaaatgggacatggattcttgatcttccctttacacatttctcgggaaatctgaaatgatgctggatgggactctacacatcctgagctaagacatactgtcagtctcacttctgctgtcccagtcctagaaatccctgggtagaagtggtggacctgtgcaaaggaggttttagaactctgcagtatttgttggggcatggcacaaataagctcatccctcccgtccgaggctagtttcctctggaaccacatttttatctagatgaaaatttggaatgaaatgaaggaatagaaatccaataaaagagttgaagggaaag

SEQ ID NO: 373543 - DNA, 323 bp, Homo Sapiens
tctacaccaacaaagtagcagtagtacctttccctacttctaacaacctaaaatgtctccagccagatgtcccctaaggggcaaaatcattttcagtcagaaccactgtatagcagtaacctgtaagacaaaagtataccaaaaagtagaagtaactttatggattcctagatcagtgtgttctgctatcactgtcttctaggctgccaggatttacgcttttaatagtgtagtctagtactaccttgccattatgttcagaagtaaatgtgaatttaagttgaatagtagtgttctaaaatatgtaatccaaatattcctaa

SEQ ID NO: 373544 - DNA, 302 bp, Homo Sapiens
tgtgtaccaaacaagagcaagaagataataagatgaaatccaagcgtatcagttttatttgccccttgcactcattggtaaaatgaacaagtgggtaaattaacataaattaacatgtaaagatttagttatgaagtataaaaagtactatgaaaatgtaacagggtaaaataatataggaaagtactgtatcctatgtgtaagaacagactgctaagggaaactctcttaaacataaaaaaataacaataagatgctataggcctggcgcaggggctcacgcctaggatacagtagggaga

SEQ ID NO: 373545 - DNA, 247 bp, Homo Sapiens
  misc_feature (62)..(62): n is a, c, g, or t
tgagattctgggtgggtcggactcatgtacactgagatagttccgtgtcaataaatacatgngtatcgaagccgtgggagtacatgagaccacctccaaaggatgagaacatagaaaggaatgtaggacttaaagcatgatggagaaagaagaactggaactgaatggggaactgaaaaggcaaataagaagtgatgagagaggtaggaaaacttggagagtggttatcatgggaaattcagtcaga

SEQ ID NO: 373546 - DNA, 460 bp, Homo Sapiens
tgcaaggagtctgcgggacagagcagactccgtctcacacaataaaaccacagcaaaaccacacacaacaaaaaacagtcttcagtgtatctggttaacacgagttgggcattcccaaagcctgatccaaccaagccttcctccacctccccaggtaaactaaaaatggagttccctatcctctgaaactaaaaatcaaattggctatgtaaagaaaaataataggtcgtggaaacataatgtaccacattacattgttaccaccccgaccacacttcagggccagtggcatacaccaccagacacgtgcatatggtcccactaagcccagaaggctactactatatcctctacacagcgccccaatcagctacagatcaatggattgagagtgggcaaaaaagctcaaaacctcatttcccctgctgcaaaatacacagtgcctgacacaaaaatttga

SEQ ID NO: 373547 - DNA, 193 bp, Homo Sapiens
ggtaggacacgacagaaacatgagaccagatttcccatcatttagcatatcccagagaaagtgcccacacagaagaatctagggactcccaggccatagcttatcttggacatgtaactttggtcatgacagtgatctcccactttgctcatgtagagagtgaaatatagattagggcacaagatgaactgta

SEQ ID NO: 373548 - DNA, 717 bp, Homo Sapiens
  misc_feature (597)..(597): n is a, c, g, or t
tccagaaacaaaggtaggaaacttgtgaccaagtgaacaatggggccagctgagcctggccctgctttaagggaggcagagattgaacattccccacctggagttctgcttccacggccactctctagaactctatttgcatcctgtctttggctctgagggccctcatgtagctaaagctccttcagttgtatcccagaccccctggaagaggcccggcaaatcatccacttctgccccccagaatccctctgccctgctctgtaactccttaccttaatggcaccatccttaatcaacccctggcttggccctcagtcaattttctaagctactgtaaaggatgcccccttcaataaacatgctattttaaagtggggcatgcttggggtggggggtctctctgaaggagtgactgcattgagcccagtccttgagcttggcaatggtgttgctagtctggtctcagtcctgctctctcacagagtagactgaaaaacagaataagctgaggttaagaaagatgttgctttttgcattgtgatggtgctggtactgagaagcatgcagcatgtcagctgtccccaggctgctctncaccaccttaaatgtttgcttgttcttttgagcaacatttaatgacaccctcccaagcgtcagccaccatgctaggcacttacccaagagatgggtaagacatggttcttgtctttgagc

SEQ ID NO: 373549 - DNA, 754 bp, Homo Sapiens
cccagatttccacatatcgtcttcagaacgtgtcttatctaatgatgaatgctgatgattactagaaattaaacatttgttcagttgtgctaaatggatgaccaagcatcttttaaagcgacaacatgcatgagctctttccctcatttagaattacgattaggaggatcagcggtccttgatattggaaccatcttaatccaaaacacagtataagcaccaaggacaagcaccggtgccaccgtcgggctggaagaatcacccacaagagcggatgccctcacagctgggctcctgaggcccagggcccggaccctctcaccatcttctagcttgtctacgatcgaggcaaaagagtgagatgcctaaaggggtgtgctgtgagcatccacagcctacgggaagccctgttatttatcctccatctctgccttccaaggctccaggcatcctttccacccttaccacctaccaaaggaaggtgttcagaaagaaatggctgcttgactatctggttttcataacctcctctacagtcttcaagtatgtgtatataacatggaagaggcttaaacagtgcgtgtgctgaaaaagactgccactagtgtcaccacgaaaggaaactactttatttctcctcaagcttcaggtgtgtgctgatcaattaaactgactttaattatttattcctgattctaacctatggtgaatttaatcaatttcagcagattacctgccctgcgtagcctgtgcc

SEQ ID NO: 373550 - DNA, 493 bp, Homo Sapiens
cagtgtttggaaagtccccttcatgtagtcctccgagcagcttttctctccccaagtcctgatagaataggacaggaattcttccctccttcccttcccagagcgcgcaccgccttcagatgtgcactcaagataaagaagcaagtgtgagcgacctttaggaggatggaggtggaagaaccacgagggacaagtcttgcatgagtcttgtgccctccggagctgcttctggcagtagagggaggaggtcttaggagacgtccgtgtgtcagccttttagcgtgagtgccaggcacgtaccctttaagcagacgcattctaaacgagtgggacgacggcagtctcgcctactgactgcacttttgagccatgaaatacctcgggccacttggccattacccttggctaagccccctggctgctacaaaatatgcaaagaatgtgcatgtttgcgtgagagtgtgttgagtacgtaattatgaatgtgtagtta

SEQ ID NO: 373551 - DNA, 551 bp, Homo Sapiens
ggcagtggtaaacgatgggcaggagtatgagttgacatggcgtctgtagacaggtggcaggaaagggtgagaagatagctgaatgtactgtgggtgagtggcatatgagataatcttcgtaactgcctcgggtgagcccgctgagggtcccagtggaaggtgctgagtgggcaggcaggactcaagctgctgtcttcccatagtgccttgcagttcctgccctggatttctggtgggaagtccagaaggccctgggagggaaagcagcgaattaacaatatgggaagcattagaggaaatctcctccattgcctcctctcctggctcgacatgctgcctacataatacccatgtatttgccaaaggttgagccaagccagggccctttcttttcacagacttatacagctgtttcactatagagccaggctaaataaacaattctttttcatttcctgcctttctcctgaggacttggtgctgtagatgacagtttctttctttcctatagtgtcttcacagggctaaatatgggaataggcattgtgttc

SEQ ID NO: 373552 - DNA, 506 bp, Homo Sapiens
gcggcagaggtagacactcctaagtgctacgacaggagtaaacattctctaaaaactactgatatatcaatgaaccagcagtatcaaccactgagatattgaaaacacatttcctcccacagcatgtgaaagatcacatcggggattctttaggaaagagtacaattgagtacagaaggaaaaagaaggccgaggaaggctgaggaaggtgatgaaaaggataaaaggatatcgcttaactgattgattcaagatggcttatgaagacccagagtttcacaggcttggggcctgaaaacaggagggcagagcttattttggcatggcagacatgtgccatgtaaaaataaaaggaagagataactaaaaggaagagataacttttaatgttcacagataatttcattttctcccttaaactatacatttgagtcacttttcaaaaatagcacttatattcaatgatacaaacattccaccattctctttttaagttgccttctgaa

SEQ ID NO: 373553 - DNA, 343 bp, Homo Sapiens
tcaggacagacgtcaagaattgcagaactattttaagagacactacaactttaatcacaatttctagtaatatgctttatatacttttttttacagtctccagtatctctttaggtagaacacttttgaattcaaagccatgggtcccattgttaatttgaacaaaatatagtaagtatactattattttccatgtctttctaggctttttaaactctgcagtgtatttactgtactctcgtagaaggagtgccatcaactgcaattggtacaaattgtgcttatttttctgctcttttcacgttcccaaaatatgttcccattcaaccaggcaggtcttccg

SEQ ID NO: 373554 - DNA, 392 bp, Homo Sapiens
ctggaggattagtataagccccatagcacagagcaggcgttcagcacctggtgccttatccccctggtgggtgggtcctcaatgattgtttgtggaggtccccttgagggttcagctgactgctgatggtgactgagaggaaattgcccaaggctggggacaccatctgaggggattagaggaaacagcctctcacacagtcctgggaagagtgcctgttgctacgagccagactggaaagcctcataattcacagagcatcggtcagattcttcagaagggtcttgcctgagtagtgggaaataattagccctaaatgaaatgcagccctgagtctgtctaacactcttaaaagcaatgatttaggagcacagtttggcgttcagacccca

SEQ ID NO: 373555 - DNA, 585 bp, Homo Sapiens
tcacactgcacatgaaacaattaatctgaatcacagaggaaaaaaagatggagggaatggcgatcctcagtgggacaatatctagcatctaaaataaatgtaaatagagctctggaagattgatggaggaacaaggggagagataggaaaactggaaaaataatggcagtacattttccaaaattatggtgaaaagtataatcctacagatccaagaatgtcaacaaaccataagcaggctaatcacaaagaaaactacaccaaggtacattgtaatcaaactgctaaattccaatgacaaaaacatctttaaagtagctggaggagaaaaagaatattacatactagagaacaaaagtaagaccaacagcagacttcaggaacaagacaagcctgagacaacagaacatccttaaagtgctaggagcataaaggtgaaataaggacaacctcagacaaacaaaagctgagaaaacatgtgaccaaaataccagtactataagcaaagttaaagttcttcagactgaaggaaaatataccagattcaagctcagagctataaaggaatgaagcctagaaacagaa

SEQ ID NO: 373556 - DNA, 715 bp, Homo Sapiens
  misc_feature (86)..(126): n is a, c, g, or t
  misc_feature (146)..(213): n is a, c, g, or t
gtgttctagaggatcacccgcagtaaggtgtgccaatcgggagcaggaggaggcagggccaccattttctgggccataccaggcannnnnnnnnnnnnnnnnnnnnnnnnnnnnnnnnnnnnnnnngcagtgggatgtggagaagnnnnnnnnnnnnnnnnnnnnnnnnnnnnnnnnnnnnnnnnnnnnnnnnnnnnnnnnnnnnnnnnnnnntctctggacctggtgcttatgtgcactgagcctcagatgcctcacctggaacatgggtctcataacacctgcctaatagctgatgtgaggtttctggggtttctgtgtgatagctcccagcaccgaagcagcatagaagaggcacccccataaacagaacatgccggggcgaccccaccctgagggaaattccaggggcgcacttggcacccacatcctgcctcacctgctcacgtggggacctagcaagcgcctggcagggcctgtcccgcagcccactggaggcagctgtggtggccatggctggtgttccaggcagctcctcataggtgagggtggtacagaaccttcttcacagacagcagcttgccccgatctacagcagcaacagcagccccccgatggtgcctccaatcaccagggtcagctgctcatgggggcagagaccacagtactatatgcctcctggcacacattatggagaggatcctctgaacagcta

SEQ ID NO: 373557 - DNA, 490 bp, Homo Sapiens
gctataagggtcgtggagattcaccaagtgcccatctttacatgaatatgttatatgaaggtggcgcatgaattataatttcttaaattctacacacatgcacacactccagtagcaaccacacatcagttactaagcacatcttaattccagaaggacgctctaacatccccaaatactccaaccagggctccaaagtccaaaggtcccaccattgactcctgttcatctaccccacatatctcaggactcatcagatttggtcccagaagtttattcccctccttccgaaaaatacggatggaagtagttataattcagttttttaaaagacagctattatccaaaagtctgaaaataaccaatgctggcaaggaagtggagaacgggaacattcatacactgttggtgggaatgtaaattggtacagccactatggaaaacgtatgaaggttcctccaaaactcaaataccataccctggtacacct

SEQ ID NO: 373558 - DNA, 305 bp, Homo Sapiens
ctccataatgtgtgcccagaatgctattgtttcagcagcggggaaaggattataggtaaataaaatacgcaaatgcagttcataatgaaaaatcctttgatgaaccactgagataatcactgtgaaaactctctgaaaaaaataccaaatgttctggaaatgcaaggtgacataattatcattctaaggtgcgatcatccagtagaagttgctgcgtgtcctaagaaaattagctctcggacaggggcagtggctcatgcctgtaatcccagcatctttgggaagcccaggtggcacgatcttat

SEQ ID NO: 373559 - DNA, 602 bp, Homo Sapiens
gttcagaggagtccccgtccagtaaggtgtgccagatgaatggaatcttttaatttaaaaataataatttcttaggcatgtcttaatttaatggatgattttttacaatttctgaatggcggtacaaaataatctacttggttctttgaacactgtagatcttggggtgagcctttcttttatcttccagtcagaaaactgcgtacttagggactcacttgatcaagaagaaccccttatgtctgggttatggcttaaaatttcatataccttttattttctgctgtgaaggttaatttccagtttttccctgaaagatgagtgggcttccagcctaactttcctgtggaaaagactttctgctctaaaagttctgaaaactttctagtgatggaagataagaatgttagtttaacatcttccttaaaaggaatctttgcgaaatatctcacaaacaaggcatgaaatatttatgtggttttttaaaggggatttaggagagagaaatatctatcagtggaacaactgtgggtagagggtagatgtgtcactattctaggccttggatgagttcagatgcagaggtcattctccacattcta

SEQ ID NO: 373560 - DNA, 535 bp, Homo Sapiens
cataatgtgtcccagagacactgaacaaaaccaacaggtttccataagcaacgctaagttatcaccacactttctcatcggtgaacaattcctaagtgaacagaatcatgcaggataaaaacattatgaaatcagtacacacgtcacactgggaatggaatttatctttacactggcaccgcggtgcctggattgaaaatcacgaactaggtttaaagaacagagaaaatgacactgggcagaaaacaaacaatgacctgaaatgactctagaagggagatggctttcccttctcaaagtaatctatacagacaagaatcaaactacagactgtgaaataatctggggacctcacagcagttagcttcttactggctcaaacatcctacaatctctaaaagtcaaacgcacgatgacacaaacataaaaacacaacacatctaacatccaatcattatttatggatttacacaaatacagtgggtgtagggaggaggtgatgcatgatgaaatgttattctcaggtacgcaatac

SEQ ID NO: 373561 - DNA, 513 bp, Homo Sapiens
ggaacaccttctgtgggcaaaccttcagctcccagcttgatgaaaatcttcctttccccatattttcaagaaacactccccagggggttaatgttttgaagtagaaagaaatgtcagcgctagtttccccttggaaagtagagaagtgcaggtaggaggatgggtttgggaaagaggcggcattccaataattcctgtctccttggcagcgcagaggacctacgctcaatttggcttctgagccttgacggtcagtatctccaaccaccacttggctcactggcaggtgatctttgtatgataagaaaccagcatccttcctccatggcttgtagtccgcgtcgcagttacagtagtacttgggatctgtgcagttgcgttcgatgccgcaggcacatttctggattccaggcccagagcctccccagtagtagtgcttctcgttggctttgccaacccaccaagtgtaagggcttccatctggggtgttcaacaatcttgacatcttgcaga

SEQ ID NO: 373562 - DNA, 450 bp, Homo Sapiens
acaactgccccaggggagcatggcctggtgggcagaagctgccaggaggttgccctgaggtaactcagtggagggtgcccaccaagggatgactgacctacaagctcttctacctcctgtgctctcaagtcagaaagaccaccaggcatccctgaatgttcctggtgctcctgcttcagcattcagtgtcccacctcccacaggagtaaggggccagagcaccttgtgttcccttgagctccaggaggcacccagtggaggaggctggggtgtggaatgcagcaggaagacaaggctcagtgaggctcagccccctactgctggtggccccccaagcttctctaagcacgctatttagcttctgctgttttatcatctgttaaaaatagtcataggccaggcatggtggctcccgcctgtcatcccagtgctttgggatgccaaggcatc

SEQ ID NO: 373563 - DNA, 485 bp, Homo Sapiens
catttctgctatgaccaccttccaggagttttctagtcaccagatgccttggtaaagttcaatacgtaatcattggctctgaaagctgttcctggaccaaatctgagctaactcactgaagaatcaacagattgaggcaaccatccggtcagttactttttcctgcatcctgctggtgttggggtaactcccaatcctagatgaaaaccttagactttctgttgtcaggtgtccccaggcaatatcctacgggggcatgatagaaaagggtaactctggggtcagatagatgtacttactcactgtgtgaagttggcaaagctgcttaatttctctgagcctacttcctcacctgtaaaaatgcgggatcaattactacctacctcacaggcttgttgtgaggattaagagatgggatgtgggagcacctagccgtatctggcaaataggtactcaataaatactggttttacttccaataaaaa

SEQ ID NO: 373564 - DNA, 436 bp, Homo Sapiens
gatgttgtctgtaaaaaccatccaaagttccactttgaaggatctgatggctgaaggtcggctacagtccagatgtttttgcacccagctgaagttaaggctagcaaccctttcctggagagagcaatgaagaagggggtgcctgagagcagcttcagcaaaacgcttagaaacaccatgaacaaaacaagaacacagtttaggctgcctccatctgaggctgtgctttttcctaacaaaggttgctagaattcacatcaggtacaaagaaaaaacattaaattaaattctctgggctccagctgaacaatcaattctacttcagtggtaaagagatatcccaagatgtccatatcctggcaggtgtgggggaacaggcaggatgaggaagcccgatacagctgctacttttccaccctgggccatcattggagta

SEQ ID NO: 373565 - DNA, 414 bp, Homo Sapiens
tgggttcagtgatcttcccatctggtctcccaagagtgctcccacagtggtgtgagccactgtgcctggcttagtcaaactttaatatgctcaggaatcaccgagagctgttaaaatgcaggctgtgattcagacgatccagtgtgggacctgagattatgctggtctggcgagacacaggctatgctgatgctgtgcagaccacactttgagtatcaaggatctggtccatccctcagcctccgtgcagtccatccctgaagacaggcttatttttaaatgtggaaattcccagctcttgacgggggacgggatgagaagcagaaggtttgctctgccagatcgttgggtggagaaaactcctttcagaccaggctagctgtggttcgggctgggctcttatttgcgaaaact

SEQ ID NO: 373566 - DNA, 503 bp, Homo Sapiens
  misc_feature (54)..(221): n is a, c, g, or t
tccataaggtgtgccaaatagaatatggcaggtccttacaagaagaaattggannnnnnnnnnnnnnnnnnnnnnnnnnnnnnnnnnnnnnnnnnnnnnnnnnnnnnnnnnnnnnnnnnnnnnnnnnnnnnnnnnnnnnnnnnnnnnnnnnnnnnnnnnnnnnnnnnnnnnnnnnnnnnnnnnnnnnnnnnnnnnnnnnnnnnnnnnnnnnnnnnnnnnnncctgggacactaatatactaagtctccccttgccaccaatgacagatgataccacccagcttggttcaccctattccttctgccaggtatgcccttctgtcctatctctatctggtgaaatccccctcatcgctcaaagactagccaagatgccacctcttcctggaagacctccttactgccttccctctttagaagctcttccccagtcccaggttcccaaagcaaatgtaggcctctgtgagatcctgcaagactgagagcccttacgggtgtgcactg

SEQ ID NO: 373567 - DNA, 505 bp, Homo Sapiens
agtctgtttggaacactattccttttagagctgatcaaatagtcaattacagcattatagggaggtagcagaatcacagagttcctacaaatacactgtgatgtagcgttggatctttagatgcctcttgtctccgaggacttgcgcaaggaggcttggctttataaggatattattaggttgatgcctcattctctcaatttacctgccaggcaagagacagcactcactgggagcagtctggccagaactagccactgggaggtgcactgaagaccatgctgcaggcttgactttgggcatacgctactctgagcctcagtctctttatctatgcagtggcaacagttaattcagctctactttctaaagaccagagaggggacgtttactgagctcaggctctcaaccttctgcaccaaaacttccaatcatatgaaagcctggcatgccagcaggcctgatttattacatggtgagatgtggccctttaacttatagaggg

SEQ ID NO: 373568 - DNA, 520 bp, Homo Sapiens
  misc_feature (63)..(92): n is a, c, g, or t
ggtggcgttcagaggatcccctccagtaaggtgtgccaagctggtcttcaaacagtcatttcnnnnnnnnnnnnnnnnnnnnnnnnnnnnnngcatgagctatcacacccagcccaggtcttaaaaatatgttcatatccttaaatttagattccacagttctgcttacgcaaacaatgaatagaatacacttaaataaagactgattggcatttgagctgagctgaacatcggcctagtatggatacctagtgattctaatttggttaagctctattttctcaatatttcatggacatttcttatagatgagtagttgaaagaaaggtagacggtctagaagctacttgaatttggcctagtacctatgtataattgaagaatagttgttggcattttaggcatatacggtggtctgcctaatttggatcatgaagcctgcaagagtgatatagggactctaacagcctcatctcagtgaaatagcataaccatttcatttcccctgccatagaagata

SEQ ID NO: 373569 - DNA, 495 bp, Homo Sapiens
gcgatctagaggatcccggcggtctcggctgaaccaggagcaggataaacctctccagtcggtggcatggggttagaacagcagatgccaaggtaaacatgcagccagtgggaaagcagatgcggccagctctcagcatccggcagagagggagtgaggcatgggaagtatgcctcgtccagaaggatggagggggggatgcccatgatcagatatccccatcctctacagaagagaggccaacatgccatcctcaccaggtctgttcagggagtctagcttctgagttagacactgacagtggtgccaggatgcaagggcagtcagccattaagagctgggccctctgcagttcaaatataagccagaacctttaggagggccgaaatatgggagctcaaatgtctctcaaagccatcgggcccttgaaaacaactgttagagttaaaaaggataatataaattaatatgcctaggaagaacaaatatcaattt

SEQ ID NO: 373570 - DNA, 246 bp, Homo Sapiens
tccataatgtgtgcccaacacaaagaaaacgatttctatttaggaaatggcaaagtacaccctgatatgtatagggttaaatggacattctttttctgagggaagcagcccggtgactgtagctcaaaaaaataatttttaagagtagaagtcatcaaaaaggaacaagcaaaaaagtgctataagaagtttgattcttggtggatactgggagataatccttcccttggtgaaatatgttcaatt

SEQ ID NO: 373571 - DNA, 346 bp, Homo Sapiens
ctccataatgtgtgcccatccaactggccaagtgaaaaatgtcaagaatgttcaatactggaggtgtggagaaacagagcttcttgtatactgtgaagatggaacagcttttctaaacagcaactaggccataggcatcataatgtaaaatgcatcttttctttgacttaccacctccatttctaggagtgggtcctactgatcttgccatatgagaacacagagtcagaccaacaaggacgtttccttgtaaccatgtttataagagccaaaagactgaaaaccatgtaatgtccctccatgaaatacacataataagactgtgtgagcctgggcacattatgga

SEQ ID NO: 373572 - DNA, 497 bp, Homo Sapiens
tagctgttcagaggtccccgcatcgggtgtgccagatcgaggttgataaaagaaagcctagagggaaagagcttaacaggcgccaaagacggcgggtttaggagcacactgtaggcaaaagaagacaatggggagaaaagtgacagtaaagagatacaatgaggtttaagagagaagcaatgagaatggaagaaatgatggggtcaggtacaaaacatgtagagtgttaacatcacctcccaacactgcagagagagaataggaacatggacccttctttcagagtaggtttatttaacaattggaaccatcaccctggtggaattcaggatatatttctgaaatgagttggctcttacacaagggcaaatatttaggcaggtactaaatgggtgcatgtgcctttaaataacactgtcttaatcctaatagaatttcaactttctccttctacttttacttagcatttatcatcttctaagtcggtaattttaatt

SEQ ID NO: 373573 - DNA, 772 bp, Homo Sapiens
tccagtaatgtgtgccattaagagttggtatctggttggtcatttttcaagggtaggggtacttttaaaaaacataaaatgtagtattgtaaaataaatatgaaacagggtcaaaatttagactatacgagaacctgtcccattccgtaactcagtgtaatttacactgcaggaaaaaaactatacctctcaaactttaagatcagccaatttcccctaccccctacttggagactacaacataactagcacttccaactattacaataaaaagctgcatgtacgaagagctgtgtaaatgaaaacatggttaatgcctcagtcgctgcgcaaacgtgacttcagttcatgtctaccgcccttaaatctacctgagctacctcacagatagaacctggcaatttaaactaattaatcatgacgcgctgtgaacatctgccgctgtccatccaatagtagtagacacttgtgctgaggattctcccatctgtacacaatggggaagaagataatagaagtcaatagtaatcaaaagtactgcatagccacattgtttaaaggactgaatgccagctggactggagagaggaggaaaaggaagggttccaatcagtaaaccccctgaaattactacagaaccaagaaaatactctccctgtcgtgagcttttgtaaagctatgtggatatgaagataattatttaaaacttctaagatgttataaggggtgtccaatcttttggcttccctgggccacactggaagaactgtct

SEQ ID NO: 373574 - DNA, 287 bp, Homo Sapiens
ttttgcctgcattcacaattacttttcacaaaggtgttggaaatggcatttttattttacacagatagttgcacatatatagagaaaattaggaaagtcccatttttaactctaaagggaacttttttctctaaaacttacttgtaaagctactgatacagatgggccgcatggttaggggaaagctcctctgtgaaaagagcatgtttattcctcttgtacattttcctcttttaactgctattaaacaagaaagcctacatacctgtttcaaaagccaaaaaaaa

SEQ ID NO: 373575 - DNA, 974 bp, Homo Sapiens
  misc_feature (816)..(816): n is a, c, g, or t
  misc_feature (896)..(896): n is a, c, g, or t
  misc_feature (907)..(907): n is a, c, g, or t
  misc_feature (926)..(926): n is a, c, g, or t
ggtgttctagaggatcccgtgccatagatgagagcagcagatgagtgacctccctgtcaaagtgactcacacagaaaccggcaaggttctgttcggaccagaagcacccaaagcaagtcagctggacgcctggctggaaatgaatcctggttatgaagttgcccctagatctgacagtgaagagagtgattctgattatgaggaagaggatgaggaagaagagtccagtaggcaggaaaccgaagagaaaatactcctggatccaaatagcgaagaagtttctgagaaggatgctaagcagatcattgagacagctaagcaagacgtggatgatgaatacagcatgcagtacagtgccaggggctcccagtcctactacaccgtggctcatgccatctcggagagggtggagaaacagtctgccctcctaattaatgggaccctaaagcattaccagctccagggcctggaatggatggttccctgtataataacaacttgaaacggaatcttagccgatgaaatggggcttggaaagaccatacagaccattgcactcatcacttatctgatggagcacaaaagactcaatggcccctatctcatcattgttcccctttcgactctatctaactggacatatgaatttgacaaatgggctccttctgtggtgaagatttcttacaagggtactcctgccatgcgtcgctcccttgtcccccagctacggagtggcaaattcaatgtcctcttgacttacttatgagtatattataaaaggacaaggcacattcttggcaaaggattcggtggaanatacatgatagtgggacggagggcacccgaattgaaggaattcaccactggcaagctggacttcagggtctttggaacanttcactatgtnggggcccccaggaggggtncctctttgactggggggacccccgttggcagggattaagggttcccct

SEQ ID NO: 373576 - DNA, 102 bp, Homo Sapiens
cagttagacagggaatccaatgattcaacttttctggaggtggcctgaggaactggcttatgtcttgcttgttctcagagcactgatggcacacattatgga

SEQ ID NO: 373577 - DNA, 498 bp, Homo Sapiens
tccataatgtgtgcccataataaaatgcaagctaccaagcaaaacttagaatttggggaagcttgtatccaccactgtgagcttgatgggcttctcaatatttacagacttttttttaagagatcagtggtgacattaatgaatgtgaccacatatgacatcaaatcacacggtgaccaaaaaccatgtttttgcaaccacagtgtcaatcaaaacataacactttaaagtgataagctcttcctactatggctactgatagtgtattcacccacttaacaaaaggacctactatgtgctacgttctgggtacagcagtggtaacagatttaaaaacccagacatggtccaaggagttttacatatgttaattaacttaatgctcacaataatgttataagaaatgtaacattaaaaacctcttttggtagttgtggacatggagccataggagtggagtaactggattaaggtcacaagcttgtaagtaatggaacc

SEQ ID NO: 373578 - DNA, 695 bp, Homo Sapiens
gagtatacctgacatatagtgtgtccatgaggaagattagatatcaagtcacaggcttattagcagagggagatgggatacaatgataacctagacacatatcaactagagtaatgatctaagaagaaaaagcaatcagagaggagaaaggaatatccacaaagaaagacagaagtagcaagtcagagtgcaatgtatcatattgatgaacaggagctgttatccaggacaaaggctcatgtgaacaatgcaggttctcacacaattggatattgcctattgcttatcttaaggtggatgggaggagacacacacatatcacatcaagtcatcaagcatcctgacttgaagtatggcggcaacaaaatataatgaagtcattaatactcaggagtcttacctgtactatttgggaatcatttgctaattccagagggttctataagaggaaccacattctagtttcacagagaacttcatcttggaaacaataaaagcaacataccccctgcccccaaccaatttggtttcttggattctggtagaattattcaagtcattattcctcaggatgtgagtttacaagcaggggatggaagaaaggtttgaatacttttttaaaaagagactggtttgactacttttttaaaaaagactgattacttttcatgtcctcaaattcttgacacttatac

SEQ ID NO: 373579 - DNA, 328 bp, Homo Sapiens
tcgaactctagaggaccccaatgaagaaaagagcaatcaagacccaaaaaatctgcctctcctcagctcaagaggaagaaggccagcctgctgttgccctctgtccctgcattccacagcaccaggctcttccctcacatccctctcctcacattcttaccttatatgattgaggccaaatatgcaaagccccgtcccccagccatgtacacagtagctgctggctgaggacactgctgccaacgccacaggccccagcgaacagccctgactcttatgtgatgatctgcttttgggtcctgtcactatctgcgcacacattatggag

SEQ ID NO: 373580 - DNA, 735 bp, Homo Sapiens
tccagtaatgtgtgcccaaattcaagatcgatgagttctacgtgggcccggtgcctccgaagcaggtgacatttgccaagctgaatgataacatccgtgaaaacttcctgagggacatgtgcaagaagtatggggaggtggaggaggtggagattttgtacaaccccaagaccaagaagcacctgggcatcgccaaggtggtctttgccacggtccggggagccaaggatgccgttcagcacttgcacagcacttccgtcatgggcaacattatccacgtggagctggacaccaaaggggaaacccgaatgcggttctatgaactgttggtcactggccgatacaccccccagaccctcccagtgggcgagctggacgctgtctctccaatcgtgaatgagaccctgcagctgtcagatgccctgaagcgcctcaaggatggaggcctgtctgcaggctgtggctccggctcctcctctgtcacccccaatagcggtgggacacccttctcccaggacacagcttattccagctgccgcctggacacacccaactcctatggacagggcaccccgctcacaccgcgcctgggcacccctttctcacaggactccagctactccagccgccagcccacaccctcatacctcttcagccaggaccctgcagtgaccttcaaggcccggcgccacgagagcaagttcacggacgcagacgcgcttaaggtaccgcacc

SEQ ID NO: 373581 - DNA, 452 bp, Homo Sapiens
tccataatgtgtgccaaggctccctcagtagtggcgctcatatccactgccttggtaagttttagagttgtgctagggaggttggcaaatgggcctggacattggccaggagtaaatcatcctcacagtttaaggtttgtggatggctcagctaggaaaacatgggtttggaaactttagtaagaaggaataaaggccaaactaggcaaaaagggaagggaggtagactgggcaaagggcataacacatatggaaaagaggaactattttaggatggcaccttgccaaatgcagtactgtgaagaggcttttgctgcctaaatatctaaaatgattttctgactatgcagatagcttgaaagtcttacaaaatatcacattaggttaaagagaatctaaggggatatgattatcagcccataatccttccacttgggaactgcctcgtgcca

SEQ ID NO: 373582 - DNA, 451 bp, Homo Sapiens
gaagtaggatttggcgcagatataagcatctgggtcttttaatgtctgcgaaggtaggctctggccttggtatgaggatctgggtctgtcaatatctgaggaggaatgaatctagtacaggtatgaggatctgggtctctccatgtctgagaaggttggctgtggtacaggtatgaggatctgggtctgtcagtgtctgaggaggtaggatctggccctggtatgaggatctgggtctaaccatgtctgaaaaggtaggatctggccctggtatgaggcttatgaggatttgggtctgtcagtatctgaggaggtaggatctcggtgcgggtacaggtttgaggatctgttttgtcagtgtctgagaaggtggtatgtggccctggtatgaggctctgggttgctcatggctcagacagtaagttctggccctaggagtgttttatcacgg

SEQ ID NO: 373583 - DNA, 515 bp, Homo Sapiens
tcagaggtccccgccagtacggtgtgccaccattaagaaaacggtgcatctcaagacttttatcacatactcgtaatatcagaggagtgtgaaccttcagagatctagggttaaaagctaaaggcatagctccagctacaacttttcttggtctacagatgtgtaaaatcttgatgcaaaaatctaccccaaatttctgaacaaaattaatattcagtattatatctagcctatagattctcttactctgggtgtaatgacagcattcccagtttaggaaactgttttaaaatctggtgtctgggttgtggctgaggcttggggaaggccagagcccccttggccaccacccctagggtgtcagctccaagcctgggcctgagggttggatggggagcgggtgagctggatcctgatcccagtggtcagtggccagatcctgggctgctggccagaaccctggcttggtgagtggctgcagctgggctctgctccagcccacaggggctaagggg

SEQ ID NO: 373584 - DNA, 393 bp, Homo Sapiens
  misc_feature (103)..(103): n is a, c, g, or t
cccataaatgtgtgcccattcccccctgtaaaatgatcacttaccagtttaatttctcacgttagcatttctaacatcacttagtgtcatagacctgaattcnttagagaacacaggaaattgagtacacagcagctcatttggcgagatgccaggaaacaccccgtagcggaggtacgggaagtgacgcacaggaaagagaagaattatcctgaccccacgggtgagagagccgaaggctgttggtgtcccaatccctggaggagtcattagttgaggccagctcttgaggcattcatttcctggctcttctagcctgctggaggccgtgaggctctgtgtagttctcaagtaaaagtgctctgggcacaccttactggacggggtcctcta

SEQ ID NO: 373585 - DNA, 270 bp, Homo Sapiens
ggttctagaggatacccgcagtaaggtgtgccagtggtcaggaagtgctacgtctggcagcagtgcattgcccatcctctgaatccggtaagtctctggtttcaatccttcccggtaaccacctaccccatccccagttccatggagcaggggaaacatccttttcttcctcattacattaatggtttcccttcctattattttctctggcgttttccatcggcttattttatttctcctgatcattaagatgaaacataattattatag

SEQ ID NO: 373586 - DNA, 468 bp, Homo Sapiens
  misc_feature (44)..(93): n is a, c, g, or t
  misc_feature (110)..(151): n is a, c, g, or t
  misc_feature (175)..(227): n is a, c, g, or t
tccagtaaggtgtgcccaaaagtagaaataaaaataaaaccaannnnnnnnnnnnnnnnnnnnnnnnnnnnnnnnnnnnnnnnnnnnnnnnnncatgaactggtctcagnnnnnnnnnnnnnnnnnnnnnnnnnnnnnnnnnnnnnnnnnngtgtggcctgctgctcccagccannnnnnnnnnnnnnnnnnnnnnnnnnnnnnnnnnnnnnnnnnnnnnnnnnnnnccacgaagcctggctaattttaaaattttctgtagagatgggggtgtcggcgggttgggccgagggaagagggtggtctcactatgttcctaggcctggttgtgaactcataggctcaagcaatccccccatctctgccatgcagccaatacaagatttttttaaagttcctcggagaggtgaggaggctgaggtgcgtgttcaccgactcctgtccctcttgggttgaaggtggctcgtg

SEQ ID NO: 373587 - DNA, 195 bp, Homo Sapiens
agaggatcccccgtccataatgtgtgcccagtaggtggtaggtagaaggagcttagtagaagtagaataaaatatttaaagcgcggatggaaataaaacgcgcagtgaggtcgcggctggaaggaaagaagtggggagaatatgagagaaaatcatattttgaccggctgggagaaatctagtagatgcccgacg

SEQ ID NO: 373588 - DNA, 466 bp, Homo Sapiens
  misc_feature (52)..(147): n is a, c, g, or t
agtatcggggacttcaggcacactctatcacacgtgggtaatttttatgcgnnnnnnnnnnnnnnnnnnnnnnnnnnnnnnnnnnnnnnnnnnnnnnnnnnnnnnnnnnnnnnnnnnnnnnnnnnnnnnnnnnnnnnnnnnnnnnnnccaccatgcctggcaggaaaatattttttctcttcctcctttttcacttgacttggtttggggctaaacaaagttatggtgcttcccccacacctaagtaagttacttctatgctgacacagcgaatatcggatattccaccctctcaagagaaaacagtcagcagttttttaaaaaccaagtttaaacgcattcttgccaggctcatttttcttttcacatggtcttccttaatattatcttccctagttacccaggttcagctgacaacaaacaaagctgcagtaaaaccgtttcgatctcagaaatggcagaagcc

SEQ ID NO: 373589 - DNA, 529 bp, Homo Sapiens
  misc_feature (12)..(12): n is a, c, g, or t
  misc_feature (29)..(29): n is a, c, g, or t
  misc_feature (62)..(62): n is a, c, g, or t
  misc_feature (110)..(110): n is a, c, g, or t
ccctgtgaaagntgcctgttgggcaacanaaccccacctaggaaacccaagaagtttgaacnggggaaccgtgtgttcaattgcaactgggcctaagcaatacggctggnccccgggtggctgtttgggcctaaattcccccatttgaaaccctaaagggcccctcctccgtgcttgagcacagtctccctccctagtggccctgcctcaacctgctggcgggctgtctatggattggggtttcacctaatcatgctgtgtttcctttcttttctttctgtacattagactacttgggaggtgctgtgtgatccttggatgaaaaacatatatttaaagaaatggagagtgtttattttgtttgctttttgaggcatgtgctgtcaaatgttagagaccaaacttagtgattagaggttggtcctttgaccttcttctcttaattgcttttcatgtaatcatgataatttactcaggtagcactccagtcacaaacaatgtcacagagatgaaacagattcaaagaaaa

SEQ ID NO: 373590 - DNA, 291 bp, Homo Sapiens
cactcctgatcacgtgacaaggaatcttagaatattcagacatccttatgacattttatatctgtactaagtttaatcttaattctatttaatcttcctaagaatcacatatatgcttgcacttatttatgtcttctttgaaggacataagacttctccttcaaaagagttttaagattttttttatagatgctcacactatttctaaatattttgccctttcattcctttataaatagaactgtttcttacattattatcttttctagtcactggtaagaaagctactga

SEQ ID NO: 373591 - DNA, 485 bp, Homo Sapiens
gttacagtctcccactctacatatgcactcacccacgcactgatgtacacatttatttcagaacaagcttcctgagtctgtgcaagctgtggattggccagtgctgctccaacttggggccaccccctcctctcatctcccctcagggaggggttgtctgggtgctctctcaaaagtcctgttctccttcctcctccagccttgccatcctgcagccaggtggccacagggcaatgacttcatcctcccaagcccgtgtttcctcaatctgtaaatgggggctaatggttcccaccctgcttgcctcacaggggggcaccaagcattcccatgagataagggacagcagagtgttttgtaaactgcaaattgttttccaaacaggcaaatggtgctgttgttttcccagctatggaactcaagaattcctccacccacaagtaaaccctgtccttgggtggaaagggatacagtggtgatagtga

SEQ ID NO: 373592 - DNA, 283 bp, Homo Sapiens
tcggccggtccttcatctcctcccactcggggctaagggctcagaatgaactggaacccaacctttgtcaggggagcccagcaatgtctgcacgacatacgcccccaaacagcgtgggttcaggaattgtaagtgtttgagaaagaaaaactgttaggattctagtttcgttgaaaagccattttgcctttgtcttcctctgggcacctgaccatccattcttagcccacctgagtattgagcatacactatcgtctctgcagtggaggtgggaggagaggaa

SEQ ID NO: 373593 - DNA, 192 bp, Homo Sapiens
tgacacctcccacaatcctggctcactggtggttcatttctcccctcagtgggcatttcctggaagactctatcctttgagggatctaacccacagacctgaccacgagccccaagtcctcaggcttcacttccccactaggcctgactacgcaagacagagcctgatgctgggggtgggggcaggctgtgg

SEQ ID NO: 373594 - DNA, 226 bp, Homo Sapiens
tggtgccttcatctcgtcccacctccaccaagtaagtgaatcttaactgctccacttcagaatgctgcctttccccttaaacctcttcttcattcttcccaaagattaactcaaaaaatatttattgagggcaccctacattctaagcattatatcagaacattaaggccaggcacactggcttacacctataatctcggcgcttagggaggtgggaggagaggaa

SEQ ID NO: 373595 - DNA, 436 bp, Homo Sapiens
gccacactcgaactggccttgcaaccatgcccctcccactgtctctctctgaccaggcttcaccctggctcatgaatgttcggcttactctccaccccatcaaggacgtcctccagcattgaaggccctccacaatctgtcctccatctaacttcgccctccttgttctacctggccaagttctggggtctgatggaacccctgtgaaggggttgagaaggggaaagataaaggatggggtgagggagagagtgttagcacagcctctgatctcaaatggaaaagtgctttgaaaagtgtaaggactttgccaaaggaagttctgatcgctcttcctgtaagtgtctgtgcacccatgtacctgtgggaatgacacccatgggacaaggcttctttcagggtgtgtgtgtgggcacatctgtgtgtcggaatgggt

SEQ ID NO: 373596 - DNA, 474 bp, Homo Sapiens
aaagagttttgattttagtgtgagaggagccactggagggcatgatcagagtttgactcccaaagaccattccagcaccaattcagggcatgggtctcaagatctcccttggagtgacaaaggcagggcaggcaagccagtgcacgcagagacagagtttgtccctctttaggaggctgaacaggtataagggtggcaggagagggaggtggtggcccactagaatcactggttcttggcatgggacctggatggatagaggggccatccacttaaacacaggaggagaagggaggtgaaggccgagtctgggaacaggccgagtctgcagcccttcctgctggagagagggtctgaagctcaggtccggctagaggtcagcaggtgtctcaagaagcccatggaggagtgaggtggaccaggacagcacgtgagtacagaaaagaggggcagcaaccagcactagtctcctgc

SEQ ID NO: 373597 - DNA, 323 bp, Homo Sapiens
ccctgactcagcatctgtctttgggatcccagccggagtcacctccactggctcccaaaatgtggccagtacccaggccttactttgcagcccaggcttctcctctgagcttcagccctgggggacccagctgcctcaaggacaactgtccctgtgtgtcctactggtcccaaaggctggcacatcccaaaccaaactcttcaggttcttaatcctccttagggttggctgcaccatctgcctagaggtcacctctatcctcccctaccccttcttctacactgccaatcaagttatttttcctggggttatggagggaagaa

SEQ ID NO: 373598 - DNA, 395 bp, Homo Sapiens
ctgcacacctcactcagagtatgtgactagatataggacaaaacagctagtttcaggccgcccccatgacacagagctgacataaccacagccctactacctaacaatacccctactagagcagctgacttcccctctgagaagaacttaggaacttgtgtactaaaccaaagagacgaccagataaggactccaagcactctgatcagcaagtccaccctggttcctctgtcccaagccaggacttaccctagtctagaggaagttctcaccaagcatagcctaaattcagctatcacttagcctccactttgagcccacatgaaggttggcagaagaccctgagggaaggggatattaatcatcttctctctggtcaggagtagctgatagga

SEQ ID NO: 373599 - DNA, 413 bp, Homo Sapiens
agcgcaccgggaggatgtactcaaacatgcatcccagacaaatggaatgataaccaaaaaatcagtcgaacaaagacacagatcctgtgaaaagccctcctcttcctgaacagaggagaaataccctgcaattcagcagaaccaaaatccatacctgccctttcaatggaaacacagaaactcggttcagttccgtctccagaatcgccaaaacctactcctcttactcccctggagcctcagaaacctggctctgttgtttcgtcctgagctacagacacctcttccttctcctgagccttcaaaacctgcctctgtttcttctcctgaacctccaaaatcagtccctgtttgtgagtctcggaaacttgcccctgttccttctccagaaccacagtacaacctgccggtgg

SEQ ID NO: 373600 - DNA, 671 bp, Homo Sapiens
agaaggtataacggggggtgtcatgcaagagtcgaggtcttaacagactggaactagatcgtctcgatctgtcagcccctgtgcctagcactgtgtctggcacacatgagacatggtggtacggtggatgggacttaaactaaactgggtcttgcttgatgggtcacaattccttaaaccaagagagaaatagctggtgccaggcaaggtaggtgctgtgagttcttgggagggacagagaaagaggatgtatctgtgtgtgagcaagggagaccggaagagttgtttgtgggaggggctggcatatgggctgggccttcatagattgttgacaagcctgatgaggagagacgacagagcagggccacaaatgactgcccatggggcctgggactgggggaaggggatgccccaggctggggctgttcccctgggcccaagttaggtgggaacaaagaccctgtgttgccaggtcttccaattcttcagagaagcagaaaatccccccatccacttattcaccacggacacgtgccccgccctggggatacagcacacggcgagacactgcagtcctcgccttctcagcctgttaggtacaacctcccaattcaaagtgttggcgactagttcagaattttaaaaacctctccgcgagccaaggaaaatat

SEQ ID NO: 373601 - DNA, 383 bp, Homo Sapiens
  misc_feature (47)..(81): n is a, c, g, or t
ccggccagtgtctctatctatgccacgctgctcctagagttaaatgnnnnnnnnnnnnnnnnnnnnnnnnnnnnnnnnnnngacctatctacaagatttcaaggctttaaagaaaggagctgcttcaggaagagataaaatgactcgaacgctataaccttcaaatgcagactgggagaagaggtatcagctatgcatgagctggagaggggtgggatagatagagacacaggtgataaagaaaatacagcaaaatgtgaaccctacaatctgggtggtggatgtataccctgtagtagcctcacctggggaaagctgccttgcaacaatgaggctgcccattctccaaacccaccccagcatctgaccgtttcgggtaccga

SEQ ID NO: 373602 - DNA, 579 bp, Homo Sapiens
tctagagatccccctcgcgaacgtgttatccctctcccaatctctgtgtgtggttgaggtggcagagagtgggagagggagacacattctgagaagatgggaaggttgtgagctaggcagacaccacaaaaggtgttttatgcaggagaatggtagaagtaggggttatcactaaaatctaggcactaggtgttgagggcctgagctaaggttagttaggtgcagtgtagacagaaagaagaaagtggatttaagagatacttaaaaaataagtaaacataatttgatacctcatcaaatataggaggcttgtgagaaggaagaagtctacatttcatatttaaattactgggaatctggagaagaaatattgaggaggattgagttttatggcaaagatactgagtttggtttggacacgctgtatttgtggtcctatggaatattaagtattgctgttcagtagacacctgaatgtaagatttggagttcaggagtgagatttccactgacgatttcgggactcatctgggtagagttagcagctgaagctgtgaatctggataacacgttcgcgag

SEQ ID NO: 373603 - DNA, 882 bp, Homo Sapiens
  misc_feature (814)..(814): n is a, c, g, or t
  misc_feature (822)..(822): n is a, c, g, or t
  misc_feature (829)..(829): n is a, c, g, or t
  misc_feature (845)..(845): n is a, c, g, or t
  misc_feature (850)..(850): n is a, c, g, or t
gcgcagcctccttgctgctctctggtttggttgggaggtgtgtttacctcttgctcctcattcctcccctgcccttttctctggaatatctaagatgtgagctgcattgactctgaagacgtttgaggaacaggagtgggcactgatagaaaggacttcaacgccagtgacctgtgtacctccagcagaagaaaatcaggtgtctggtcttgggggcactgtgctcacctctagagagaagaaaaaggctgggtttggacttcatgcctcctcactggtgaaacccagggatgtagatagagggccacacccaccctgtccagagtagagggcacctgtccacgtggccagggcccattgctgccaccctcgaggagatggaaccctgtgatgcaaaagctttgctggtgtgtttggggcataaggcactgctccccttccatctctagcagatatcatcttctcagccaattctgtaggacactgaggctcttgtttgacatggtgtgtggatggggacttgccccaagactgagcaggtctgccctttcattggggtgtatacatatcaggggaccctgaggtgggcaccgtactcagtgttgtgatgcccccacctagggaggactcaatgctctttgtatgccttatgcagcgctgatctgtccctcggagttcccaggttcccagctccccaccctgcaagccctgaagcctccagcaacgtctatctccaggagagcagggagcctatgaaagtgttccggcagaccagaagttgccactaacacacgtctaccagtaacccaaatgngacacttnagacctnaagttttagaccaagngcttncttatctcccacctatcatttttaaaccaagg

SEQ ID NO: 373604 - DNA, 482 bp, Homo Sapiens
  misc_feature (168)..(369): n is a, c, g, or t
tgtgctaatacgataagatatttgttgaatgaagtcatgattgaatgaatgaatagacaaatccacagaaagaggagctcagttaacattattccctatccttggactctcaactgagggaacgattttgtagtagaatgttttgaccaagggtacaccctctagggnnnnnnnnnnnnnnnnnnnnnnnnnnnnnnnnnnnnnnnnnnnnnnnnnnnnnnnnnnnnnnnnnnnnnnnnnnnnnnnnnnnnnnnnnnnnnnnnnnnnnnnnnnnnnnnnnnnnnnnnnnnnnnnnnnnnnnnnnnnnnnnnnnnnnnnnnnnnnnnnnnnnnnnnnnnnnnnnnnnnnnnnnnnnnnnnnnnnnnnnnnattttgttgcaacttaaaggattcacttcaattttatttattttttaaaattattgtttcagaaaattcaatgtaggtattgaagggagtgaaaagaaatcccatgattaaaa

SEQ ID NO: 373605 - DNA, 363 bp, Homo Sapiens
  misc_feature (322)..(322): n is a, c, g, or t
tcagagctggtttcaaagttcagctgcagcacatactttgggccagctattgggcttcataggacctcaggtttggcatctagaaatgggaataatgatacctacctcctgagagataaagggcagaacaacaatttcagcaaggctctatcatttcagttatccttccctgctacagtgcaaatctctcttaaagactgtagggctggcttccgtgaatcaaatagaaacagttacagcataagcctgggccactgtgttgccttgggatatgcatatcacctgttttaatcccaggatttgactttcctcctagtgctgnggctgattatttaatttttagataatcatgtagcacatatc

SEQ ID NO: 373606 - DNA, 424 bp, Homo Sapiens
agaaaacgggtgcgctgacacggaggaaaaggacctggtgaggccttgtttcctcctctgttttagagacagtgacacaggagaaaaactagaagaacccttgggacttaaagccaataactgcttctttgtttaacataaaggcagtcttgagaaacagctaccgcaattgcagacccggcaaagggcccaatgccaggagactcattgggtgggagaaagagcccatcacagtgccacggatctgagcgatgactcagggaggagaaaatccaagtggggactatacagccgaaaggtgacacacacatatcagcagggaagctggaaatgaaaggatcaatggaattttatttgtcacgcagacaccggattgacaaaatattaaaagacttgacacccaagggtggctggatgctgggaa

SEQ ID NO: 373607 - DNA, 567 bp, Homo Sapiens
  misc_feature (392)..(463): n is a, c, g, or t
tgaatgagaaaaggaaaagggaagagggttctgatattgaagatgaggacatggaagaacttcttaatgacacaagactcttgaaaaaaacttaagaaaggcaaaataactgaagaagaatttgagaagggcttgttgacaactggcaaaagaacaatcaagacagtggatttagggatctcagatttggaagatgactgctaattccagtgccacagatgaacccacaaggacatagctgttccctaacttggtggatggctccagtttgcttttaacgaaaatcacaacttcaggagacatctgaaaagaatgatgtctctgaaagctgtcctttcagatgagggagaaatgaaggatttcacacttcagaatattttactaaaaacatnnnnnnnnnnnnnnnnnnnnnnnnnnnnnnnnnnnnnnnnnnnnnnnnnnnnnnnnnnnnnnnnnnnnnnnngtgctttatgttggtgattttgatttttgaaatggccccgtgatgtagtgcagtctagtgttcctgggtgcaagaaggtcaaagtatgccggggaactctagag

SEQ ID NO: 373608 - DNA, 379 bp, Homo Sapiens
gatgcgctcttgtgctgaagcgctccgagcagctagtttgaggatctgtccttcttttattagttcatttgaagggtttacaatgtcttcttcttctcccaacatttcataaatctctaagagtttctttaggttctccattttccttattgcactattagaatggcttgctgctgtagatataatttcaagtgattttttagcatcattccagtccagggaatcaggaggcaatttccttagatagtccttaaggagcatctcataccggggaatccgctgaacaggttctagcatgtgatgctgcaaagttaagctcccacagattttctgtttctgaatttcttcaaccactgatttgacctggcgcttttctggc

SEQ ID NO: 373609 - DNA, 459 bp, Homo Sapiens
  misc_feature (53)..(53): n is a, c, g, or t
gagagttatgagaatagggcagaggccataattaaagaaatatttgatgaaanctttgcagaactaaagaaaggttcaagtcttgagattgtcagtgcttgtcgagtacctagtaaaattgatgaaaagagactgactcctagacacatcttggtgaaattttggaattctagtgataaagagaaaataataagggcttctagagagagaagagaaattacctcccaaggaacaagaatcaggttgacagcagacttatcactggacacactggatgctagaagtaaatggagcaatgtcttcaaagttctgctggaaaaaggctttaatcctagaatcctatatccagccaaaatggcacttgattttaggggtaaaacaaaggtatttcttagtattgaagaatttagagattatgttttgcatatgcccgccttgagagaattactggatagaggc

SEQ ID NO: 373610 - DNA, 347 bp, Homo Sapiens
gacatacgggggcagggaggaggctgagaagatgcagattaaataaaggtatggaatggaaggcctgtgcattcctggggcatgggtctaaggcctccactgcaagcattatgggcccccatggttcagggcacgatgaggggttctgggaagggactcagaattgggctccagtgttcccaggaaccaagtaagcagaggagaggaaacctcccctgcctagcctggggcctctgagactcaagtgtgaggcgctctgagcacctggctcccctgactccggtatctgggcctggggcactgctaaggcattgtcaaggtggcccttggtccagctcagtgggaca

SEQ ID NO: 373611 - DNA, 611 bp, Homo Sapiens
  misc_feature (554)..(554): n is a, c, g, or t
  misc_feature (574)..(574): n is a, c, g, or t
tcccaaagtgctgggatgacaggcgtgatccaccgtgcccagccgggaaatccattttttaaaataaattcaattatgtcttgaatgtactcagaaaacgagctgtttaaaatgtcccattgtgactgtaatgtgaacaatgacctctaacttgtattttatttgggcaaggatgggggatgtgcatcaaatcttcacctctggggatttcctgaggcttgggtctacttgggctcaccctccacctggcatccccaccccactcctagatattaatacaaatctagccttgacaccgcctactgctccaccaccgcctacgtttttggccatcagagccttggagtttacagagcagaagccatgacattggggagcttgtataaaaatcaatgatcagaaccccacattttagtttccttttgggggagaaagaggagggccgtgggaaggaaaaggggtgtggcagctgggagcgtttatttatgttctttcttcagcgggcaggcattgcccgccttttccacctttttccccgccggggcacagggagnccagcagctgggagcgtagntttgtagttttcagggggaaccccccaccccaggatt

SEQ ID NO: 373612 - DNA, 240 bp, Homo Sapiens
gaatacgatatcgctgtcaatctactgagggagaagaataacatttttaatccccattttaagagcctgacaatagaagagtaacaaagaccttattggcaatcttataatgctaaggttctaactcttgggcttcttcacagatcacgagcagaccacactaccttaggaaatctttaaaactgctttataagagagtagccttggtaggcaaaaaaaggaagataagaatggaaactt

SEQ ID NO: 373613 - DNA, 440 bp, Homo Sapiens
  misc_feature (70)..(70): n is a, c, g, or t
  misc_feature (134)..(134): n is a, c, g, or t
actgcctgaaagtgcccaagcttggtttctattcctccgagagaatgcaacaccttgagctaaagagaanctgcccaggacagccctggcctcattcccatccctcctagagggggtgtcctgccacactagcncagggcgtgtccaccacatctaaaacccagagctcactgctgagtcctcagctgtggtgcaagtggggcaggcatgggagactctatctgccctgggcagtgctcctgagcccagggagaccagtttgaatgtccttctgctgccaagacagaaagcacatggtatgcccagatgtgcactggatgtgactgaggaagggctgggaagctgccaatatccaaaaatctaatgttgttgtcatacagggagataaacagggctactagaaaatagcttatctgacccttttctgggagagaggggta

SEQ ID NO: 373614 - DNA, 210 bp, Homo Sapiens
ccaagggacggctcactgcaaccttgacttcctggcctcagatgattctcccaactcagcctcgcaagtagctggaactaaaggtgcaatgccaccatgcctcgctagtttggttttactttttttgaagagatgagccctcagtatgtcccccaggctgagctcaaacccctgggctcaaatgatctgcccgccttggcctcaaatgat

SEQ ID NO: 373615 - DNA, 391 bp, Homo Sapiens
ttacaccaccgacctgcacgcctgctacagcatgtaacaccaccgacctgtactcctgcaacagcatgtgtgtaacagcaccaacctgcacgcctgcaacagcatgaatgtgtgttacaccaccgacctgaaatcctgcaacagcatgtgtgtaacaccactgacctgcacgcctgcaacagcacaaatgtaacaccaccgacctgcacgcctgcaacagtgtgaatgtgtgtaacaccaccgacctgcacgcctgcaacagcatgaatgtgtgtaacacccccgacctgcacgtctgcaagtgtgaatgtaacaccaccgacctgcacgcctgcaactgtgaatgtgtgtgtcgagggttggctttagtgtatcctcaagagcagccaga

SEQ ID NO: 373616 - DNA, 187 bp, Homo Sapiens
tcggtacccagtgtgggccgcacctgtgcctaggactttgcaattttgcatcactgtttgttcagtgtgcctttatcgagtgtctttgtttcaagaggcacagatggagcccgtcttcaagtagctctcaagagtgtcagaaacagatcccacaccctgtactgtgtctgcctgaaacttaaaaggg

SEQ ID NO: 373617 - DNA, 311 bp, Homo Sapiens
  misc_feature (18)..(18): n is a, c, g, or t
caacgctgacctattccnctcataagaaaaaatgaaaccccttcatcttctcaccttggggtcgatttttttgaagttaggatcctcttcatccacctcaaaatagagttcggaggaggtgacagaaagagtgccctttactacaacagagggggccacaagctgagctggagtgctcaggctaacaggaccggcaagattctctaaatctttctcatccacggatgacagagtatcatcatcgccttccaggaggatctcgttttctgagttctgatttcctaaagcctgactcctgatgggggtaccga

SEQ ID NO: 373618 - DNA, 250 bp, Homo Sapiens
ctcctcccaccggccatgtgctctctgcccacttcgtccaccccagggaactccctcaggcccagagtccgtgctcagtgcactgttgttgaggcgactctgtaccttgggagcccaaactttttaaaaagtaggaaagcatggggtatatgcaggtgtgcatgctgggatttaaaacaacagaaactccgtaccctctgctccagttcaggtgggagagttggtgctcccgaaggtgggagggccaaag

SEQ ID NO: 373619 - DNA, 349 bp, Homo Sapiens
ggagaaggagaaggaaatttatcgctggcctgcgcgagagtccctgaaaaccatgctggctgtgggctggactgtggagaggaccaaagagggagaagctttggttcaacagcgggaaaatgagaagcttcgaagtgtgtcccaggccaaccagggcaacagctacagtcctgctcccctcgacctctcaaacgttgtgctctccagagagctccagggaatggtggaggtcgtggctgagaactatcacaatatctgggccaagaagaagaagctggagctggagagcaaaggtggtggcagccaccctcttctggtaccatatgacaccttgactgccaaggaaaaa

SEQ ID NO: 373620 - DNA, 210 bp, Homo Sapiens
actactttaaatatctgtcaccaaaagatgattttctaataatcctctatgaaacaaaggtttattcagagcaggaattgaaattccatgttgttatgcatcaatataaaattgatttagcatttctggaaagaaaattagcaaaatacatggagttttataactgtggtattctttgaaccagaaattccacttttaagaattaaccct

SEQ ID NO: 373621 - DNA, 409 bp, Homo Sapiens
gggttcttgactatgtagcgagctcttcgtccaacggaatgagatgttttatccaaagactcttcaaacgtggcatgcaaaatgggccgtaccacctgccaggtgacaaatgggcccttcaccttggtgttgaggacattgctggcaatgcggcacagcacaagcagcccatcctcctgcatagaacaggtgacacgaagccgcgtcatccgctgcagggcactctggtcggcttcatcatggtagcgcagccttttgctttttttctcctgggaactctcctttcttctttctcttgatcttcttcccagggtccttcttcagccgcttccgcttctggcttttcccacccctcactctccggtttcggtccagcgagggctctcggtccacctcaaactgctcttcc

SEQ ID NO: 373622 - DNA, 647 bp, Homo Sapiens
catggccatagctgactccagaggataaaactacgtcagcgagagagggaagaagatattggctatcacacaacctcaaaattcacccactaaacaagaacaataacactttcctacttccttcacaggatgagtgtgaggattaatttaggccaggtcaattataaggaactatacagaaggtattttttgcagagaaggtcccagctttaaagctgaagctatatttactctaaggatttggagaggtcactaaagtgtatgaggcaggccaaggaagactggaggagagagtggattctagaagggaatcaatccaattgggtgaatggaggactaaggtgagctcattgtccaggaccaatggatcaatattagtgggtggggtaatcgtattcatagtatgctagcccctttatgccatacttatgctgaggccctgggtagggaaagtataaaaattagaagacctgtttcactaaaatctctgtaagatgccgagaacataagacaacgcttctgtaaccaaagaatagtgcaaagcataaatctacctgtggggcctccgtttcctcaccccccattattcttcagaatactccaatcttcttgggggatcagccaatttatcctaataatagaaatga

SEQ ID NO: 373623 - DNA, 524 bp, Homo Sapiens
gagaaaaccaggaatggggtgcagatcctgtttttgaataacagcaccacaggcatcttttcataagtaaaacaccaacattaagaagtcttaaattttgaaaatcttcactctcagaagtcaagaaatgattattttcacaatgctggtttcagtggctcatggcatagctttcttttatttggtggtctttgctcctgtgtgctagggcacagggaaaggcctctgaataaattctaaagctattttatgctgctgctcaccaggaaaaaaaacatgcccagaagtttccagcttagatgatgaagttcaatgcaaaattcaggcttgtcttaaaccatgacgagacctagagacttttgttttgtgttttgagaataagtgtgatccttcccttctcttacataagctgcattgaggttaggtaatgagttcaggtctttagggtttctgcagaggcaagaacccagtccgttctctccgctctcgctgaagcaggttttccctcaggagtcagctatgag

SEQ ID NO: 373624 - DNA, 274 bp, Homo Sapiens
agggcacagggaaaggcctctgaataaattctaaagctattttatgctgctgctcaccaggaaaaaaaacatgcccagaagtttccagcttagatgatgaagttcaatgcaaaattcaggcttgtcttaaaccatgacgagacctagagacttttgttttgtgttttgagaataagtgtgatccttcccctctcttagataagctgcattgaggttaggtaatgagttcaggactttagagaccctgaagagtcaagaaaacagtcagttcaca

SEQ ID NO: 373625 - DNA, 304 bp, Homo Sapiens
aggaaaaaactgctttagggagagcgtaagtcatgcccatggcggttgcccgagcctgaaaactcaaatgtttctttctagatagggctggaaacttgaatctctggaaaatgcaaaatgcccccttcaccaccaagaaaggaccatcctggtccctgatccccgggggcacaacactgctgtgtgacaggggcatgacagctcccatgaaggagtccagaaccgagacctgtggagagaacatgagatgcccaaggtcacgaggtgagaggctcaaggtcacagagtccatcataagactcat

SEQ ID NO: 373626 - DNA, 368 bp, Homo Sapiens
  misc_feature (115)..(261): n is a, c, g, or t
gaagggcagtcagggaaggttctgccacagggaggtgcacatgtgtgggaggggccaactgagtctattttcaacctcacaactctgccctggccagcactaatgaacttagtgnnnnnnnnnnnnnnnnnnnnnnnnnnnnnnnnnnnnnnnnnnnnnnnnnnnnnnnnnnnnnnnnnnnnnnnnnnnnnnnnnnnnnnnnnnnnnnnnnnnnnnnnnnnnnnnnnnnnnnnnnnnnnnnnnnnnnnnnnnnnnnnnnnnctctggacagcaaaatatgctagaattaagaaatggcttttgagtactttcaggaaaacatggtatagacatatagccacaggtaagactacataactactggttag

SEQ ID NO: 373627 - DNA, 539 bp, Homo Sapiens
catgttgggctgcccttagcgccaggcacacacagcgcaccaacaagtctaccacagtctgacctaagccagtttcaaactcagacccagcctttagtcgggcaagtcgacgatactagaagaaaatcagaacccctacctcaaccaccactttctctcattgctgaaaataagcctgttgtgaagccgcctgttgcagattccctggcaaacccccttcagttaacacctatgaacagtctggccacctctgtattcagcatagctattcctgttgatggtgatgaagacagtgcatctgggggaggtgttgtagccattgacaacaaaatagaacaagcaatggatctggtgaaaagccatttgatgtatgcagtaagagaagaagtggaagttttaaaggaacaaataaaagaattagttgaaagaaactctttacttgaacgagaaaatgcactgttaaaatctctttcaagcaatgatcaattatcccaactcccaacacaacaggccaatcctggtagcacctctctcgctaa

SEQ ID NO: 373628 - DNA, 519 bp, Homo Sapiens
caacagcaactacttcaaatgttaataatgatgcaagactatgttaaggaagatgatttaacatacgcagctgcagaaggtttactaacatagcaccctaggagacatttcttttggatgaaatgtctgttgttccaaattgattttgcttatttttgaactcaggtttttttgtgcatatatgaaaagtgaaacgatgactttaatgtattagcttcattagcagaagaaaaaaacttcaccaagagttaagttattccagttttatgttagtattaccaggtgttttaaacagaaaatcaattaattcaaataatattttttttcatttatctcatgggatcaaaataaagcttgtggaagtttattttgtcacaggtaaaacgtctcatattattgtaaatgctactgtaaattgtaaaaagctcaacataggagatgaaatgatttgattttgcaggaataatacaaattttgtgatgctaaaaataaggttcttaactaaatcaagaaacctat

SEQ ID NO: 373629 - DNA, 746 bp, Homo Sapiens
  misc_feature (387)..(448): n is a, c, g, or t
gggttgtatgtgctggccaagggcctccaagtcccacggggaacgttctatctacacccgcagcctcctggcccttccctcccttcagctgctgcagcccacatacacctcactcacctcgtacacattgtacgcctcatcacttctctcctctctcagcttggtgagatcaaaggctgcggctgatgtggataaattacactctaatgtgaaagacattcagtcatgctattgctttacctcaggcatcagagttgggcaataaagaaaaggcttgtgcctgggtagaaaaggactccaggcatctttccagtgccctttgaatggagtcactccagcttctcctgggagctgttctgaagccactgggttcagtccagtgccccnnnnnnnnnnnnnnnnnnnnnnnnnnnnnnnnnnnnnnnnnnnnnnnnnnnnnnnnnnnnnncagcccgggggtctagttgcagggtcacatgtgtgattttgctctgcttcctggcgtgggagaggtagatgaagggaaacaaaaaaaatcaaactaacaaagagagaaatgggtaaaggaaaaccagaagggagagagaataggactggtagtctgaacacgtagatgacatcaatattttcaaccatctctgaaatcagttcattgctgtaagtcttcctaatgtatagggaaaagcttaaaaaacagtattgcatggataatcacaaattcattgacctttctttagaggaggaag

SEQ ID NO: 373630 - DNA, 340 bp, Homo Sapiens
  misc_feature (176)..(184): n is a, c, g, or t
gtttctaatgggcatggtgccactgtaacagatggtcatgggtgtagacagccaggagaggcctatgagcatcaagggacataagggctaaaggcaaggctgatctggaaccacctaaacatctacctttcctgtatgaattgagagaatatttactaatggattgactggagtcnnnnnnnnngttctttaatctaaacaacggctctcttgagattccatacctgagctgagcaggaataaactcttgtacttactaccactgcagagttttatatttggacaattggatagtacttacatgtcccattagctaacaggttacatttatagccaaata

SEQ ID NO: 373631 - DNA, 566 bp, Homo Sapiens
ccctttcatcagggcatgtgatgattaattttaaatgcccacttgattggattgaggaatacttagagaactggcaaagcattacttctgggtgggtctgtgagagtgtttccagagcagacaggcatgtgagtcaatgaacttaatgaaaaagatcccccctcagtttgataggcactatccgattagttcggggcctggatagaacaaaaaaaggagggaaaagcatttttttcttcctctctctctttgagctgggaccttctccttctcctgttcttgtacatcataactccaggctctttggctttgggactccaggatctaatactagtggtggtcacctcagtcctcaggccttagatcttagactacgaattacaccatcaggttgcctggttctgaggcttttggacttgaaccgagccatgctgctatcatccagggtcaccagcttgcagagtgcctgtcatgagacttctcagccttcataattgcatgagctgattctcctaataatccctctctcgctgacgcagttttatcctcaagagtcagctatgacc

SEQ ID NO: 373632 - DNA, 445 bp, Homo Sapiens
cagagggagagaataagtgaaagagaggctgaaagagacagagattacagaaagacacagaaggtgtgactggggaaagaaatagtgttaaaagaagtcagaaagttgaggcatgtcaaagatggcctatgaaagttgtaaaaaatgttataatagggaatttatgcaaggaatattgtataaaagtaattaggtgtcctaaatgtaaaactattaaagaaacagtttatgtgcaaagcatgtaaggaaagtgaaatatacttttactaaaagaattataaggaggcataaaaatatggatttttacctacattaaaaggttaaaaaataggtgctaatgaaaattcaaaaagaaaataaatattgctaatccaaagagaaatattatccaaaccccttataaaggaaatcttgctccatctgcatcaaacaacccattaagggc

SEQ ID NO: 373633 - DNA, 469 bp, Homo Sapiens
ggaattgataagtcttatgctaaggttccataaaattttttaagacactgccaaactgttttccaaagtggctgtttcattttacattcccaccagcaacagatgaaggcaagcattgatttctgaaattgccttagatagtggaattgaaagtcttcagctttggttacatttggtctttgaactgcaaccttgaaagaaaactgtgaaatacctaaatcatactatatactcttaaagacaaagaatgatgggaaattaattgaaataaatgaggtttagataacagaagggatttgtaacaagtaagtgttctcagggatagtattttcagctttcgtttgctaggaaattaaatcaaccaattaaataaaataactctccataaagatcagttagatttgccatatagattgttcatttacgaaaatgcactttgagagttatgtaacaaagacacttgtttcat

SEQ ID NO: 373634 - DNA, 678 bp, Homo Sapiens
cattcattagatagttaatggcgttccaggccggatgctgctcctgcgtcgtctcacccgcaagacatggattggctcttctccccattctgcagatgcagaaaatcgagtcccaaactggggaactaacttataagtgatagagaggagccaggattttggatgctggccttcctgctgggtggcttctagggaagaagctcaatgacttaatcaggatgatttagtccaagctggagagggagtgagagaggcccctttctggccttgggtggaggactgtagaagagttctttctctgggcagaaggttttgatgaagtcacaggcatttctctgaaagcctcctgagggtggaaatactgacagccccttggtcctcaccagtaacaacacatgagaggtgatgtggctcctgtgagagccccccatctgggctgctgagctctggagcccccagagctggaatattcctccctgcatcttcctggtgccctttgcgacagatggagagggggtgtgcgagaggaagggagtctaaaagtgttgtacggatccctcacgcgctcgcttgctgcttccaatggctccgtgcgacaggttattttcttatttgtagtcttggacagccgtaaggattaccccctctctccctgccgtagttttatcctcatgatcc

SEQ ID NO: 373635 - DNA, 513 bp, Homo Sapiens
agagggagctggctaagaaacagcagggaacagtgtatagcgtgctcaaggaacatgagcaagccagtgaggctggcacagagggtggaaggtaggagggtgaagatgacagagtcagagaggaacggaggggccagaccacacagggccttcaaggccaatagaaagatgcgacttttactcaagtgaaatggagagccaaggtagggtttggacattggagtaccatggcctgacccaaaattttgaaggagcattctgctgtggtactgagaaatggctgcagagaggcaaggttagagacacagggagttctgcgggtggttaccacagtaccccaggtgacaggtgacaggtgatggtggcttggacaaacatggtagcagtggaggtggagagaagggctgagattctggttatactctgaagctagggcaaaggtggctcatgatgcaggtgtgagagaagcaagttcaggtttttgaccagaaaaactgacaagattggagggga

SEQ ID NO: 373636 - DNA, 467 bp, Homo Sapiens
  misc_feature (76)..(92): n is a, c, g, or t
attgggaataaggcaacaatttcacctctcattacacctattcaacagtgtactaaaattcttagctaatgcaatnnnnnnnnnnnnnnnnngatatataggttgggaagaaagagacaaaactgattgttcacagatgacatgatgttctatacataagatcccaaagagtcaacgaaaaataactccttgaaataataagtgattatagcaaggttgcagaatacaaggctaacatatcaaagtcaatgtctttctatataccagcatgaacatttagaatttgaaataaagaacttaataccatttatattagtaccagaaaaagtaaaatacttaggtataaatctaacaattatgtaaacaatctcttagaggaaaactatacagctctaattaagaaattcttcaaaagatctgaataaatatagagatatttcaaattcatggacagaaagacattattg

SEQ ID NO: 373637 - DNA, 473 bp, Homo Sapiens
ttcctgtccctgctcgtgtgtaaggctgccatcccctcaacttgtgccttagatcccatcccttcttccctgatcagcacttcccctcaatacagaattatccccagcattgcctagcatgttgcaacatcctccttgtgaacgaaaagaaagaaaaaatgagcagaccttctttgagcccatatttgtcttcagctactttgccttctctctgcccctttctataaaaactccttgaaagaaatggctgttctgtaggctccacagccctacctcctgttctcactttcactcatcccacgtgggaaacatacgtcttcattgctttactgaaaggctcttcgtttgatctccgtcttgccaaatccaatggccagttttgttcttatctgattttttcgaaagcgttgacactccctccctcttgaagccccctctttcttagttttggttccctcatggccagttgtcaa

SEQ ID NO: 373638 - DNA, 524 bp, Homo Sapiens
  misc_feature (50)..(128): n is a, c, g, or t
gacccacctgctttgcgagagaggcagtgatctccagagaaacagaaccnnnnnnnnnnnnnnnnnnnnnnnnnnnnnnnnnnnnnnnnnnnnnnnnnnnnnnnnnnnnnnnnnnnnnnnnnnnnnnnggtctagatacacaagcagagatttattatgatacttggcctacacgattatggaagcctagaagtcccataatatgctgtctgcaagccagagacccaggaaagccggtggtgtaattcagtctgagtctgaaagcctgagaaccaggagaagacagatgtcccaactcaagaacagagatggaaaatttgcacttcctttttgttctgttcatgctctcatcagattggatgacgcctgcctacattggtgagtgtggatcttctttactcaatttactgattcaaatgctaatctcacccagctatggtctcacagaaatagtgttttaccagctatctgggcatctcttagcccagtcaagttgcacgggaaattaaccatcacaccaagta

SEQ ID NO: 373639 - DNA, 768 bp, Homo Sapiens
tctggcagggtcactggctgtgatcggatgggagagtgcacagctttcagatccgagagggcatcagctttgggcttctctttggggagcaaaggctcagggaaaaggcgctcctcaggtgatttctcctgggtggcggcagggacaggtgggagttggggcccctctgttgaggggctgtggactggaatgaacagaagagctgattcctggggagaccggatggggctggtggcttgggagggacctctctcttggtgcttcggtgaggcgggcagcttctcctcatcttccgacaccctcagctccagctctgcttccccctcagctgggcacggcaaacgcagctctctgtcagcatccgacgggctgtcagaccagtgctgatcatcatccagctcagcaccagtgtcccctgggtccccatcctctgctgaaacaccttctatctcagctggttctgagtccacatcttcctctaggtcattctcatccaatggggctgcaaagcagaaaggttcaaaggaaggaagaaaaggaggacagacagacaggctgcatcttcacgggggcgagaggtactgcctttctcagggcgctgccatgcaggccccaggagaggggagatgctgccaggcccagggggctctccacacgtagcatgggtgctggggggggcccggggcccccacacacaggaggtgggcatttctcaatgctaggggccaagtgggaagagaagagcggctgagccgactgtcatctcag

SEQ ID NO: 373640 - DNA, 367 bp, Homo Sapiens
ctaccactactgtcataggaatagagcatgagagaccaaatctccagaaggaagagaagaagaccttatgcctccaatgtcttcattccttgaccactttcctcatggtcaggtgaattcctactgaaatcctctttccggctcttctatccctaacagatgaaatcaacctactgaaatccaggtctactagtgaaataaaactaggcatattttttcactggatgaacatacagcatgaagacaggcacatattctgcttgataatttcctgttctgtacttttaacatttattttaaacccctgcttatcctggagcaatctacttctccatccaaacatgaagcaaatgtatactgattcctg

SEQ ID NO: 373641 - DNA, 465 bp, Homo Sapiens
taaatagagaaaggtggattacttgaatacactataggtataggtttttacttcaataaatactggtttatcttcagattttctttattccttttactttccataataataaatgatttactaacttcaataacgcatataaataggaaccttaaaaagtgatagtgtcttggtaatttctcacacattgaggcaggtttgacagataatagattagtttaaactaaagtttttattaccatcttagagactgtaaaagaagagtaaaacacactgcacatcaaggggctatgagaaagttgcaggtaatctcttttcaccttatgaaagcaatgggagttcaaatgcatgtaagacactgagccttgcacaataaatatggaacaaagtaataattagtttctctgatcacttgaaaataggttatcaaccacaataaataacttattttgaaaaaaatagttt

SEQ ID NO: 373642 - DNA, 520 bp, Homo Sapiens
  misc_feature (79)..(79): n is a, c, g, or t
tcatagctgaatcttgagggtaaaactgcgttagggaaagaggctaaatccagctttctctatatctgtttccagaaanatctattcagacagctcttttagaaaatgtatgaaagagtgaggactaaagttaagaaccagagaatatgggtaagaagaatgagtcacaggacaattagcaacactttaaacaattttttagaatgagtggagtgttggcatgtacccagagttactatctgcaggaataaatgaataacattacccaaattctgccatctgtatttggacggtagcccagattaggctaggagcctttgagggtggcctcattaagtagcacctgacatccatttctttcattatcttcttttctcccttttggtcttcgtttcttgttccctgtctcctccttttccctcttttaaagctgtccttcctttagacttgccaatcatcatcatagatgcaggcccagtccctggaactcgaggctaaaagaggtttctggttgctaaca

SEQ ID NO: 373643 - DNA, 708 bp, Homo Sapiens
  misc_feature (432)..(432): n is a, c, g, or t
  misc_feature (447)..(447): n is a, c, g, or t
  misc_feature (458)..(458): n is a, c, g, or t
gaagaaaggccttagtgtgccccagcagtctggctgcgtccagccaccatcacccggaaggatgcccacaaggcagctgaccctgaaagcagcctccccctcatggagagtcagcagcttgggcagccacttccaggccagggtggtggcttctctgcagaccagctgaggggaggactcctgggtggacagcctttgacgtccaccccacgctgatgcagaagctcccagaacactcaggaaacttctccggacagagccctccttgtcaacttgaggccctcccaaggccctctactgccctctgggtccagcagagggagtggaggaagggccactgcctcccacctagagcttctccgaatgacaatcagctcgtgccaggtggggaccaggatatgactcctggtgcccaggccctgggcctgctancttgcccgccaaccngaaccgtgaantgtagggcccccaagccctcacctctgccccaggaccaacaacaccctggtttggagctgggaggaagaagggggcctgagagagccccaggtccattctacccccagcttcactcagcactggagctggcagagacgcaaaacccagtctgcccttgggattccaaacctccctagggctcccaactgacctcaggcctctgagtcactgaatgtcaccaggagaggtgggggagggaaagtgggccag

SEQ ID NO: 373644 - DNA, 369 bp, Homo Sapiens
tcaactcttatctcacgcacactcacacacacattagagagtcagtcagtgtgtctgatgggtgtgtctttgaggacattagctgaaaggtctttgcgtggccttttgtggtcaactatttgctgaatcacacacttcccagcacatcaccctggcattttatcataatcagcctaggaacccagtcataagcccacgtgtaagctgcttggcaaatgcaacttgcttctggaattacattaactgggtctcctctttctaccctgccccaagcctgccttgcccttgtttcaaaagaattgagggtttaaagtaaaatctcttttctaaatgccctggcttatcactggttatttgaagaaatttctc

SEQ ID NO: 373645 - DNA, 343 bp, Homo Sapiens
gcatgcatgctggtggacgagtcgccaggaacagctcttagacttatccactgtaagtgtgtctgcaggcatgtggaatgaatggccacacaaataaatagataaagaaactaactgtgggatgaatgaatgaatcttcccaaatgccaacttcaagctgccattccctgatgcaggacagcaggaaaaaaggggaagttgggtggtgggatgtatttttcatgtctgtgagcctcatctaattccataaaggattcagttcacactaaaatcagaaatgaaaatccagacaagaaaagccaacatcaacattaatcatcattaccagcacttagcatttgta

SEQ ID NO: 373646 - DNA, 316 bp, Homo Sapiens
gctcatagctgactcttgagggtaaaactacttcagcgggagacggcaaggtgggttgtataaatttacatttgatcattgagatcaaaaccaggagtactgatgagggtgtagttgagaagagaccctgggtctaagccggtggaatttcaaaggctcacgaatgggtattagaataagtagacccaagggactgagagtgagagggtggcaagggggtgcaagattcagaagactggggtattccggaagcagtggaagagtgtgtttaagaaggagatttgtcaggtccgggcgcagtggctcagacctgtat

SEQ ID NO: 373647 - DNA, 369 bp, Homo Sapiens
cctagaagcctgtcactaacaggaggctgtgccacagttgcccttaccacacagccacttgtacaacccccaggagacagtcatggatggcatgcacaccacaggaagacctgtcccaacttctgaataaactctgcttaacttatcaagctcacaccttcaccccttctcatacgtagatctcccaggtataccctcttgttccctgaaaacttcgagatctggatagtgtatcctgccatggtttctcagtgtccttcgaccccacagcttcacagattcttgacctccttagctcctgttaccttcctccctcccaggaccactctgtagaactattccacctttaaaattctaaactcttgcatt

SEQ ID NO: 373648 - DNA, 497 bp, Homo Sapiens
gaaaaatgaaatgcagagatgacttctatattacgctcttgattactgtgacagtaatattcaaaaacaacttgaggagcccctgactttgaaaattaagttaatattgtctaagcaaatcaccctccagctgccacccctgtattatttattccctcttgtgaccatttctggggtaagttccgactcacattcgtcaatcaattcctctttcttctccacgcaccaacctcttatgaaacagagccccctttacttgatttttccaaaatccaaccctaggaaggatatggggtcatggcagaatattctggaggctaagggccttcaactctgtcttttgatagttctgtttcctcccagtcctttggttgcagggcgtttcgcagtagcctttctcctcagttcccagatcccgccttagaacgtggccagctctgttgcacattctctcctctctcgctgacgcagttttaccctcaggagtcagctatgac

SEQ ID NO: 373649 - DNA, 270 bp, Homo Sapiens
cttgcccagtagttctggaggaaggcccgggaatctgcaaatgagcgcattccccaggcagttcccatgcaggtgatccacgggccacatgttgagaaactgcagtcacccttggggccacaccgtccctctcctcgctgtcccctctctgtagtgactggccctgaccttcaggagtgcactttccactctaccaggaagccctatgacatcctcaggctccccagacctgcagcttgcatggggcccctcccttcttccacagccctc

SEQ ID NO: 373650 - DNA, 196 bp, Homo Sapiens
ctcagtcggctcatgaatgcagagggaaccctagtatatgtaggcatcatgggtaaaacctgccgtctgacaaacatgcagtgtggcagaagcaagtctttcatctgacgatatggaaggaagcgctggagagataggtagtttctatgcatgtacagtcagaggggcttgtgtaagcaaaggagtcgcctatctc

SEQ ID NO: 373651 - DNA, 235 bp, Homo Sapiens
caagggcgactcccagatcgtgacaacttcagctttgcccatcatacatcctccagagactctctcaaactcaagacagactttctacaggaaggaatggctgttcctatttcagaatattactgataccagagctttgctgcatcttcatgtactttcctttatttttatttttattcttttggctgtcttcataccttcctcagtatttttgtttgtgagatggagtcgccat

SEQ ID NO: 373652 - DNA, 160 bp, Homo Sapiens
  misc_feature (137)..(137): n is a, c, g, or t
ccgcctgccactactttgacaaccactggcataaacatcaggtattgtttctgctaattctagttatgtagtcaggtgagtacttatctaagtgtcagccatgtgccagcctcaggtaaccggtattacaaatacanggaggagtcgccatatcgtcgga

SEQ ID NO: 373653 - DNA, 220 bp, Homo Sapiens
tagctgaccgacgactatggcgactccaggcccacgaacagcaaagaaacaacctctcggggtgggcttggagacctgggcctgcacagcttccttggtaaactgaggaggtgtgtaccagaggactgtcagctcattcctctccacacccaatactgtgggattctaggatacagtttgtcactgttgatggctcaatcttatgcactggacaaagata

SEQ ID NO: 373654 - DNA, 174 bp, Homo Sapiens
accgacgatagggcgactccacaaattatcctaaccaatatggaaatcaattaatcaaaaataatctgaccctgcaaaaattactctactgacatggaaaatgccagtaaaatcttctacttttgtgacacccaagtaataaaccaacaacccacatattaggagtcgcctatc

SEQ ID NO: 373655 - DNA, 448 bp, Homo Sapiens
ggcactccctggaatatacccatagattactctggaaacagctggttccgtttcaccatcgtttcaagtgaagccccagttttgtgcttttctgccagaaataacgtcagcccagaagccctgaatcccaacagcactgaactgccggagttccacccagtgtgggcacataagtggcttcctcaacccacagaaagatgtgttgctaagaccgtaaggtgaccttttaacttcttcagagatagtttcagtcatgcatatctttaaactgctacatctcacccttggttaagccattttttagaaaattatgagatctaatgttgtcacctagtctgaaatactgtaatactgtggcaaagtcctacaacaggcagtcattaataacaggtagaaagaaaagaccgaggagaatggctagtaagacatggaagtaagtgattaaaaa

SEQ ID NO: 373656 - DNA, 408 bp, Homo Sapiens
ctgcttcatgtcgatgccctgcttctccagcagctcacgctgggcgaaggcccagtccacaggctcagctggcgtctccgcacaaggcgtgcgctcacgctcctgccgggcctgctcggggtggttgaaccggaacacatggctcttacccatgatgatgcggtttcctgaacgcaggatgctgggctctgtgactttcttgccattgacgtaggtgtctgccccctcacagggctccaaggtcaccacagcttcgctgcctcccctggagtcgctccggaagacgcagtgctcctccttgatgaagtgcccactcagaacaatgtcctgccgcctctcgccatcccccctgcccactctggtgatcccatccttgatgtagtagagcaggcactcagacatcagcgg

SEQ ID NO: 373657 - DNA, 324 bp, Homo Sapiens
cgagtcaggcgactccctggggctcagttcccttctgcttggcgtgtggggcttggggcagctagctagagtcagcccctcaaagtcctgccctgtctggttcgggagcaaacatcatcgtgtgttagggattgagggagagagtcacctagttcagtccttaggacccacactcttaggaagggctgcttattcttcccgcctggggcagttactcaccacctttcctgatgcctctgattgccaggccttcgggctgggcacacacagactcacagagtgtattggacacggttcttggccttcaggagtcgccctgtcgtg

SEQ ID NO: 373658 - DNA, 441 bp, Homo Sapiens
atgagcatgagtcttgcgctgtgcagtcctgcggtctgcgctctgtctgcctctctccctcagcctcctgcctcggaccgagctgggctagctgtgtgtctcagcggcggctcctttttttgctaggaatgtcccgtggttgggacagagtgcgctttgttcttctgtccacctgctactgagcattggggttgtttccatttgtgactattacaaaaaaataatcaccttgggggcttggccctggcaggcgattgaagctgcctgaagagccccttgatcctttgggggtttgtttttacagctttggggtgggccgagaacagcctttctctagggttggtttatagcctaacccatctgctaagtgacgtaccctgccccgggtgtctcctgaatggctgaggggtcagccagggccctccgccttggctgttggga

SEQ ID NO: 373659 - DNA, 266 bp, Homo Sapiens
tcaacacacactgtctccctctttccaacggccgcagggagctgtgaagcaggcttcagggtggcaccgtggaggatgacacagtctttggcaacctttcactaaagtgccttgtgccggaggacggtggagattacaaaagtcacaatgccactgcctagtccagggtaggttagaaataaccctggatcctgtggctacagaactgcccttggagatgcttcacagctgtaaagagctgtccatcctctgccctatccctgcta

SEQ ID NO: 373660 - DNA, 366 bp, Homo Sapiens
gcacaacacactgcccatgaagctagggcagcaagcagggactttcaactgggacaaccttttgaactggggccctggctttggccattatgtagatgtttttaaagatttggcatctcttccagaaaaagcagcagcaaatgaagaaggcaaagctgggacaactaaaccagtccccaaagatggggaagcagaacagtatgtgtgaagtttatgtactggcactataaaatataaaaacaagaaataatacttcaaaccattgtaaagttgctgactaggttgggtcacatttgaaaaacagggccagtatgggactagtgggtgggaggggaaaacttttaaaattattaaccacattgctgg

SEQ ID NO: 373661 - DNA, 496 bp, Homo Sapiens
ttcggcaccagggggatataccaaggaataaaacaagattcctggagggagaggggaacggacagcaaacaatagacacaatacgatcgtgaggtatatagttaatgttggtgatgagtgctcctcaaaggaaaaaactaaaaccagacaagggaagtcggggtgtcagggagaatggtttgtagtattgatgacaatggttaaggaaggcctgagttctgcaaagacctcaaggatatgagggactagagtgccctctgctgtggaagagcctgcgcaaagatcctgaggtgggaggagtcagggagccaactcattttacggtaagtggaggtgggatccaggggaggattctgagcagaagagggactttcaactgggacaaccttttgaactggggccctggctttggccattatgtagatgtttttaaagatttggcatctcttccagaaaaagcagcagcaaatgaagaaggcaaagctgggacaactaa

SEQ ID NO: 373662 - DNA, 279 bp, Homo Sapiens
tgttagacaacagcaatgacctacactcaagtagcattttaaatggctgtgacattctcacagatagggcaaagagtgcagtagaatatgttttggagtccataaacacaagagccagacaaccacacagagaataattcaaacaaaacctccgctttcgggagcaacatttccagaaggtgctaagagtgtgtgaatcccgaagggggcttcagtacaaagaaactcatattggattttgagaacaccaacattttttgttaactccctcagttgacg

SEQ ID NO: 373663 - DNA, 433 bp, Homo Sapiens
ggcgggcagctgggattacggacaccggaacgtgaggaacacgagtagttcaagaaaatgctgaagatgcgcttggctgggaggctaggataggctgacgaagtcagactgagtgtgggaacctggctgggaaagggtttcttctgtccataaaagctactccaatggttgtgggagacttaattccaattccaggtgatacagcacgtcagtctcccactagctgtaggagggtgtgctgcagttcacagacctaagtcaatgttagtctaccactgtacgtctggtaacctcaatacctgcaaccggagcaaaatgtgattccaggtcttggcaacctctgaaattccaactccatttccgagagctttgagggaggccatatgctgatttcaccacaagcaacttcacaacccagtactggaatgccatc

SEQ ID NO: 373664 - DNA, 395 bp, Homo Sapiens
attcggctctctgggctgacgaaagagattggattggttagtgcctgtggtatcatcgtagggaacatcatcggctctggaatctttgtctcgcatagggagtgctggagaatgctggttctgtgggccttgctctcatcgtctggattgtgacgggcttcatcacagttgtgggagccctctgctatgctgaactcggggtcaccatccccaaatctggaggtgactactcctatgtcaaggacatcttcggaggactggctgagtaagaggatctgtggagacctgaatggtctaggggaaaaggaggaagacattcagaaggaggtcagattggaaaagagccaacggccagtgggtttccagtctccagtgtgccacggggtgctatgaaa

SEQ ID NO: 373665 - DNA, 426 bp, Homo Sapiens
cctggtgatagagcacccatcaggcttccattactgtgggctccctaagtaagaccatggagagcttggggactcccccaggaaggccgtgaagctggggattcccccttaggaaagccatgaggaagctggggactccccaagaaggccatgaggaagccagaaattggaggtggtaagaagtggtactgatcaatgatagccagcaggactcatctcctgcctaactggacaggaagcctggcacccacttctgtcttcccctggaactgggcactggcgtacactggtatccctcctatagaagtgactcacctgactgatcagcaagaagcctagattgcaggcctcaccatggatagtcttcctagttgccttgggaaaccctggaatgggcatcaggagaaagctacaagaatccagtcc

SEQ ID NO: 373666 - DNA, 385 bp, Homo Sapiens
ggtaccgaattcggctctctgggtctgcagagggaagtgctagtaaagggagtccctaccacacaattgggctttttctgaatcaaaagcagaggttgcaaatgggtggcccacaggttgaatttggtggaaagacaggtgttatctgactttctaggcactttacagagttcaattagttcacaacatggaagatctgaattttggccttctcttaaaaactcaagagcgttatggagcccacctcgtcacatggcaggtctggaggagctgagtggcggtggcctcttctggggaggcacgtgcttccaactgctccccaacactgaggctgggtgtcagttgccatctcagagagccggaattccccagagagccggaattc

SEQ ID NO: 373667 - DNA, 163 bp, Homo Sapiens
tcttagtccttccatggccaatgtttcctgtaagagctaaccgaacaaacgttcatgagaaaccggagtttgttcatatctaatgggagggcaaggatttgtaaaaaaaatgtaactgtttggggattgatcaaaccggagttagtatttgctgtatagaaaa

SEQ ID NO: 373668 - DNA, 491 bp, Homo Sapiens
gtgagcaggcagccgagctatggggagcaggaaggaagaagagtacgaaactacaggaggacgccggagtaacatgggatgatgattatgtgctaaatgagacagttttctgcattggttcctgcttttgatcctaggacctggtcgtactaatgtccagcactacaactgatctagaaataccacccccagggacccctcattcagagctcttggaagaagtcgaatgtactccgtcacctcgattagctctcactttgaaagtaacaggtcttggaacgactcgtgaagttgaattaccactcaccaatttcagatcaaccatcttttactatgtacaaaaattgcttcaattgtcctgtaatggcaatgtgaaatcagataaacttaggcgtatttgggagccacatacacaatcatgtacagagaaatgaaggatcctgatgaagaaaaggaaaatggaaaaatcggcttgctggtcatagagcatg

SEQ ID NO: 373669 - DNA, 653 bp, Homo Sapiens
acagcagtactgagcatgctgggagcttgggacttggagatgaatgagccaccgttgctgctccaagtaggactacttggagtgtagctgaggccttggacgcagtatgaccaggggcagctctgccagggctgttggccaatcagtcattttcatttcttgttggaggccaggtcctctgctgaactcatttcctagctagtgttaccctaattctgatgaagatcaatggggctataattcttgtttttgttcctctttgcagcattaacagcagcaaagttgtaccccggtttgaaaggtttggcttgggcgtcctggagtccagtaatccaaagatgtagccagccatatggtttttcgctgctgatctctttctttttaaaatgtgtttctgaaacatcccaacaaccaccacgacaaaaaaacactgcctgcccagcgctgcaaaccaggagcacacgtcctagattcagactgttggccataaaccccactcgggagatggagctgcacctgctatttcttaaaatgacacctaccaacaaccaaacctgtcatgacagacagcaaatgtttacacgtatatttctcctgagtgaacctgatgttttacaataggtaataataaaaacagtctgtgcagatgcact

SEQ ID NO: 373670 - DNA, 537 bp, Homo Sapiens
  misc_feature (153)..(153): n is a, c, g, or t
  misc_feature (527)..(527): n is a, c, g, or t
ctaggtgctgggggtacaccaggaaatgagacaataatctctgctttcattagcttacatcctaggagaaagaaacttgataggaagcataataaatagggtaaattacatagtatagtacagtatgagtgctatgaagaaaacatgggtaangagggctggggattacctgtgatggtgtgggttgtaattaaatgggtgatcaaagtggcctaattgagatagaggcatttgaacaaacactcaaaggaggtcaaagagtaagccatttgaatatctggaggaagagcagtacaggcagaagaagccaccaaggcaaagcacatgtggtatgctaaaggaagagcgaggccagtgtggctggagcagagtgagcatgggagagtgtcgtcagagaggtaacaggagcagatccagacaatacaagattcctgcataggacttggaaagacgggagcttttactctgagaaaaagagttcagagggagccattggaaggttccaagcagaggagcaacataatctnacttacattg

SEQ ID NO: 373671 - DNA, 272 bp, Homo Sapiens
ccgttactggtaggcgcagcgctgcacttggacacacattcagctgggcgggcgtcagcacatcaatgacattgaatggccttcgccacagggaccgcagcttcctctccagcaggtctatgaaccacgtgcaggtatgtcagcggccctcaccgccgtcctggttggctgccaccgggctgcttgaatgtaggatagggatgttccatggtggctggactgagccgctgcgcaagccgctgcttgcatgctttcccagcctgcatcagggt

SEQ ID NO: 373672 - DNA, 688 bp, Homo Sapiens
cttaatgacggcgggaaagcatcaaaccagcggcttagcagcggctcagccagccccatggaactcctatcctacttcaagcagccggtggcagccaccaggacggcggtgagggccgctgactacctgcacgtggctctagacctgctggagaggaagctgcggtccctgtggcgaaggccattcaatgtcactgatgtgctgacgcccgcccagctgaatgtgttgtccaagtcaagcggctgcgcctaccaggacgtgggggtgacttgcccggagcaggacaaataccgcaccatcaccgggatgtgcaacaacagacgcagccccacgctgggggcctccaaccgtgcctttgtgcgctggctgccggcggagtatgaggacggcttctctcttccctacggctggacgcccggggtcaagcgcaacggcttcccggtggctctggctcgcgcggtctccaacgagatcgtgcgcttccccactgatcagctgactccggaccaggagcgctcactcatgttcatgcaatggggccagctgttggaccacgacctcgacttcacccctgagccggccgcccgggcctccttcgtcactggcgtcaactgcgagaccagctgcgttcagcagccgccctgcttcccgctcaagatcccgcccaatgacccccgccgtcatcagg

SEQ ID NO: 373673 - DNA, 460 bp, Homo Sapiens
  misc_feature (247)..(247): n is a, c, g, or t
  misc_feature (430)..(430): n is a, c, g, or t
ggatacagcacaaactccagttgacagtaaaatgaagcttctaggtattttgtattgtacatatttcctcctactgggtgttcaaaagaaatttaaattcaagtaccttttgtgataaaatgttttagatttgtgcacccattggcaaaacaggaaagtttccagataggtattgtatcattgagaatgcagcacagatagtgtgggcttcacactatagacacagaatatagctttttcttaaagnccaaattttggggtgataggacactttaaaatatccctaattttggcaaccactagcaaaaaaacttgtcagaataatttaaccaagcccctctccacttcttttatttaaaagcactgattcaattgctagggaatatttttgccagatttttctttacagtattcccttagggcaggtccnctgggaaaacttgcagaaaaatgtggagct

SEQ ID NO: 373674 - DNA, 379 bp, Homo Sapiens
  misc_feature (44)..(44): n is a, c, g, or t
tttttataaataaggatccatatccacagtttttccacatgccnggtgttacctacctcagcttggtatagcttggtagtttggatatgcttttaatatagtcccacaaatgccacactgttaactaaaatatcacatagtacatcctcaaccatgcactaagatacatgttggataaagcacatcacaatgaaccactgattatggactaccatgctctaaaattaatgttgcttcatggaagttcagttaatagtggaatgtatttaacttttaaaagagaagaagaaggttgtatatacccaaaagtctatgtcagatagtatgtattaaaaatgaaagtttatattggttccaaaaaaaataaccagtgtactat

SEQ ID NO: 373675 - DNA, 363 bp, Homo Sapiens
gctcagttcctcagatatcccacggtcttgcccacatttgcattctcttttccagaaccactttctaccctaccaccattccacagatgactggcaccctctgatcctggagcatgctttggtcctcagctagaataatatttcccagagaggccttctcttcccattccacctaaaataggtctctctttcctagtcctacctcattccccttgtttgcttccttcactgcatcaattacaacttttacatattttatttatctgtctgtttgtatctacaaagtaagcactttgaagactagttcatcatcatgtcctcctagatcctaatgcagtgcactcagtaagcatttgttggctg

SEQ ID NO: 373676 - DNA, 414 bp, Homo Sapiens
cacgagcgccccagtcgagaggcccagctgcctgtgaggtgtgtgcttgcccatccagccaaggatgccagtcttgctcacggaaccatcacatactcataacctgaagttttcctgtaaaatatccatcagctcactgtggttcttgctttgggtgtggcttcaaccactacaaactgatgagtgaaatgctatgggctttaggcttatattcttggtgctgttttctgtctcttctcctgaagtctggatttcaagcactttcacacttaacaaaataattacatacctgaagttttcgtaatgtggagtgttctactgggaaatggagttatgaggatgaatttctgagtctttctttgctctgctggaaaaaataaaaatagagttgacttgttcagttaaatgactgta

SEQ ID NO: 373677 - DNA, 139 bp, Homo Sapiens
tggccggaccggatagcgcccaagtcactaggcgctgtggttaagggctgtacctcgcattatgatgctgttgtgaactctgcttcctccggagtactttcagctggcttaaattcaggggtacttgtgggcgctcgtg

SEQ ID NO: 373678 - DNA, 149 bp, Homo Sapiens
ggtcacgagcgcccagtacccctgaatttaagccagctgaaatgtactccggaggaagcagagtttcacaacagcatcataatgcgaggtacagtccctttaccacacgcgctctagatgacttggaggcgctcgttgccggcgtaccg

SEQ ID NO: 373679 - DNA, 760 bp, Homo Sapiens
cccggcttagcgcaccaagtggacacacctgtggccactagccctgtacttcaccgcacaagccctgcctgagttctaatgccggaaaggaaaccttcagagagaatagctacttcagaaggagggatgagctgagtcgtggtatcccagcctgagtggtggttgttcatcttcagtggtagaatacagaaactatggcctgcagcaaagctcttctggtgatttctcctccttttcaaaacaatattgggaggccaggctgcctccatattgaattctagaatgaaaactgaccagctctgttattcagagtctagggaaaagaaatatgaggattgcaatgcaaaaacatggagtccttgtttgtttgctggtgggatgaactccagcccctcacacttagcattagaagctcctttcccatgattttatggaagaagaaagctgttgactgcccaggcctcttgtgggcacccgcgccattcacaatagggagacattcacgacacactcccacactccagccttgctctgactctgttcatggtcagctgtgatgtcattacctcgtaaggcactgtcaatgggagggagcacattattacctggagggtcctcccagcacatgatctggatcacatccgatcatctatcgcaagagggctctattaattatcgcatgtcatacccgacgcctgttcactggcctgatacttctgttaataagtacttaaacttgggcgctcgtgccgggatcctg

SEQ ID NO: 373680 - DNA, 454 bp, Homo Sapiens
  misc_feature (138)..(226): n is a, c, g, or t
gtcggtcccggttgagcgcccaagtgtgcatacctagagggacagatgagaggaccgtggtgcagtcacaggatggaacacagcacggtgatgagtaatgcactgtgcacagtgacatcagtgactgtcatgtcattnnnnnnnnnnnnnnnnnnnnnnnnnnnnnnnnnnnnnnnnnnnnnnnnnnnnnnnnnnnnnnnnnnnnnnnnnnnnnnnnnnnnnnnnntgtcttagctccctattgctgccataacagaggacgacaatctcagtggcttgagcaacagaagagaattctcttactgaaagccacctgtctaaaatgcagcagcaggtcctgcttttcctgcaggttacagggggaagtctgtttcctcatcttttcagcttttaggagctgccttgccccactccgacctctccatcgtcaagtgtcctctcactaggactgtcc

SEQ ID NO: 373681 - DNA, 287 bp, Homo Sapiens
atagcgcccaagtgctgggattacaggcatgagccactgcgcccggcctaaaattcaaaattttaagggagagtcctatgggtccttatggagaattagtttaacagattttattgccagttcctttgtaaggtctggagaagcaagaccccagaagagagaagatggcccaggtggtttcatcccagggccttgccttctgagggtgggggtggaggtgtgtgtgggtatggatggggagtttaatcatctcatgtttcgggaggtgaatgtgaacttaatgctgg

SEQ ID NO: 373682 - DNA, 314 bp, Homo Sapiens
tgagcgccacagtcaaaatacacagcaactattttaagaactcaataaaaattgtgtgtgtgtctgaaaagaccaagaccatattaatgagaagtgtattctccatctcttagatttaatcttctcttcccttatatctccaaatagccaagaagaagaaaagtcattactgtatgagcattaacataggtggttctaaatcacatcacagctgtcattcttgttgtgtcagtcaaggaatctgatgaaacatagaacaatttcagacaggccaaggcctcctatgaggtaagaaacacttcgagagaagccac

SEQ ID NO: 373683 - DNA, 401 bp, Homo Sapiens
agctcccaacacttcatcgtcacccccactgctgtccagggtgccaatgtccatatgatcatggcgaactctccaagctcaatctccaggccaggtttctcctacaactcagactgaaggtccaactccctactaacacctgcaaggaacggcttaatgagaaaaccaactttccagcccaggctcctgcctctctctcccttaccataagcacatcagtcttatctaggttcctggaggtatatcacacccaaaatttcccacttcagggcctttgcatgtgctgtcctctcagcatgggagactctgtcccccaatttgtctcaaagctagctgcctctcacattccaaagattagctgaagtgagttagaaaagtcaaaggggagagatatatacacc

SEQ ID NO: 373684 - DNA, 263 bp, Homo Sapiens
ggcacgagcgcccaagttcagcctaggagctcccaaggcccctccactacctgccagctctccgacagcacaagagacacagcaatcccacatcagtcaacaacccaccgccacaggattcctaggggcaaggctctgcccctccccccagcacatatgtcagaggggtggcttccctgggttacacccctcctgctgttgggggagtggggggtcggggaacacagctttccagatgtgcttggcaactcctactagaaaag

SEQ ID NO: 373685 - DNA, 494 bp, Homo Sapiens
cacgagcgccaagtagactgaatggccttaagaatttagcctcccattccccactgagcagtaggtggatttgaactagaacagtattaggagaaaatgatatgctggaaattcttattgaagtaacacccagaacattctctaatattctgctgcaaaattgtatagtattcttgcaaataaaccttcctctgggtggtaacttttgtgagaagcagataaggcttgttatataaagcacaactaacattaagcagcaatgatttttatagtctggcacacctaaactgtggttttgtttgatttaaggaagtctccaacacagggagagagaaaggaatagttatgttatttatcaaaatattagtattttgttcctgattttcacactatgattaaaattagtttttttattcattggttgtacagaatttataagcatatacatgctagttgaggctgtaggaagctagtatcaaataaacctcaaaaca

SEQ ID NO: 373686 - DNA, 324 bp, Homo Sapiens
aggacgctggggttccgagaggtcacatcatttgcctgagacccaaggtgcccaaagagtggggctgggctttgaactcaggtctctgagcactgtgacctgtacagcatggatgcctttttcccccacacagagacacatcccttccagaagtggcacatgcatgcagcactgcagattccttcatccattgagggctaccatgtagggttgggcaggtcgtgcactgcacaagggggtctggctgagaggctgaaatcctgctgggctctgcttcccagggcgtgtgccagtggggctccatccacctggggcgctcgtgcc

SEQ ID NO: 373687 - DNA, 587 bp, Homo Sapiens
  misc_feature (27)..(27): n is a, c, g, or t
  misc_feature (33)..(33): n is a, c, g, or t
  misc_feature (106)..(106): n is a, c, g, or t
gctgtcccctctgtctgctcagtaacntcaccnaggctgtccttacttctttagcccagaagaaaagcttccctcttgctggcaggtgagatcaatcagttttgcnttgagctgatcatgcccttttcaatgttatcagggctctcttcggaggggaaaggatctactatgatactgcaccagacccgaggcccaaattgctggcctttgtgagaaagacgccaatgggaagtatacgttccctccaaggctggggcaatgaactccacagatacaactcccacatggccggccttgaggcagggaaccaaaacatccttcttttctgtggaagccaaagtcaggtttccccacatgaacattgagcttagtgtctgcactccactatacatttcctgtatttttcatcctccagtgtttgataaacttggttcctggatgaaggtgagtcccatcaggcaaattctcatccacaaatgctgcactgagcattggcataacggaggtacagggctgcaaagggagcatcagggtattagactggagcaagctctcaggtcggcctaagggagacttgggcgctcgtg

SEQ ID NO: 373688 - DNA, 268 bp, Homo Sapiens
  misc_feature (136)..(144): n is a, c, g, or t
ctccaccgacggggtggtaacttggtgatgtgtatttggaatgtggctttagtggacagtggctgagcagaggatgaaacactgctagctcctgagcaacataccacagtgactcttgatgttccatgttaggaannnnnnnnnccccagttacataagttggagcaccctaatccataattactctgaattggttaccattaccataattaaaaacaaaagaactagttctttcaaaaaagtggaattggccaggcgcggtgggtca

SEQ ID NO: 373689 - DNA, 373 bp, Homo Sapiens
taatccttacaaaactctgaatccgttgtgactcaaatagtcctcatattttaattaaataatcagctgtttattgggtatttgtgagctcaccatctttcaaggatttagagaaataaactttactgaacaatctgagaggctgatttttattaagagtggctaagagtttccatgtagctttagtttattaaaacatatgggaatatttgacttaaattttattggaatatgctagactcagccagcatctgaaaaatgcagagcaattcaattaatcattgcaccacttcaggaaaaaaggaaccctctatccaattttactattggtaaaagttataataaaagggtttgattacaaaaattttccccc

SEQ ID NO: 373690 - DNA, 136 bp, Homo Sapiens
ccaccccggtcctcccaaagtgctgagattaaggtataaaccactgtgcccgagtctcaaatgtcatgattgagaaaaaggaggggctgcactagatgatttccaaatttcctaccagaattaagatcaactaggc

SEQ ID NO: 373691 - DNA, 591 bp, Homo Sapiens
tatgatttagccatacgagaggggtaggcaatgacaaacaggcccagcacatcaaagaagaccatgtttccatgtcgatacttagaagcagcagccagcatatcagatgtagctagatgcttaagaactgctaaaatgttgtcacctgctctctgaatggaatctgttagaattctgtccgctgtgtcatactcggtgtgataaatgtatccattctcaataaaagctaagtctattcctggaatgttcccaaaatccctgtagatacgaaagtcagtatctgaaggaatgattccactctgaaaaacctcctgagccaccacagaagcaaaagggtgtttagctgctgaaacataagcttgaaccaaacaaggattttcaggacctgtttggaatacaagttctttccctcctacacctgctgcctctaggttaatgaatgcacgaatcaagctagcccaggggtgctgagtaatgaaaccatgactggcttgcaagacattttcctcagcaccattaaagagaaatatgacagcatgatgcaaggcttctgaagatgttgacaagacgcgaaggacttccagcatcact

SEQ ID NO: 373692 - DNA, 516 bp, Homo Sapiens
ccaaattggatagatcttctgaagagcctttgggagttctggtaaatcccaacatgtaccagtcccctccccagtgggttgaccacacaggtgcagcctcacagaagaaggctttccgttcttcaggatttggactagagttcaactcatttcagcaccagttgcgaatccaggatcaagaatttcaggaaggctttgatggtggctggtgcctctctgtacatcagccctgggcttctctgcttgtcagagggattaaaagggtggagggcagatcctggtacaccccccacagaggacgactttggatagcagccacagctagaaaaaccctcccctcaagaagtctcagaactccaggcgacatatcgtcttcttcgtgggaaagatgtggaatttcctaatgactatccgtcaggttgtcttctgggctgtgtggacctaattgactgcttgtcccagaagcaatttaaggagcagtttccagacatcagtcaagatctgattcgtccatat

SEQ ID NO: 373693 - DNA, 184 bp, Homo Sapiens
cctccagcaacatctggcccagctgatcatgttctccgtaacgctttactctgctcccaggatgctgtgtggtgtggtgttgatcatgttctccgaacgctttactctgctcccaggatgctgtgtgatcgcggtgctgatcatgttctctgagcactttattctgctcccaggatgctgtgcg

SEQ ID NO: 373694 - DNA, 181 bp, Homo Sapiens
ggtatacttatgaatgaggataggagaaggaaaaataagcgaaccaactggagaagccagatggcaggaggaccattgtaatggaatccaagataagaaacgatttctcaaagcaaagctaagaaaaggaagacgtggccgggcgcagtggcattacgcctgttatcctagcacttcgcga

SEQ ID NO: 373695 - DNA, 585 bp, Homo Sapiens
ctccccccacacttcccaaagtgctgggattacaggcataagccacaagccacctcacccagccaacatgttacatcttaattcttggattttcttcactgcagggctttgggtggagaaataaaactcttcaaatgcatgatcttggagatccctgtgaatcaataattctttagacaactgcggctcaaaatccctcctttcccttttccgagttattccatccatcttattagaaaggaagtgaattaggtgtaggtggtctgtaacacctgcacatctttttatacgtgtagagggtatgcctgggatatataggttgtcttcaagcagtagctgctactacagctagagagaggaggagtgccaggaaactgatgacctgagaccaagagtcttgttgatgttctgacttagataaaggttttgatcattttcatgaaataatgcagggaagtcatttctgctgtttctttactactccattcttggaggattagaacaagtcacactgtaattgactaaaacgactttttattttaaaatattaggtgggaggagaggaaggggatctctagagcggcc

SEQ ID NO: 373696 - DNA, 269 bp, Homo Sapiens
tattctgaggcagaggaaacagcaggtgcaacctttacacaggattgtgcttgggatgacttgaggaacagcaagaaggccagtgatggagcaaataaaaacagcagcaaaggatgagcttacatagggatctgtaggtcatggtaagaattttggattttactaagggagatggggaccactagaagatatggagcaaaagaatggcataatctgacttacattttaaaagggtcactctgctacttgtggaaaactgtagcagggta

SEQ ID NO: 373697 - DNA, 511 bp, Homo Sapiens
  misc_feature (24)..(24): n is a, c, g, or t
  misc_feature (47)..(47): n is a, c, g, or t
  misc_feature (56)..(56): n is a, c, g, or t
  misc_feature (112)..(112): n is a, c, g, or t
  misc_feature (127)..(127): n is a, c, g, or t
aattggtaaccacgattctctcanttggttagtccaatttttccccnaaataggcncttgtacactggctggtgggaaaatgcttgtcaccaacattacccccaccatgggntgctccatcctccgnccttctatctacccaggagtgtagacaggaatgtgccagaatttgtccccactactccatctcccttagctcactgctcctgtgtcttacaagctcagtctctttcaccacatcactccctgggtctttccagtttcaaagctccaaagagctaacaaactaaagaaaacactcagatagctctgagtattcctctatctatttcttcttagctttctgagttgcctttttcactgcttccaaatggattcattaatgaagttgaaggaatacagtacatgagcaaagtgacgaaagggaaaaagaataccctagttggggagggaagaagagatagcttccttataaaaaaaacaaatgagaaggctggccgtggtggctcat

SEQ ID NO: 373698 - DNA, 220 bp, Homo Sapiens
tcacagcccaacagctcactgcccagcagatgccatgaccaaaagcatctgtccagagagcccacagtcagtcccccgaggccagcagccatgccccaagctcacagcccaaaacaaggaagaaagtgaccccgacagtgccaaccacaacacacacgcacagcactggagaggggatggggatgcatgctcaggggatgcctcaggaagcaggggaccc

SEQ ID NO: 373699 - DNA, 176 bp, Homo Sapiens
cttgtacagccacaaatctgctccccctcttcctacttattcctatcttttttgcatcttccatcctccccatctccaaaacatttagggagaaacaaggctggcgtctgctgggtagcagtctgactgattatcaggcttagcctgatcaggagctgttggcattacacaccaca

SEQ ID NO: 373700 - DNA, 421 bp, Homo Sapiens
ggtccttgtaggacactagtgccagtttgctacaaagtgctatttgttcagggtgaagcaggcaattctctgggcagcgacactgtggctgcaggcagttgctgtagttcaaagcaaacagccaagctagagtaggagggactctgacggggtttgttcattagaattttgaacattaatttttgaaggaaagaaaggggagtacaaatagaataggaatagaaatattgtgaaattttctttataacagaacaaaattgggtcaggagaaaggactttaagaaatcacttaacatttatcattactttgaaagcaaatgccttttttgagtaaaagcaaatgctttttgagcatttactttgtctgcagtgcactctagtggggtgggaaacgaaagttagcactagtgtcctaacaagg

SEQ ID NO: 373701 - DNA, 318 bp, Homo Sapiens
ttctcacctcagccttctgtgtattataaaagggtatagggcaggctgctgccacaagtactctgcagtccactggcttcagtgccagaggttagttctcatgccacagctgcagtgggcactgccacctggaagaacagctctgtgccactcaggggttcaggctccttccagattgttgctctgcaatccctcagttgccgtcctggcctcaccagaccaagtgacttgtctccaagttaaacacacctggaacttgcgtacctcaggtacactcacattccgttcacacctgggaggggggatcctcgagagtct

SEQ ID NO: 373702 - DNA, 337 bp, Homo Sapiens
ctctagaggagcgtttcggagtgcgtgggaccacagcccgcaggtgagaatctgatgttctggagcatcacacacaaccacaggtgagcatcggagagtctggagcagcacccacaacccaaggtgagcatctgacaacctggagcagcacccacaccccgaggtgagcatctgaccctcaccggagcaggacccatacactccaggcgagcatctgaacaccatggagcagcacacacgcccccaggcgagcatctgaccgaacagagcagcacccacaaccacaggcgagcatcatgacagcacattaacagcacccacaaccccacggtcggga

SEQ ID NO: 373703 - DNA, 239 bp, Homo Sapiens
caccttatgcgtgggcgtggggctgtgtcctgtggatgggagtaagagagtgagtctgaggggtgagtgtggggctgtgtccctgttggatgggtggggaggagtgagtctgaggagagagtgtgggactgtgtccccgtggataggagtggagagtgagtctgaggggtcagtgtggggctgtgtccccgtggatgggtgtggagagtgagtctgaggggtgagtgtggggctgtgtc

SEQ ID NO: 373704 - DNA, 445 bp, Homo Sapiens
  misc_feature (163)..(163): n is a, c, g, or t
tgccgccgggtggactttagagaatcccttgttggcggccggtgagttttcacagccggcatctcagcttctgctcgcagctgccgcctagttttggcagatgagggctctgaggcccagagaagttaaagaatttgccaatgaagtaagcagagcaggactntgaatccacacttgcctgactccaaaagccaggagcttcttgggaaaggccaagagaggacagggcctggcggtcccctccccaacacgcacacccctagtgtgttttaaaagatggcaggctccctctttgccatcatccgaggacaaagggcgggcagtttctccagaagcgagtctgagtcttgtcctgatggatccggcccacactccctcgtatcctagcagcatgaaccctccacctcactcaggcacaggactcctcccaggaggggggattcga

SEQ ID NO: 373705 - DNA, 547 bp, Homo Sapiens
tctagaggatcgcgttgcgtgggaatctgtgagttaaaaggctgtattagccatgcttctgagagtgaagacacaaacgaacctggcccgcagcatcatctgccagcacgaggcaccaccttcctgctttaccataaaccaacagcaccaggtcctgtgccgcgggcccagactcaggcagcgcagttacgggagcctctcgccttcaggggtagcaatggctccatgatttacactgaaaaacctgcattcagtggcagaggcttccctactccaagatagatggcttcagaatttcggggaagtggtgttctgtggtggtcaagacaaaggcttttggaagcacagtcatgggtttgcttcccaaccttgcctgttggttccttgacaaatgaacctctgtttcctcctctgtaaaatgtcagttgagattctctgaaataatattgcaaagtgcccattacaaagggctcaaaagaaagatcttaaagttgtcacagtcatcttgtggtcaaaagagccctgcactaatatcccaggtcctagt

SEQ ID NO: 373706 - DNA, 452 bp, Homo Sapiens
gagtgcgtgggaggtaacgtcaggctaagaggaacatggtcctggagccttagggaggagaggagaggagaggcagcgggcgcggggcggcgtccagggggctgagcgaggtctgggcaggaggacagagctgagccttgggctgccctggcccctgcgcaggacacacagtgaccggggctggggtgggcaccccggttctaccatcgggagtcggcgtgttcatggagtctgtttccttgtctgtgggtgaaactttggcttggggtcacgggtgtgttatttcccagcgacagtcggttcagtcagcacttacaaaatcaccagaaacaggggcacaggatcttgctcagcagggagaggtggatcctgattcgggaccccaggctcttcacctggccatggctgcccgtccggtggcccttcctggcccccagctcttgctccactgc

SEQ ID NO: 373707 - DNA, 226 bp, Homo Sapiens
gcttagggcttctcttgcctttttagtgtccttctaggcggcctttccttcctccttgtcagctcagaaaacttttcttccacttcccttattctaaaccatcccttacatctactcctttccagccgaccaagagcagaaccacggctggttccactgccaccatgctgtcccacactgtctcctcaggatgtattcaatgtccagccctcccaccatgcataag

SEQ ID NO: 373708 - DNA, 317 bp, Homo Sapiens
ccatgtagtatggtcaccagtgtaatctcaaagaacaggagacctgagggaagagaggcggacaaaggacacacactcctggctttctgtatttgccagtcacaacacttcaccatctggtgacccccactctcaggcaatctatcctggacgcccccagagtcacccccaggcccttgcacagacaggcctccaggattacaaacttctctggtcataggaagctagggaagccttcaactcccctaagtgggcctctccctccagccacagtgagcctgcgactctgggctgacctggctcatagctccaaagtg

SEQ ID NO: 373709 - DNA, 123 bp, Homo Sapiens
aaacatgagcacattatatacctgataagggatgagtaatcagaatatatagtgactcctatagtcacaacagactctgctgggaagtgcggcccaatgaggacatttccctcgagttcccgg

SEQ ID NO: 373710 - DNA, 292 bp, Homo Sapiens
  misc_feature (237)..(238): n is a, c, g, or t
  misc_feature (256)..(256): n is a, c, g, or t
  misc_feature (263)..(263): n is a, c, g, or t
  misc_feature (274)..(274): n is a, c, g, or t
gctgggtgctctagaggatctcaccagccttatgcttgtttgaatggtgtagtaatcatacagaaggtagagggagtgtcacatgtgggtctccagagggagagagagctagctagctagctacagctgtctgtataggactgatagctttaacttgtaggtgtgggatgtttcatgccattgttgtgatgggaggtgactctagttgagtttggttcgcaaccgaagtgtccttgnntcttccagcatacaacanatctcangagacgttcangaaaagcagtatgctcct

SEQ ID NO: 373711 - DNA, 525 bp, Homo Sapiens
  misc_feature (48)..(48): n is a, c, g, or t
  misc_feature (101)..(101): n is a, c, g, or t
agacagactgaacatttccctgtttcgagccaggctcttccaagaggnccaactgggtccccggaatcaatcctaggctggaagggaaggtggcccccttnaaaaaggactcccaagcctccaaaaatctggttcctaccttcacatctcaccctcccgttctggggaagaatttctggttcctacagtatccactccatcctcaaggcttcccgcagggccttggggcactgccttgccattcggcccagttctccgggccccacctgcacccctttcttccccctgggatatgatgtgtggtgtttcctgtggtaaaagactgaggcaggccaggggtctgccagtaacatgttcccatgtacagacacggtccccacaccctcccagcctcaggcccaggcagacatgggcgagctggtgagactgcccagccacggctttgcttagccacctgtggccgagggctctcagagacccccttaacctcccaaatactaagaagctaaaatattttaaaaaaaa

SEQ ID NO: 373712 - DNA, 1065 bp, Homo Sapiens
  misc_feature (1055)..(1055): n is a, c, g, or t
ccgcagctgctccaggatgatggtcttgtcttttggtggttcggatccttggaacctgatggtgtcattgatgatgtccagtgtgtcggccacagcgttgtactctcccaccttcacctccctgctgtcttgaaagtgagtaaatttaatggtccccattctctccccattccggaatacaacttgacccgtgaccccgaagaagttggtctcgttcatggcattgaggatgatcctgcccagcgtgtggtccgtgtagttgaagtcctggatccgctggtgccggctgctggcatgcagtgtctccatggccctctgcagtgtcttggcgatgacccagatgccatcgtaggcgtacccgtggaacttgctgggccccacgcctgaccgcttgttgttgtactctctctcatactgctgtggagtctttcctgagatggtcttgatctgcttggagctcaggggctcgaaatccacgccaatgtagccctccatggcagcaagcagattcttccggaggcagcgggatgagttggcttccgtgtgcacctgctcccaccaagaaggctcgtaccagcccggaatgatccactgatatttactaccatacatgttctcctcgtatgcacaacagaacacttttgctgccatattctggtcaaactggccaaggatgatccgcacatcattccccttcagctttttgacactggtacagggatcgttggagaagctctcggtgtctgaaatctcaatgtcctcgccatacagaactccagtcaggtcattccgcacctcagagaacctctgaacgtcttgcgtcagcgtgcccacgcgcttccactggtagtgcttgagcaacttcagaatggctggattcaccgcattgtctgatgcgacggtccgaaagaaataagggaattttttcttatcggctagaacaggcgtggttgcagcaaaagaaagctgcaccagattccagccttggagggactctgcaatgatggatgtgacggatggacagacgcctccaaacaccatcaagtggttcggcnccgtatttta

SEQ ID NO: 373713 - DNA, 427 bp, Homo Sapiens
  misc_feature (224)..(285): n is a, c, g, or t
ataggatccgatcaagttcactgtgtgctggctgtgatgacactctctgtaccatccaaagactttatataaaatgtgaaagaaaagtaatcctttatgacattatctagagaagacccaggaatttacccatttcttcaaagttatagttaaaagtgccagtaactctccttttggctggtttgtggtattagtgtcatcaccacaactgtgagcttggctannnnnnnnnnnnnnnnnnnnnnnnnnnnnnnnnnnnnnnnnnnnnnnnnnnnnnnnnnnnnngctgggtcagaaatatgtcacaatttttccagggtagggatcagacagagagtcatatcacctggttgcctgaccagggttatgttacaattctctcctgaaagcaaggcacagacaacaaagtcacattacttggatactg

SEQ ID NO: 373714 - DNA, 402 bp, Homo Sapiens
gagggaaatatgttcctgaggataccagtgaaaagcagaagtaaaggaggaggtgggagaaattatagaggtgctaacttttctctttagaagtaccgttagcatttttaaaaacatactatagattttccagattaccagggatggtgctgatgggggaaatagaaaatacaaaatctgcagcaaacgaggaagacaaggaagcactaaacatggaaaacataaaatgccggaaatatatgttataacaatgaatgtaagtagggtaaagattgaatttaagattgaatagcattaaacagcaccaagaaggttagtaaaccttgtttcactgtgagaaaaaaagagaaccgtatgctgaaggatctaaatacttggttaagttcaggtgaactgtgataa

SEQ ID NO: 373715 - DNA, 207 bp, Homo Sapiens
tagatcaagttcactgaattctcactacatctaaactgttcatattaacatgacagtgaaaaggaatgtctccttcccatcctatcacttagccacccatttgcccttccgcccgtttgccctcctggagggccaccaaccactgttaccagtctcagaaaagtccagacaaaatattatgcctttttttattttcctttctctttt

SEQ ID NO: 373716 - DNA, 388 bp, Homo Sapiens
acccagctcagtctcccaaagtgctgggattacaggtgtgagccatcatgcccagatgctaactccagttttactaaatcccagggtaagcatttgtgatgggaaaagaaaaactttacaacttatgcggctagctctgtttggtggatgagtgagacctgcttatctaagatttgatccagttcaaattaagaaaactgtaatttcagagtttctcttggttctttgtgtacttaatgacaaaacacctggggtttaggaaatctcaaagggatgcaaagggagatagatctcagagctcagtgtgatattgaagttaaaagctaaatcgcttagtgatctggtaaagagcctatactgacattatacagtggaactgtgattccag

SEQ ID NO: 373717 - DNA, 610 bp, Homo Sapiens
  misc_feature (15)..(15): n is a, c, g, or t
gttacaggagcttantcaagttcactgcagtggcgtatgctgctggtgggaggcaggcactcgctgggcgtgactaccccaagttatgtaccgtgtggggctgcccagccggaagaccctgtaccagctgcaggcggagcggattcggcgggtggagcaagctggccggtgagcgccacgggacccgctgcaccgtcccctggtacgtcatgaccagcgagttcactctggggcccacggcccgagttcttcagggagcacaacttcttccacctggaccccgccaacgtggtcatgtttgagcagcgcctgctgcctgctgtgacctttgatggcaaggttatcctggagcggaaagacaaagttgccatggccccagacggcaacgggggcctctactgcgcgctggaggaccacaagatcctggaggacatggagcgccggggagtggagtttgtgcacgtgtactgtgtggacaacatcctggtgcggctggcggaccctgtcttcatcggcttctgtgtgttgcaggcgcagactgtggcccaaggtggtggaaaaggcataccccgaagagccgcggcgtgtgtgccaacgacgtgtcacagtg

SEQ ID NO: 373718 - DNA, 727 bp, Homo Sapiens
gttcactgtgggtctagtcgtatcatgatgtaatagcctgatagtgggtagtgggcagggggcgcatggagggagaatcattggtttaccaagtttcttgcaaagctaattttgccctgggaccatgcttcccaacaacaatgtgtcctcctggccttggcaccccagcaagtgtgttccccacggtgtccttggcaaatccgccacacagttcctgacatttcccagattcccttgcaggaggtaggggtcatatgactagacctgacctgtgtcacttctgggctaaagctcttaaaagctcacatcactcttctctctcttcttggctgcagggacctttgaagccatgcattgagatggttggatgaccagacggagggggctggatccctgaatcacccactggagtgggcctgcactagagcatgtgtgaattagaatgaactgatatggttaggctttgtgtgcccaaccaaatctcatcttaaattgtaatccccctgatccccaggtcgagggagatgcctggaggaaggtgactggatcacaggggcagttcccccatgctgttctcatgatagtgaatgagttctcacaagatctgatggttttataagtgtttgacagttcctcgttcacatactcgctgtctcccgcctgccgccatgtaagacatgccctttccccttccaccatgattgtaagtttcatgagcctccccagc

SEQ ID NO: 373719 - DNA, 430 bp, Homo Sapiens
gccaaaccatatcaccacccctagtggggagactctccaattgagggtgggatttatacagacagagaacatgatgggctggcttgctgccatgctttacctccctctggctctcctgttctgtgggatggttttgtttgtgcagaccatcctagcccagggcaacctgagggatgatctagtcccatcaggactggtcactttgagaatctattggtggtgttaaaacctggaccagagcttgaataccggctttactgatgactgtctgtgtggcctccagacaagctacttaccctctctgagctcaaagataatagcagcacctacctcacatggctgttgagaaaattaacaagatcatgcttttagagcaataccagagtacctgtccatagtacagtgaactgtgatagggatcctctagatc

SEQ ID NO: 373720 - DNA, 364 bp, Homo Sapiens
gcttatacagttcactggattatctcaacagtacgggcgactgtgactgtactccgctgctggtgcgcttacgaagttaatagaagacaatcaacatggcggcagctagcagagtcactgccacaaagcagccaatgatgatcttgggggtcttcaatgacttcatccaggctggtctgcatcttgtcaggtggtgtctgtcgcgggtactgccacctgcttgggcacacgggtagtctgaatgagcaccgtggtagaggtggtatatgccggctggtaaccagtggacgtggtaggaacaggcttgtactttcgcgttgtgtcctcaggcgagatctccgtggtctccactgttactgtggtg

SEQ ID NO: 373721 - DNA, 561 bp, Homo Sapiens
gtgctaaaggtactctagaggagcttaatcacagtccacctgcatgaaaaggactttgcagatattttggtgcagccaacgttggaggagaacaaaggaacttcagatgggcaagaagaggaagcaggcacaaacccagctctcctctcccagaattcaatgcaggcagtaatgctgatacaccagcaattgtgtctcaactttgctcgatccctctggtatcaacagactctgccgccacatgaagcaaagcattacctcagcctgtttctgtcttgctatcagactggggcatcgcttgtgacacacttctaccccctgatgggagttgaactgaatgaccgactcttgggcagccaacttttggcctgtaccctctcccataacactctttttggggaggcaccctcagacctgatggtgaaacctgatgggccctatgacttctaccagcatcccaatgttccagaagcacggaagtgtgaacctgtgcttcaaggtttctcagaggctgacagtcacttgctaccaggactgtgcagaacagccagcgcttgaaca

SEQ ID NO: 373722 - DNA, 895 bp, Homo Sapiens
cacgaccaggtgtcattactaaaggctttacccagttgcccggggatgctatttatcacatctcagatttagaagaggatgaagaggagggtattacttttcaggttcagcaacctcttgaagtggaagagaaactttcaacatccaagccagtaacagggatcttcctgccacccattacttcagcaggtggaccagttacagttgcaaccgccaacccaggaaagtgcctgtcgtgcacaaactcaacattcactttcaccacctgtagaatattacatccctctgacatcactcaggttacccccagctctgggttcccttcattatcctgtggaagtagcggtagagttcatccaacacggctgtgaattctcctgccttgtcctatagactcagcattggtgagtccatcaccaaccgacgagattccactacaaccttcagtagcaccatgagcttggccaaacttctacaagagcgaggcatctctgccaaagtgtaccacagcccaatttcagagaaccccctccagcctctccctaaatccctgggctatcccttccacaccaccaaattcaccatctcactcaccttgcccttctcctttaccctttgagcctcgagtgcatctctctgaaaattttttggcctctcgaccagctgagacattcctccaggagatgtatggcttgagaccctcccggaccctcctgatgttggccagttgaagatgaacttagtggacaggctgaagagactggggatagccagagtggtcaagaacctggtgcccaagagaatggaagatgccaggaggcagaaattggtcctcaaaaaccagattctgctgtttatttaaattcaggtggactgtgatcagcgatcctctaga

SEQ ID NO: 373723 - DNA, 600 bp, Homo Sapiens
  misc_feature (19)..(19): n is a, c, g, or t
cactgtgaggcaggtgtanttagaatcatggtctccatgaagcttcactcttgcatgtgaccatgggagccagcccccaccggcgctacgggcaccctcctctctgtttctggctctatcctgctttccaagggatctgcacacatgtgtggaaacctccacgcacccatccaaactctacccgaagttctgcagagccactgctttgctgcatctcgcatctcagggtgcgttgggcggcatggcctgccctgggagcgagtgcactggatggacaaaccatctgggcaggggattctagagaaggaagagcgcaagctttgggtgagcatttccctctgccctgcagacttcttgcccatgagcaaggggatgaccaggacagaccccttaaggccgggcctgagggtgatgtgatcaaatgacgcaatgcctgcaggggaccaaccacagagttggcacctggtcgggtcatggttagtactgtagtcaccccctggccaccgcccttggaaaggacatgcaagatgttctgaggctgcttccacagccaggtctcaataagaccacaggctactcagtggaactgtgaatcagcat

SEQ ID NO: 373724 - DNA, 548 bp, Homo Sapiens
tgtattgttgtccactgcagtaggcaccggccacatgtgactgctggcatgaaatagaagtgcagttcctccatcgcactgggtaaggcctccagtattggacagcacacagaaaggttttcatcatcaagagagttctgctggtcagccctgctccaggggatgccctctgccttcgcatagcacactgccttgaggccctgccaggcaccaagcactgccctgggccccatgggatagagcggggaaggtgatggctcttccagaggattccctcagatggggaggcagcagtatgagctctgagcagaagtgggtattgttgatacagaggaagttctttgccacgagaactttcaagcagtgaaaggaattcccatcaggactcagaccccaggccgagatcttgccctgaatgtaccctgcctctgctttctcctgcatcccatgctaagcagggtcatggtctgaactactcagattggatttccaaaccatccttgtataaactgctcagaactagcatcttgcaccttcttaccctcctc

SEQ ID NO: 373725 - DNA, 595 bp, Homo Sapiens
  misc_feature (19)..(19): n is a, c, g, or t
  misc_feature (53)..(53): n is a, c, g, or t
  misc_feature (68)..(68): n is a, c, g, or t
  misc_feature (95)..(95): n is a, c, g, or t
aaaaaaccccttcctgtcnaaatgcctggcccctcctaaaaatcccagggcangcctactttccatgnctgttcgaaagcatccggagcaatccnaaagtgcctttgaacaacagagtaaggcccaagaagggcaaaaaagggacccagagctgaggtgtttgggcccagttctggatcactcatattgttgagggaggggtgggggcataagataacaaggagcctacaggccacttgaggaaattctctggttttgctgcagcttcgcttcaaacttccacagcagaagagttggaattctaatgccgcaatatacgttgtaataccagggattctctagaggcaagttaaggcttactgggcaaagaaaacaattccagatgatattgtgatagaatgctacagtgaaatgcttcttaatgactctcctgtcttgcctaaaggacaaagacctatgagtgacttcaatttgacgtgatgtttcagtgatctttacttcagctctaagtcagaatcaatgccacaggaaaagaaaagcttcttacatctcagacatctgcttgcagagcaaacacaacacaagaacacatgta

SEQ ID NO: 373726 - DNA, 444 bp, Homo Sapiens
tatgttgtggctcctggagacacgacataacaggtgaagggataacctggggtgggctggggctgagaccatgtgcatgacccaattctctctcctcaagctcgaacccccatccccaggatcacacaggagaatctcatactcacggcttggattgctcctggggaccccctggtgtgctgataactggtgtacaatgctcaggagcagcccagacgggagccgggaagggaccctcgcccttaccatctatccccatttccgcatctcttgcactggtaccccgggcgccacgttctcagttcctgggactgaaaactgcagcagtctggccagctccagggacagagtggcccagccacctactatgtaccctcctcagctgcccactggactcaggtcctgaatgaagctgtccgcctgcctcatgccagaagcggctgg

SEQ ID NO: 373727 - DNA, 442 bp, Homo Sapiens
cgcgccactagcctcattgttctttaaaatcctcctactctcttagaaacccttctctcgcggctccacgcctgtggcaaaatcttcctaatcacttcatagtctcctcactccacggagtgtttttaagcctctcctcgctcttcgccaatgcgcggccactgctctctgtgcccctcccactgtaatttaagcctctcccactcttccttaagtcccacctactcccttcaaagtcccccacaatgttccctaaggatcttgtattctttgccaagcccttttccttccaaaaggccctcccactcccctctaagctcctcccactcctcttccaggatgaccacttagcgaatgggagggcaaagatttggggctaagcacactggagtcatccttgcagggagaccagaattactcctgtaacatcagataataaaaa

SEQ ID NO: 373728 - DNA, 612 bp, Homo Sapiens
  misc_feature (572)..(572): n is a, c, g, or t
  misc_feature (578)..(578): n is a, c, g, or t
  misc_feature (595)..(595): n is a, c, g, or t
ggatccctgcaaatgctttaggagggcggggcctggtataacaatagcaacaataacagtagtattgacccatgaggcctggtgggggtactctcaagagcacaacaggtcgatcagtaaccaggagtggggtgatgttagctgaacattggcaacaggctgtctggagccagctcctcagccctgagctcttgaggcagtcactgctcctcaaggcaacctgtgtgctcagtgtttagctttagccacgtcgtgacttacgagaaaactagggagccattagctggcaccaccggcccagctgtcaggtggtggtggtctgcaggcagtgctgtgagtgccataccacccaccccatgcctacccacctccctcccacgctggcacttgctgtaggggctgctgcaggacaccactaacttgtttctcagcccagcttggcccccatcctcagagtccctgcatctctcccagggcctcactcttactgtcagatatttcaaatgcacggatcacacagtgaggcatccaaggggttcatcagttggcctgggctggggttctggatttcntgggtnttaaatttatggaaggnagttattccgacaggtt

SEQ ID NO: 373729 - DNA, 418 bp, Homo Sapiens
tctccctactgtatcctatgctaaaatgttgatgtatctgtttttgtgcttgttttctggatgattggaatgctctgcagtgatgttcatatcagcagtacagcgctggacttcctcaaaatcctcagagaacccatgctggttattagaacagagctcaccgatgtgtttgacaaactgtttgacaggaatggcttccatgtcatccggaataggaataataggaatactctcattagggaccactcgaggtgaactgctgtcttccacatagaaatgagcagtctgaaaacattttctgctccccttctctcctctctccccagaagaaggcacttcacggaaacgtctgggaaagcccttggactttattttgtacaccctctctagatacctagggacgagggatcctcccgac

SEQ ID NO: 373730 - DNA, 366 bp, Homo Sapiens
ctcgtcctagggtatctagaaagaagaacgcgcttctaagttgtggggtttctggaaccagagcttagaaagaacaaaaatatggcatggtatttgtcatggtttagtaaggctacttttagttaattattgtgatgtaggccattaagtagacttttccaaaacgaaaccccagaggagaggggttttgaagatacatatatactggtttctaagaactaatcttttcggatcattggtactggtagaagggattcgctatgttttctgccaccattggatctctgtataaagttcggctccactatcaaaatgcttagatagatgccttggcaatagttgccaccctaggatacagtagggaga

SEQ ID NO: 373731 - DNA, 585 bp, Homo Sapiens
tcccttcacgtcccttccaccagcctcccttccacagcaacaattgatcacatgctttcacatgtgaccacaataggaataaaataacagcgtaaagaaatttgaaagttgtattacatcattattcactgttcaaaaatttttttcaagaaacaagtacactttcaatgaaattacaatgcttcagaaaatctcccttttaaagttatatacaaaaacagctttagttgtggattcatttttatactcaatactctgatttagtgtaatgtctgaagtgtcagtgccttattctagtgtaaattctcatatttacgtaaaatcaattttgaattaaatatttttttcatatttacatctgcaaaaatatactttagtactaaactctctgatgttttctaagctatagattttgaaaaacaaagtctttccaaattcattatatttgcaggactcttctccaatataaattccatgttgttgaataaagctggagcaactgcttcaggttttcctctagtacacaaagtgtgcaacaagttctgtgatacaagtaaaggtactacacctactatagtggtatag

SEQ ID NO: 373732 - DNA, 389 bp, Homo Sapiens
tccctcccttcacagcctctaacctctctgatagttaaacagagacccaaagggataagcaggaattagacaggtgatgggagagagggcaaaaggcttgtgccaggtgagagaatagcataatcaaaggctaagtggtaagactaatcttgaggcatgagaagaactggaagaagttcactatgactggaggaggaggaatagaatggtaagatgaggctggagtgctatggggtcagatagtagaaggccttaaaagccttgttaaaggatttggatttcatcctaacatctgcagaaaactattgttagactttttagtggattacagtgattgatttttgagtttttgaagaattactcttgatgtcatctgctggtggaaggga

SEQ ID NO: 373733 - DNA, 132 bp, Homo Sapiens
ctcccttcaccagcacaaaaatctacaaacacatatcggacaagacaacccacattgggccagtgtcttgtgaggggtgtccgacatcatggtaagtcagcaagggggagagactgcacttctaaagtgtcc

SEQ ID NO: 373734 - DNA, 538 bp, Homo Sapiens
acgctaatgtgaaaatggaacagcaactgcgtgctataagaggaagcaaaacgtctgcacaagcgggtgactgaacttgaatgtgttagtagccaagcaaatgcagtacatactcataagacagaattaaatcagacaatacaagaactggaagagacactgaaactgaaggaagaggaaatagaaaggttaaaacaagaaattgataatgccagagaactacaagaacagagggattctttgactcagaaactacaggaagtagaaattcggaacaaagacctggagggacaactgtctgacttagagcaacgtctggagaaaagtcagaatgaacaagaagcttttcgcaataacctgaagacactcttagaaattctggatggaaagatatttgaactaacagaattacgagataacatggccaagctactagaatagcagctaaggaaagtgaaatttcagtgccaatttaattaaaagatacactgtctctctttcataggactgtttaggctctgcatcaagattgcaccag

SEQ ID NO: 373735 - DNA, 281 bp, Homo Sapiens
gtgccaaaggtgaaaacccatctctactaaaaatacataaattatcccttcaaatctttggggggtaatttttacaatgcagtctaacaaccagctgcctcaaaatgaactgggatccctcgtaaccaggtagctcccccagtccccaactctcacctgccatagtctagtaatcttgtgggtggggctcgaggactgtacatattgatacaggcagtaacctgggaactatttctgacacccctattacccttggttgctctttccttcacattaagcgc

SEQ ID NO: 373736 - DNA, 527 bp, Homo Sapiens
  misc_feature (361)..(361): n is a, c, g, or t
  misc_feature (403)..(403): n is a, c, g, or t
  misc_feature (481)..(481): n is a, c, g, or t
gagttaatctaggagataatggatggcctagtactagataatatatggccccacaagctcttgacttctgtccttggggaaagccattttgttaaccacactagtgagatttacatgatgcttaatggagaacagagaagatcttgttgcaaaaggtgtattaaatatttgtgctgtttctgtatgagattgagaagcttttcccacctctcacccctatttcctataaggatatccagagaagccaaactgttctgtgggtttgggaatggtcatttcccgggaaaatgcatctggatcgatgactaaacctggcccttttctctgggctgtagtgaagccgcattttcacgctgggctnggcagtgtgcttgagagcctcgaatgctctgcggcgtagtgncccttctggccctgcctgacgatgtattcgaaaagatggagagtgaagggagactttgtggcagcagggaaacgggtnggtgaggtgttggggcagttgtggggaacttctgaggattttacag

SEQ ID NO: 373737 - DNA, 542 bp, Homo Sapiens
agcgcctaatgtgaaattgctgagtcatatagccattgtatttccattgttttagaaactgccaaactattatccagagtgactgtaccattatacattctcaccagcagcatatgagtagatctagctcactaacatcctctaccagcatatgtggggtcaccgtttttaatgtcagccattctgatagatgtctagtggtatgtcattatgcctttgatttacattaccctaatggctagtgatgttgaatatctttctatgtgtatattagccatccatctgtcttcttcagtcaaatgtctcttcatgtcttctgcccatattcaaatgagatcatttgtatttttgtcgttcagttaattcctttgattaatgtttgtgtggtataccttcttatatcttcttactttcaaccttcctgtatgttatatttgaaatgagtttcttggagacagcgtataattgagtcatatgtttttaatcaactatgctgttctccatctttaaatcgtaatgctttaaatgtaattattgatatg

SEQ ID NO: 373738 - DNA, 295 bp, Homo Sapiens
tggcccgccatttgtgaaaatagggtctgcttactgtttcctaagtcagatatacaggctctctcctcatgtaaatcatttcaaaggctagaagcttagtctgatagaacactgcccatacaaaattaaagcataatattacaatatatgtggtaattcaatagttctccttgggtttctcatcttttccagcttagcatctaataatgaatactaagtagaatttgcacatgttggtaattttagagcagtttgtttcacttaggtgagaactgattactttaaattaccaaca

SEQ ID NO: 373739 - DNA, 250 bp, Homo Sapiens
tatagataacagtgatgtaagagggtgtccactgcagatttataattatgaaaaacagcaaacaacaggacagcagtcacagaaattgtttatgagtggctccattatgtagctgttaaaattatatttaggaagaaaattttaagatgtggaaaaacatttatgttctaaagctgggcagaagaacagctctcatgcctgtgatcctagcacttgggaggctgagatgacagcgtgtgctacacacccc

SEQ ID NO: 373740 - DNA, 429 bp, Homo Sapiens
  misc_feature (416)..(416): n is a, c, g, or t
aaccaaccctttcatggctctccctttcagccaaggccaagcagcccccctgaggcagattcctttgtcccaagccagcccctccccaaagaaccttctgtccccatctgagcaggacaaggcccctgttgctgatgataaaccaaagcagcccaagatggtaaagccaaccactgaccttgtatcttcatcatcagcaacaacaaaacctgatattccaagctccaaagtacagtcacaagctgaagagaaaacaacccctcctctaaaaacagactctgccaaaccctcacagagttttccaccaacaggggaaaaagtcaccccatttgattctaaagccatacctcgacctgcatcagattcaaaaattatttcacatcctggtcccagttcagagagcaaaggtcaaaaanttagttgaccccg

SEQ ID NO: 373741 - DNA, 343 bp, Homo Sapiens
aggtgggtctgcctgaaagattaggaatataagcctcaagagagctcccagaaagatgagatctaaacacaaattgtctctgtatgaaacatagagaaacggaagatgcgtataacaaagtatgacgcacttttgtaaatactataaatgaagaatgatctagaaaggtagcctactggaagtcattagaaagaatcaatgtccaaagcaatgaaaaaataactcaatgttcatgccgatgcaataaagcagggaagagaccacttctttagccaaatgagaaggaaactgagaatagacctactgatggtattcaagttcatcaagagttgttattaagttg

SEQ ID NO: 373742 - DNA, 268 bp, Homo Sapiens
cgagtgggtggcgggggaatgtcctccgaaccaggcacagacaggctgcggctgaatttcatggctgggggtgctaggtaaggtcaggtcatcttctgccgcaccgatagatttttgccggagcatcaacccaggtcctggaggcaggaaagaaggacgctcgtaactcggctgggcacggcggtggggatcgaagctcgactcagtggcaaagaacctttgggtcggtgttgcccagggacacgaggccaccgggaccaggctcact

SEQ ID NO: 373743 - DNA, 455 bp, Homo Sapiens
ggatcccccgagtggtccctgctgaggcaggctgagcttgaggagggccggccgcagcaccaggagcagctccggcagcaagctcattatgatgctaaggataatgatatcgttcaggcagcagaggaccaggaaatccaaggagaggaaggaggtgcctatgaaagagacaaccagcaccaagatgaagcagaaggagatccaggtaatagacatgagcctcgtgaacaaggaccccgaaaagccgacccagaatctgaggcagatagggcagctgtagaagatataaacccagcagatgaccctaataatcaaggtgaggatgaatttgaagaagccgagcaagtgagagaagaaaatttgccagatgaaaatgaagagcaaaaacaaagtaatcaaaagcaagagaatacagaagtggaggaacatttggtgatggcaggaaatccagacca

SEQ ID NO: 373744 - DNA, 519 bp, Homo Sapiens
ctggccgtgcagcatgctgtggaccgggccatcatggagtaccatgccgatgccgccacacgccagctgttccagagactgacggtgaccatcaagaggttcccgtacccgccgttcatcgcagaccccttcctcgtggccatccagtaccagctgcccctgctgctgctgctcagcttcacctacaccgcgctcaccattgcccgtgctgtcgtgcaggagaaggaaaggaggctgaaggagtacatgcgcatgatggggctcagcagctggctgcactggagtgcctggttcctcttgttcttcctcttcctcctcatcgccgcctccttcatgaccctgctcttctgtgtcaaggtgaagccaaatgtagccgtgctgtcccgcagcgacccctccctggtgctcgccttcctgctgtgcttcgccatctctaccatctccttcatcttcatggtcagcaccttcttcagcagagtcaacatggcagcagtcttcggaggcttcctctacttcttc

SEQ ID NO: 373745 - DNA, 499 bp, Homo Sapiens
cgagatggtcctgcaaataagcccacgtgagttgcactgaaaggatcagggcactggttctcgaggactgggaatgcaatgataaaacgaaatctcaccagcactcagtaaagccagatccaatggcagccttgggctggtcacccctaaaccgccatgtgtcagtcgggttccgcctcccagaagcgggttaccctgatttgtgagctgattattctagaagactccagggtctgaaagtatctcaacaggttggctatgtaaaaacacagtcaatcaagcagccagacactttgcagagagactccactccacgaagaattacaggaggaccagagggtctggctgtgccggatcccacagctcagcggctacatgtcccccagaaggtgggcccaggaaggccctgcaccttgtatgggaagctctctactccccaacacaatacccctcggccttgactgccccttagacaccgcctgcctcctgagtagcttgg

SEQ ID NO: 373746 - DNA, 500 bp, Homo Sapiens
ttttggttcggttcacacaaatgagtgggttgctgtgctgtctccgaaagattctgtcgttccccttggcctggctccctgcccggggctggtgctgtggtacctacatcttcaggaagctgtgcagcctctgccattgccaatcccagggggatctggcatcctcctaaggaccggggcgcgtggcccagataagaataggtgttcctttgtgctcataaaacagaatgcggcgatggttgctttagccgtttctcaccatgcaatgcagagggacaaagggctgtgctacacttcccagttacattctgaagctcataaatgtatgagaaggtttgtgattttgcacaaggtgtgtgtagtaagttaaattgttgaacacaaaaatgttgctgcttgaggcataagttggataataggctttaaatgatcagggattcaggttcataatgaacttcacagtaaagaacacgtttgttctgtaaagcattgaacatctg

SEQ ID NO: 373747 - DNA, 647 bp, Homo Sapiens
ctcatcctgggtgaagtctgtgatctcagtgacaacaaattggccggtcttattggaacattcaaagagacgagactggacatctaggatttcctgctgaagtctgcaatatagtccatttaagggcatcaagctgcttagaaatgtttttaaaactgaggttttagcctttgtgcaattcacaagcctggcaggcagggggagcccagaagagggggaggctgtgttcccataccttttatcattggcatagggagttttccctcccagtaggtcccagaactcggctggctcctggccctcggcacagtgttctcgctgccatcacagagaaggctggccagctccttagccattgcccgctcatccccactagaccccttgccataccacaggtagtgctctgcctgagttcgcagcagaaagacatcattggagtttagggaggaggcaaaggctggaacttccactgctttggtgttagatttgtcatttccatgaatttggaagagtcttactggagggtcaggctcggcatttcccttcctggaagtcccaccctcaaagataactagcttccctttgaagatggccatgaagtggcgtggctccgttcccatcctgactcgaacctgcacagcagcccc

SEQ ID NO: 373748 - DNA, 810 bp, Homo Sapiens
  misc_feature (795)..(795): n is a, c, g, or t
gaaaaccaaacctgaatgctcctgcagtgaggagatcagtgacacctcccaggaaccttctccacccaaggcatttgctgttaccaggtgtgggtcctcacacaagccaggggtccatatgagcccgcagcttcatggcccagaatctggacaccacaaagggaaagtgaaagcattggaggaggataatttgagtgagtcctcttctgagagctttctctggagtgatgatgagtatggccaagatgtggatgtgaccaccaacccagatgaggaacttgatggggatgaccgctatgacttcgaggtggtccgctgcatctgtgaggtccaggaggaaaatgacttcatgattcagtgtgaagagtgccagtgctggcagcatggggtctgcatgggattactggaagaaaatgtgcccgagaaatacacctgttatgtttgccaagaccctccaggtcagaggcctggcttcaagctactggtatgacaaggagtggctgagcaggggacatatgcatggcctggcatttctagaagagaactactcccatcagaatgccaagaagatcgtggccacccaccagcttcttggtgatgtgcagagagtgattgaggttctgcatggcctgcagctcaagatgagcatcttgcaaagccgggagcatcctgatctgccgctgtggtgccagccttggaaacagccatcaggggaggggagatctcatttcagaaacatccctgtcactgacaccaggagcaaggaggaagctccaagctatagaactttgaacngggcagtggagaagc

SEQ ID NO: 373749 - DNA, 479 bp, Homo Sapiens
agtggtccctgcagaagctcctacctggctttcctggagtcaacccccaggctccattccgtgcaggtggcccctaaggtgaacttcatgcacaacctgttgcctatgcaaaacttgcaaccaaccgggcaacttgagtacaacggagcagtctctcctacagccgcccacgctacagctgttgaatggaatgggcccccttggccggaggcgcatcagaatggacggagccaacatccaactgcatgcccagcagctgctgaagcgcccacggggaccctctccgcttgtcaccatgacaccagcagtgccagcagttacccctgtggacgaggagagctcagacggggagccagaccaggaagctgtgcagaggtacttggcaaataggtccaaaagacatacactggccatgaccaaccctacagctgagatcccaccggacctacaacggcagctaggacagcagcctttccgtt

SEQ ID NO: 373750 - DNA, 489 bp, Homo Sapiens
cagacagctatacaggtctgcaaggtaatgggagagaggaatctcgcattgctccaggggcgcagatcaaatccctttgccctgtgcattgcttactgcaaggagctgacaagatagtgacttcgaggatgacgagctggcttctatttaaagccacgatgctagtcaccgtcgctgtgagactaatcagaagggtgcctgtccgatgagcctcaaggagctcgcacagctcatgtggctactcaccgatgctgatcaggtaccaggtgaggaggccagacccgggaacggaaaggctgctgtcctagctgacgttgtaggtccggtgggatctcagctgtagggttggtcatggccagtgtatgtcttttggacctatttgccaagtacctgcaaaaagcaggagcacatttcatagtaaaaaagacagacaggaatattcctccacaagaagcattagaagttaatccaaagcactcaatgaaatag

SEQ ID NO: 373751 - DNA, 410 bp, Homo Sapiens
tcttctccctgacagcatttcgcattataatcactttattcataaatcaaatggtccatttaaaagagattatatagaggaaaaattatttcaaagacttgtttacccagtgtttttactataagctagttcccaaagcctataaataaaaagggttattttcatgtgaactgtttaactcatcaatgtgtactatgcatcttgtgtagaagttagtcctcctctgaaagaaatttccagaaatatatttttatttaggaacaagagcttaagttataagacactctaacaaagtgtgtgtatgtgtttgtatgtgtttttctaaccatagaaaacattattttagtgaatgttcaaatacacagtggtactgtctgcttctctggaagtttctgtgtcagggagaagat

SEQ ID NO: 373752 - DNA, 592 bp, Homo Sapiens
tagggaaagaaaatctgagacgtgagtcatgtaaatggtattcaaaaccacaggaacagaaagaaagaggctaagtcttcgagaggcctaaactcagcttcacacagtgtgcattgaacaaatatgaattatgaagtaataataattcaaccttctactcagcaagcatgggaaataatgacactagcaaaattcactcagaagtgtttattaacagagtttaaacaaaagtgctactgatttttcagtacttggcaaatccaatggtaattcaacctaaaaataattacaaccaggatgagtttcatctgacataaaggttaggataaccccaataaaccaacaggatatcttgatataaggggaaggcaatagagaaaatgcttcgggtgataaatctgaaatcttaaaaggtaaaatgaggcatagatactgatgttttccaagatcaagatacataaatttatgacaacattttagtgagtgaaagtcggtgtttttagctctgtcctatttaaatttttctcttggaacccctgaaaatagacaagagtaggaatgagtactgtagtcaaaatgtcagggagaagat

SEQ ID NO: 373753 - DNA, 610 bp, Homo Sapiens
  misc_feature (222)..(222): n is a, c, g, or t
ctctctgacctgccccctaaaatacttccacagtcatcattgcataccacaagtcccccagcaagattattttaaaaagaagatgctcgccaagacaagcaatcaccagaatgcacagaaaaatatgaggacctttggtttgttcctccacttggtaaaactcagaaagataatggcctatgttggcaacggtatgtgaagggaaaggaggcgctttgggcnactgctgaaggcagcacaaaactggtgaggaatgtgcaacagacaatttggcaatatttatcccaaattgattatgtgttctcctttggacccagagttccctatacttaacacctgttttacagaaatggttttgtatgcccccaaagagatttgttcaaggacactcatgatagcaatgcatgtcagaggaaaagaagaaaaaacaaaagacatatcctaagtatgctctttatttcacaccaggatttgatcaaatggtccataactttacctgccatttattttccccccagaagttcaactcaccttcctttctgtgctgccatctctagaccataagttgtccattttctctgtgtctagacccaagctgctgagttctact

SEQ ID NO: 373754 - DNA, 406 bp, Homo Sapiens
  misc_feature (194)..(281): n is a, c, g, or t
tcttctccctgacagcaaagctgaggaaattcatcaccattagaccaccctacacgaaatgctcaagggaattctaaacctggaagcaaaaggatgacatttgccaccatgaaaacatacaaaagtacaaaactcactggagtaaagcaaatacacaaagtaagaagaaagagaaaggactcaaaccacccctnnnnnnnnnnnnnnnnnnnnnnnnnnnnnnnnnnnnnnnnnnnnnnnnnnnnnnnnnnnnnnnnnnnnnnnnnnnnnnnnnnnnnnnnctcacatatcaataataaccttaaatgtaatggattaaattctccacttacaagatatcaactaggtgaatgaattaaaaaacaaggtccaactacttattgcccacaaaaaacacacttcacct

SEQ ID NO: 373755 - DNA, 209 bp, Homo Sapiens
cacaactccctcttcacagcaatactaactttaaatgctaattttgactactgcatattaaggactaaactctagtgaagagaagaaaagctcagtacagtataaacaaaggttcgaataaacattagttggctactatcctacctcatccacatttccctctcttacataatctttcaattaccgatatttgtaatgatgatattctg

SEQ ID NO: 373756 - DNA, 391 bp, Homo Sapiens
tccgtacgtggcttcagattgaagcagagttcatgaggaggcctgacaagcattttgatccatttactgaaggcatcgtagatgggatagtggcaaacactttgtctgttaagattatttcaggtcagtttctttctgataagaaagttgggacttacgtggaagtagatatgtttggtttgcctgtggatacaaggaggaaggcatttaagaccaaaacatcccaaggaaatgctgtgaatcctgtctgggaagaagaacctattgtgttcaaaaaggtggttcttcctactctggcctgtttgagaatagcagtttatgaagaaggaggtaaattcattgccaccgtatcttgtccagtgagccgtacggaggggatcctctatgagtc

SEQ ID NO: 373757 - DNA, 369 bp, Homo Sapiens
gtgacttcaaaatctcgataagagttcactataacagaaaaattacaaatgaccaatgtaatatgtagtaccataacaaatcttaacactagaatagttaccatgtaatctgaagaagcaatgaactccacagttgaattctgaacttctggtcgtatatgaggctctccataagatcgggtaagggggttatacataaattcttcaggaactagataagaggtcccagtacaaatttagagacacaatttgtaactaaacacatatatacacacctaaaaataaatatctattatcaatatttacacgaggtttagcaacagtactgcgaacatttaatggtaaaaatcaatcccttaagccctcctt

SEQ ID NO: 373758 - DNA, 265 bp, Homo Sapiens
ctccgtagtgctcatgtacatcatgactagagatataataccttaagtagttagccaccaacactccaatcgcaaattctggaggtctgggattattccacaaatcactgggttagatgcaaaccttctagagaagtctagtatcagcagagtaaaacaatctcctgtttaaaaataagatttctttatcactgccctgctttcacgcaatcacagcttcttgtgatttacttatttattttttagatggagtctcactctgttg

SEQ ID NO: 373759 - DNA, 725 bp, Homo Sapiens
cttcaatctagtgtatctgtatacgtcttaatgagcagccaaccaagcccaggagtgtggacctgcttcttcagtgggttatgtgatttgagctgttttctcagcaaatgatagagctaaccaatacgggcccagtttttggctagtgagattgaggcattgggctttaaggtgcatggtggtgaagtctgcagttcaccacggaacatcagagcacattaactgcagggtgatctcaagcctaaatttcttatggagctgctccaaccaactgagccttgtggttattttactttgtgcaagaagtaacagtgaggcagcagaaagagaggtgataaaagcaaagattgggcacttaaagcaagatatttcagatagtatgtaagtaatagtcacttactcttaggtaatagcacaacggaatgaaagtacaaaggccaacaatgttgtgggtagcactccatcatgaaagcagcctcttaagtaaatcttcaacaaatgtaagctccctgagggtgaccaagataatcttgttgtataggtatccctggctctatagcataacccctgaattacttactgattgaatgatgtatatccaaatgactgctgtgcaagggaaaactgtatttctttaaagaagtttctcattgcatctttgatcttaaggtaggctatccatcattttgtattcattcttgtgcaactggtgatttcctttatgt

SEQ ID NO: 373760 - DNA, 313 bp, Homo Sapiens
accaatgaactcctatctgatctctctgcttctattcttcaccacacaattctttctactaataacatacagggccaccattttctacttacatgtgtaaatctcaccactgccccacttgaaaaattacagtgtagtaccaatgtactatgacttacaataaaatcccaacctccttaccataacctaatagactactagggatctggcctcattctgcctctcccatttgaccacctatccttctccccctccctcacttcctttgtgaaactgccaaactcaagttctgagcacgtcggaggtccgagcc

SEQ ID NO: 373761 - DNA, 525 bp, Homo Sapiens
cgtgtgctcacttcttactccaacccactcacatattcaaaaccttgttaacagttcttacctctctcagattcaatattcgatcaataaaatagaggtaatatcagtctctgggttgtatataccgaattaaataatgtatgttaaaagctcaaccctttgaaaacatatataataaatgacaaaggagaaaaaggaaaactctgaaagtggtttatatattcaggatatctttacaataatttgctgacttgggagtttaaccattagtagaattagctcagtggagttaagtggtacaaacataggctttaggatcataaatgtgccactcataagttgactaactctaggcaagttacttatcttctcgcagtttacttcctcatagaaaattagctaatatctttttcctctagcaaaaagaaaacaaaatctagataatatttaccttatgacagtggtttgtcacgctatgttcgtaatccttaggtcaaaaaaatgaagcgaaagtccatgagccac

SEQ ID NO: 373762 - DNA, 576 bp, Homo Sapiens
tcttatcgaaagtggtaaagtgagtgagtgatggactaaaccttgtgttccttaagtaattgacaaagagcatatttctttatggaagtgaagattctaatgcatttgaggagataatacagtacagtggttaggagcgggactggaggcagactgccttacagtataagtctagcgtaactgcttgctatttgtgtgaccttggataggtcacttgacctgtctgaccctgtttcctcatctataaaatggtgagtgttccaccagagtacactctaactacagagattaaatggtacctgggttgaaagggatctggaaataaagctagaaatgtctcactgcatatacatttctttgaagtatctgttttgccttacaaattcacgtaggtgttggattttaacaccatattacctatttaatataaatttaatattttaaattacttaccattaggtaagatgtatcatactgtcctgaggtatcctctctttctctggaaccacatgccccagcttggaagtagagccctgcatgtaaagtgccttgaatgctaaaataagaaatttggaa

SEQ ID NO: 373763 - DNA, 620 bp, Homo Sapiens
aaaagcaggaaaacttagcttcatcagcgtgggaaacaagtttaagcggttttgttttagctggagtagtccagctcgggatggctagagaggactagttgagttgagagaggaaagcaggcacagccaggggcttcagacacagttaaatttgcttctggataaacttcgaagtactggagcaagccttattcgttgcatcaaacctaacttaaagatgacaagccaccactttgaaggtgctcaaattctgtctcagcttcagtgttcagggatggtgtctgttttggacttgatgcagggtggttacccatcacgagcttcatttcatgaactctacaacatgtacaaaaagtatatgccagataaacttgcaagattggatccaagactattttgtaaggctttgtttaaagctttgggcttaaatgaaaatgactacaagtttgggttaaccaaagtattttttagacctggcaagtttgcagaatttgatcagatcatgaagtctgaccctgaccacttagcagagttggttaaaagagtcaatcactggctcacatgcagtcgctggaagaaagttcagtggtgctcactctcagtcatcaaattgaaaaaaa

SEQ ID NO: 373764 - DNA, 388 bp, Homo Sapiens
gcttcaaatgttctaaggtgttttccctgtattaagaactattatccccattttacagaagaggaaattgagacacagagggcagtaggtacatagaagttgttcagtaagtgggagttatatttactatataccttcacctgagtccctgacgtagtttcctatgtatactccaaatgtgtatatttcttgcacattaggagtcacaaattatggcccaagggtcaaaaccagcctacagacacatttggtttggactgtacatggttttagtaaccagagattttcacataaaaatgcccttcacatgtgtgcacccacccccttgcccctctaaacttcctaaatcccacctatttttcaaagcaaagatcaagtgccttcccac

SEQ ID NO: 373765 - DNA, 815 bp, Homo Sapiens
taaaggtggactccttacttttatatttcaagatttctatttgtatcaatatatgctgcattttctgattgaaattgctgttctgtctaatgaaacttgtgattttctgtagttgctttttacatttgaaagcaaactttcatactgtgtgtgcttaactgtaccccttctgttagggatttgattaaaatactctaaccgtttcattaattcctttttatgtgcttaatgtatgtgacatttatggctttgtcatctcaaaagctatctgtggacaaaatccatgaagcctgttgactgtgatttatacacgtgaaagaaaaaaaccaatttcctcctaagcagtgaatcagtgaataagaaactgttcagtggcctctgattcctgacccttttacccttcatggccttttttctattcttaattattccttgagtaattgtgtgttcttgtaaaatgcaaaatcaatttacatgcaatcaggtatggacacaagaaatgcttgtgctctcgatttcaggactcacagataccataacagtcacgggactgtagttcactcagtattttttgttaataatgtggctttgctataaaataacttggtgtttcctttgctttggtactacaagattttaaatgttgcagcaaatgaaagaatgaaaacacatttgaaagctggtgtcaaaaatcatcagctgtacttataaaagttgttgtgcagcttctgaaatgtagtttattgctgtaaatatgtacaatttatgttagttcgtttattctgaaaacacaaataaaactttttttaaattac

SEQ ID NO: 373766 - DNA, 565 bp, Homo Sapiens
gacagaaaacacatgctgccagtctttttaaagactaggccaggggcttaggtaaggtcatttctgctgcattctattggctaagcctccttagagtgagttcatatgcaagaggagaagaaatatatttcaatcttaatagagctgtgaccaagaagctgtagccaactttattctgccacagccggaatacggaaagcagatgggagacctttatgagatgaagctgggagaggaaatcagctggctaaatcttagcaaggcctcatagcaattttagaatctaaaatgacaacaatagaaagactttgggtagttttaagcagcatatttaagcatagttcagaaataatttatacgataagatcactttggagaaaagagtgaaatcccaggatatgaaacaattggtgacttagactagaaaggtaggtagggatgaagggaagtcatatgtgaatattgttcagaaggcatatttgagaagccatggtgactgctgcatgtaggaggtgaggtagcagaaagcaaggatcttccttctgtcttgataatgttagagata

SEQ ID NO: 373767 - DNA, 392 bp, Homo Sapiens
gcacccatgcttatttatttatgtgtttctttggctgttctcgtgctacaatggcagagctgagtagctgcaataaaacatacagctctcaaagccaaaaatatttactctctgtccctctgcagagaatttgcgaaccacggtctagaatataaatatagcaactatttagaataaaagactaatacatgaatgttttcttgtcttaaaccatggttcacttgacggatttttagatagttttacacaagtaattgtctaaatttgcaaacattaaaaactctgtttaagggaactccttccgtactcccatcctcatatcctacaatttcaattacctgagaagctacaaataaaatcaccttaaagattgctgcttttaaattctaacc

SEQ ID NO: 373768 - DNA, 884 bp, Homo Sapiens
  misc_feature (530)..(530): n is a, c, g, or t
  misc_feature (532)..(591): n is a, c, g, or t
  misc_feature (675)..(675): n is a, c, g, or t
  misc_feature (824)..(824): n is a, c, g, or t
  misc_feature (843)..(843): n is a, c, g, or t
gcacatggctaacaatggaggaagagggggcaggggcaacaagggccaaatgaaagctaccatttggcctgtgaccaacctgggaacaactgcctgctgcctgcgcgctctccacccctcagatgtgaatgaggccttcctgcccagagacctcccatacccttatctccaggccacatatgagagcagaccgattccatgttagacttatgatacctgaatttgcacccaggaagggggatgctgcaaacagcttaccttcagttacgacccggtcagtcccgatttctcccatctcactttctcttagacaaaatccctgagagccaactacttactctacccacccccaaatcttctccacccaaccacacgggaacctggcagtccagcagaggccctgtcagagggcagagaatgctgcagggagagcgtaggtcagatctagggaggaatgccaggccagaaacccccttgacagccttgtggacaggatgtctgagggtccctccctccagttcctttttttntnnnnnnnnnnnnnnnnnnnnnnnnnnnnnnnnnnnnnnnnnnnnnnnnnnnnnnnnnnnnaaagaaatcacctgacctaccttgtctgactataggttgtaagacccccattccagagagagtcctgcccatacccagaagggnaggaatgctgctcagagaggctgagaagaatctagacagacagacttgctgggtttcccccacttcagcctatttaagcattaagattcataagccttttctttccaatcatattttccacacagctggtccatactttgttgaacctnagcataaaaatgggacaanttttcccggaacctttgggtcttcattctgaagggtcctgg

SEQ ID NO: 373769 - DNA, 503 bp, Homo Sapiens
tgctcacaatcatggtggaaggcacggaggagcagtcgcctcttacacggatggcagcaggcaaagagagagcctgagcagagaaactcctgtttttaaaaccatcagatctggtgggactcattcactaccatgagaacaatgctggaaagacccacccccataattcaatcacctctcactgggttcctcccacgaccatgtgggagttgtgggagttaaattcaagttaagatttgggtagggacacacccaaaccatatcagaagtccaatttatttatttttttcttggtttcttatgcttttgctgtcatgtctaacaaagcattacctaatccaaggtcatgaaaatttatacatatgttttcttctaagagttttataattttagcttttaatttagatctgtgatccattttgagttacattttctgcatggcgagataagggtccaacttaattctttgcatgtggacctctgttgtcccaaccgactttgat

SEQ ID NO: 373770 - DNA, 325 bp, Homo Sapiens
tcccgtgtgaattaaccacattttagaagaacaggtgtgaattagaataactgttgagatgacattctctaaactccacttcaactgcggtgacagttaatgccttcagactgttccattcatcatcccttcttcacttgatgtgtcatcttaaatttcttaatttaactactcaagtaataagatcatattttttgacatgagtctgagcctagaaccttagtttaagccattgggagacattagacttccatttttattaatagattatcttttatttgtaaacaaagtatctattcatatgaagggaaaattcctcttatca

SEQ ID NO: 373771 - DNA, 314 bp, Homo Sapiens
cgacttcttggaatttaatgaaaaagtttagttgaataccaatttaagttcgctgccaagctgccttgtgtttcgtaaaacaatagggagacatccggagtgagtgctttttaaataaattaatggcgtatgtcaggtatatgtaaaaggacaacccccataatgaactcatgttaacatgatcaatccatggccaatcttgatttatctgaaatgccattcatctttgaacccctatttattttgaagcaaatcccagatagcaaatcatttcatttgtaaatatttcaatatgtatgtctaaaagataagga

SEQ ID NO: 373772 - DNA, 464 bp, Homo Sapiens
ccgttgtcagtgaggccgttctcagtgctgcaaaagagcccactttctaaaaggacgtgggaagaaagctgctgggaacgtgcttatgaaaaaggtccttagaattaacgtatctacccactgctttcgcacctttcaccttcctgggctttcctgccctccagcattcttctctagagaggttcctagcccgctcagcgcgagcgtctccagtaggtaatagcagctgaacgtgggttttccacggacttcaggcttggaggtgccatatacaagcacacttcttccttcccctggcttctccatgccaccacccactttaaagatgtaaactcagtagatttttcatccagtgaacggtcatcttcacatcgaaaggtgaaggccaccactgttctcaatgccaagcaacagaacgttctgagatggccgttcttccttgcactgacaacgggggtaccgag

SEQ ID NO: 373773 - DNA, 404 bp, Homo Sapiens
tctcagcaggcatccctctgcgtgcttcacattgatttatattagtgtgccagtctttcccctacctccctaatatttcaaacttcttgtggacaatgaccattcattttcatacctttatatttccagtgccaccagaaacacaaaagcagcttagtgttgatttaatgaagcagcaaaatgttaaatacataacaaaacagattgtcctgtcacctaaaacaaattagtgatgtttgagtaattagggttttgcatgtgtatatagaaaggctattttgcaaacagtggttcagtctgtattgggcacaggtgaattctgccctgcgattgccatctttagcacttttcagagaatttgttgccatttatgacactgatcttcagacacactgtgtaagtgc

SEQ ID NO: 373774 - DNA, 388 bp, Homo Sapiens
atgaatctaagtgggttgtctcaataagctgacaatttgcatgtgtgatgagggaggagggaggtgggaggtagcaggaacaccatattgaaacctagtgttgaaataaaagaatattgtaaaaaagaaaaaggcagactctagacaaagaaaatggttaaaattgtcacgaggagtgttctgaagccaatgcctctctacagttaacctgagtatgtattaatcctgagtgtgacaggtaattaaaacacattatttgtctaaccacacttcctgggaggaggaaacagtagcagagccaaacagatgaagacccaggacctagacacaatacttcaccatgcgcaacagcaaagtgcgtgcaccacatcctagaaaatgacaggat

SEQ ID NO: 373775 - DNA, 351 bp, Homo Sapiens
tcgtggcttcactctattctaacaaagtagttatctttcacttcatttctagggttaaatgttacaggaaatgtttactttatcaaacacttaaatagagcttactataagcctcaccctcttctaattgctttacaaatactaatttctttagcaatctatctatgacacacctatgcggtagctattacaggtacaaaacctgtattccaaaacccttagatcatgtctgtctcagaatgtaggcatttctatacttttgaaaagtaaaacagcatattctagaacttggcccagtgggctagggtagcctgccaccaagatagctggactataaaatggaagaatatt

SEQ ID NO: 373776 - DNA, 281 bp, Homo Sapiens
  misc_feature (42)..(56): n is a, c, g, or t
gtttatacagctacagaaggttctctctggatactagttagnnnnnnnnnnnnnnnaaaagccattttgatcttgttatgaacgatatattctcccatgctaggacaggaataacacagtagtagtagggcagaatgaatacaaattttgcaatcagtagaatctaagttcaagtctctatactgtctaatgagggtagctctactctctgagactagtacctagtacctacgtcacagggtgtatctgaggattcaattgagtggatacatgctaaaaca

SEQ ID NO: 373777 - DNA, 357 bp, Homo Sapiens
gtaaaaaccaaaccaagtaaaacaccactcagaagctctccctttcccctgagctgctgctttagatgtgtggacccgacaggtacctataccctcagagcagaaatccaggcatccctggcagccttccttccccacccctcagtcttgctggtgcccagatgggagctggaagagatgtctcctggatgggcgctcactttgctctactgtaacccttggtggcttaaccccagaccactcctccttacaacagcctctggaccctgagtctacccctcactcttctgcgcgtccgtagcggccggccgctacggacgcgggcgggggatatagggtcgaagccgcactcgtaag

SEQ ID NO: 373778 - DNA, 488 bp, Homo Sapiens
  misc_feature (458)..(458): n is a, c, g, or t
  misc_feature (467)..(467): n is a, c, g, or t
cagtcagtggcctctgctggagacaaagcctgcccagctggtgaccagcaagtgtcaggctgacgcccaggcccagcagtggcagctgttgccacacacatgacggagggattttcttgaagggtcagctattgcactgtgctgggaggctggctgtggctcctgtttgtgaagagaactcccagttccttttcacagccgctgagaacacatccacacatctaccccacggccttgtcttggaactgctcctgctatccccacaccctgcttcctcaccccactggctcttgggcaaatgactgttggtaccagggaccctgggggtcttccctaacaaagcagaccagcctgggggcagatattacctaccacaggagccccctgttttttcatagggccaaggattccacattacccattaggagtttcatgggattttagaagggttttaggantttttttgnaaattttttccttaaaattat

SEQ ID NO: 373779 - DNA, 393 bp, Homo Sapiens
acatctccttgtgctacttctgttgggcaaaatctataggactataaaaatctattggttctcttctaagagctagtggtgattgttaacaaatagggttgcagataatcattcttattgtaaatttaacttgttttcacatagtttcgttttcatgtagcactaaatctggagaaagttgctcatgctacacagtacaaatatcccttcctcccaccataaaggcttggaatgtttccatggtgttgtcagttaattgtcaacttcattgaacccccttcctattagaacaagagactttgactattaaagtagattgtttattgttgcctgttagtataatgggagcctgatttcccagtgtaaatatgttagaggacagcttccttacga

SEQ ID NO: 373780 - DNA, 320 bp, Homo Sapiens
acaccgacctgagtcctttgaaatctccttctgacatctttcccttctgttgtgaaatatgttaagccacaggccaaactgctataagatcgaagttctgtttttttctcacctaataatagagaggtaatcagatggtctagggcagatttaactctacaaggttatcaggaactttgtttccttctgtcttattcagccattcccagtatgttttcttacccataagatcaaagcagactcatcagctccatatctgcattccactggggaaagagagagagaaaagagcagatttttcaaaaaagatatgactgagc

SEQ ID NO: 373781 - DNA, 273 bp, Homo Sapiens
  misc_feature (193)..(202): n is a, c, g, or t
tgcgccgtactgccaccgggatggtgcattgactgctgacccacatgctcctcagcaggggacagctgcatccatggtgctccatgcacacaatcgaatgctttgcagtcaagagaaggcaatgaggaggatctacatactgctatggcgtgaaaaaaatagggtgcagaataatgaggataacatgcaagcnnnnnnnnnnggtttgagacagagtttcccttctgtcacccaggctgaattgcagtgccttgactctgtggctcacgtgca

SEQ ID NO: 373782 - DNA, 754 bp, Homo Sapiens
ctggatgtatgcttggatctcccgggcacttttattctgtataaatttctcatagttatcgggggtgtacagccgcagtctgtccttgggagagtattttctttctgtaacaagattcagggcattgtcggagcgggactttctacttctccggcggcggtggtgatgagacctggatcccctctcttcaaaattgtagacgcgtctccgagtcctttcactcatcggaggctgccggatttcaatgtcatagttcccattgtcaatgacatcatcagaaaacttgacctgctggggtctggattgagacttggaccttctgagcactggcagatgtactggcttctcttcaggcaggattttctctggacacaactctgaacttagactctttaaggactctgcactcctgtgcagccatggaagagttcaaagttcccatattgctcatcttctcacaatcttctgtttccatctcctcaaaattttgcagagaatacaatgatggccttggcttgttttctccatccaccgaagcccctgtgatattggacaatgccaaagaatccatcgaatcccgaacactttgctctggtttcaggtctgacagacactccagggaatcttcataccactgtgtttcatcatgattataccctgaagccccatggtccagttccaattcctgaagccttctactgcttgcagggcctgggtggctgccataagcagaatcgcccagtcccatcttgtg

SEQ ID NO: 373783 - DNA, 171 bp, Homo Sapiens
tgggggggctatgggggcacttagcgtgcgagtaggacaggggcagaccagaaatacctgcaaaacagtaatagctatcactgagccactaccacaggcccaacactttacaaatccaatgttgggatcccactgataaaccagtgatgagagataaaagggatggatgaa

SEQ ID NO: 373784 - DNA, 403 bp, Homo Sapiens
ctagagaaggcatgcgcttggggtagaacattcccaccctgctgggaagctccagtgtgaggaactctccaacacagctgtgtgcgtaagctggaaaaattaagggcaggtcagcatccaccccaaattcacagagaggccgttttatggctctgctactcacatctccctttcttggaaaacattttaatttaggtctgacctcttgcatggtgggaaggacccaaggtccttgagtaactcagcgaaggcaggggtctctaccttcccatcctagggcagaccctgaacacaagctccttgagctctccaaaaacaaacccacaccaaatgaagggactcaggcactggtttgactccccacaggacggatcagctgctctagaggggcggctcttctctg

SEQ ID NO: 373785 - DNA, 247 bp, Homo Sapiens
  misc_feature (226)..(226): n is a, c, g, or t
tggaacgtttggccaactgttccagtcggaatcttactcatagtagaaccagaagaagtacagatggcaccaatgtaactcatttatctaatatggaatcggtacacaatctggtctacgcccagctgcagttcacctacgacacgttgcgcggctacatcaaccgggcgctgacacaaatcgcagaagcctggtgtgtggatcaacggcgcacctagaggtcttnaagaactcagcagaaaacccg

SEQ ID NO: 373786 - DNA, 391 bp, Homo Sapiens
gtctactgtggcctttcgatcatctaggagccgctggagcaacttctgttcttggatctgtgctttcaccactttatactcagcagatggaggtttctgattggctatgagctcctcggtatctgccaaccagctgagcaatggctccaaggcatcttgaaacttcccacaatgcaacaaagcttgcctgtagctgtgcaattctttgtgcgaccttttaattcaatgtattccatcgtagcattgatctcttccatgtcatgttctaaaccctgtacatcacagtcttttcctgcactctgaattaagtccctggccaagtccattcacctgctgcaatttcatctgaagaggatccacttgttctttctgaaacatctttaaaatctgc

SEQ ID NO: 373787 - DNA, 407 bp, Homo Sapiens
acaccactgagtcacgttgccagaggagatgatcaatctggggactagataattccagttcactttaaaataattttgttacaaagcaggcgtggtttatcaacttcaccacggcctaaaagaaatatgctcatgcataaacctctgaacaggtgatttggtgtgcagagtgctttggctttgctgtttagagagaagaacactggaaaacaggtgggtgtaggtgttgtcaatgaaaagaaagattatcctttgtaaattaatgagatggtatcctgatttatgcatatgtcccttctgttctgagtctgtttattaggagtaagtttccctttctctgatcaactcaagattgactttataggtatgaaaaatccaaagcaaaaccctcagcaatcatgacctac

SEQ ID NO: 373788 - DNA, 276 bp, Homo Sapiens
tacctttcatatgctctggactactctataatgcataagaaggtagcaaaacaacttccaaggggctacttattacctaaagaataggtaagtgaaatttagccattgtcttttaggtaggaagttcctgtttttagaccttgaggccatccctcttaaactatcctcctagattataaatcctttagagcagagatgccatcctattttgtttggcacatatcactctagagcctttgtactatacaaagtcctttaaaaggactttatatattt

SEQ ID NO: 373789 - DNA, 433 bp, Homo Sapiens
aaggatcccacaccactgagtcattgaaggattactgacaggagaatggcatgttttagaaaaactacaccggcaatatagatcaaagattggatggaatacagttacgcaaggaatcagaagaatctttaatgatggcgcacgtggaagtgataaaaacttataaaacagcagaaatctgtaaatattgtgcaagacaacttactagcatattgatctctactaaagctacaaaatatctaatagagttttatagcacgcgatatatatgcttaacaataaatatttttggactatatctaatgttttctattttagtaaaacagaatttccattcagtaaagcaaatcattttcaagaaaattctttctgggtcatgaagtgccccattgtcctcttttccacaagcaagagagcttggcgaaaactcatg

SEQ ID NO: 373790 - DNA, 533 bp, Homo Sapiens
catacctggaccttctggggccttgagagacatgctggatcaagtctatcagcccttagcagtccgggaactgcttatcctccagggaggaccaccccagtcctgcacagatgtgaagacacagatgaggtgtcgggccccagcttggcttcggcgtctatgtggacagctgctctctgaaaggttaatgagaactaatggtgttcagagcagtaatccggggcattttggaaagagcaggtgcgggaacagatggtggaagtgatgctgaggtgacggatgctgactggaagaagtgtgacctgatcgcaaagattaaggcctcttgtccccagcagtctcatatatcaccaaagaattactacaagggaacatctgcccccaggttctggatttatttacactttcaagataaattgacagcacagacaataacagagagttgccaccactacctttataacttagtcaagagaacgcccacatttggcagcaaagtatatgctccagaccagtgttcgctcctcttcatc

SEQ ID NO: 373791 - DNA, 140 bp, Homo Sapiens
cccacacttcctgagtcagtatttttttattaaaaataatagcagaggtgttgtgcattcctgctgcttcacgagccatctgtcacagacaccttgggcataagaagcttcaaaatgcatgaggagcactgatcagctgc

SEQ ID NO: 373792 - DNA, 419 bp, Homo Sapiens
atggtgttattactgaaggatgaatacttttaatttgaagtgcaatttatcttatttttcttttatctcgtgtttttggtgtcatatctaagaaagttttgcctaatccgtggccacaaagattaactcctgtgtttttttctgagttttgattgcctcatttttaatgactatttcactggatagataaaagaaccttggttcagatgagatcattgttgtttattgttggatatttaggaaccatgtatttgtggatgacctggatagtttgttctgtggttttccccacagtgtcatcttcctctatatttagacatttctttttctattataagctctttggacattattatatatgactttgtgctcagtataaacaccttagaataaaagaataagttggactcagtgactgt

SEQ ID NO: 373793 - DNA, 289 bp, Homo Sapiens
acaccacctgagtccactacaaccattgtgataaaccacagcttgctggtaagctagttttcacttctcattagttgttaatcacttgcttaatatttgagactgcctacaattagtgaaacccccatataagacttatgatgctttcagtatattttttatttacaaatacattaaattcacagcaatgagcagggaggaatagcaaaagacataagatacttacgcatacctgtttcggccttttgactgcagatccactcctgactcagtactgtggggggtcctc

SEQ ID NO: 373794 - DNA, 416 bp, Homo Sapiens
ccttcctgagtcgaagtgcctcacacagtccacacaagccccataacctggcacactaacaatcagatgcagtgacagagacctgggttgctatattcatgacactttcatacaaaatgaggtttcaatgttacattcccactttacgtatttcctgagtattcctaataagagaagagctggaagtaatgattcttctgtattctgttctgattagtcacaggaaaagctttcaagggacactttacattagcactgggaaatgctgcacaaagcaagctagactcaagacctagtattttataacctttatggagttttgctccaaagtaaactcttttgactaacaaacttaaaaatctgactgaagtatttacactattcacagtattcacaaattactttatagtgtggac

SEQ ID NO: 373795 - DNA, 499 bp, Homo Sapiens
cgatggaaccctcactatagtaggacttcggggcagaagtcacaccacaggcctggaggatgggaggataggagacacttccagaagccacactgacataagaacagaatcttctcttgggaaggccaagggaagtcagccacataattccctttccagtgtgccttgataaaacgtaaaacatgaatgaagacactctcaccattagattcttctgttagttgatctcaggaaacagaaacaaatgaaatctgacagtaactttctgtagcatcttcagggaaagctgtctcttcaccaggatgcatccccaccccggccagctgagtgactcactgttcccaagaagagtaaggacagcatgagacagccaaaggcctgcagtgtgttcaagtcaatacctgctcactcaacattagctcactggtcaccctagaattctcctagctttgaaggatgcactaacacagaactgcagctgggagagtctccgtcgaac

SEQ ID NO: 373796 - DNA, 405 bp, Homo Sapiens
ctctccatcctgccatcactgacctgcctcaatccctgttcaactctctcttattcagtctcctatgtggattgtcccactgccttctgtcctctgcgcagccacaaggcagtctatttaggatgcagatctgtttctgtcaccccactgctagacccccgcagtggctcctcacaaccagcctatagcagacaagcttttattagagcagactatactccttgtgtgcagaagtggtggttatttgtcatctactctgcccttgagattctcaactccactccagcaactctgaacttcttgcagcgtcctgcccttcccagcatcttatctttgcccatgctgctctttatgttcattctctttcctcttactctaacttctccttttagactcagtaggtgt

SEQ ID NO: 373797 - DNA, 300 bp, Homo Sapiens
catgagatcgtgcgttagtgcgtctgtgacgtgaactcgtgagtgagtctgtgagtgagatcatgagattgtgagatcatgagtgagatcgtgagttagtgagtctgtgactgagatcgtgagtgagatcgtatgtgaatgagtgagatcgtgagttagatcatgagtgaaatcgtgagagactgtgagtgagatcgtgagtggaatagtgggatcgtgactgagatcgtttgagtctgtgagattttgagtgagatcgtgagtgaatgatattgtgagattatgagtgagtgagatagt

SEQ ID NO: 373798 - DNA, 633 bp, Homo Sapiens
  misc_feature (502)..(502): n is a, c, g, or t
  misc_feature (516)..(516): n is a, c, g, or t
  misc_feature (521)..(521): n is a, c, g, or t
  misc_feature (526)..(526): n is a, c, g, or t
  misc_feature (549)..(549): n is a, c, g, or t
  misc_feature (572)..(572): n is a, c, g, or t
  misc_feature (586)..(586): n is a, c, g, or t
  misc_feature (610)..(610): n is a, c, g, or t
  misc_feature (623)..(623): n is a, c, g, or t
gtcagacatagaacgccacccactccttccaaactacatacgaccaacaacctctgggcactcttccgagcttcttgttcatgctttatcgccaaggcctagaaaagtgaatgcaaacagttaagaaccggccctacattcttgctgtctctgcctccgagactcaggagccacttttcaagagccgagacaactcgttagagaggagccgtggcctgctctggccgaaaaccccttcctattaacagactgcaactagcccggaacgactttcaatttgcagagtccaaccatattccacaagacaatctaccacctcaaggttcacgcgtggattctacaccttaaaatccttgggatactgtctttgatttgggagatgaggcaaaggaaaggaaacaaggacaaggaggaaagttgacaaaatgctttaccaacccaggaacaaagagttacctggggggggcaaattgttacaagggaaggtggggattagggaacngagagttgtatgcnggtgnggagngatttggtttgtgttctagctangtttgctttgtcttatgattttngggtgtattggttnacgtggttggttttttgtttaatntgggtttgggttnaagtgttttt

SEQ ID NO: 373799 - DNA, 403 bp, Homo Sapiens
ggatccccaccacctgagtctgtgacactaacagtctcgtgaagtaaattgactgagagggtaatagtaaatacagaagtatcgagtggatgcctgaaactagcaggagaaaaatagaaaataattatctcatcaaggaacaaatagatctattgatagtataaatatttaaaaaatgtttgtaaccttttccattaagtatactagtttatgataagttgaaatattgggccatctgccttatgaaaatccactcaatctgtgcaattcaaagtattaaaatggaaataaaataaatactgtttcacatagtaaaacaaattggaccttataactaatcatttctactcttttcaatacctcccactattctcttcttaactgaaaatgactcaggtggtgt

SEQ ID NO: 373800 - DNA, 290 bp, Homo Sapiens
aaactctgcgcggcctgttacctttgagtttttatctccacatacttatattaaaccgtgtagttcttcttcccatctgacatctacaatctcttcactgggtctgtactccatagctattttaccactttctgaaataaagttagcaaggatgaattcagaatctttttcattccaaaacttcctgcatataatggtagcaacccacaatgagacattcttttagtttctaaaagcaggaaataagcattttcctgaaagtttcctcatctcttcatcatacacttcga

SEQ ID NO: 373801 - DNA, 219 bp, Homo Sapiens
attcacacatgcacacatacacacaaaatagaagtactgtcttcgctcaagatttattcttaccctgcaggagataatcagtgatggtcaaatcaacaacagtgatatggggcaatgaaacatcaataattagttccccccattcccccttcaaggtcaccttgaaggagctggttgggaaaagcaggtttctattggtctctcagggtgtgacagttt

SEQ ID NO: 373802 - DNA, 628 bp, Homo Sapiens
aaactctgcgcggctatgtttaagtcctgagtctgaagaacttttagagtgtggttaaagaatcttggatttgggactggagggttaggaaggggacctggtaaaggtgtccctcagattgtagggctggagactgaactctgagtaaaatctaaaggtggggtaggagagggaacagcaaaggctagagatgtagaaaaaaataaagcaggagagtgtcatggaagctaatggaagaacacagttgcagaaggaagtagtcagatgcaaagaccattcctccaaggggaccgtcacttgacacctctgctctcagaagttagatctctgtcatcttcacatctaaaggaatgtaaggggtcaaaagactgtccccaaagctcttagaacaagagtggggtgggcgtacagtggatagatttgactccaagtatctcttaaggggccacttccagccaacaccttactctcactccatgaaggtttctcccgagtgtgtcctctgacacgtgacaagtaatgatgtccacgtacagctctgtccacattaccttacaaacaaggcttctccctaagcatttccgcgtgtgtggctgatggctaacttgttgctataatcacatcctca

SEQ ID NO: 373803 - DNA, 492 bp, Homo Sapiens
  misc_feature (352)..(352): n is a, c, g, or t
  misc_feature (447)..(447): n is a, c, g, or t
  misc_feature (481)..(481): n is a, c, g, or t
aaatattctgaaccctattgagctcccagttgtatctcctgttccttacctcacatgcatacactgcttggtgtttagctgaagacttaagggaaacccaatattctgccctgcaaatcttaccttggctcccctaaattctctacccagggaggttcccttccctagccttagtgccacagcttagaaaccccatgtagaagcttgcgcaattatagggctttctttgttttccatctctcaggagtcactgtcctgcactggcttttgtctaacatctgaaaaacttccttgtatacattttatataggttttaatttaaggtgggagaaggtaaatcgtgcctctgctnactccattttgactaggagtgggaagttaaactttgtatttcctaaaatgttaaatggagggctggaggcatctttttcccatgtttatttattncattccttattggctctctggaaaagcttgtttncaagtcttttt

SEQ ID NO: 373804 - DNA, 436 bp, Homo Sapiens
cgggaggcctatatacagcactttaatgacccatgttaaatctctgtaactcctgatgaatacctgctttgtacttcctacacactatactatctagttaattcaggaagaaaaatagaagacattagatgcaactattaccaaacagggtagtgaggacttggatatgttcttcaggttccttcctcaaaatttaagtccacttttcatcaatcactgggagaggcaatgtaggaaaatttatttacagaaatgaggaaagcaacctaaaactgggtggataattattaaccaaatggattttatctttaaaacagacatttcttttctgcccaacagatttttatcttggaaagcaatacttttccagaactgggccagaaatctggtctgaattgtaatagtggttggcctgtccagtccgatatattgcctt

SEQ ID NO: 373805 - DNA, 427 bp, Homo Sapiens
cgggaggccagtatatcggacttggacagtgcccaaacaactattactattcagaccatgatttctggcccaattctggaaaagtatttgctttccaagataaaaatctgtttggcagaaaagaaatgtttgttttaaaataaaatccatttggttaataattatccacccagttttaggttgctttcctcatttctgtaaataaattttcctacattgcctctcccagtgattgatgaaaagtggacttaaattttgaggaaggaacctgaagaacatatccaagtcctcactaccctgtctggtaatagttgcatctaatgtcttctatttttcttcctgaattaactagatagtatagtgtgtaggaaatactaagcaggtattcatcaggagtacggagatttactgggtcattaagtgctga

SEQ ID NO: 373806 - DNA, 1001 bp, Homo Sapiens
caccgagtgttcagctgggcgggggcaggaattgggtggtcagcaggccgccaggcgttgcctgggtgccgaagcgcttgagcagtgctgcttgcttgtcggcactgaggcggttccagacttcgaccatctgcaaggcagcgtcgagtacagcggcgtccggcgtgtcggaaggggaagtggtcatagtgaaggtctcggataattcaggcagtgtggaaagcgctcaaaggcgcgctttccacacggtctggtacggcgtcagtctcggctttcgcgctcgactggttttgcttctttggcctcaggctgcttgtcgctggcctgctgcggtgttggctgctcagttgggtgcaggtttgggaaggggagattaggtatctcgtgcatcgtggtcgctcctcgcaaggtctgttttttcaatcgcaggtgattccgcgctctcaaaaagccctggcaggatacagcaccgtaaatgacaaaaagacttttatctccacagatgcacaatttttaatggttcaggcgcaagtgacatgaggtcacacccctagaacggcaccttgcccaggatcatgtcgcggtacatcacaaaatcccccagcaagctgtagaacgggtgctgaaaggtggcggggcggttcttatcgaagaagaagtggcctatccaggcaaagctgtagcctgccaggggcaacgccagcagcagaaccaatgagcctctgccgatggcgtacgcgagaatgcctattaccagggtggtgccgataaagtgcaggcgtcggcaggtgctgttgccatgttcgctcaggtagtacgggtagaactcggcaaaactgttgaatttcttgatgttttccacggtcaccggccctctggttgctgtgccgccaacgggtgcgcggcggggagcttatttgagtctagagtgatcagtgctaacagccagtgacaatagatgccactttagtatccttggagataggcgcgtaaatagcggc

SEQ ID NO: 373807 - DNA, 329 bp, Homo Sapiens
cggaccgggcggccatataggctatgattacaaaacacagaagtgtaggtttctgcaggcccaaactctttcttctaggatactggatcaattatatcactatttgatcaatgtcaaatctccttcttatatcaacattgatagaaatctatgtcaatgtcctaatctaataggcattgtctagcagactttctattatgtagtagattcttttttcctgagatggaactttctcccctctgcattgactcaatcaatggggaatacatgagaaaatgaagatacttttgcttccacctatataatttcctcccgggccggctgctgtg

SEQ ID NO: 373808 - DNA, 863 bp, Homo Sapiens
tgacatagagagggcgagccgactgtagatctcttctttcgtaggtaccagaccttcatcatctctgagcaaaaccggattatttctgaccattctatacagattcaaaccgtcgatccgtcccgccggatcagggttaatccaacgctgtaaccacggcacgtagtacctgaacccatagtaataaagccccgtcgcatcccgctccttgcccgaataacgcaacgtgcgataactctcttcgctcgaatcacccttctgcgtgaaggccgtcgtaccaaacggatgatacgtctcgcgagtgatgatcctcgcttcactgtccagttccagcgaacaagagcccagatgatcgctaagggtgtaacggtattgatcattcgccagttgctgcggcgccgcgccttcccaatgcaacacctgcaccgtggtgcggccggcctggacggtgacgacgtgcagtttctcgccatccccatcgcgcgtttccagccctggtagatatcgggtctcactgaccaaggtgcgggcgttggtttgcgtcgtgcgcaccttgcgctggcgcatgccgtcggcaccgtagacgtagcgctcggtgtcattgaggcgcaacgtgcgctccaccatatgcacatggctcagttggttacgtgcatcccaactcagtgttcggccccggtccaacatcaacaggttgccgttggcatcgaaggcttcggcaatctcagcttcggtcggtggcctcccgcccacctcgggcaggcagcgattactgtgcttgccgccgtctacacacgcccatgttgctgtggccgtggtggatcagctcgagcaatgccgccagctcgtagcatagtttgaca

SEQ ID NO: 373809 - DNA, 655 bp, Homo Sapiens
cacatccaccaggctgatattggcgaactggccacgctggtagccatcgctcgggccggcaggccagttgtgccagaagcccatgaggatctttttgccggcgatgctcggcatcggcgaagcggcatcgttgagcggcgattgcagtgaggtaaagtcaatctttgacatgttctaatccttcagaacgtgtgggtttaacggcgcgggcttatttgaagtccacatcgaaggcttgatagaaggcgttgccggtgttggcgacgatccacatcaacacaatcacatgctggccctttttgtgggtcggcagtttcacttcatgatcgaccttggccttcagttcgcctgcatggctgtagtacggcacctgggcatagaagtcttcagcgaacggctgggcttccagctgtgcgcgggtgatgcgctgtttcggatcccagccatccttggtgatcagccagcgatagccacgggtggtgtgcggcgcggtgtatgcccaggtgaccttgaaggtctgacccgactcgacattgagcaacggccaggtgaaggcgcgcccaagtttcttggccatttcctcgtgggtgaagttgatgcagtcacgggcatcggtcttgccaccgctgaggatgacgccgtcggcgggtggggt

SEQ ID NO: 373810 - DNA, 318 bp, Homo Sapiens
gcctgtacacgaatgtggtctcactgacttcaagaatgaagccgcagacctcgtggtgtgtgttacagttcttaaaaatggtgtgtccggaattggttccttctgatgttcggacgtgttcggagcttcttccttctggtgggttcatggtctcgctggcttcaggagtgaagctgcagggaccttcatggtgagtgtcacagctcttcaggcagtgcatctagagttgttcattcctcccagtgggttcgtggtctcgctggcctcaggagtaaaactgcagatcttctcggtgagcgttacagctcataaacatgg

SEQ ID NO: 373811 - DNA, 543 bp, Homo Sapiens
aaactgagttggtagggtaagtgattgggacatgagatgatgagagagagatgtattgactgttaggaaatttaatttttatgaaatcagcattatggggaaatactgtaatctgattcattcctgcagaattcccaggaggaagaggcccagcctcgggagttgaaatgtttcattatgtacatgcgtgggaaaaagatgaaatgtggtttccgtgtgctgattttctgtaaaacatctattagtatgagagtagccaggctaggcaacaaagcccccaaaccatcgtagtctagggaaaagtgaacccagaaggcatttctctgatggatgctgacatcaggagcaataagtttgaaagtagcaagaaaaagtaatgacagtaaaataatgttgaaatagtagctaaggaatgatcacatgctgaagatgaggtcagtcctttattcctcatcaatccctgcttaactttgcttttagaaatgtaaggttccccaaaaatgaggaaactgcaaatgtaagctttttataccaactcagttt

SEQ ID NO: 373812 - DNA, 796 bp, Homo Sapiens
acactgagctggtatttacagatatgttctctcaatagactctgcatctctaaataaagcagaggtttcaaacaaaagttgtaagcagttacaaaggacttcacaagaacatgttactaacaattgtccaattaccaaaatctgacaatgattaaaaacaaaatctaggggagtcagcacggttgtcctaatagcaccactctctcagtaacactactgtatgccttcttctgtgggaggcaacaaaattgaattggagataatcattcaggaaatacagatacactgaagcttactaggggtgttccaatgtaggaagaaggagttaggaatagaggttcacacagcctactcctcattctcccttctctgcctcagctatagagcctgggaaaacaaaacactcatttctccaccacccttgtagctggatggatcccttgtgggaatcctaggcagcgattgtcataggatgcagatacaaggacagccccaaaatattaagaaaccaaatttataaatgaataaacacatgcaaaaatctttaaatcttttcctctatgaagtattcttgtataaccatctatgaaatatgaatctattcaagcatctggtgcttccacttacaagaaatactgtggatagagtaacacactgaaagacaccaaaaggaagcaaacaaatgcattccaaatgtaggaaagaacacaggacaccaaacttggtttctgcaacaagtcaatagcaggagagaataaagtagaggggcagatttctctagattaccaactcagtt

SEQ ID NO: 373813 - DNA, 519 bp, Homo Sapiens
cggtacccaactgagttggtagggtgatagttgaaatgggattagaaagtactgcaattattttgctcatgtagaaatatgcaaagaacctttgaccccttgtaaacaatgcagtatgagggactaaacagagggctcagttcttcttccctcattagcacatcattaagctatcccaatactaaaactcttgttaatgcagaggctgcttaagaaatcaacaaagaaatgcctctattaatagtattttcagaatacttgcctctgaatatactctccttccttcaatcttagtttcaaaacacagccagaaccacggggcatacttttctttccatcttgccctgtgcaaaggtattgcatatttaaatctgaaatgtacccaagtatatgtatcagacactgcaggctgatttaacgcagaaaaaaagaagagtcacaattccaaatctaagtttccgtctatatgctaagagcatgagaagcagagaatgagaaatggaaaatcctctatgggga

SEQ ID NO: 373814 - DNA, 337 bp, Homo Sapiens
atttttttaaatgaattttccttaagtggtacctatatgcaaagctattgcccactcagagaagaagcaagaactgaaggagcccttcctaatttgtggctcataagggtcaatctctagagttgcagggtgtgtaaccaagtctgaccaccaggggcacccccgctctctgcgctattggccctatggtgactcatcaggttccttttctagtttcccctttagtagagacaaagtagactagggttttcaaaaagaactgtcaggtactgaaggcaactaaaaaggagacaaaatgtaaaaccaggaaaggacatttctggggatagtctagagc

SEQ ID NO: 373815 - DNA, 253 bp, Homo Sapiens
acattgtcggatatcatcactccccagcagcctgacttagccagtaattttacatttctatagcatacctgctgtgatctattcttgaatgttagccttatatgctcaaatagattacatgttgcttgaaagcaacaaatggaatttacactgcttggcattccacacaacatgtagcacaaacgagcaggctcttaaaaaagatccacaaaagtactgatgaaatttaacattgccccgtggggtaggaggt

SEQ ID NO: 373816 - DNA, 305 bp, Homo Sapiens
  misc_feature (295)..(295): n is a, c, g, or t
acctcctaccccacgccagcttaggctcaactttgtatatgactcactcactccatgatcaacaatgtctgcatatccatcactccccagcctgcctgacttagccagtaattttacattcctattgcatacctgcttttatctattcttgaattttagccttatattctcaaatagattacatgtttcttgaaagcaacaaatggaatttacactgctttgcattccacacaacatgtagcacaaacgacaggctcttaaagaagatccacaaaagtactgatgaaattaacantgcccctgcg

SEQ ID NO: 373817 - DNA, 522 bp, Homo Sapiens
tgacaggcacggcttccctagggctcatgctgcttgtggggctcacagccaggacctataataatagcctgtttgcagaggagtcagatacctttcctaggccagccctgacaccaagatccccacagaaaaaagcatcgtctccccgcaacctccttgccacttcccctaattacgcctggttctattccttattttctcctcttattttctttgctatcatccatccatggtggcctggaacactgcaagagagtaaattcaaaaacagaataaaactacgcttttgttcaagcacagaaaacaaaacttaaagtcagcaaacctgggttcaggccccagcagtgccacccatgagctgtgctccttgaacttaaagtcagcaaacctgagttcaggcctagcagagccaccgatgagctgtgctccttgtgcagctgctcatcccttttcagttctaagttccttgtctgcaaaatgatcaaactgtctcatgatgtcactcgtggggtaggaggtggt

SEQ ID NO: 373818 - DNA, 554 bp, Homo Sapiens
acctcctaccccacgtacaagatggttatagaaccaagcagatttaacccaaagaagactacctcaaggcatttaataatcaaactttaaaggtcaaggataaagaaaggattataaaagcatcaagaagacagaaacaaataacatataatggagctccaatacctctgacagcagacttttccatggaaactttacagtgcaggagagagtggcatgacatatttaaactgctgaactttacccttgagtagcatatctggtgaaaatatccttcatcatgaaggagaaataaagactttcccagacaaacaaaaggggaggaatttcatcaataccaaacctgtcccacaggaaatgctaaagggaatacttcaatcagaaataaaaggatattaatgagcaataaatactcacctgaaggtacaaccttactggtaatagtaagtgcagagataataacacagaatattaatacactgtaaccgtgtgtaaaggacagtggcactatcttggctcacgcaacctccgcctcccgggtcaggagttctccc

SEQ ID NO: 373819 - DNA, 342 bp, Homo Sapiens
acctcctaccccacgcaagtccctgccagttatctgaatctcatctgaagacactcagatgcacagatattctatcaatttcatcgtgaagtaatatccctcagaacctgatgactgggtgctatgtgcaccctttttctgtgcattgctttggtcccagggtctcttttcccatcaccctagtaaatttttgccggtctctgcttggatctcttgttctcctgcatcctctgtagttagttcactctccgattttgtgtgataccttctcctctgcttcctcttggtgaggagacacagtcaatttctgtgccttttcatatcggcatatcttcatttttc

SEQ ID NO: 373820 - DNA, 394 bp, Homo Sapiens
acgtcctaccccacgatttgaagcaatgcctagaggagtctgatgacttttcacagtaccaactaaaaggcttgcgtaaaaagaacaatctgaaccagcatatacgaacatgtccaaaaggaaatgaatcagcaacattcaggacacatccgaaggcagtatgaagatgaagggggctttatgaaggaggtagagtaaaggagagtggtcttctgaagacacttcacattacatcttgataaaagcacaatgcacggcatgtcttttgacgtgatagtcatctccatgtgaaaaactgaagacagagataagagcctgatgctacccctccttctccaagaactttactagctatgcaagctgccctgctgggtgtgctcaggagggctggagt

SEQ ID NO: 373821 - DNA, 422 bp, Homo Sapiens
ctaaccaaccaaaaacagaaaaagatggaatggaattaatatgttccatttagtaaagatggaatagaattggtccagtttgtgttcattagtagcatattcacctatttggtcagcaaccatttctattttttttaaaagccctaaccatacccgaagaaacaacagccctttttggattagaacaaaagaaaaagccaaagtgtactaggagctagccaaaatattaatacgtcggtctcaaagaaccaacccacttaggtgcttgcttagagacttctacttaacacagaattggaaaagtttcgacagctgaatactaactctgcaaaacggaaggaaaacttttaagaacagcaacgggtgatctggcaaaaatgaaaggtagaccttgtgaagaaatgagatgaactaggtgtata

SEQ ID NO: 373822 - DNA, 115 bp, Homo Sapiens
cgaaccttttctgacactttctctttgtgtgtgtctgtgtgtatttgatattgcctgccattatttgattgattcattcattcattcaacagaggcttattgaaagtcttattga

SEQ ID NO: 373823 - DNA, 301 bp, Homo Sapiens
gacagggataccagtaggctttaacacctgtctgtgggttcaacaaagaggaattaagcttcttctcaattgcagatgtcgtgttgtattctgggtcccataggagatcttgactgacccaggagtggtcccctccgggaagaaggacgctcagccaccagctgcccccaggtgttcgtccccaggggtagaactcacccactttatgagcaagtctttgtcaaggaaagaagacggcaattgaaattttcattgagctgttagcatttttttcagaaaaccattttgtcccagtgtgtgt

SEQ ID NO: 373824 - DNA, 312 bp, Homo Sapiens
ttaataaatattgtgtggtgacgaaaaaaatatagctgcatactagcaggaacatatccttattccatgcatacagaaatttctaacctgtgacatttatgaccatgcctggcaataccgcattaaagatagcttctaataggatgtgccagtttggatgaatgaccattttggcatttcactaaataactttgttctggatttgtattcagcaatcctctctcaaatgcctctccctgtgggcccatttttcagatctcattcttgctctctccttttatctggccaaaaaatatcaaggtcgtgtcacgg

SEQ ID NO: 373825 - DNA, 324 bp, Homo Sapiens
cgaccgtttgaacgaccgttacggccatctcgccgcgctctatgtgctgggcgccatcggcctgttctgcagcgcctggctcacggtgccagtactgcaaatggccgcgctgtgcctggcggcgtttgccatgttttcctgcaccgccgtgttctggacactgccggggcgcttctttgccggcgccagtgcggcggccggtattgccttgatcaactcggtgggcaacctcggcggctatatcggcccgttcgtgatcggtgcgctcaaggagtacaccaggcaacctgcctcaggcttgtattctatccggtgtgatgtgtt

SEQ ID NO: 373826 - DNA, 122 bp, Homo Sapiens
tgttgaggaggggggatcatttgagccccaggaggtcgaggctgtggtgagccatgatcacactgcattatagcctcggtgacagagtgagactctgtcccaaaaaggaaaaaattgggata

SEQ ID NO: 373827 - DNA, 165 bp, Homo Sapiens
ccgtggcgctcggcgggcacgtaccccaccccccggtccacccgcacctccatgtagagcttcccgccctcctcgagggtggcgatgtggaggtcggggttcatgatctccacgtcggcggagggggtgaagtcgcccgccctcaactggggatcgtctagagtc

SEQ ID NO: 373828 - DNA, 641 bp, Homo Sapiens
  misc_feature (572)..(572): n is a, c, g, or t
  misc_feature (627)..(627): n is a, c, g, or t
ccttcaaggtcaaatgcctgcctttgtgaacagttaataaactgacattttcagacatttgccattcagaagggagcattgtagcctgctgtagaccattccagcaaatgtcagaatgcagggcaagatgtgtgtcgactatgttttttatgtttaagttacttacttatttcttcaggtaagtgtgtaccaaataacaatactgaaaagccctccccttgccaggccgaggaaataaagcttaagtgaaaacagctcttgggggaaaaatgccactttacaaatacttttctaacaaaatagcattataatgaagtttttacttaattccattatttatatgttgacgtgaatgtaagtggttaaaaagtattcatgtgggacatctcattactttgtagctgtggctttattaaccagtgaatgctgtggcccttagcgaaatgcgttgtcttctgcgtgatgtggaattcgcgcctgtattttaaaagatggtgtggtttctcccttgtttgtattttaataaacaactgctctaattgatgtgtttagacactataaagctttacctntaaaatattttcagggtctgttctgaaatcaccccttgttaaacttctctaaccnaaatacaagtgtag

SEQ ID NO: 373829 - DNA, 252 bp, Homo Sapiens
aaagctaatagtgccaacataaatactctgcatatttataactatttctttttctaccttctatgttatagttctagggaatgcctgatgcacagaaccctaatctttgcaaaatacgtaccacaaataagatatcagaataattgttatctcttttgctcagtgtagtagtgggaagagtttatatagagtgctctagctttagaacgggaagagaacgatgtgctgtctgttaactaaatttctctacgc

SEQ ID NO: 373830 - DNA, 606 bp, Homo Sapiens
  misc_feature (173)..(184): n is a, c, g, or t
aaagcttatagtgtagtgtattcaagagaggatttctacaggaaagcagtccctgcccaagcagcacctacaataaacatgtttatgagcaaacagttcagaaaaacatattgtgagtcttagaaacagcatatgcctcatttcatagaggttgctatgttgctaggcattcnnnnnnnnnnnnactgcattttagagaaataactgtaaaacgagggtctataaccagcatataacacaataaacaacagcatcaacttctgtccccttgtggtaaacagtttccctatgctttaatgggaaatgtaaatgttaatgccttgtgtgctttctcaaaatagttttggacaaattatattccaagaaagatctctgtatttgtcacctctatcaaaggtccaaagattatagaattttcttatcgtaaatcaaggactgctcccctcagcccatagaaaaggatgagctacttcctatttttcaagagctttggaatccctttgcagtaagagaggaactatgacaacaaagtccctaaatgcggcaagatagcacagagagggaggtgtggcatgcagcggcagcaagggtggtcacttaagcttt

SEQ ID NO: 373831 - DNA, 372 bp, Homo Sapiens
  misc_feature (281)..(296): n is a, c, g, or t
ccttgtcacagctaattggcatgattctctctggagatatattagacactggcggatcaaggctgatcatctggacccatgaaaatagagcagttgtgttgaccaaatgaatggcatgaaaccatcaggacctactctcatgtcccagaactattaaaagtctctggtctcttcctatgcaaagcagcagaggtgagggcagtagtaatgagcctcctgaggctttacagactgagcagggtagaaccttctggggcttggtgagttctcggctcttgtcnnnnnnnnnnnnnnnnaagtgaacgtaaactcaagatttttttgtcttcataataaaacaaaagatgacacttaaaatgagatatcttggcc

SEQ ID NO: 373832 - DNA, 362 bp, Homo Sapiens
gctttcatgggtaacaaccccccagactggaatggcatagacatccactctagcaaagtggggcaccaacttagaccagtggagtatgctgagtataagccccttagcagcagagttgcaagagatcttggaacctgtagtcctaatgcaagataaggccatggggcctgaggcacccctagacatgggtctagctgagctgctactgctgtctggaccactgttgcagtcccacctagtactgacaccatattgtttgaaactggaagtggacagtgtgctcaatgggctgaactcaaagcaatatgaatggtgatcactaagaaagtgacacctatgataatctgcactattaactttcg

SEQ ID NO: 373833 - DNA, 675 bp, Homo Sapiens
tatctctaacattaggcataatcccttttattcagctgagaaaactgagcttcattgaggtggaggtcaaaaatcacaaaatttgtgatgaattaagatttgaacatatgttttgtgactccagttttcctttcagattttaaaattaattaaagggatcttcattatacttttattgttaactttttgttaacataattaattcatacattcagtgaaaattttgttgaggtactgggacaggttaaaaaatacagttgtagccctcaggatatttaatatccagtgaaaagtgacagtcagtaaaccaacaatctcaatactttgatatatgttgtgaggttgtgataaccgattcttgtttagtttaattctatatctcccttagaccagtgttaaatttaaataaaacacctcattttttccaattcagggaaggcactaaacataaagcataggatagaaatgttgaactcatccaaaatattattttgtttaatgaaaatgatgaagattaaggaatacttccatgtattgagtaaggttgataattttctaattcttcactgtgcattattttgtttgaagttggtaaatttggagtatcctgcagacacattttgctttatgtactacaacattctacaaccaaataaaaattattttgattatctg

SEQ ID NO: 373834 - DNA, 250 bp, Homo Sapiens
atccccgtatctctaacattaggaacgcaagagagctctagaggcagagcggcaggcccgtgtagaagaattgttaatgaagaggaaagaacaagaagcccgaattgaacaacagaggcaagaaaaggaaaaagcccgtgaggatgcagcccgggaaagagctaggtatctcatttgctatcttgatgaacattttgcactgagtgaatattcaagttgaggtcttaaagccatttactgtaatgttaga

SEQ ID NO: 373835 - DNA, 451 bp, Homo Sapiens
  misc_feature (360)..(382): n is a, c, g, or t
gtaccgtattctaacattagtggctagactatcaaacgaaatatataacatgtaagaacactaaagacagaattactgtggcatagagatagttagaattgcttcagcctaagagatgaattaggtaatgcaaggaggtgaatatgttggcttgcaatatgaacaaggcagagagctgggagagtaagatgtaagttgctaaggagggatgtgtacttgagtttggaaaccataaagggaaatcataggtaatgttagagatacgtatctctaacattaataacttctctcatgaccagaggtatctgattcctgaccatttttgttacatgcattcctcttctttagctgtttctttcnnnnnnnnnnnnnnnnnnnnnnnggagagtgtatttccgcctcttttggcccgggccagagttgcatgggcccatcctgggcttcaaagcaa

SEQ ID NO: 373836 - DNA, 335 bp, Homo Sapiens
ctgaggtggatctagaggatcccgtatctctaacattaggaatgctggaggtgcattttaagttttaataataagtgctagaatgaccaaattgcagactaattgtttccatattgtacttaaaatgagtttttaaaagtgaaaaagaaatgactatatacaatcaatgctatttattgtacctctgggcctactcttctaaaaattgtagcttatcgatttttctctgtcaagcttgaactaatgtaaataattgaaataatgtaaagttatattttcatgtttttatagatacaacatgacaagaatacataatgttagagatacgggtaccg

SEQ ID NO: 373837 - DNA, 324 bp, Homo Sapiens
aatcgagctcggtaccgtatctctaacattataaacataaaacacaaggaactgagacaaactgatctaacatgattacctgttcctgtatgtaagttaaaaaattagacatctgtaattggaatatgggtatctaagtcactgcatacttgagatgcactaaaaatatttatactacatttagaaaaaaagtaagttaatttttctggatactttttaatgtttaatcgttcatgtttaatttaaaagtcttgagctacttaacctctctatgattcagttttatcatatctaaaatgagaataactgctaatgttagagata

SEQ ID NO: 373838 - DNA, 446 bp, Homo Sapiens
  misc_feature (139)..(211): n is a, c, g, or t
ctcggtaccgtatctctaacattatcttcagctttgttggaaaggttgatcttttggtctgctcttaacctttgctaagcaagaccagaatagcatttattctaggattaatttttcccaactatgaggcaagactttnnnnnnnnnnnnnnnnnnnnnnnnnnnnnnnnnnnnnnnnnnnnnnnnnnnnnnnnnnnnnnnnnnnnnnnnncaaaatgcgtaaagcagcttggcctccctaatgtgtatctctaacattatcaacaagtcagataaaaggggtgtactgttcatgggttagttactggggaaggcatgaagctacacaacaactgtcagaacggtctgtcttctaaataggaaagtacaaccagcaacaaaaaaactcacaaattctaatgtctggccctcagaacatccttcagactaatgttttagatactggt

SEQ ID NO: 373839 - DNA, 218 bp, Homo Sapiens
tcacattaggaagcatatagtatccttaaagaataatagcaacatataagcctggaaaaagtcctaaatggcagggttgtgttttacattttttcttctttgtgcatgtattcttttccttcccaggggaaggggaatacagaagagaaaatgagttttaactttaaaaaataagtgattgtaccagagaaagaagttgtcctaatgttagagatact

SEQ ID NO: 373840 - DNA, 281 bp, Homo Sapiens
gatcgagctcgtccatctctaacattataggaggaaaaggtactgaaatacaacagactttactttttgttttaactgtcccatgcacagcaacacatggaagttcagttaaaatctgttttgtggttagattctataagctctgaagatgtactggtaatcaagttccagaatttaaagtacatcagatatacctgacacatctaaaggagttttcacttttgtaaaacagaatatactataaccaatgaatactgaaactaatgttagaatacggtccg

SEQ ID NO: 373841 - DNA, 422 bp, Homo Sapiens
  misc_feature (173)..(196): n is a, c, g, or t
  misc_feature (219)..(334): n is a, c, g, or t
  misc_feature (360)..(377): n is a, c, g, or t
ccctagaggatccccgtatctctaacattagcattttgcagtttcagtatacaagtaagtcctatatacgtttgttagatatatgctcaagtatttcttttgattgaactgttataaatggtattgcatgtatttccatgtgttcactgctaatatataaaaatgcaattgannnnnnnnnnnnnnnnnnnnnnnngccttgtttagagacaaggtctnnnnnnnnnnnnnnnnnnnnnnnnnnnnnnnnnnnnnnnnnnnnnnnnnnnnnnnnnnnnnnnnnnnnnnnnnnnnnnnnnnnnnnnnnnnnnnnnnnnnnnnnnnnnnnnnnnnnatgacacgcatcaccacacccagcgnnnnnnnnnnnnnnnnnnaaaaagagaggggtcctcactatgtggcccataagtgtagagata

SEQ ID NO: 373842 - DNA, 243 bp, Homo Sapiens
tgcttttgttagaagatttgataactttcgttgtcaaatttatgcctaagatttggtagggggctcacagtttagggtcagggtttccagctgcttctgttaaaggaggttaaaccatagtttctgtgacagaattattctattaagcatttttattctgggtgtgcataactttaaaaaatacaacttttcagtaatatgtcattaaataaatataatgttagagatacgggatactctaga

SEQ ID NO: 373843 - DNA, 135 bp, Homo Sapiens
agttggaccttaatggtctaatattactattacgtaccttggcaatgtctttcgaaaccattttcccccactgctttgctggaactctgtgtctacctatactaatgttagagataccggtaccgagctcgattc

SEQ ID NO: 373844 - DNA, 422 bp, Homo Sapiens
  misc_feature (351)..(366): n is a, c, g, or t
ggatcgagctcggtaccgtatctctaacattaaacaaacatacataagtaaacctttaattagtatacactcaaggtacatacattgttttcctttctccttctaaagcatggaagagatttggtttttaaataagctgacaaaatatgaaaattaaaagaacacaaccgcatgcagaagtagcacagaggacttcctagaaattgtattctttctccagggagcaacaagaatcgttattcccaaaagggactctattcacttcacagcctggaaggtaatacctacctctgacagaacagaaactggcgtctggatcctagaatcacctagcagtagtcacaaataccnnnnnnnnnnnnnnnngggtattaccccatttaaagaaatttattgtttccttgcaccaaagtaatctcctt

SEQ ID NO: 373845 - DNA, 210 bp, Homo Sapiens
tcgagctcggtaccgtatctctaacattaaagcacgacagatttatcatgaaataaagtgcaaaacaggatttctttaaggtgagtcttcaggttatactcccagatccttgagaaaaataagtttactcaaatgttacggacatttctttggggggaaaaattttttatataagtaccacactgtaccataatgtggagagatagcggg

SEQ ID NO: 373846 - DNA, 265 bp, Homo Sapiens
tctagaggtatccccgtatctctaacattaggaaagagcagacaggagacttacgaagcaacctgaattaatattctgtttttaatagtgacccaagttcgaaaatagcctaaaatttaatcttactacctgccgttagatctcttttgtatcagtttcccatctgtaaaataggaccaatttatttttatttttaaaaaggaggtcagagtgtcccttttgtatcagctgttttttgttcttttttgttgtgtttgagatgcag

SEQ ID NO: 373847 - DNA, 312 bp, Homo Sapiens
tggctgatagatgattccttgaggtatcacgtatctctaacattacctatgtgtagggaaaagcacacacatgtttactgcccattataaaaaattcaggatccttaaattcagggctcctctcctatacgcaacccactacatgtacatgtgtcccctttctgcattgccataggaactgtggctcgggaaaccagtgcaaatgccaatacccttgttactattattgcagtgaataacgagctgtcctttgtctctagcccagtggtctcatgtctaatgttagagatacggggactcctctaggagacg

SEQ ID NO: 373848 - DNA, 372 bp, Homo Sapiens
tctgttcctagaggtgtcccggtattctacattaacagttgatatgctgattccaagaaatccttcttcaagcaattaaaaaagaatcctttattttgaaagaatctaagtctctaacttctgtcccttatagcaagtcactctctggaaaaactattacctgattgggttgtttcgctgttcaatagaacaattctcatactgcaactatttcaaagactctcataagttcaacatgctaagtaaccatcaaaatggaactcatattaattttctttgtctactcaatttccagtaattccttactgcaatgacttaaaatactttgttgtcaatgttagcaacctattttcagtagacccttccttttgc

SEQ ID NO: 373849 - DNA, 311 bp, Homo Sapiens
tatctctaacattagatttaaaaacaagcttcaaataaaatacctaagactattttaaataaagatataaaacaaaagagcagaaatctggaagtaaaaacaatctgaaagttcatactaattcaacatcaagagacttgagaatgtaaaaagaaataaataaaaataaacaagccaacaaatcatactcgagaaaaacaaaataatatcatgcaatgggaaatgaaaggaacatattccattttttcttaatttgtttattacagagccttcataatgttagagatacggggatactctagaatcagcta

SEQ ID NO: 373850 - DNA, 317 bp, Homo Sapiens
agtctctacgaggatccccgtatctctaacattattcccaacatacgcatgagacttcgcattgtatgcataaacacatacacatgcacacacacatgcatcatgctagagtgaccaactgtctcagttttccggggacacatcatgctagggtgacccactgtctcagttttcctgttttaatactaaaagttctatgtcctgagaaacctctcagacccgggaaaaccaggtcaccctaatataccttctcctgcaatgaaacctaccgaatctaaaatgctaatgttagagatacgggatcctctagaacgacc

SEQ ID NO: 373851 - DNA, 447 bp, Homo Sapiens
gtatctctaacattaatgtatactgcctacttgtaaatcactctccatctttaaacaatttgtatatttatttatctaccttaagttcgtaagttccatggcccttcattttttgtaaactatactattttggcttcttggacttttgcatacagatctaaatataatgcctcactgctgagaatctcttttttttctagttcacaagttgatgaaccaactgatctcctataaaattatcagaacctataagaaagcatgtttttaaagaaggaaggaacaaaggtgttggggagaaatcaccatctttctttgtactacattgagaattatgaatatcattgtagagcaaaatatcacagtattccattctcctgtgacatttttacatggactcaactaagctgcgggtccaatcctaatgttagagatacgggtaccgagctc

SEQ ID NO: 373852 - DNA, 270 bp, Homo Sapiens
tatctctaacattataatcactgaaaaaaatgctccaatcaggaggtttttataagacataaataaccataataatattagtagtattttttatactatagctgcactcaacacaaccacaaaaccttctggaaacaaagagaaatacacgcaatgctgagcactctggatttatttctggagtttaactggcatagattagtttattataaaaatcctacaattggctgcaaataataaaactcatcctaatgttagagatacggggat

SEQ ID NO: 373853 - DNA, 250 bp, Homo Sapiens
tatctctaacattactcttatccttctaagccttttcttttgaaataaacaaacaacactcatttgatctatttacccctacagtgatcagcttcctaaatttttactttggtgactttctactatttctattttgcatttaaactatgttttattatttccaaagaattttatacgtacttcttcatttggttctcaccataacttgtgataaactggggcaggtacatctatcctaatgttagagata

SEQ ID NO: 373854 - DNA, 308 bp, Homo Sapiens
tgctgggattatagacgtgagccacagcctgcatttgatttcttgctgaatacttatttatttcaggctttcctgttaaaatgagtctattaaggatgcacaattttctttaggtaggcttggttctatttccactttagtttccatttctatatgtctctggggagagggttacttttcatatatttctaatataacaacaatatggatagaaattgttttgccaaatgatatattcttttgggatttgttgaaactttctctgttgctttgttttttttggtaatgttagagatacgggtaccgag

SEQ ID NO: 373855 - DNA, 211 bp, Homo Sapiens
tatctgtaacagtgagatgaagtttcgacgagtaggtcagttcttttccttgggtccaggaaactattgagcagcaacagaagatcagagcagagatgtggctaaacagtagcaggtatgaaaagacttagaggttctggtttctgtaagcttcaaatatctgtgatgcttgtgccaaaacagcttaagtagactgtaatgttagaaacgt

SEQ ID NO: 373856 - DNA, 458 bp, Homo Sapiens
gctctagaggtatcccctctctaacattatgtaaacgaaacataaatagacagcatagttctttgtacatatatttagtacaggttgttagggattctggaatatgtacaattttacatcatggactgcatttttcacaatgcataaatatatatatgtattttttgttttcacagaaacaaaaataagatttcactaatgacactgaataccatatcatagatatgctgcaacagtccaaattcaagaagaaacatgtcaatgtaaatgtgcaaaaggctagcttactctaaactattcaaactttgttcactttatgttctacagacaggtaaatcctgactttaaacacagaaccttgaaaccctcctcagaacagtaagtgaaatggaacagatctttccctccccaagaaaacaaagccttgttgcaagctaatgttagagatacgggtaccg

SEQ ID NO: 373857 - DNA, 324 bp, Homo Sapiens
tgaggcggtccgtatctctaacattagaattacttaatgtacatataaaactataggattttcctgactttatctcattaatcttcttaactaaacaaaaccaatttgccttcttgattcacctttatccctcaatcaagagcttgttttcttaccttcagctcttttcccttagttcaaccttagtagactcaactgtcactcctcattcccctatgctgtctttgtgccactgccgccggtcgcatagttgagggcagagttcttacctgtttactgacacataaagggccagatccttttgtttttaatgttagagatact

SEQ ID NO: 373858 - DNA, 288 bp, Homo Sapiens
tatctctaacattaggttaatctcaatactttatagttgttcttcctatagtttaatttataaaataaatgagcccaatttttcttgcttcattgaggaaaaatgtttatatgcatagaggaagaagggaaataaaaaactagcccaatagagaccagctaaatctgttgtttttctagtttacaacttccataggatggggaaggcttataggtttattttgaaaaggacttgagcttaagtcctatggctggagagtaaaaatagatgatgataatgttagagata

SEQ ID NO: 373859 - DNA, 550 bp, Homo Sapiens
  misc_feature (170)..(178): n is a, c, g, or t
gtatctctaacattatcgaatctaatctcttaacagatgaggcaactggtagtcaaagaggttggtgattattcacacagatagtggcaaaccaagactaggaaactagaaattgcttcctagtgctctaccacaatatactgaacaaacctcactcttatgaccaccannnnnnnnnaagcagctttagatgtgaaagtgtttatctgtgttggagagagaagaagatacatctctactcttaacacagctaggaaagcttattagtatcatggggactccctaatgttagagatacatctcaaacattagaaagacatcctaatatcaagcatttatttattgactgcttgctgtatgttcaacattgtggaatatcatgggaagataagttataatcttattaaacaaagagaaaaaggcagcatatggttaaagtatttaaaaagtatattgctgaattcaaagttgtgccggagagagtagtatgatctgaatattcagaaaagcttcatgaaggatttaagacaagctaataatgttagagata

SEQ ID NO: 373860 - DNA, 451 bp, Homo Sapiens
  misc_feature (363)..(381): n is a, c, g, or t
tatctctaacattaggagggtattagttcatgggttggcattgctatcacaaagaaggctctggcagcacctgattggcttggccaagcttttcccatgttggcgtctgggcatcttcctagcagtgggtcactcacccagcagtgatttggcctcctgttgacataaatatgcctaattcaaagcagaaagtcaatttgttattttgcctaaagaaatgtaactaccaagcaggctagatttctgtcttggcataaccaggaaatctttaccaataatttatgatgtggtcacccttgttgtaggcattatggaagatggaaagatatataaggaatggcgtcttgcaaaaagaactggacnnnnnnnnnnnnnnnnnnnggtattattgtcaaaaatccggtacccgaccccaattccgaatccttggccaaacctttacctggggcaa

SEQ ID NO: 373861 - DNA, 527 bp, Homo Sapiens
gtccccggcacccagcaggccctggggggctcaccgaaggctcgaaggcactgcacacttgtatattgtcagtgaagaactgttagttggttgtcagtgaacaataactttattatatgagtttttgtagcatcttaagaattatacatatgtttgaaatattgaaactaagctacagtaccagtaattagatgtagaatcttgtttgtaggctgaattttaatctgtatttattgtcttttgtatctcagaaattagaaacttgctacagacttacccgtaatatttgtcaagatcatagctgactttaaaaacagttgtaataaactttttgatgctagctgtttactggtttttgtttttgatgtcataaatagaccttgtttaatagtcacaagccgttgggatatcatacccagctgaaaaagaacacactgcttaacataagtatatgtatcgtaataagagttttttaccagctaagtgattcaatgtaagtggtttttaaaataataatgttagagata

SEQ ID NO: 373862 - DNA, 259 bp, Homo Sapiens
tatctcaaacattaatgctacaaatgattccaatagacagatttttatgtataatcttcagcctaaaacaaccaagcaatttttcaaaatcattataatattgctgctgatgttaataaatatgaaatctcttaccttgtatggggtaactcttttcctcttcacagtagtaggctgtgctaatacaacattgtttctttatattgttcatctgaatgagacagtaattgccatcagaatcctactaatgttagagata

SEQ ID NO: 373863 - DNA, 485 bp, Homo Sapiens
cacgtatctctaacattaagaatttaaaatagaatcatgacattgcaatccaaacactaccttggcttgccagattagtctacgtgtcactccttggtgtaaagctataattccaacttccagcaaagaagtatctctgaattcaaatgagaatgacatttctatgggaataaatgtgaactgtctcacatttaaccattaagaatttactcatacgtcatcatgataacctaatgttagagatacgtatctctaacattattgcatacgtttattgggccagatagtgtgtaggcattctacataaattatctctaaacctcagctaatagcagtattagatagctattattagataagcagtattgtcctcagaggatagttgcttagctaacaaacgggagagctgaaattgttggttgagttatgatggaaaataaatgtgatggagccttccaaagcatataccagtaatgttagagata

SEQ ID NO: 373864 - DNA, 240 bp, Homo Sapiens
tatctctaacattacaaaacttggctcaaatccttccatctccaagcaggtcattactatacatgttaaatcccatgctctgtctcacacatacctcctcctcaatatctacagaatcttttacaagccctactcctgtgactgtacataaaccatgctcccttgcaaacttacttttcctgtttaggggagtatatattaccttccaaagggacagtaaattacttaatgttagagata

SEQ ID NO: 373865 - DNA, 649 bp, Homo Sapiens
gtctagaggatcccgttctctaacattatacaaactctgcttccacaaacaaatacaagtgacgacatgatatgctgcagttcacatatagcaactcaaaatgccaccaagtctaaatattaggttaacatcttcaatagctagtttgctcagaacaaatgtaaactattttgatgataactacaaaagcggcaaaatccaaaagttggtgctttaaatttattcacacgcacattataaaagggaaagggaatacaattccagaagtattttaaaggcccaaaccaaaaaaagatgttcaagatgctagattaatgaaaaactttcacaaataaatttgacaacaatgaaattacagatcttgaaaaatgtgtcctctttctttaatgttagtgacagttctatacagcacagacataactgaagaaacacattactttgatttgggtttatgtattgtacttttaatcacttactgagaatatttcaaatttatattctcatcaggaaaatgtaaaaaagatactgatatatattctatgatttttatgccacaaacacccctgttatgagatcatttaataggaaaacaattatactgacatctcttgttccattttcccattagatatatacatacaacttcaag

SEQ ID NO: 373866 - DNA, 598 bp, Homo Sapiens
atccccccccaatggaatccaggctggactcaagcaattctccccacctcagtctcccaagtaactgggactacaggcatgtcccagagaatcggctctcctacttctatttttccagctaataagcttggagtcacttagtcactctaatactctttattaacaacttaaaatgacacatgaacatttttagagcactttccaagttttattaatcactttctcttttgatctgcacaatagatcaggtttgtaggtattatctccaatgtacctgtgaagaaactaaggcctggaagagttcagcgatttgcctacagtaacacagcaagtaagttacgagaccaggttttccaacttcaaagcctgtactctttatattccctgtcagcggaagataaaagttttgcggggcctgaagtatgcacatttaaggtggctgtattagttttctatcactgctataacaaattaccacaaactttgtagctttagacaacacaaatttctcttacagctctgtagttaaaaggtccagacaggactcactgggctaaataaaactcaagcgtcaagagggctgtgttcccttctgagg

SEQ ID NO: 373867 - DNA, 360 bp, Homo Sapiens
  misc_feature (265)..(273): n is a, c, g, or t
aaccaagatttgaagcctggcaaatttggctccagagaccatgctcatttgccattgtctacagaaggcagtattacccaagaaaaataagatagctaaggaacaattccaaaggaaaaaaagtaagatataccatagtttctgctttgaacttaccccatttgttgggcaattcttaatataatgtccaggtttaccacaacggaaacacgtgtaagatggaggtggtggacctagaggtttcttcatgtaactaaaagggggnnnnnnnnnttacatgtatacgaggactttgaaaaaatagtgcttttgattgggggggaaaacccaccccaaagtcctacatgagtataaatatga

SEQ ID NO: 373868 - DNA, 608 bp, Homo Sapiens
aaggatccccccaatggaatccgcacataatttatgctctactgacggtatagatgcttgttacatctagtcctacatacatacaaatgtaagaatagcatgcatcattcagtgttagaaaatgtttctcaggtgctatacgcaactgtggtgaataccaaagtgatttaagtacctcaggaatcagaattggaatgtgaaaagaacacgaatgctcagcataccaatatttcaattaggcaagagctaattgctttcatgctaaccacgtgtaaggatttggcaggcaattatgtttttttctttcttaagtgcttcctcctctggaatccttcctctaattggaacagtatctgctttgacatcagtggcatacaacccacaaactctcatgacctttgtatgcaggtgccttgtgtgttgggagcataggtcaagagatatcccttggtgagcagtgttgcacataagcgttggtgtttagggctttaggtcatactgtgccagcacagggcatggggtcctgagagacgaaagcaccatttgcctgtaacaaagcaacataggtattggggtgcataaaatggattccattaggggggggatcc

SEQ ID NO: 373869 - DNA, 477 bp, Homo Sapiens
caacggtcgtgcatgggaagtacctggcgttctgatctcattaaggatctggccaaggactgtaattccaacttatctgatctccccaagggtcaacttcacaaattcatgccagtgtagtacaatctgaatggtgatcgaaaggcttccttctcagcctccaaaagcaatttccccatctgtcagctacctcaaattctgacataagagatgtatatacttagatatgtgactttggtattcaaaaaatccttattaatatgcttatactccgggtgcagagacttttacagatgaggaaactaaagctaattggttaagtaaattgtcctacatcacacagctcaagggcagagcagggacttaaacctaagatgcatgactccagaagcctttgctctttctcactatctcatattgaagaaatgagaaaggtacggaaaggtgaggctggaatgcattctaggtaaaacagga

SEQ ID NO: 373870 - DNA, 519 bp, Homo Sapiens
  misc_feature (175)..(466): n is a, c, g, or t
aaaccaagaagaaatccctgatttacctgaaaataattcagaagggtgattattaagctaatcaaggaggcaccagagaagggtgaagtccaacttttaaaaaattcaaaaaatgatacaagaaatgaggagagaaatcttcagtgaaaagattgcatacattttttgttgttgnnnnnnnnnnnnnnnnnnnnnnnnnnnnnnnnnnnnnnnnnnnnnnnnnnnnnnnnnnnnnnnnnnnnnnnnnnnnnnnnnnnnnnnnnnnnnnnnnnnnnnnnnnnnnnnnnnnnnnnnnnnnnnnnnnnnnnnnnnnnnnnnnnnnnnnnnnnnnnnnnnnnnnnnnnnnnnnnnnnnnnnnnnnnnnnnnnnnnnnnnnnnnnnnnnnnnnnnnnnnnnnnnnnnnnnnnnnnnnnnnnnnnnnnnnnnnnnnnnnnnnnnnnnnnnnnnnnnnnnnnnnnnnnnnnnntgatagtgctttttgataatgagctttaaaagattccattgagggtgcgagct

SEQ ID NO: 373871 - DNA, 240 bp, Homo Sapiens
ccccaatggaatcctactgggaagtagtagcaagaaaaagaaaaccatgaaaaggaccctggaaccgccatgacctttccaatggggaataaggaagttcctggagaagggcagtctctgctacagtaactgcatgagtgggagaggcattttcccttggcaaaaatttcctggtcagcctgtatcaaaacctctttttcccccatggaaaaaggctgacaactctgcaaaaaaattaat

SEQ ID NO: 373872 - DNA, 468 bp, Homo Sapiens
  misc_feature (336)..(349): n is a, c, g, or t
atgaggataccccccccatggaatccagtccaaaaatgtgtttaaaatacaccacagttgtaattcttgaattctctgtcaaaatctaaatttaggggatttcagatttctctggaagaaaatgggaaaacttagaccttcatcctttaaacagcaggaattaggaaacggagctgagtgccgctgcccctttcagatagggtgttcaatgggccaatgggacatgcctgtggtcacacacgtcactcattcacccacctgcctggcccctgctggctctgaagctggacatcctgatgaacaggatgctatgtgtcctttcaatatcatgtggcnnnnnnnnnnnnnntatgaaagaaaccagccagacacaagagatggtctactctataattctgtttttttggtttttgatttgcatttgcctagtgattagtgatgtttagctttttaaattttcatatgcct

SEQ ID NO: 373873 - DNA, 417 bp, Homo Sapiens
ctgcagtcactctaaggatccccccccaaatgatccctcccttcctctaaaaagtaatcactattcctggcttttatagttatcattttcttgagcttttaaacttgttttatcatccaagtatgcatctgtagtcgtcttgctactaatatgactgaatacaaatggcaaaccttgcttttttgcagaattactgttttaaaaaaacttcctacaataaaaacaccagaatctttaaaaaatgtttaatctgaagtaatcaaatcatcagacaaatctacaaagtgcctttataaagtacatgaaatggtctgacctattcaaatcaaagtcaatgtcatgaaaaccaaaaaaacacactgtagaggcaaaacaatcaattttaatgtgttgtccttgaccggattccattgtggg

SEQ ID NO: 373874 - DNA, 590 bp, Homo Sapiens
ggtaatccattaccaagcatgatacactatcctctcgacccttccaagatactgacagtttcagtatattcctcttgattaacgtaatgctaaattatttgtagtgatctttaggtatattttattacttgtaattaatattactgttcaaaatttagcggggaatctgtcatccttcctgaaacttcagaatcacctggagtaagggtcatttgtattcatggtcactgaccacgtggggtagaaactgcaagtcatggttccttcaggcaaagttaatagtggtgacatggaggcatcatgatagagcagcagactccagaagccaatttgactttgtgatttctgaaaaaattacctgtcaactgtgagcctgtttcatcatctgtaaagtttgaataatgatacctaccctgcctgatagaagattcttatgagggaacatgatacgtgaccagtaaatgttaatgctttccttatacgtgaaatgacataaaatcttggaatattaatagatgggaagaagatgtgtaataaaactgtctataaacacaattctgacaaatttcagaactgggattccattgggg

SEQ ID NO: 373875 - DNA, 414 bp, Homo Sapiens
tcatgtcggtacccccaaatggaatctctctgagtgtctaggacagaatcctacccctgctccatattagctgcttttccttaggtgatttatgtcactaccagaagcgttggttcccttgcttataaatgaggatacaggtccacaatcccttatctagaacagaggtcagacatgttttgaaattcaaagttttttgataatttagagaatggtgttaagttgtatataccatatatatcctaataagcaagatctgaaaccatatcccataataagcagtaatagttaaatgaattgtcaaagtgagaataagataataaataacttcatgttagctcaggtctggttttgccaccaaatgaagtatgaaaatgattctaattttctgagctctctggttccattgggggt

SEQ ID NO: 373876 - DNA, 409 bp, Homo Sapiens
ccccaaatggaatcccttgttaagaaatcaagaatggtctcaaaatagttctaattttaatccaatgatttgttctaattttttattcactaaatgtaataatgtaaagttaagcaaataaaaggaaacgagagaaggaatgttaagtggagaaggtgagaagggccaatcttaggttttgagtccagcctatctggcattagtatatgccacccaaggctgtcctcatggttgcttttctaccaagtgggactcttctaagtctgactcttctgcagacctgacaggaataggtgaggagttttcccaagcctagtatatagtggtaaaattataatcttctgtatcattacactgaagttgactaattttccccacttgatttcagtgttgaaaagtgcaaatacat

SEQ ID NO: 373877 - DNA, 618 bp, Homo Sapiens
ccccaatggaatccagagtagcctatgatcattccctgctgggattctttaactgttaaggcaaaagaaaatgcagttgcacttaagagtatatggataaaataaagaactgtgaagtgaaaaggggagagatttttttaaaagatgactatattttaactcctacctgactatgtaaattcaagagataccagagaaagatgaggtgtagactttaaaccttccaacattccattgtgttaatcattcttcctcatcaaagaggcagtaagggataatttacagtgactacagttacaaatcatgtgctgtataagcacccaagagcagagattaggatggaattaagggtgttaaagaaaatatggcctctcttctttaccatttgattgtttatgctgtccctggagactcatatctctctctattcctaggaccaaagtttacacaactgccaaatgtataaacgagaacaccccttaaaattcctgtgaaacattgtacatcttaagagagcagatgtgtctatgggctgtcacaaatatcagtcttgctatgtttagcataaactttacaaatattagtggagacaccctatttaggattccctttgggggg

SEQ ID NO: 373878 - DNA, 387 bp, Homo Sapiens
agtcagtgtcggtccccccaatggaatccctggtactactgacatatgacagaagtgatattgcattaaaatggaaaagaaagagaagactcatatcccaggaaggaaggaatctgggcctgtctcaggcaaaactgtgaattaaatgaaagatctctaaaacttcatatcttggcctaatggtcacttttttctttcagtggtctgcttaagcagattttaattgccctgaggctttctttccctggctgtgtgcatcttcccagtcacctttgctgaggttatcaacatagcaaaaccctccctaggttgtgccacatgctccagactttcccaacccatttctcaaaatatcaagtaattactgcgtttggattccatttgtgg

SEQ ID NO: 373879 - DNA, 670 bp, Homo Sapiens
  misc_feature (107)..(122): n is a, c, g, or t
aaagacaataatgtattataggtaatatgagcttccaataatgcccttgaaagctaacacaaggaaaatcatgtcagtgtatttaaagcatcctcctggtcctcacnnnnnnnnnnnnnnnnaagtttatgttagcacaccctcaggtatattttcttttgggcttgccagcaatgttaagttagctggtgtttttatgaaatgccacaaacatattttctttgttgtagatatctacaagaagcaagtggcttgaattgtcactttctctgacatattttgctgcttttgggtttctgatatcagtttttctaactcatgagttctcagtcagggctgaatgctccttcctttagcatgagttgaaagactgtggtaacccacagaaaaactgactgtgatattgcttttcaaagttctccaaaagttgaaactgtgcttcttttacagcctcctggagagtatgcctatatggagcatcttgcaggcatttcacattcctgctctgacttggactccatctataattacatggtgattttaaaatccatttgaaagaggtatggctagagaggattagccagcttattaaaatatcctttttttctataaggttttctgcttttccacagccaaagccttcacatgggatccatttggggggtacacg

SEQ ID NO: 373880 - DNA, 373 bp, Homo Sapiens
ccgcaaatggaatccaatctaagtgaattgcattcctaggccaaacatcctcatcatcaaaaaataattattcaatgcctgccttatatagagaatcggaaacagttatctcagtgtccttgttgttttgagtgcattaacaggccttagtaacagcatttgggtgcattcctaattttgtatagactatgaaagtgacctgtcatttataatactactgagaggctttgccatttatgctcattttcctgcactagctattgtcaacacttagaaacttgtcttctattgcaagatgccagtttactcctctccctggcaagcaaaccacacacgtgcctaaaagaatccttcatacaggattccattgggg

SEQ ID NO: 373881 - DNA, 425 bp, Homo Sapiens
caatggaatcccaaggaaagggatttgcttgagatccacacagctgtttaaaggcagagttgggattggaaccaagtcttagagaatccattgttgcttctacactgcattattgctttggttccctagtgtacattcactttgcttaggagtgacatgttcagtttatcttctctaagaatggcagctgttatttaggacaatggcatgctgagaaatagattgatttctattctatactgtgtccagtaaaggtcgggggagaaagagtaaatcttatcttcttctgtacttttctttgattaatgtaagagtctagagttttatcagaagattattgtcctttaaaatattgatggactgattatcacttaaagggtataaacagtgggtagtaattcagtgattgagaggttaattgcagg

SEQ ID NO: 373882 - DNA, 500 bp, Homo Sapiens
ccccaatggaatcctagcaaaggtctccatgtctaaggatggctgtgggttacaattctaaaggtctttttatttgcttattcaaatataatgacatttaaaaattcctggcaaattagaagtattaagttactaacttaacattttcatatagacctttgtattattttatgtaccagaatcctcaaaagcactctggagttattggcctttttttataaaaatagtgaagcagagagattaaaggagttaactgtaagaaatacaataaacattcatagcctagatttcaaattcactccttatcatactgctgctacaaactcaagataattattaaaatccaaaatagaaatgaagccctgactgaactaaatccttagcaaagataaatgaacttgcttggttttgaagagtagtgtaaagaaactggtttggaggggtctggaaggcaggtcatctgattatgattcctaactgccatgagacaatgcatgagg

SEQ ID NO: 373883 - DNA, 527 bp, Homo Sapiens
tatccccccccagtatggaatccccccagaggctcaggaaacctatcaatttatgagcaactaattatattgaagcattaattatgaatcaactgaatgactctataataaatgcaggatcactgtgaggtttcaaaaggtagggcaatattttaaaagattactggaattaaagtcaggagacccaggtttaagtcctggctctgcaatttataagccatcgcccctgtagaagtcccatcacctatgacctgtaatttgatgtttctcgctatgcagtctctagacttaatactggtcaagaggcaaccaaggaggggaagtgatttgtgcctcttttgaagcatgctatacaaggcataaagatacagtgctacagtagaaagacgggaaagaaaacacttttcaagtagccactgtgtgtaaggtactttacatactgaatcaaagtagacagggattacagagaaggaatgtgctcaccaacaactacctctttctactcttattacctggattctttgggg

SEQ ID NO: 373884 - DNA, 532 bp, Homo Sapiens
  misc_feature (60)..(85): n is a, c, g, or t
gcaatggaactctgtgctagtgaccgctgtccaatggcaactgataaggtctatgacttnnnnnnnnnnnnnnnnnnnnnnnnnnctctgcatacattttttaatgtataaaaaccactcaatataatgatccaaggagatgattaacattgttaaggctgtatattcaagcactgtatgttaaaagagcaatggtgtgaaatttaggcagtaagaaatgtcctgcattatggatggtacagtaattaaagaatgatgctttcaacagctgattgttggtatacactggctactgatagcagtacagtatgggagttaataagggtagcagacgatggtagaaatgacttctgaaagatgatagccagttttctccagcattcagcctggtagtaaaactcagaatcttggcctgcatcttaaatgaaatactcttttttctcttcagcattgacttggctgccttcagcattgataatggctgtgtcagcatctggtgcatcttcagctcctttagcttcatttgttccat

SEQ ID NO: 373885 - DNA, 334 bp, Homo Sapiens
cttgcatgcatatgattatcaatttctgctcattttatttccaaatacttcttgaatttactactgcattaactaatacctttattattacaatggcatctttaaaaacctatgccaccagtctcatcttctatttattttccacagtatgtcaagggatgtattcctctttaaaaaaattgattattcccatgcataaaacccttcagtagctcctaattgcctacaaaactacagaataaatataatactgaggaggtgagggagggaaattatagaccaatattactcatacatgtgttaaagtataagtaaaatactacttatatgattc

SEQ ID NO: 373886 - DNA, 515 bp, Homo Sapiens
ccagagtattacttatgcaacaaatatatattagacatatgtcatatattaggccttatggtaggtggtgaggtgacagcagtggccagttcctcccagtggtgaaacacaacacttggggaaacccaggtgagcaaagtgaggctcgcaacacagcagcacaggtaggtatgctcacaaaccaccatcccgagggaaatgtgcagaaacagtaaccaacattgagatttcaccgtgcataaagagaaaacgatttgaactaggtacaggtaaagccagttaagattatttttttaaatatattttaaggataaatttaagactcatgaggacattttctagccagcaaagcacagacaggctggtattgtgggtctgatttaacaaaataaatatttgtggctggttcaattatggtaaattattgtttctcaagtgcctgagtacaaactgtgctatcacgtaggtgaaataagcccttcccttgggcatccaggctctgatatgggattcca

SEQ ID NO: 373887 - DNA, 570 bp, Homo Sapiens
atccccccccaaagggaatcccaaaccattctatcatctctttctggtagtctataagatgttcattgacctttcaaaatgtccctggtgttgagttttcatacattctacataatttcttcatcttggtcttctggctcattttatctgttttgcttttcatgtctagatgtttcactgtttccaaatcttatttttcttgtcatatgctcttgcttatcctccacccccaccattttttgtcttgttccttctcaatctttggatattctttcattccttacacatactgtatttcaataaatctaagccatcaagtactgaaaaacacatcattttgtgtcaatttaatgctgcactgtcatccgaattttagagttgttaaaaaaaattttgtgtgtctttgaatactctaatccagtaattccaaaatctgcagtctttgcaggtcagattctgttatttctcttaatgtattcacaatgacttttcaaaactttgtgaatttgagtatgagtccgaaatctatcagtatactacctggattccatttcggggggatactctaga

SEQ ID NO: 373888 - DNA, 511 bp, Homo Sapiens
ccccaatggaatcctcctacctcagcctccgtaagtagctaggactacaggtgcatgccaccatgcctggcttttattttttattttgtagagataaaaaattcaaagtatgtattaattgtataaacattcacagcaagaagcaaatacagcttcttaataaaaaccgtgtatagtttttgaggttttaaaactagctcttggacagtggccagttatgagtaagtgaaggagaaaggagctttgcctggactgatttggagggttacagagaggtggcaggttaataatgtactttcctatcataggcaaggggaattctaatgccacctggttttaaagtcagaccccccccaaaatgtctgtcacaggtgatgagtccaaatggaaattggctcctttaatacctcataagcaaaccatctaggattattataaagtagaacaaggtaaagccagagaatctctaaactgcatcttgtttagtcaacctgcattccattggggggac

SEQ ID NO: 373889 - DNA, 357 bp, Homo Sapiens
aatctcccatatacccttctgccggtgcgagccttgggcaagttgctcaaccacagtgtgcttcagtatcttcatctctaaaatgttgccagcaattttcctgataggctgttcatagaagaaaagaagtaatatgtgtaaaataattagaagattagcacatagatggatattattattactcatattactcatgtagaaaatcctgttcttgattaatgaattagataaaattaccaaagataatagaatcttgacctgccttgagaagaattaagtctattaaagaagatgagatagatcaagtgtggccacactggctttgatgtctgaatcgaagttggaattccaccctct

SEQ ID NO: 373890 - DNA, 428 bp, Homo Sapiens
agccggtcccccaaatggaatcctcaggaagaggagaactcttctattgtgactccacggggaggctaacccaaggagggacaggtgaactagtaggcagtgccaaaggaaagttaaggagtttctgtctcaaggctttcagagcctcactgaagtaaagggaagagttctgtggtttcagtcatggagggaaatgaacaatgagcacggaccaacacaggctgtagattaaggaagattctggtaatgactttgatagactttcaggaggatgggaaaaggggagactgaagttgtccagaggtagggaaggataaaaggtggtatttgagcttcgccttgacacatgaataaacagatctcagctttctataaattgtaattgaggatgaaaggaatattcactggattccattgggggaccggct

SEQ ID NO: 373891 - DNA, 249 bp, Homo Sapiens
atgacataacctgggcgaatgattccaaatcaaatacattatttgtcaaagttattaagcaaaatgtagaaatgcaaaacaactaaggatttaatcacagccagttatttaataagtccaagctttacagactgctatcaccattacttacaaaaaagaagaaattcaactatggggaaaaaacacgcatcccaacaaacaaatggcaatactaataggattatgttggaaattacatggcttcagcag

SEQ ID NO: 373892 - DNA, 356 bp, Homo Sapiens
aattgcatgggacatgagctacatatgagtcaggaactgtaggaacacatttccattcatgatggattggagataagtggtgcttcacctcagataattcaacagtaatgctctaaactacatgctgtgccaccgtagatgaaataaggtgttaaatcttctctcctgtgtctctcgatactccatatgatacatcatgtgctaaaagtgccacttgtaatttgccttgtggaaattcattttattattttcttacctcttgcacctgtgaggaagtgagtatgagagaaagatccagaaaggggagaggtcatatgaccccctgctctccactggcactgaccgagtagtagaca

SEQ ID NO: 373893 - DNA, 826 bp, Homo Sapiens
aagggcgatcttgtgactgtcgtcagccacgttgttgtctgtctttgttccttgtttgtttgctttagtactttaatttattcagaagtggtgcatgaaagtttaatttggcatccttgtatggtttacacattcagctgacaatccgtcttctaagagttatcaaaataacgacctccaaaagtcatcaacactttgggtctgctggtgtccaccagcccttgttggcttttatgaatatttcatttatgcctctttacacgactttgtccactgacttgaactggaagcccttctccactcttgcatgccttcacagagaaaatcaaggccatttgttttaagcttctttgatttcttttctcatcttttgttattactctcctattattacctctatttgtagccattcctcctttttgtcccagtggtaaaagtgcaaattcctgtccgtggctaattttgtccatctgtgctttggatctcatttcttccaacccttaaatctttatttctcctgtatttcaccttttactatatatgcgttaatatttatgtataatgtttatgtattacacattatatgttatgtgttatacaggtatactttgatatttctgtattacatgttatccatataaatatatgtaatacttatgtggtacatattacatactttaaagcttcttgaaagcgtgtccccatttattgttagcattttgactgcatgcacacgccccagacactttagcctgggctctgtcccctgctcatgccgctaaaactgctcactggtgatctcactgctgtcatatcccgtggattg

SEQ ID NO: 373894 - DNA, 376 bp, Homo Sapiens
cctgcctacttccagacgcatgtggagggcatgacccctgctttatagaaagataaactgaggtctggcacaggcacacatctgtcacaagttgtaccagctagggagaggctctacaagtcctgcctttccttgctttcaaatggaggtacatcctcagcgcctcagcgcttctatcctcttttgggaggaatcataataacctcagtctgctctagatccatgagctgtcctcccaatgttgtcccctctcacgctttgaaggctagaacttgacatagaggtctaggctacccacagcccaatgctatttttgagttgttccagcttttttacatctcgtttgattatacagctaggaaaaaacacctcttta

SEQ ID NO: 373895 - DNA, 440 bp, Homo Sapiens
gtgatttgaaaagttgcaggatacaaaaatcaactgcatttctataaactggcagcaaacaattggaaagtaaaaacttaaaacaactccaaaatagcatcaatcaaaaatattcagaaacaaatcaaatgcaagttgtgaaagacctttatatgaaaaactacaagtactgcaaagggaaattagattgaatgaaatcacaataaaaatcctgaggaatttttgaagaaattaccaaacttattttaaaattttaatggagaggaaaaatactcaaatagtcgaaaaaaatttaaaagaactgctgatttcaattcttgctataaaattacagtatcatgacagagtgacattgatgaaataacacttaccggacaaataattttcaaaaaaggtgttaagttagtgagtggatagtgggtagatgattccatttgggg

SEQ ID NO: 373896 - DNA, 408 bp, Homo Sapiens
ccccataggaatccccctgagggtggttgtgaagattcaagtgaaaaagtatgtgtgtatcacttagggtagttcctggctacctggtatatggaatgcactcagtaagtgttagcttgagaacagcaacattcttcccattatcagacatttctctaacttatagggtaatagctttaaatgagccattatgtaggatggaagtagattaatgactatttctcaaagcttttaaggaaaacagacttgtaacctaggtctcaaactattggccttttgcccaggttttgagccctgggagtgtccgtgttcaaaacaagttgctgatctggtagatcctatggctgattcacgatgactgttattaaaaagagatggtctcctcccagtgtgttggattccattggg

SEQ ID NO: 373897 - DNA, 451 bp, Homo Sapiens
tcgtctctagagtatccccccgagatggcaatccatgtcaatggtttaaaaacataataaatagtagaaaaggatttaaaataaaaagtaagtttgttctgcccaactctcacaagcccaaaagcaatctctgttcccttatctggaggttctagagaattcctgaccttaaacaaaccatgctcacatggactgattagctccaaagaagaaactgaaaagggggttgcgggtgtgattttaagtttgtcatcccccaaaaacaagccaattcagtaactgtagttatttctgagcagcagggtcatagacaacaattttcttcctcatagctttctgtattttctggatgtgtttggccagacatgtataagcaagaaaaacaaagccattaaatagaaaatgaataaatggaaataggcagagtctccaaagaatactaaaggacatg

SEQ ID NO: 373898 - DNA, 485 bp, Homo Sapiens
  misc_feature (358)..(417): n is a, c, g, or t
atcaggtgagagcgggaagatattagctttatccaaatccgtttactaaacattatggaatgtacataccctctgacaagaactggaatgtacataccctctgacaagaactgtagtaacactaggttggatgattatggtggggtgagttaatgagatgcaagggtagcagtgtagggatggacatcatcatgtcagatacaaatatttggtggctttatacaaaagaaatgtgagagatgcaagattatccattaaaataaaagcaaaacatcttgagaacctaaattatatggctatcattcattgagaacttcctaggttctgattaaggacttaacatacatttcctcgtttnnnnnnnnnnnnnnnnnnnnnnnnnnnnnnnnnnnnnnnnnnnnnnnnnnnnnnnnnnnntgaaccagcaacccctccaagattacagcactataacaacagtggaactgggaaaagaggaaagggat

SEQ ID NO: 373899 - DNA, 537 bp, Homo Sapiens
  misc_feature (184)..(394): n is a, c, g, or t
tataatcgagctcgtacccccaatggaatcccaactggagactttcagatatgcacttgcacatacagcacttctgacaagagaaatcattttggcagttatctaatgcagatatgcacatggaaatggcctcgtcaacccattctattttcttatgagttttaaagataataacaatagcttnnnnnnnnnnnnnnnnnnnnnnnnnnnnnnnnnnnnnnnnnnnnnnnnnnnnnnnnnnnnnnnnnnnnnnnnnnnnnnnnnnnnnnnnnnnnnnnnnnnnnnnnnnnnnnnnnnnnnnnnnnnnnnnnnnnnnnnnnnnnnnnnnnnnnnnnnnnnnnnnnnnnnnnnnnnnnnnnnnnnnnnnnnnnnnnnnnnnnnnnnnnnnnnnnnntacactcttcactgctcactctctacagaagctacttaaaacagtagcctagacataccacttgacatacaaatgtctttaaattgggttgagactcaaaatatttgtaatggattccatcgggggggatactctagagacga

SEQ ID NO: 373900 - DNA, 374 bp, Homo Sapiens
cccaagggaatctacagatgtgagccacgcgccgccctgtcaggtttaaaagtagcaatctgtcctcaggtgtacttaaccactacagaaccctgtctttgctaccatctcttttctcctttctgcgtttttacctgtgacctagtctgtgatttttatattgatgctgctctctgctctcatctcctttaataagtttgtcctactccctttttccttctagcctatccaaccctgctctttatctactttactgaatttcttggtcctattttctttattatatctcctaaactaacttcagaatacatgtttgtatgtcaaaacaaccgtagaaggggaggcttaatattccaggtttaccttttagcaca

SEQ ID NO: 373901 - DNA, 118 bp, Homo Sapiens
aatcctagagggagaaggtcgtgaagttaatgaggaattatttgagtctggctatgttttgagggatgaaccaacaagatttcctaaagtataaaatatgaaaataagagttatcaac

SEQ ID NO: 373902 - DNA, 425 bp, Homo Sapiens
  misc_feature (380)..(380): n is a, c, g, or t
  misc_feature (413)..(413): n is a, c, g, or t
gaatcccttatacttgtacgccgggcagaataaatctcaattaagattttgtgtggactcgggaagtgtttttgttccctaaacaatagccttaagaagggtggaaaaaggcccgtcttcttcttggatccttggttgggtgacaaccctccggtggtgagacatggtgcctgattttcagttggggctttctgcctcccctgtttggttttctagggacaatttaaaagattctgcaagttaattactggagaagtccgtagatcctggattcatagtatcagattaattgtggtctttgagtgggaatcctagtggtttatttagactcatcagttgtcttattcttttttttaaaaagaaagaaaacattttatttncgtaagcttgtattgcccttaaaatattttctntgcaatcttagg

SEQ ID NO: 373903 - DNA, 400 bp, Homo Sapiens
ccccgaggaatccaacttcaataatataacaagcaagtcttttgcaatgaaatccggcagagatatgagattttataaccaatagggatctgtgttgaaattatgcactctctgccactttgtatctatgtgactgtaagaaactcactccatctctaagagtcagacaaactcataaaaatagcttatttggattagaaatgatacttgtatggatttcaaaggacagacacatattgaagcattagtatatccatttcaaaagtgacattcaacaccaacatttcgcaataataaaaacacagcttaatatgagactaatcattaacactatgaattctaattctgcaaaaaagttaaaatttaaaaaatttcaaattcagccgggtgcagtggctca

SEQ ID NO: 373904 - DNA, 390 bp, Homo Sapiens
ggaggctgtaaagagaaaatgcttagaaatggtgtgataaacaggtatgtggcagtagctcatttctcgctaaggtggagtgacatacgaactgcaccagaagcttaatgctccgaaaacatgaaggaggtctcttctcctttcatgaagtctcatgttgagagactgtagcgaaagaatcccgtgttggtgtcacagtgcctgtcggcagatgcacgttggtaaatgaaagccgtctttgctctgtggagcagccgatttatcagcgcatcgtctaaatgccatgccttccgttgttctgaatatcaaaatgagataattttgtatagtctggagttacagtttaaaggctttcagacctattttctctgtgaaaggattcctttgggg

SEQ ID NO: 373905 - DNA, 386 bp, Homo Sapiens
  misc_feature (251)..(251): n is a, c, g, or t
  misc_feature (278)..(278): n is a, c, g, or t
cggtaatcaggatgggtcatgcgtgactctatctccaccccgcatcttctaaagcatctgataagcgctagagaaaacatcctgtgtgcagaggtttagatgctgacacagggtgggggagcaccaacgacccaggggccacgaggagttaatcccccgagagataggggcctactctttggaaagttcagagaaagcaaagagaaaaaagattccaccgcgctgttacatgtaggttaccaataacacanaaacacaagatagtaggtagaagactnctgtagcccaaacattaacgaaaacatacgaccaaacacttctttacgtccaatgcggtacggtactcacacataaaaggaaaagaaaaagtttttaagcagggtgtt

SEQ ID NO: 373906 - DNA, 412 bp, Homo Sapiens
cctatatgcgctctaccagatgactcaattatattccatccatccatggaatcctagacaatcataaaaggacatttatgttaacatggaaagtgaagatacgctttgaagaataggctacaagagagaatacattacacaatcctactgctgtataaaacaaaacatctggaagaatctatgcttaaatattaatagtgtgccccgcaaagtggtaggataatagtgacttttattctttttactaatctctattttctcatgtttctgtaatgaacatgtttcataaaacaaaatgggtctgttataaaaatctgaaaagcgttgcttttgaaagagagcagtagttacaggctgtatgtgtcaaataaaatattaatgctaaatatcacacggattccatcgggggtgg

SEQ ID NO: 373907 - DNA, 466 bp, Homo Sapiens
  misc_feature (49)..(49): n is a, c, g, or t
cccactgcccccaaaccgccctagacacgaaaccccaaagcagcctgcnacgggcaaggcccccgcggaatcctgcagagcaaactcaggttaacttgggtcccatgaccgtttgcattcgaaacacaatacactgccctcgttctctcagttagcagctgggcagcagcgcaccattcatcatttaggcttgtggtttgttgtttactctaccaatgttatgttgaaactgcattgtaaaaagagaagaaaatggcaggttttccaggtccacggaaaggtttggcctgacgctggagtgcggtgatgaacttacgtgacaatgattgtattcctcagtagcactttaaacgccgaagacagccctgcagcaagcctgcacacgggcttgggtgggttcctttggagaagatgtggctggaacacaaacaatctttgaaagaaataaatgtgcacacagaacact

SEQ ID NO: 373908 - DNA, 647 bp, Homo Sapiens
ccaatggaatccttccttattcacgttagccagtgattaaggatcttcttccatatcatctggattaggagccataatgaagtgctttgggtatacaaggttatgtgtgtatgcatgtatttcccagcgagcatcatcactttcatgtgtaatgtaacgttctccaatgcgagtttcaaattctctaaggtcaagccaagtctgatagtcctgtagccagggatgactaagagatttgtcaacactgtaacgttttctcatcttcacttgaagcagattgtttatcagatcaattgcttcaccagaaatttctctccatggatttggtgggtacataaatgcagcattttggatttggtcatttatatcttcatcctcattaaaaggaaatgtgccactgaggctcacatagatgataactcccactgaccacatatctagggaacggttgtaacctttgctccggagaacttcaggggctaagtatgctggagttcctaccacagatctcctgaatgacttttcaccaatgatgcgtgcaaatccaaagtcacacagcttcacctgaggaaatggctctgctgatgcaagcagcacattttctggctttaaatcacagtgcacaatattcttaaaatgcagattcc

SEQ ID NO: 373909 - DNA, 382 bp, Homo Sapiens
ggcggtcccccaaatgaatcacaagatattagctatcgggctacagataaagaccacaaagccctgaaggtcttctctggaggcctctggcagctatgcaaagcagtccacaagtggagaaagctacattctgcattcatactgttccatgagccacaaagtttagctatgccaacaaaagctgtgacccccttcatagtaacaggacctacttatttctgaaccacccatacagtgacaacaaccctcaagattgaagaaggctgaaacaataaggccttcataatagcacaaaccggagaaatgggaggcaagctgttcttaggatcatgacttggagggtagaaaattggtcaagattgatgtgatacccacaagggat

SEQ ID NO: 373910 - DNA, 367 bp, Homo Sapiens
taatctttatacaatttcacagcaataatagcagcatgattttagcctcttaaaagatttcctcctttgctctaaataaaaattaatttcaagttctaaaaagccagagcagcaaccatccagtaattggaatgcaattctcctagtgtcttctacagaccgagcatttaaaatacgtgaatgtataaaacttgagtattattaagagttatggaatgaaatgacaatctaaactcgttttgtaaacataggactgccttgctagtctgatgtattttggggggtggagggagctgagaacatagaatggagttgggctagagagttcctactcaaataaggaatgcaactttcaaaactcgtgggt

SEQ ID NO: 373911 - DNA, 739 bp, Homo Sapiens
tatgctcatagctgactctagaggataaaatgaggtcgagtgaagagacagtcattagtgagaacctaagccccatcgaagcacagtattacatgtggttgggaaaaataaaaagacagtggtgtggaatactccaaaacctagaaatgctgtaggaataaatctgtggtaactatagaggtttaacttatatcattttcaaactatttaattttttcttttcctggttctactaattatactgtgtcagatttggaactaaacaggcaaggaggctttgagtcacatcgttttcattttaaatcaggctgtgatgcactgtggctggtgccgtcttgcatgaaacgcatgagccgtgagcgcccagttcagactggggccagggaggggcagtccttggcactttctgtcctagaggacactgtcagttgagttaatacaagtgacatagcttcccttccctcccccttcacccactccctccagaacatttagtgtagatgaaaatgtggtgatagaaatgggtgcatgatcttcacgtgtgacagccaggcctttgcctcttggccaagtaaagcccttccgggtcgctctccttcgattccattttacctcctcttctgatcacttccagagatgagctgtttctggataatggcacacgggcaaatctgtgtgccctgtgggccgctgttacttaccctctcctgcgagacccaggggcttttccctactgttc

SEQ ID NO: 373912 - DNA, 373 bp, Homo Sapiens
gtagcgcggccatagaagtagtaccgttaaactaaggtgtgactttctgactcacatttatgaatatacccagttagattatagaactgcaacatcatacttattaccttgaaattacatttttgttctgaatgaccaagccttgtaaacaatgtaagtactacctaacacacatattctgaaacaagctccacgttaagcgttggtttgtaatgggtgatatttggatagctctgattaaatatgtaaattatgaaaattagaagtggaaaaaaagttacctttgtacttgaaccagctacatattgatctttgactcaataatggatcattctctctcttatagatcttggtcttacacaagttttttctt

SEQ ID NO: 373913 - DNA, 372 bp, Homo Sapiens
tcccccaatggaatcacagcatggctgaaaattgaacctggcctccctcgtggcctaccactgaaggaacagcattttttgcctatctagaaagacaatgttaaatgtgctatctatatattttttaacttgtgctacctactacgcgtttatatttgtggaatctgttttcttttggacaaaaccacaaatcaaaaacacctcatttcttaggcatttgaaatccctaattcagaaatatctcccaaacagaaacacaactacctgcattctttttgacaaaagagctaagtagcattagaaaattattttaaacccaattctgttttttaacagaataaaattcttctgttcttcacattcttctttcat

SEQ ID NO: 373914 - DNA, 376 bp, Homo Sapiens
ccccaaatggaatctgtgatgtcttgcagcatacagtgccacttcaaaagaagggtagctgctagtgatgttatatccctctttattttcagcgaaatctcagcttgaatcttacatggctcttacatagaatcaacagaagtgcttttggaattgcaatttataaaaaacatgtttgtgtactagagtgaatgtgatggcttatcctaggatgtggcagaaaatgacttcaccctcaagttctatattaaatacatagcttctcagaaagcacctgaccccatctgtgaatcacgtcctgagcttcactattttgaaaatattaccatatctcatatttgctaagttatctaattaggtatgaattctgtgagaa

SEQ ID NO: 373915 - DNA, 586 bp, Homo Sapiens
agattgcatactcttttgagggaaatgaaaagcaatgaagaataagtatgcttattgtcgaggagctatgaatccagtttgaaagaaaagcatggtatgaaaaggtgtgggagatggagcatggaagtagagggtttgttgttggaaactgttgtagaagattaagataatactggatgctagagtggggtgggtgaagctgatgcatctaatattgctttccacatctttgtaaaactaagatgtagtgaggtaaatctccattgcttgcgctgcttacgcaaatttttagttctgagtgccaaaaaagatggaaataatatttgagagtaggtgttacataaaagtttctgtggaatggatccgttttggtggatatcattatacaaccttcatactgtttataactggtaagtaatgtatttcaactttcaggatgatattaaacttcctttactataattaatttgaagacagttttttgggtatgtagaatccatgaactgatgttttttgtacaagtctttctagtaaaactaaagctgtcttgtactgttaatatttgtgccctatggcatctctggat

SEQ ID NO: 373916 - DNA, 355 bp, Homo Sapiens
agcggtccccaatggaaccacatcgattagcagctcacagtagttacttttcacttatatagtcacgactgacaagtactagcagttcacagacacattctaagtgattttgatttcagatccagataatgagaagctaattgttttttaaaaataaaacagggtctataattcattacacagataaatgatcatttcccattaaatattttgtttcctaagtgcaggtatacgtaaacaagtgaaagggatgcaacccacaaatagtcctaattcaagggctagagaatttgacagtttagttgataggtcagcaaactataggcttcaggtcagacctagcctgctgcctacc

SEQ ID NO: 373917 - DNA, 379 bp, Homo Sapiens
tggggttgcagaagtggtccggggaccctggcttccttgacatgccatccccagagcctggttcaaggcctctctgtcttctcggctgtttcacgacgtgttttgtaacttggcgggattgcgtttcgctgtgtcgaggttgtctcttctctgactcgccctccgggggactgccggggtaaatctggagagttgctcgtgctgacagtcctcccccagggcctccccggttctgttgagtctcctttctctgtagtggaggaaatgtgtgtagcttttgtgttgtgtgccgtgtgtttgtctgtaaaagcaaggaccaaagtctcccttgttgacctgtcaatcctatttgggacatataaaaacactatggattcca

SEQ ID NO: 373918 - DNA, 343 bp, Homo Sapiens
ccaaatggaatccccaaatggaatccctagagtgtgggactagatttactcttcttgttctccctggtctttaatactatgcctggcatacacagggggtgccataagtattttgctgagtgagttggtgaatagaagtgttcctttacaaagtaccgttttgatcatctcataagaaagtcacatggtacctgggtggcctgagggaaaagcaaggcaggtctccagggttgagtttagcatgcctgatctttgctgagattcaggatttccaatcgcactggagaggattgtgtaggtagtagcaagagggtggctacatttagctgacgtttctcatgcg

SEQ ID NO: 373919 - DNA, 356 bp, Homo Sapiens
atccggttatcagacaagagattttaaagcagctagtagaccatgctataagaagtaaaagcaaacattcttgaaacaaacaggaatatagaaagtcccatcagagaaatagaagatacagaagagaaccaaataggaatattagaactgaaaaatacaaacactaaaaatttaaaacttactggatgggcttaatagaagaatagagatgacaaagaaagtcaatgaattgaaaacagatcactagaaattatctggtttaagcaacagagaggaaaaaagagtaggaagacaaagactgaacagagtctcagcacctgtgggaaaatactaaaatgtctgacatttatgtcgtt

SEQ ID NO: 373920 - DNA, 424 bp, Homo Sapiens
  misc_feature (129)..(159): n is a, c, g, or t
aatcgagctcggtaccgattgatgcatgtagtagattttagtacagagagtgacaggagagactggcattaaaaacagtattgagatatcaagtcggtactgtgtgctattgctaggaatatgaagcannnnnnnnnnnnnnnnnnnnnnnnnnnnnnnctaccctggttctttccctcttgacatagaactttgcagctagaatgattttcaagagtgaatttggccctttgctttagaaaccacctggtattttcaccttcagctgatctaagaagaaacagtaaatctttcccaagagttcactttcctcatgcttcctatctgttagcagccacatattctttgacatcaaccctatgagaacaattgattttcattattacacccttaagtcccttaatccttactgcatttcttctgt

SEQ ID NO: 373921 - DNA, 490 bp, Homo Sapiens
  misc_feature (93)..(102): n is a, c, g, or t
atgcatgtaggtcacaggaattcagtacctttactgtactgatgtgtttactctttcctagaaaagcaaggaaatgttttgcttctgcgttgnnnnnnnnnngcccccacacctagaatgtcttttttcacagcccacgtttaaagctgatctacctctcataagccacacattctagtttgtagagatgcttccccttgttatccttaagatctcattctcttctgttattttggtgcttaattttaggtagatgtatacattggttctggtatcctagtttttgcgaatcttgtccttttcatatatcgtacttcttcagttacacatctgtagaccaggtcttgtaatctccctttgctcttcatgtgcatgctcttggtttggaggacttactcgttgagctgagtggctcaaagaatacctagaatgagatttttagccaaaaactaattcaggagatggcaaaagcttccgtcttcatttatac

SEQ ID NO: 373922 - DNA, 403 bp, Homo Sapiens
atgcatgtagaggagatatactcgtatgcaagtgaggagaaaacagaaaaagaccctgagattctagcttagtaaatggaagactgatataaaaaataagatatggatcatgtaagaaggaggacagatcatataaaaagaaagttgaaactacataaataacacaaaaaaagaataatagacatatgagaaccttggcaacattcatcttcaagaaagaaactgacaaaaaggtacactaaacaggtacattcagaagacaaagccagtagtgaatagggtcataaaaggctcaaaacatctgctgataagttacctataacttacagagctatctcagggatgtcttccattgatactctgggttaagcccgcctaataaagcctttaatttcaccttgta

SEQ ID NO: 373923 - DNA, 375 bp, Homo Sapiens
  misc_feature (282)..(300): n is a, c, g, or t
agataggctatctacggtatctggcactattgtcattgattactacatttaattatcacaacgaccctgtgaagtagaatattcctgatgttcagattttttttaaggcaattttaaggagtaaggtgttatgttactcaaaatcttatagttgaacaagttacagagctgcgatgtgatcctttgcattgtgtctcaagatcctgtaatgaatgacaagtatgcaatacagaccaggacataattgttattaatagggtcatttcagatcagtccaggccnnnnnnnnnnnnnnnnnnnacaaaagtgagatcatacttttttaatactcagcaactggctctttctcactcagcaatcatagataaccttgca

SEQ ID NO: 373924 - DNA, 499 bp, Homo Sapiens
gatggtgaggcaatcactgaacaaagaaacaaaacataaagtagcaatacacaactataacaccttatgaacagtaggctcatctacttttcttgtctccagtatggtcaaagaactcttaattcttaaggtttgggtataaaaaaaacttggacagtgaattgtctacattctcttagacataccaatggagaactagttcataacaggtcattttgatttaagaaaagtattggaaattaaaagggaaaaaactggaagaggcagagctttggctatcagactttgaacatttagctaacaggtacataaataaaacataactaaagcaaaatttttacttagtttaatacccaatgcaaatttaagaatgttttcagcaatctgtcactctcagtcaaatcacaaaatgcagaagctaataagagatggattaaagtgcacagactacagattttagcaatccttgaaggtttctacatcatcactcggtaccggc

SEQ ID NO: 373925 - DNA, 499 bp, Homo Sapiens
tctgttgacacagtccgtactccaatctccgttcctgactaggacctccctctcgaggatgaatgggaaagagaagaacttgataaaaagcaaaaagaaaaggcatctttactggaaagagaagaaaagccagagtgggaaactggaaggtaccaactaggaatgtatccaattcagaatatggataaattgcaaggagaggaagaagaaagactgaagagagaaatgctacttgctaaactgaatgaaattgacagagaactccaagattctcgaaatctaaaataccctgttttgccattgttacctgattttgaatcaaaactacactccccagagagaagccccaaaacatacaggttctctgaatcctcagagagattatttaatgggcatcatttgcaagacatcagtttctcaactccaaaaggagaaggtcagaattcaggaaatgttagaagtccagcctccctaatgagttcgcatttggtagctacat

SEQ ID NO: 373926 - DNA, 659 bp, Homo Sapiens
ccccgactagcccgacagcactttgtcttgttcttccagtgggtggaattaaagacaaagtgctggcggcacacagagcgggactgaagcaagtcattattcctcggagaaatgaaaaagaccttgagggaatcccaggcaacggtacgacaggatttaagttttgtcacagcaagctgcctggatgaggttcttaatgcagcttttgatggtggctttactgtcaagaccagacctggtctgttaaatagcaaactgtaggtccaaatctcaattttttagaattttaagttatgaagtgctcaaaggtactgacacagttgattttattcacaccattaggggtatgcaagatgtccctgttttataaacataatcacaacagtaataaacctcaagtagtggctagtgtttagtatagaaatataagatgttgatttagtaaactgataaaaatcgaattcttgtctttttagtgggatccttactgtccctggaaagatatagcatagtggttctcagcacagtctccagaacagaagcatctgtagtacctggtaacttgttagaaatgtacattctcaggctccacagcagccagcctgaatcaaatcctgggaggtggggacagaaatctgtgttaagaagccttccagtaa

SEQ ID NO: 373927 - DNA, 545 bp, Homo Sapiens
  misc_feature (61)..(159): n is a, c, g, or t
  misc_feature (179)..(225): n is a, c, g, or t
gttatctatgtcgggaggatggagtgggatggcatgaaattcgtcacatcgtactcacatnnnnnnnnnnnnnnnnnnnnnnnnnnnnnnnnnnnnnnnnnnnnnnnnnnnnnnnnnnnnnnnnnnnnnnnnnnnnnnnnnnnnnnnnnnnnnnnnnnntgagtggggattaccatatnnnnnnnnnnnnnnnnnnnnnnnnnnnnnnnnnnnnnnnnnnnnnnncgtagtttatatcccatcctaacattactgtgggtcttttgtgagcttttcgatgtccctctcgttacaccccagtcctaaccccaattcctggggtagagagctgggagctggaagccaggcagcctggagtgagttccagccccactaattccagctgtgtgaacttggacaggtttcccagctcccctcaattccagctgtgcgaacttgaacggtttctgagcctccttccacttcaattttctcgcctgccaaacatcagtcgtaatggtacgtacctcacatggttatgtattaaatgagttactacatgcata

SEQ ID NO: 373928 - DNA, 434 bp, Homo Sapiens
tttgaagtgtcactgtcatttgggtataatatctgaaaactcaaagtttttctctgcttttatgatattcaataaaaaattaagaattgtacctgttcacagaataaatagaatgataattttcatttcacaatttatgcaacatatttaatctatttttgacaattccatcacattttttaaagttgtgaaatttatttttctaggaaattgaaagagcatatctccttgtttttttccaaaattagtcttaaactgattaggcttaggcagtttcttactcatctttgtgttttcagtgcctagcacagagcagacacttcaataaatattcgttgaataaacaaaggaaggaattattcatagaagactctgatgctctacagagaaaagaaagtgctctcagttctaacactgacgtgtttagggctaag

SEQ ID NO: 373929 - DNA, 191 bp, Homo Sapiens
gagatataggttaagccctctaatttacgtcagatgaaaggtcactagcgagattcttctttaaaaataattcagcatttctaattgatgaaataatatcagtaacactgttacttggtaacattgctgctaggatttttaataaatgtacatgtaatatgacaaatcaatgctacatgcatcactggtgc

SEQ ID NO: 373930 - DNA, 592 bp, Homo Sapiens
tcaagatacattttacgattgacgagattcgaccgttatcccgggactgggccttcgcgcgtactcgctccaacggaaccgtcactccgctagtaaatgctcaaccgggaagtgctgaaggcaatcaggaagtgttcttgctgcatcgagagcccgacggaaagtggcgttttgcgcgctatatcttttcttctactaataccctcaagtgagcgtgagtcaaaagtatgaacgctaagacacaatctctaataatggtcgctgcacgcgtgttgatggctttgctctttattttgtccggcgttggcaaaatcgataaccccgaagctatacgcggttatatggaggcgatgcacctgcctgcagtgttgctctggcctacggtggtgtttgaaattggttcgggtttgttgctggtcatgggttttaaaagtcgtatcgtcgcgtggctgctggcggggtactgcatcgtgacggcaatgatcttccatactcagttcagtgatcaggtgcagatggccatgttcttcaagaatgtgacgatggccggtggtttcttgctgctggcaagccggggtttgatcgaactacg

SEQ ID NO: 373931 - DNA, 338 bp, Homo Sapiens
aaccgatgtgatgcatgtatacaagatgagagatcgatggtgttcctatctgggtcagtaaatggggaccgacacctcctagaaaagctgacagattcttgccaaaacgtggcttgattgttctatggagattagaagtttccatgagccaccgaagttaccttcatattccacgcatgaactctgtgagcgatttgcccgaatcatgttgtccctcagtctgaactcctgctgatggagagataaactgcacactttccctgacacacactgtataaactctttttagttcttaacccttgccttcctgtcacagcgtttgcctgtggctgatatag

SEQ ID NO: 373932 - DNA, 411 bp, Homo Sapiens
  misc_feature (87)..(95): n is a, c, g, or t
  misc_feature (256)..(268): n is a, c, g, or t
gggaaaaaaacacaatgacactgtctacaaagtcacctcttgtaatcattcacaattagtatatatatcatcaaaaagaaaaatgcnnnnnnnnnatggttaaaaataacaagggacttcatgtaaatgtataatctacttaatgtcttttttaatgctctgcagccaactcaaagaaaaatgccctgccaggggtaaacactaactctgtatttatttgcacaacaggcattggtttcatgaagtaggcttgtannnnnnnnnnnnngggaacatcagtgtcttacgctaacattttaaactgtaaaccagaaattcctaaccaagagagcttggttgttagaacaaagctgggaggatactatgtgacaccatcacacctgtctggtggtcccagaggttcctgtggtg

SEQ ID NO: 373933 - DNA, 393 bp, Homo Sapiens
taaatggtagtaccatccacccagttggctggaggaatctgggaaccttcctaaacttctcccttctgtaactgtccctctccctgccttctccccatctgattaaatactaaagtctggaaattctaccccttgaaaatatcccttgaatctgtatcatcttccctgttacctgcggccattgtaattgcttgcaggatttctactttcggcatcatactccacaatgctactagaatgctcttcttaatatgagggcctggtcatatcactatgtggctggaaattactgtccagggcgattaccagcccccgccagcatatcagcttgacatacatgatgctgtatgagttagattccaactatctagccagcttgagctgccactgcta

SEQ ID NO: 373934 - DNA, 788 bp, Homo Sapiens
  misc_feature (140)..(140): n is a, c, g, or t
  misc_feature (576)..(592): n is a, c, g, or t
aagcaggaaaatcatttgcttgtggacctactatgtgtcaggcacctgctgaaacagtaacatttgatgctctcgaacggcctttaacaggtcggcactgatctgttgaatgctgcaagtcgaaggaagcttttagcttnagagaggttaaatagcatcctcaaagtcaccccaggtcatgctctgcttctggaggggctgggatgcagcatgggagtgtgacctcctgcgcaccgactgcacgggccgcctcgcagccggcatggtgaggtgagatgagttgaggtaagctcgcagctccttggtgccagcccttccacaaccagagctgggcggcagcaggctcttccccagcttacctgggcaagagagtgaggactgcacggctggcgagtgatacatggagagtgttgccgcctgcctgacaggcagaagataaacagctccccgttaaatctcgcttaatgctgatatttataaatttattcagcttgtgtttaccgaatcaagagaatgcctaataacataacatgcttcatctcacatgttcctactaatgagaatgcaagtattgcnnnnnnnnnnnnnnnnnaacttttcatttgtgctttccactcactccacccgtggttcgtggttgttgtgggcttagagtttaatcgtggtgctaaacactgggaagtctgggcttctcgggtgttagtgaggagagagccaagggtgggtctggggcagtggctggaccaaggcctccaaactgtgcctgtcctacatgcatcaggaccggc

SEQ ID NO: 373935 - DNA, 391 bp, Homo Sapiens
aaataaaatttgaactgcatattggtcaagtaaaaaataatccaagggtaaaaagtattaaattgagccacattagtgaaggggacaatcgattcgtagacatttttgaaattaaaatctgtgatatgaaaactgttggagatacaagaaaacagacacagaaatctactgaaagggttagactttaatgcacctctctcaagccggattggcaaaaattcaagtctggaatgaaggtaggaatatttgtacattactggacaagtattatgggacaatttaggcagtgtcataaaattcaaactgtgcctatcgccacaaccctttgataccatttctaggaatatatgcttagagaaactttcactggattgttctttgtactagaaaa

SEQ ID NO: 373936 - DNA, 444 bp, Homo Sapiens
  misc_feature (200)..(210): n is a, c, g, or t
gttccttgattggaaaaaatccttagggtactgacatgcttcactgttacaacaggatagtgttactcctgatcatatcgtttattctgttgcccacaaaaatggaattttgaaataaaaacagacatccttcagaagaatttttaattttattttctgtttcctgagagagaaacaaagtaatagaagatacattgccnnnnnnnnnnnccacattgtaacataagaaaatttattttcctagtttctacagcgataaatgaagatttgtgtatgtgtgtgtgtttatttcttcaacttcatgttcttcctaggcagatcaaaggcagtcttttccaagatttgtatattttagcatgaaattagtgcatagactctgatttatccaggaaacatttatttctaatcactgaataacaacaaatgaataactaagcatcactc

SEQ ID NO: 373937 - DNA, 525 bp, Homo Sapiens
  misc_feature (447)..(475): n is a, c, g, or t
caccaaggagggagagaggggaaacacgttgaagaatgcaatagagtgattatgatgacggattacagaaaataagcagtagaagaaaggaagaatgcgtataaaggaaatgcttgggccccacagtagggtttaaagaatggctggaataaaaaaacagacaaaacatggtttaaagataggaggtggtagttaaagagtaatatgcttgcaattgagatttgacagtggttatgattactggtaatagctaagcaagagtaagtgattttgaaactaagaggcaggtactagattgattgacgatacagaaataattaagaatgataaaagtagctgaagtagagaaaaagacaacgagtcagatcctaaaatcactgatgaaaagagacttgtggatgagtgcaaaaggacaagggatagtttaatctaggggcatgtatttcnnnnnnnnnnnnnnnnnnnnnnnnnnnnnggagagggagtctcgctctgtcgcccaggcgggggggcagcggcccgatc

SEQ ID NO: 373938 - DNA, 446 bp, Homo Sapiens
caatttacgtacaaaggagtgactgatcacttcaaataaggcaaagtaattcactgtcgtactgtccatgccaacctttgctgcgatagcctgatatacctggtctgtagtactgttctttttaaccctgactgtaaccgttgttccatctggtaatgctactctcagctctacgtcggacacaccattgtagttctcatcggattctgataggaattcctgcatgatgtcactctcaccaattactcgtattgaacacactttttctagatattcttccaatccccgacgtcgggcatctaattgttgttctgataatgaaaatggccacttccctgggagtcgaggaaatgtaaagttggcaaactctctcttcaggttctggtgtaggatagcaaactcccggtaccgcttagaacctgaagagagagtctccgtcgaactgg

SEQ ID NO: 373939 - DNA, 320 bp, Homo Sapiens
catgtaggctactttataaagttacataaaattgtgaaaaagttgcatgctttagaaacagtatttccatcaagcttgtggtctaaaaagaatatgaagacaatagcaaatggatgtttttaacacagtttcttagtatttacagtattttttcttctctagctgccatcccttcaaagctggtcaatggtttttctggggcttttttcacctcacattcagagcaaggaggcatttgcaatttctgtgggataggctgggtttctgcgtggcattacttgggggactttcttgtgctacatgcatggtaccgagctcgt

SEQ ID NO: 373940 - DNA, 460 bp, Homo Sapiens
  misc_feature (180)..(204): n is a, c, g, or t
tctacatggcttcctcaatattgtcccagccatttctcatatgtatatagtataaaccgtgacaaaacactgcctttatattatttagcaatatgttgtaaatagcattattaagctcttttttgtaataaagaccctttgatttgaatatagtacaataactgaactgataaagtcaannnnnnnnnnnnnnnnnnnnnnnnnagctagaggcaatttcaattgtgaatttttgttgttgtctattgttctgaagactttgcataatttattggtttaatttatcctaatttatttgatgaaggtgtacaattttgtattaccaaggatgtactgtaatattaattgatatgataaacacaatgagactccctgtccatattaaaaagaaaataaaaaggtgccagtagacaattgattttaaaggaaagttaaaaaaattagttgatcgagctacgga

SEQ ID NO: 373941 - DNA, 416 bp, Homo Sapiens
ggaccgtagctcgatcacacactacaaattccctggagctaggagttcccagcaatcctgaatgaaacaattagggcatagccagaaaggagaaagttgttgcctacagcctagagaatttcccaaggacctattgaaaatgactgctgcctaaaccacagttacaaaactcagtacactcacaaataatgcctattctatgttttatcttaaatatctgttgtttccttgattatctctgaagatatatatacatacttctaatttttgcagtacttcagcaacagaataaaaacctcatccacattgtaaagtgcttaaagtaactttcccatgttaattgctcttggactttcattcataagaaatagttcatttggatctttaagtcatcaccacaagttgatcgagctacc

SEQ ID NO: 373942 - DNA, 634 bp, Homo Sapiens
ggtaccgtagctcgatcaacgtactcagagatcaacaatatctagctaaagctggtattgaattctgctttctcaacaactctatcatcaacatactgataagcaaagaaaagtcaccataggataggaagtcagcagatgttggagatatactggcagagtgtggcatgatgagcacatcagattacataccaaacttagaaaaagatgtttgcttgcatccaacctttttattacagtaagacttggctcttatctctaaaacctgatttctttacctctcgtcagcaatactgaaagccaggctccacataaagcatcaagacagtccccaaaaaggttcatgtattacagcacgcctgttaactctgcagtcagagtcaccaattctgaactctactggtcagggcagatggacagtgggcaacagaaagattcctaagcagatactgaatggcaataaaaataaagtaaaaataaaactgcataactatcaaccttaaagaaatgacaagacattccacaaagacacagcaatcaaaaatagaaaaaggatatgaagtccttaagactaatggagccacaaacaatagcagaattcatcaaccagggatacataggtttgatcgagtaa

SEQ ID NO: 373943 - DNA, 635 bp, Homo Sapiens
aaacaatctgtgtgtctatatgtagtaaatatacatgccacaatatttatccttttaaccatttgtaagcatacaattcagtggcattaaatacattcacactgttgtgcaaccatcacaccatccatctccaggactttcccatcatctcaaattgaaactaccttaataataaacaattactccctattctccctccattccaacccctgggaacctctctattttacttacagtctccatgaatctgcctactctaggtacttcagataagggcaagttctctcttccaggctatgtggagtcttggtggtaggatagctctagggacctacctttgccttcagaagcagaggggagccaaacctctttctccacccctagtagagtctgggggtcagaccatgacctaatcctggctaatcagatcccttgatctggaggaaatgatgcaaggatgacaagtagcgtggtacacaccaacatatatcatacatcccatcctatgtgctcctcttaggtaacatgacactcctccatcaagagaggaagtctgatgaacttccttgccttgaacctggcaggacccttgtaaaccaacagaatatagggagagtgttgatcgagctacggaa

SEQ ID NO: 373944 - DNA, 701 bp, Homo Sapiens
  misc_feature (93)..(283): n is a, c, g, or t
tatggtatcttcatcatgggatgttgcaaagatgcaatgagctaacatatttaaaatgcttatggccgggcctgggggctcatgcctgtagtnnnnnnnnnnnnnnnnnnnnnnnnnnnnnnnnnnnnnnnnnnnnnnnnnnnnnnnnnnnnnnnnnnnnnnnnnnnnnnnnnnnnnnnnnnnnnnnnnnnnnnnnnnnnnnnnnnnnnnnnnnnnnnnnnnnnnnnnnnnnnnnnnnnnnnnnnnnnnnnnnnnnnnnnnnnnnnnnnnnnnnnnnnnnnnncaactgcaactgtccagcagatgcattcttatcacttaagttgcttgacctagaattgctctctgccagtattggtggtacaatgagttggaacagaagccattttagtgaatgactgcagtgaaaaaaatgcaagaaatgtgtgtttaagacagagacagcaggagaagaagaatgacacagaataggggtgactttccaggccaaaaggggttgacttgatggaaagtacaagtcattgctaacctctttttatctgttttattgtcctgataaagagacaatatttcttttcaggaacatttaacctattctttattctgttgtttcttttccatatactaccgcagacctgcagtttttttctctttgtactgtatccgaatgtacctagttgatcgagctacgctaccgagcc

SEQ ID NO: 373945 - DNA, 446 bp, Homo Sapiens
tctcgatcagacatgtatgcaccaacagtacacaagcctgtaactgtgctttaaatatttcaatttgtgggaaagctctttcaatggagctgctatttttattgggtaagtttgtattctgtagcagcatggaataaaattgaaatttcgagaaacactgaaaaagaaaagagactacataaagtgtttttgtcttattaaaaaagaattgagactttgtcccatttaacaggatttgctctaagcttttaagacaccttagctcccagagggcattttgccatttaaaaaattatagtattatagactacagtcaatgggggttattaatttaaaccttattaacctcaaaagtgctactttcaacaagattaagtaagactattagagatattagcaaaacagcactgagaaacagggctaggttgatcgagctacggtgcgga

SEQ ID NO: 373946 - DNA, 501 bp, Homo Sapiens
gcaatttactgcggcgacggcgagctgctgcaccatattcctgaacaactgagcaaacgagagaggtacaccgacaaatggcagcgacgcacacactccctctggcgtcaccgggcatggcgcgcatctgcctttacggggatttacaacgatttggtcgccgcatcgaccttcgtgtgaaaacgggggctgaagccatccgggcactggccacacagctcccggcgtttcgtcagaaactgagcgacggctggtatcaggtacggattgccgggcgggacgtcagcacgtccgggttaacggcgcagttacatgagactctgcctgatggcgctgtaattcatattgttcccagagtcgccggggccaagtcaggtggcgtattccagattgtcctgggggctgccgccattgccggatcattctttaccgccggagccacccttgcagcatggggggcagccattgggttgatcgataacggtagcgagctcgattgta

SEQ ID NO: 373947 - DNA, 487 bp, Homo Sapiens
  misc_feature (58)..(92): n is a, c, g, or t
agaaagttagttctttgagaagataaacaaaatcaacaaaacgttagtgaaactcagnnnnnnnnnnnnnnnnnnnnnnnnnnnnnnnnnnntcataaacggaagaggatatgtcacaatggacaccatagaaatataaaggatcattagagagtactatgaacaacaatatgccaataaatttgaaaatttaaaggaaatgaataaattcctggacacatacaacctataaagattgaacccagaaggaaaagaaaacacaaatagaccaattacaagtcatgagagagaatcagtagtaaaaggtctttcaacaacaaaaaaatccaaaaccagacggctttactgctgaattctaccaaacctttaaagaagaattaataccaattctttccaaactatcccagaaaataaaagaggagggaattcttcctaattcattctacaaggccagcagaagcctgataccaaaactagttgatcgagc

SEQ ID NO: 373948 - DNA, 305 bp, Homo Sapiens
tcatattaaagacaggcaaattaaaatacattgagataccatttctcacccatcagactgacaaatacccaataatctgacattatacctttttaatcaaggctacagggaaactattacattgttggtgaggtcataaaatggcacaacccctatacggagagtaatttcaaatatacagcaatacctacaaagctacatatacatttaccttttgccctagcaactccaagtacagaaatctatctcaaagatacactatcaaaatacgtaagcacaagctattgttgatcgagctacggtcc

SEQ ID NO: 373949 - DNA, 363 bp, Homo Sapiens
tcatatgaatattatctacagtgctctaactgttctaaatctagatcgtgatcgtgtggattacccctgtcgacatttccaaaacttgctgaattatacaactaaaatgcatgtattgtaggtaaaatatacttcagcaaagtaaaagaatcagaaagttctaattagaaaatcaaatatattgcatattgttaaaacattttggtactgatcaacttcctgctttaaaaatatgtataagctaggacctgtggcacatgcctatactgagacgggagggtcacttgactccaggagttcaaggctatgatcatgccacagcactctagtctgggtgacatatagaatctcctctcaaaaaaa

SEQ ID NO: 373950 - DNA, 560 bp, Homo Sapiens
gtccagcggccgcgctacgcttttaagcgcgttgtaaaacctcaacagggtattttgtgcttcgtgatcagcggcaattaccatgtccgggtaaacgcagcagtgactctagggtgagtcagcgggccgctcagaattgggtacacatgagtttctttcgcgcctgcggcactgttcctccagcggtagggctgacgaatgatgaaatgtttgccatataggatttcaatatcggcctgttccagaacctgaagggcttccctcgcatcggccacccaggttttcgggcccaccccggcagggtcaccgcgaacgccgagaagcagaagagccagcggcgaggtgtctccacgggagtcataagcctgaaaggcattttcggtgtgcaggtccaactccaggtccgaaccgttgccggtatactcgcctacggcctccgagatgcggtaccaagtcattgaccagttttggcccctcatgcttgatggagtacggctccgctatcaaactgcccaaggcaaccagcacattttcagaaagataaccacttttgaagttca

SEQ ID NO: 373951 - DNA, 466 bp, Homo Sapiens
gaggatccccagtagtcgatcaaacctggcatgaccgtgctctgcttggcgtaatcagcaggtctgcgtgtgaaaaatccacatctgctgcctgacccacgtaggttatcattccatcaacactgacgagggtatctgctgtaatgagtggagacgcgagatcacccgtgaggaaagtgcctatattatgaataattgatgtatatggcttatggttcgacatttaatttatctctttatatcatcgagtaacgggttcgaatatccgcgcgccacacttgttgaatgaacggaagttccacaagttgttcgtgatgaacaaacgctggatccaacgatacgcatgcccctctggatcgaaactgggggtgaacttgtcacgcgaatggagcatgaaacgattgttgatgtacaccaacttgccaggttgaatgtccagcggccgcgctacgcttttaagcgcgtt

SEQ ID NO: 373952 - DNA, 805 bp, Homo Sapiens
tccccgtaatcgatcaaacaggtggtcagagaaggtttaagggggcagtgagaaaagacttgaaggaggtaagggagtcagtcagccatgaaatctggggaagagtattccagaataaggaggacaaaggtcctagaatagcaatgaggacagggaagctggagggaagccaacaaaggggttagctgtaggtgtcaagggacatgcgtggaaacaaggggtacagattatgtagggtttatgcgacactataaggaatctgatttttactttgaatgaaacaaggatccacacagagggttggggagactgtcatgctcagttttaccaaaataactgtggctgttgtattgaggacaggccttagcgaggacaagggtgaaagcagggataactgttaggaggctacaaaagaaaccatggaaagaaatatacacttcctacaaacttggatcataatggtgcagggatttactttaaggcaaaaataaataaaaacaaatttgtcagatgttaataggaaataactgtaactggctcttgtcattatatgtacattgtacatataaagcagcaaacaatgacatcttttaactactcacctcaagagaacatgttcctttacaatcagctattcactgttaattacatataatttgttgaaaaagttacttttatcaactgagaatactataaatctgctgtgtgaggtagctaacgcctgtaatcccagtcacagcaaggccgaggaagaaggatcaccgctagccagcagtatgaggctacgaagtgagagttcaataat

SEQ ID NO: 373953 - DNA, 479 bp, Homo Sapiens
ctaccgtaatcgatcaacggatgctcacgtcgccgccgagcgccgggacgccgtggagaggagcatgactcaccgtatgtatggcgagcaccgcgttgagtctacttacacgtctgcttcaatcccaggcaggtatcggttcagaaacgaattcttgcccggccgctggcgcttgatggaaaactaccgtacgccagtagaggggcccaatgctaccgacgttacctggcatcagtatgaaatgatttcacaggcataacaatttttacggtgttttaccgcaagccattgtgcgctggaacgttcaaaacaatgaggctctgcttgctacgcagcagcaggaaggcatgctggagcggtttttggccagtgagggcaatggccgttcaactcagagaatcatgactgctttcggactgcgtgctaacgggtatcacgcgacaggaagtttacgattatcaactgggggcggacgttga

SEQ ID NO: 373954 - DNA, 127 bp, Homo Sapiens
tcgagctcggtaccgtagctcgatgaacctggtctccagcagaaccaaatgtcagtcacatataccacatttaaaattgcttagaatagataggctgggcatgtggtttatgcctattattccagtg

SEQ ID NO: 373955 - DNA, 535 bp, Homo Sapiens
  misc_feature (392)..(409): n is a, c, g, or t
ccgattagagctgagggagtctgacttcacatctgatgctccttcacagtcaggagaagtaatatgagtgaggacttggcaggctactagtaatctgcttttgttcttaccacttgacagctctggtttcatctggattatgggctttaggaatgttaccccacctgtcataatttatacctcattttgattcatgactctgggttagcattccagagtagagtaaacataaatgcagaaagtggagatagcatgcatatggcctgttttcaagttatacaactacagcaggggtatccaatcttgtggtttccctgggccacattagaagaagaatagtctggggccacacgtaaaatacacttaacactagagatagctgatgagctatnnnnnnnnnnnnnnnnnnttgcaaaacaatctcacagtgttttaagaaagtttacaaattcgcattgggccccattcaaagccgtcctgggctgcatgcagctcatgggccacgggtttgatcgagctaacggtgcgagctcga

SEQ ID NO: 373956 - DNA, 146 bp, Homo Sapiens
gaggaggatcacctgaagccaggagtttgaggctgccaagtgagcaatccagtctaacctggatgacagagggagattctcaactcaaataaatgaataaataacctggattgctgtttctcaggttgatcgagctacggtaccgg

SEQ ID NO: 373957 - DNA, 381 bp, Homo Sapiens
caggtcatcagtagacaatcagaatcaagactggcagcttcttaatggtggaattcatggtttggcttaacttcttactaagaaataaagcagaactatctgacagaacaagggtcctgagatttcctcccagtttctgcaagtgtggaaagtaagaatacccgggaggaagcccaactttatagaagtgggctgccattcaacttctaaagaatatactttaatacttaaatatactttaagcatatttcacagagtgaggcagacctgcagtttatttatttagcaaatattagttaacaaagtggtcccactttttaaaattcaaatactggcctccgagagactgatccctaattcagttggtcacccacagacctg

SEQ ID NO: 373958 - DNA, 150 bp, Homo Sapiens
ctgtagcctgttaatatggttcaattcttcaaatattgagctgattaattttcaaatattgagctctcccttgcatctctggaataagtaccacttggtcgtggtatatatttctttacatattgctgaattctgttgatcgagctacgg

SEQ ID NO: 373959 - DNA, 561 bp, Homo Sapiens
gtcggtacctagctcgatcaacagcctcagccccactgccacggaccagccacgtccacagcaaaaggaatcgtgtccgacactaagaaactgtgaccacccagtaccaaagatgcctttatatagaaacggactgtggcttgcattctttccctccaccagctcctgaaatgaaagggttccgtcacacaatgaaataagtaacagcagggagagagagagaggggaggtaaattgtttggaaagtagaagacagggtggaaaagatgaaattcaagacagatgtgtgagacccgcaaacatatgtctttgaatttatgcatccaagtgattgatgtagaataagaaaaaacagctacaagcccaataaagaaataaatataggagtaaatacagaacaaagtatcacgttccccacttcttccagaccaacatcaattctcgtctctctttctgctacataaagttgttacaaaccggggcgagtgaaggatcgaagatgaaacactacgaattaagcagaggttctctgtgtcctgacaccctcaggtatgatcgagg

SEQ ID NO: 373960 - DNA, 489 bp, Homo Sapiens
aggccgaatccgcctacatctaagaagaagcaaaacataaatattatttgtagtaactaaggaacgtttaaaatgaaaattatagtatgtagctaaactacaaaaagcataaataaatataacagacagtatagttagtctttcttactctaaacacgttttgtcaaatgtaacacattgttgaatatcatggtgagtacacttcttgataaactgatgctattgtcccaaacagcaacttctccaaaatgataaagcaccacctaaatttcattaaaagaactgatattcatggtttagaaagttcccaatgatgagattttataatgtaataaaaatgtaaacttctgaatgaaaaccatttacatttgttaaggcacatctggatacctccagacattaatatttatagctatattattattcatttcaataataagggatttctacaaacacattctgtacctgaacacaatctgctgggtgtgt

SEQ ID NO: 373961 - DNA, 373 bp, Homo Sapiens
ctctattgcatagtgagagtaaaggtcacaaaagtcccatcactgtacacggaaaaggtccccccaactagtaagatgccaaatagggtagtgactccccagcctaagtgacaacaaaggtctaaagatttacaagtaacttttcctattaaaacatgacatttatgcgaccagcacattactgagattaaatccatctaatttaaattgccacagaggtcatttaaagcaatcacaatcatctgtgaaaatattcaagaagagttcttccttttctccaagaaaaggctaaaacattagtcatctctactttccaagctactggaaacagaatatcatacattaaaaaatacaaaggaaaactccctccaat

SEQ ID NO: 373962 - DNA, 406 bp, Homo Sapiens
agggccgaaatccggtaaaggctgggggtcatgtttgcctcacgaggggtggtacaaggcggagggacgtactgtatgccctattcctcaccatcttcactctcccactgagtatcacctcacaatacaggtgcccttcgcactgtgcttagccagtgagggactaaagactcccccacagagtataaattgccatgtctatttcagagtgacagctattaatattattattgttatgactctgaaagcccactcatctttgagtctctggcaagaggtgaaagacaggtgttgggaggtggctcctggagcgtctgtagacagcatttgcctaaataatggaatccacgtgtaataatcatgcttgagataaagagcttccccatccctcatgtccacttgcttt

SEQ ID NO: 373963 - DNA, 520 bp, Homo Sapiens
tagcgttaacaaattacttgaggatgtaacccagcatcgtgttgggtcgacgcgacaatcagaaatccaaggatactcaacgcgaacaagcccatatagggcttaacgtaactgagcaggcggaagtatattttcaagctcgaagggcttgcgctcggactggagtcggtcatatcacgcggcgttttgaaaaaggaggctgactttagcacagcttctctgttgtacttgcacccggcgtaagccgcggcccggttggatcctaccggcgacattacttagccactagcttaagatggtcggctttctatttctggaatggctttactgtatgcactccaagcgccttacctatggctcaaatcgcgttttcgacttcctggtcctatggattttgcctgttggcttgctgctgctcctgagtgcactgttctttgtcggcaatcgcaatgtactgcaccgcattgtctacatcctgttcagcgtaccgaccttgtttctgttgtgcatgcggattcgg

SEQ ID NO: 373964 - DNA, 571 bp, Homo Sapiens
tgggactgacgctcatggacaggttcccatggataaatttgtcgaaggcaccaggtccaatgcagtggtcaagtcggacgcgccaacaactcaatgtttcgtgggaaccatgcctgtggtttgcccgcgatcccattttgtgtaaggcagataatcgaagggtgctaaggcctcacactgagcgccatgccaagacttttgagtcaaggctggtgagcatcgaagcacaagttatggtgatcgcgcttatcgggtccgcccgggaagctttggcggaatcaccaacggcgccatcccaaagaacacgctccagattggccactcctgtgcccgcggacgggaacacagaaaagcgctaaccagcctgggtctgactcagcacggcgccggctggccatttgctgtacctgatttttttatcaaattcctgacagagcccggcgatttggtcgctgatattttttcaggccgggccatgaccggtcgagcagctgaagagaatcaacgtcgctggatctgcgtcgagagtgcattgcagtacgtgcgtggagccgccgagctcttccgttca

SEQ ID NO: 373965 - DNA, 363 bp, Homo Sapiens
aggccgaatccgcgaagcccgatcatagatggtagagatcaaaagattcaaatgttttatatctgaggcagttttgttgtatcacagttataaccactcccacctatgtggcaatgatcctgtctctatttttatgtaatctattcaaaacagttaaaattggtttttgaatagaaatgcaaagttccatttaaacaaataatctaaagatagaatgtttgtttcatatgccagaagtttatgtattgaacataaactataacttgaggaaccaggaaacgtatgcatgtgaatcatggctatcatctttgtaatctgtctgtccaggccattgccacatttattactttggtttttggtatg

SEQ ID NO: 373966 - DNA, 871 bp, Homo Sapiens
attgagatgctagatggccacctctacctcctcctggacatggggtcaggtactataaaaataaaagccctgttgaagaaagtgaatgatggagaatggtatcatgtggacttccagagagacggacggtcaggtaccatttctgtcaacacgttgcgtactccctacactgctcctggtgagagtgagattctggacctggatgatgagttgtacctgggggggctgccagaaaataaagctggccttgtcttccccaccgaggtgtggactgctctgctcaactatggctacgtgggctgcatcagggatttgttcatcgatggccaaagcaaagatatccggcaaatggctgaagttcaaagtactgctggagtgaagccttcctgctcaaaggaaacagcaaaaccgtgccttagcaacccttgcaaaaacaatggcatgtgcagggatgggtggaacagatatgtctgtgattgttccggaacaggctatcttggcaggtcctgtgagagagaggcaacggttttgagctatgatgggagcatgtttatgaaaattcagctccccgtagtcatgcatacggaggctgaggatgtttccttacggttccgatcccagcgtgcatatggcattctgatggcaaccacttctagagactctgctgacaccctccgcctggagctagacgcaggacgtgtgaaactgacggtcaatctagattgtatcaggattaactgtaattccagcaaaggtcccgagactctttttgctggctataacctcaatgataacgagtggcacacagtgcgtgtattcggcgtggaacagagtttaaagtaacagcggattgccatcgggaccgagctga

SEQ ID NO: 373967 - DNA, 633 bp, Homo Sapiens
cacttggagaccttcctgtttctggggatttactcaacacatgctgctcattttcacaatggagcagggcctaccctgttaaatgccaggaaatataagaatccctcagactcatgaaatgagagtaaaatctgaaaatttcctcccctaggtcacctcgtccaacgtcaataaatcccttatgctgtttgcttacccccatcgaatagtaggcactttcatttacagtgatattctgagtgactccccactcggttctgatgatgggactaggaggaatatggggtcctgcccttggaaggagcatagcttggtttgaatacacactgatgccatgtgacagccatggatgtagggaggactctgctccttgcctctttccccgccatctcccccagcaacttgttacagccgcatctcacaattacaatgcaggacagtatctacagcacaatgagtctatgtacacatggaccattcccttggcatgctttagagagagacacacacacgctcacacacatgtacacccacgtgagagcgaaagacttgagcacacacgcacagtggagaaaatgaaaatggcacttcctagcatttgcggcatgactagtgctctggggagggggtgga

SEQ ID NO: 373968 - DNA, 1444 bp, Homo Sapiens
gttctgaggtgagccataacagctgcactaaattcataaaacatgtgcaactctgggtaaaatattttccttctaaaagcacaaccactttacaagattaaaagtctagtaacatttctaaatattattcatatcatacaagtagtggttgttaatttaaaacttcattagtaaaattacagtacaagcatgattaacctccagaattgcaaatcccagactccagtggaaagctacattacatcttcagtagtacattatcttccaccatcactcccacaccagaggagatgggggcatctcagatggctgagcaacagtggaactaataaagctcttaaaagcagcagactgagggttgatgcagagaggcactctgtttcctttctgcctgttccaaaatgaactgatgaataatttctttaaactgtcggacagaactgaggttcttctcgaaagtgtcatcaaatttgggattggtgacaggctcaaagtcactggtataaactcttccagtggaggtggaaaagcaacatttacacatacatgtgtgatatcgtagtcgcccttcatctaggtaggggtgggctaaggcatccttagcggatattcttttggataggatcaaagaccaacatcctgcaaaggagatgaacagcttcatgtgtagcctggctagacagggtatagagtacaggaagagatggctgtttatgaggacccctgagtatatgtgccttagcgccttcacaagctgtcctcattgcttccagtgatggtgtgcccaacagatccgtgatcaaatccaactgctgaatgggactctgtgcctgaaacaatattcttcgtcctagtagttctgcaaagatacatcccacagaccagatgtcaatagcattgctgtaatgacggctgcccatcaggatttctggagcccgataatactgagtaacaacttcctgagtcatatgacgggattcatctaattcttccactctggccaatccaaaatcacaaatctttagaacacagttgctgttcacaaggagattccctggcttaatgtctcgatgtaaaatgccagctgaatggagatatttccaaacctcgcaaaatctgataaagaaaaactttgacatgatctgagctgagtggttgaggagagacgataattttatgtaggtcactctgcatcaattctgtgacaacatatatttcttcaaaatagtcaatgtgtggaggttagagtatgtcaagggcagagagtacattatcatgcttaaaaaaacacaacatcttcaattcccggaagacccttttgcaagagaccagattctggaagacgttgggcatctttttgagcgctactctctttccatctcttggatctgttactgaccagacaacaccaaaggctccatatccaatagctcgtgccaagccc

SEQ ID NO: 373969 - DNA, 340 bp, Homo Sapiens
tgcccgggttcgggattgtggcaccgaggtactaccagaactatcgtttgaggtactaccagaactgtctgagacctgttctttttgctcctagaatgcattgtccatctttcctggtgtcacagatagcctgaagtctggcttggccccctggagcctggtattctctcttccaggcctcttgctatggatttactttatccctctggcaaagtcgtcaatcggtatcttaagttacctttcccgtactactttagagcaccacagaagttccctaaggtacatttccttaaatgtacctttcttccatggcacatgagacatacgggagatgctagag

SEQ ID NO: 373970 - DNA, 535 bp, Homo Sapiens
  misc_feature (286)..(286): n is a, c, g, or t
ccatggcactgggtactgggtcgggggtgctgttgagaacttccatggtagtgctagcaatcttcctacatcacccttctagcctcctggctggagcagggtggtagcattccaggggtgcctgggtgccaggggaggagaatgtgaggtagattggtggatgcacaggaggaaggtgggaatagtggtatcaactctcctggaggcttgcttctgaaaaggacggctggagagtgggagagatagttgtgggattgaccaatcaggagtcatgttagaattgtantttgataaacgaatagtactttcacatatctaatatttaccatagctccaaggtagatatttttcctcattatatagttgagaatacagattcagagaagtgacttacctaaagtcatactgccctaagagaactttaaacctaggtcttagagatgactctgctatgaaactttgtatgtggcactcaactttatgtgttcatttcccccaagtggcaaattaagacaataatccgctggccggtggg

SEQ ID NO: 373971 - DNA, 690 bp, Homo Sapiens
  misc_feature (95)..(95): n is a, c, g, or t
agcatgagacaccgcacctgactgtcccagtgtcttttctttaagcactaatcctattctaggccttgctgggatggacgtgtgaggatgaaccngagagatgtgtctgtgagagggtaccaagattggtgggcttgaactaggggccccatggtttttttcgctcagtcagttgaatcatgaacgtaagtaaagtgccttcgcaatgcagaagagggagtcatttctcccaacatgtatcctgaagagccctttgaggaggtggcatttgagctaatttttggaaacttcagtaggattttaaaaagttacccctcaacttgttttcgaaataaacagaaaagtgacaacagtataatagataacctttgcctagatttgccaattaacatttagtcatgttaactcttatccctataaactgcgtatctacatgtagacatgtatctatattacacccatatatctgtctaatctatacatctgtagttatacacatttcttttttcatgggaccacgtgaaagtaagctgtagacaccgtggcccttcccatcccagattctttaacatgaattatcttttaagataagaatgtttttctgcacaatcctgataccattatcaaacctaagaaaaataacagtaatccagtgataattgtgatattaaaattttcctattaattcct

SEQ ID NO: 373972 - DNA, 290 bp, Homo Sapiens
gcctgatcttccgtcccttgattgttgaagtactcaagtacttttccactttggcctttctttgaaacaaactcatcagatattcctagtgcttttagggtattagaataatgcttttctgctgccattcttgcatttttctgagcaactctttcaaatagcagtggcctcttttttaatttttcttctctttcttctagttctcgttggtattctctcatcctttccttttcgctctttcttacggctcgttctcgtcctctggaagataccgtgggcacggaagatca

SEQ ID NO: 373973 - DNA, 327 bp, Homo Sapiens
tgatcttccgtgcccctggcaaccattatctcatctcaggacagggcagaagggggatgaatgcactctgggaagcctcttggagccagccttgctgtgtgcctaactaggtccttaatatatactacgtatttctgaagacaaacaagttatcagcatatcatcatcaaactgcgatggtctctccatgaaaactcaaagcaagaatactgatgtgaataaaaactctgtgaaggcatatgctgcctggtttattttccacaggagaagcctcacatgtagggtccttgaagcctgtgttcaaattaattgtgggacggaagatca

SEQ ID NO: 373974 - DNA, 314 bp, Homo Sapiens
tgatcttccgtgcccaggccccgtcggcgtggcaagaggatctcaaactcagtgtccagatccaagtcagtgctgcagtagtctttgggtaggttgatctcacctttaaacgacagggttatgcttaagcagagaggagttccaactcctcacagaatctaggcgtggggaggagggatgcagaagccatcagctccacacacagccgggagccgggtctcggttctgccccatctcatctgctgatagagtttcaaatgctttcagctcccttttgatgccatatgtagggacggaagatcaggggattctca

SEQ ID NO: 373975 - DNA, 385 bp, Homo Sapiens
gtccaaaaagagagcacagagtgaaagagaataaaataatcaaaaaactttatccaaaatttactaaaatgcaagatttgaatttccatattcagtggacccagtgggtgcccagcgcaatgaacaacaacaacaacaaactcatcaaagcatattggaaatgttagaaccccaggaataaaaggactccaaaagttctagagaaagaaaaatagttcacaaaccaagggtcagaaatctgaacagcaattggacctctcagtgtcaacactggaagctagaaactgaaaagcaagacagcaacatcttccaattctgagagaaaacaatgtctaatctagaaatccttacctggccaaaaaaacaatgaagggacggaagatca

SEQ ID NO: 373976 - DNA, 419 bp, Homo Sapiens
tcttccgtgccctaaaggaaagccagcaaaccagctgcttgctctcaggactttttgcaattgttttgttggccaggcaggacaaaaactcatgatgtcccagagggaatcactgatgtcccatgcaatagaactgaaatcagggagcaataagaacattcacattgctctggctacattggccctgaactattctgtttgttttcataaagaccataacattgaagggaaagcccaatgtttgtcactaattagcacaatcttggaagtagtacaagacctagaagccacttttagacttcttgtggctcttggaacacttatcagtgatgattcaaatgctgtacaattagccaagtctttagtttgtggattctcaaataaaaaaagtattcctcagtatcaaaaccagctacgta

SEQ ID NO: 373977 - DNA, 142 bp, Homo Sapiens
tgatcttccgtgccctgctacaggcaaagggtacacgaggtatctggaaatggctatgacatcagcatatgatgggcgtggcttttctgtcctagaagtaattgtgccaatgccctttgtatggcactaaggaggggccacg

SEQ ID NO: 373978 - DNA, 384 bp, Homo Sapiens
catcagtcaataaaataagaaaaaaactcttttctttaaagtggggctgttttctgaaattcaggtgggcaggatttgggaatgacaagcactgctgatgggggctgatgccctcaagggagttttctgcctccagattttccagtctcccttctgcggcctgtgcacacgtgctctgtggggaccagacgcctttgttgttggcctcatcaccccctggtttgggagagcacggagggtgaccccctgcccctccctgtgctgtggctgcaactgccaagcctctttctggtgagctgtcatcctttgaatcataaaactgaatatttggcctgttggatggataatttctaaaatacatgggacggaagatcaggggatcct

SEQ ID NO: 373979 - DNA, 383 bp, Homo Sapiens
gagaggatcccctcatcttccgtgcccctaaaatgacattctcttatgaaagaagacagagagggaaggaaatcagtctatcacaaaaatccatctttattgctacctcttaaataattttcaaatctattcatatttctgtatttccatttatatcatgttttaacagacaaggaataagaaatcagttaattgaattgatcagggagggtctcagggaggagatgagacttgaaaatgggttttgaggtttacctattgcttggagaacagaggaaggtaagaattccaaccaaaagggaagaaaggataaaagctccaacatggacgccatcacgggtacatacatatgagtgtgattatggttatgggcacgaagatca

SEQ ID NO: 373980 - DNA, 626 bp, Homo Sapiens
agagaaagacgaatagagttaggaaaaggaagacaagcaggtgggcaggaaggacatgcaccgagtaccaggcaggtgccctactttcacgtccagccctggcctggggtcgggagaggtgggcgctagaagatgcagcccaggatgtggcaatcaatgacactattggggtttcccaggatggattggtcagggggagaaaggaaaaggcaaaacactccaggacctctcccggatctgtctcctcctctagccagcagtatggacagctggacccctgaacttcctctcctcttacctgggcagagtgttgtctctccccaaatttataaaaactaaaatgcattccattcctctgaaagccaaacaaattcataattgagtgatattaaatagagaggttttcggaagcagatctgtgaatatgaaatacatgtgcatatttcattccccaggcagacattttttagaaatcaatacatgccccaatattggaaagacttgttcttccacggtgactacagtacatgctgaagcgtgccgtttcagccctcatttaattcaatttgtaagtagcgcagcagcctctgtgggggaggataggctgaaaaaaggtggcatcgata

SEQ ID NO: 373981 - DNA, 344 bp, Homo Sapiens
cccccgagtagccgggaccacagacactcaccagctgcttaacctgtgaacattttgtcttaaatggtaaaagggactttgaaggcaggatttaattaaggatcttgccaatgggaagatgatactgaattatcccagtagacccaatgtaatccttacaagtgagaggcagtagaattagagagatgtagggatggaaacagaggttagagaggagagaagatgctctgctgctggctttgaagatggtgaaaagagccacgaatcaagcactgcaagcagcatctagaagctggaaaaagcaaggaaacattcttccctggagcccacggggcacggaagat

SEQ ID NO: 373982 - DNA, 386 bp, Homo Sapiens
taggatcccctgatcttccgtgccccaaggaataacatgaactagcttatgtttcatgatcatcttccaagtgctgtggcaactgatttggccacttcttgttggcagttcttggcaccagtacaattctaggttctgaacttgcaccatactcttatcgtcatccaaattgcagtgttttggttcagttggaaaatcaaggttacagtttgcgttcacagaatgaaatttcccagcagtgttctgtgattgtcagagtgatgtaatttgatatattaaaaatcaacaattttttcctcagctttgttttttagactgaaaatgatttggagtcctggtgaacctttatattttgacactacaggagccagccacaaggccaaatg

SEQ ID NO: 373983 - DNA, 480 bp, Homo Sapiens
tgatcttccgtgcccaacgagaagatcgcgatatggctcaaggactgccgtacacctttgggagcctcactggatgaacaaagcagtagtacactcaagggtgtgcttgtgagaaatggaggaagttttgaagatgatttgtcattgggagctgaagccaaccacctccatgaaagtgatgctcaaattgaaaactgcaataatatcttggccaaagagagaagattacagtttcatcagaaagggagaagtatgaattccactggatctgggaaaagtagtgggacagtttcaagtgtttcagaattgttggaactttatgaggaagatcctgaagaaattctttataatcttggatttggacgtgatgaaccagatattgcttctaaaattccttccagattttttaattcatcatcctttgccaaagggatagatattaaagtatttttgagtgctcagatgcaacggatggaagta

SEQ ID NO: 373984 - DNA, 458 bp, Homo Sapiens
  misc_feature (155)..(155): n is a, c, g, or t
  misc_feature (375)..(375): n is a, c, g, or t
  misc_feature (388)..(388): n is a, c, g, or t
  misc_feature (409)..(409): n is a, c, g, or t
  misc_feature (415)..(415): n is a, c, g, or t
  misc_feature (430)..(430): n is a, c, g, or t
  misc_feature (436)..(436): n is a, c, g, or t
taccttcccctcccctaaaacaatctccagaactttttggactataaatttcttggtttgacttctggagaactgttcagaatattactttgcatttcaaattacaaacttaccttggtgtatctttttcttacaagctgcctaaatgaatattntcgtatatattggtagttttattactatagtaaatcaaggaaatgcagtaaacttaaaatgtctttaagaaagccctgaaatcttcatgggtgaaattagaaattatcaactagataatagtatagataaatgaatttgtagctaattcttgctagttgttgcatccagagagctttgaataacatcattaatctactctttagccttgcatggtatgcnatgaggctcctgntctgttcaagtattctaatcnatggcnttgaaaagtttatcnaatttncatacagatcacaagcctccgg

SEQ ID NO: 373985 - DNA, 516 bp, Homo Sapiens
ggactagacatggtaatggtgcctccctctggtggatcagacaatttagagaggactttgtgcctttaatgcacatgtaggataaagcgtccgacacccatgcctatagccacgtgttgcacaagcgtaggggcgcacacacacgattccctctccaccttccgcacaaaaacagtatgtaatttaatcagcaaatgccccatttccatctctaccggaaagctttcagacgcattcccagatcagacagaggactagggttaaggctgggaatgaaacaccagctagtatcccagtgagctctcccaaacacacatacacagcaagtcagactaaacaacgtccaactgaagactcacctcaaatacttagacctaagattcacgtccaggctctttcagatacaccaggtaagtaagcacttggcattcctatctcagccattcacttcacagaatcttttgggtgcctactgtgtgcccaatactgtgcttagtggtacttgccctcagcagg

SEQ ID NO: 373986 - DNA, 476 bp, Homo Sapiens
aagtaacatctgatgctgtagaagcttagtatcaaatattaattggactgaaatagttcagaatattgtcgcaaaatgatttcctcccactcagttttgacttttgcagagcttctacttaccatttgtagtaacctgaatgacgataaaatggtgaaaaaaagatttgaaatggtgaaaccgccttgttccagatttcattcaggtgactaaaatgcaaaaccaagtacaatagacaaataatagcagcactagaaaacaagaaatactaccgtcgatagagcagcaatttctaggtatttttggaagacaggagggacatagggattgacaggtgtttgttggtgtcagtgtgagcaaaccacgtaagctgatgcgaagcagaaatggagaggtctcaccaattctgagtagtgagggctagtaacaaagattaaccctaaggtgggtggacatgggtgtgtggtggctggttc

SEQ ID NO: 373987 - DNA, 652 bp, Homo Sapiens
gaaacactcactgaggtcaggagttacagactggcctcacgtgattgttagcctcccgaagttctgggattacagccgtgagccactgcgcccagcctcttggaccattataatcaatatgtatttctttaacatgtatggggaacaactttccccttgtgagtaataaaatcgttacttataatacctactatggaagagttacagtctaatcaggcaagctgtggctagaaaccagaatgatgatttctagcttgtataatacaggaatagtagagaaggggaacaagggattgtgtgctgcagttgtcggggaaaacttgaatagtaggtgagacattaattgggggataagatttggatgttgggagagtgaggttctttggatatgttaccaaaagcacagatatgggattaaatatatgagatgtaagaatggaaagtctgggttagaaaaaatggagctgtattctgcaaaaggctttattagacttagattctaaacgctgtgttctttatttagccctttcctacatcaggcacattaacaccctcacccgtctggattccggttttgtttttttgttatttaatcttggaagtgaggcgaagaaaagaaattaaacatttaattgaattcatattatatgcc

SEQ ID NO: 373988 - DNA, 396 bp, Homo Sapiens
  misc_feature (150)..(150): n is a, c, g, or t
  misc_feature (158)..(158): n is a, c, g, or t
  misc_feature (357)..(357): n is a, c, g, or t
tgcaaagccagacctagacctgccgtagctgttgtcccatgcctaattctagttacaggaagccatccctgtaccctgggtccattcacaggaatgggttccagaggaggctgatagaagggtttgaaatgactggctagatccctaccntgctgcanagacacagtggtagctggagagcaggcagagatggtagaattgcaggtttgaccacctgtcgtgaccccagatatacatctccttcctgggaagaacgtgagttggaaaaagtgctgagccagtccctggaaaaactctgggtctctggcctggattctgtcccttagccaagctcttaacaaaatcccttaacctcantggtctcctcttccttcacaataggagttagtaattcct

SEQ ID NO: 373989 - DNA, 474 bp, Homo Sapiens
  misc_feature (319)..(328): n is a, c, g, or t
tgcatacgaatagttgataagaacataaaaaagaaggcgacaaccggggctgccgccagcaacacttatggaagaactgggggacaggtggagggcaattatggggaggcgatacaattatgagctagagtacacagtgtgaggcgtctaagagcccaaaagtacgggatagaaaaaggtataagacaatcagcgcgggaacaaatggccgaaaacgcatgagccatacaggaaagagcgcgatatagcggaataagaacaggaaaattagtaataaacgaggggcgggggaggcatgcgaacaaggtattggcgaacnnnnnnnnnntataacgggcggcgaagaagcaacaggtaggaaacccccaataccctgtgcgtgataggttaccagaacaggcctgcgcctatttgaaccggaccagcggttcgtaccccgattatagcgcatcgttactgcctgactggctaacc

SEQ ID NO: 373990 - DNA, 293 bp, Homo Sapiens
caccacacccacccccacgcgaggtaaaccccgggtacgtgatgaccacttttgatgaaggtacaggttagccagtcaggcagtaacgatgcgctataatcggggtacgaaccgcaggtccagcaccaagtggtttttagctaaccccacgctggcgtaccgccacgtctggttcgcgctgaaatttatataactaatataagcagataattagccaaaccgttagacgtgcgtcgcactgtctaccacttgcgggtcacaaatcgtacgagcgtgtaatgccatcgcattgt

SEQ ID NO: 373991 - DNA, 248 bp, Homo Sapiens
ccgttgcatccaatagtgagatggtgcatgaaaccttgtatatccaaatattttggtgtgaaaaaagggataaagagactttgcctacacggaaaattgggataaagtgaatactaatataaaaggaagaggaaaagagatgagctgctgtgggtgggcgtgcctattaatgctgctaatgtgcggccccgattatagcgcatcgttactgcctgactggctaacctgtaccttcatcaaaagtggtc

SEQ ID NO: 373992 - DNA, 149 bp, Homo Sapiens
cgtagccgttaacatcatacaacgcttaagaccgcctgccgtccacatgaacctccgacacattactattgaacgcgagccgacctgggttttgaaaaaggcaagagaaataaacgaaaagacaaggaaagcgccacagccaaaacaag

SEQ ID NO: 373993 - DNA, 460 bp, Homo Sapiens
ccatagtgagaatgtgaaagtttggaaggaaagaaacgggtgatagaaagagagacagtgttgggcgggaagggtttacttgaaaatttaaacactaaggcgggttgcgcttgtacaagcccagtatgtgacatgggcgagaataaggagcctaatgggcaacccacagagagggacacgtgcggtacggccccaagtaaaggcgcgccagaaggggtagtaacgggaaggaatgggcccgataaaaagaaatacagaaagggggaagcgacgcgctggcgaagttgtaatggggggggaggtcaggtatatgcataaggaaaacacgggggtaagtaaactagataacgacgcagcggcgaccgaggcaaaaatacggtaaagatggaaagtgggtaagtgaaaagccgagaatacggcgggaaggtaaagaagttaggaaaatggcatagggcaaaga

SEQ ID NO: 373994 - DNA, 459 bp, Homo Sapiens
ctgcataaaatagttgatgccgggcacctggatgccagcaactagtacgggtgcacctggcggggactagtacagctacacgattgccacgatgccgtgcttgtactacaaggtgaacaggtactaccggcataccggacagccgataccttgaactacacgtgctaatattaacgactatcacggtaccacgtagcgactacaagacgacggataccatttactacttaaacttgaacatataggggaggaaccggggacgaaggaagacaaaaaggagaggaaaggaacaggaaaagactcctacggaataaggaccacctacacaaacgtggtacgaaacacgggaatgaccgggaaacgagcaaccttaactggcgcgcagtgcttggtattgaactgatgtacaggggttattagctacgtccaatagtattaaggaacggggaatatataaaa

SEQ ID NO: 373995 - DNA, 474 bp, Homo Sapiens
  misc_feature (301)..(333): n is a, c, g, or t
ataccaatagttgagtaaaggaacgccggtgtaaatgcaaacacgtggggaagactacacggatgccacaactgggaagacctttgtacttactaaaacacaggcaaaagaaccggtgtgctagtgaatgcattgacctactaaaagcggagtggtgcagcgtaaaggtgaaaccggtgcccggtgcgggttgcgcttgagtgctaggagggtaacggggagaaagtggcaacgactaaagtggggattgatactacgttttactatacagttgaacaatataatacgaccatacaaagtnnnnnnnnnnnnnnnnnnnnnnnnnnnnnnnnnagcgaaacttgaaaggggacactaaaatggcaaacgtaaaaagccgactggaaggaatgtagggagtgcggtaaggtaggccgtgggggaaagggcgatgctgaataaatttaatttgatgtctatggtaaggtgaccagc

SEQ ID NO: 373996 - DNA, 308 bp, Homo Sapiens
accatattgatattggaaactatttgattgctgtggtactggcgtattaggcttacgctacggtgactattagacaatatacagtttattagagaattgctttggaattgttgctgatatgcggcggtgctgggtataagagcatgtgctggagataagtaccttttgctgtggaaaatgggaaccgggtaaattgttgcaaagatagtgatgtgatggggtgacacccggtcaaggggtgtccctggcaaaatggagcacgtggcacagcctaattggcgcgtttgggtgccggatagaatgccgtt

SEQ ID NO: 373997 - DNA, 480 bp, Homo Sapiens
tttgcaacaatagtgataactgtatataattaatttatgcaacgctatgattttaaatgtgttagctaatgatttggactggtaataccatttaattatacacatttcacccgttaaaaatagtactacacgagacattaacagaataagctgaatataagcgggcagattaaagaacttttgttgagggccgtaaaaattgacagtacagatgccagattaattggccaactggctgctcagcggggtataccgcggcaacgctgggccccggtaagcaccggccgcgcacccgctatgcgcggatgtagcctgcctagagctgttgcactagggggaccctgaccccggacaaatttcggggggcattaatacaaaagcgcgactgagtacgggagaaagacgtaggggacgactaaaaatagcggcaactattgaacagcccacccccagcgagccgaagaggggcgggttgcggag

SEQ ID NO: 373998 - DNA, 458 bp, Homo Sapiens
tgaaagtacggtaactgcagtagaagggaatgggggtacggtgagaatgaaaggttgtggcttgcataagcaaaagggatgccgtactttggtggggagaatacatgcatgaatgacgatacggaataccacagacgcgatagaagggccgaccagtgtgaggggggcatgacgcgtgaaatacaaaacaggagggaggcctgcaccttggaagaagtatgaagcagctaaaaaacgcgaggctagaaggcatactttaaataattaataataaggacttcgtgggcgatgaaaaacaattgcccgacagtaataacccgaatattgggagtattgatgcacagattatattttgcgacgacttaaacaataagaacctcctacacaggcgcagattgccccttacgttacataattctttgggcgcgttgaccgcgaaacctttgcataacactaac

SEQ ID NO: 373999 - DNA, 493 bp, Homo Sapiens
  misc_feature (153)..(184): n is a, c, g, or t
ggcggccagtcggtctaccatgttagttgagcgtgatgggaagggaaagatgctgatctttaaatttttgtccttagttagttctgtatttagtgaattaattgcatcctaaaaagtcaaacttgaaaagcacattttaaatggcaaatctannnnnnnnnnnnnnnnnnnnnnnnnnnnnnnnagtaaacagaccatcagaagagaacaatggtacagagcaggggtcagcagatggattttgtaaagcatcaacttgtaaatattttcaagtttattagctgtatggctctggtttctgttccctgttccaaatgttaaagtctactgttgtattctaaaagcagccatggactgaatgtagctgtgttccaataaaacttacacaaaagcaggcagtgggccataatttgcaacacctgattcacagcataattgtgtcacaaactgaaagtgttcctcaattaaagtatggtagaccgactggtccgct

SEQ ID NO: 374000 - DNA, 494 bp, Homo Sapiens
  misc_feature (39)..(39): n is a, c, g, or t
gcggaccagtctggtctaccatcatattaaattcagacnctattaaaatcagtagctattataatatctcaagagcactattttcctcttcatagaacaaaattcggaagaaaaagcttgtaaacctagcagtactgaggtttgataaattgcagtagaaaaagctgggttgggaacatcagaccttatcttaaatttcaaagattaagtgcgcatgcatatggtttgctttgacattcaacaggtgctttgtttgcaaccatcaaaaggagcatttgttcattctcagttacattgttcagatttggatttaataaggcgcactagaaaagtagcacaagggactgaatttctttttgtgtccatcaacttaaaacttgagctttctaatactgttatatctaatctgttagcgtgtttaaaatgagaacaccttatctttaaaaaaatcaatttagttcagcctcttgatatggtagaaccgactgtccgac

SEQ ID NO: 374001 - DNA, 439 bp, Homo Sapiens
ccggaccagtcggttctaccatcaggaaagtggaatcaggaggttgctactgaaacagtggcaagaaaatgctactgtagctgtgatccaggtgatcagggcagccactgctgttaacattgtaactgctggaagtctggaatgtaggatctggccattgctgtgacagcttctccttgatgctcgtgaactggtgactagatgctgttatgatgaatctggtccctgctgcctttgccattgtctctaaaataattggaaaatgattaattatgtttttaatataatttaattgtaattttatgcggctgaattcttaatggtggctgtgtttgacaactgatttgtgaaattcatggaaatttgatagttggacttgcaagagagtacagccaactccattgcatcactgtaaaacctcctagctgacggttctact

SEQ ID NO: 374002 - DNA, 589 bp, Homo Sapiens
gtccagtcggtctacatgcaatgtaaaaattttttcctttaagttactaaccaagaagctaggtagataagagatgaccaaacaaaaataatgataagaaggacagctattatatgataaactttagacttgaaaattaggtaataaagttaatttcttcagaatatcctaaaatgtaagtttgtaaattgataaagttcagaaaaacttatccatcttctactcatcaagatagcaaagtaagtttttcacaaaattaagactgagagttacgttattttttttgaagtggtaatcttgctctcatctaatttttaaatacagaaataaaaagatccctttgaattaatttcaagtagttttaatacctctcttaaagtaaccccttcagttctgtcacatttatatacacccaactttgaagcctattaagaatatctttgacatgtgagtaccctaacagtggctctggtttcttaagcacaaagggaaaatggcagggtttaatttctttggtgtacatatataaatagatgtttcaaataaaattaattgggtaaatgtgaatatgtagaacagactggtccga

SEQ ID NO: 374003 - DNA, 450 bp, Homo Sapiens
  misc_feature (118)..(126): n is a, c, g, or t
acttaggctgtatatggcctatggctaagaagagtttatacaaagttctttctagggactgggagatctaaaaaacttttttcaatgatcgataagttgttttattttatcactgagnnnnnnnnnggtcctgaatagattcctgtttgggtctcttggaagcctacacttgtcactttgaaaacttgcccgtgttttaacgttcccacatgttttgatgtgatgtagataaactggtggaaagtttccaatttgaaaattgtgctggggccagtaagatattgctgtgactataagagtttgctgttcttctgagatgctggtggaattgggctggaatataggagggtgcagagaacataggagcatgttcagctcaggcttaggagtcttgcagttgtggctggatgggagcaattggagatggtagaaccgactggccgagctcga

SEQ ID NO: 374004 - DNA, 486 bp, Homo Sapiens
gctaggcctcttacagccactctcctatggatcctccatgggtccctccccagctatcagcatcctgaggcctcctctctcacccaaaggagtgctgacctggtcttcgtcaggaaggtttgcacaactgttgcaatactctgggtgagagaggaggcctcaggatgctgatagctggggagggacccatgcaaaagcaataggagagtggagttaacaggacttagagacagaaaagtctatccagactactccccgctatcctctggtcctcaaaacctctcagctacccctaccttcccactctggagacagtggaaagatggaggaattacgtagatccctgggttttcatcccaattgtgcccctcaccccttgcttagtgacaccatgaacaaatcattcttctctaaagccttgggagacctgtatacctttcatgccatgccttgacatagtgttcctcagaccttgggaggacgttg

SEQ ID NO: 374005 - DNA, 605 bp, Homo Sapiens
  misc_feature (412)..(420): n is a, c, g, or t
caaggtactccttttggcaaacccacttgagttccattgttcagataaagagccaagatgcactgaaattacatgaccttctcagagactcccacccaaagagaggcacagctgggctggaactcccatctccctctgatgggcgagcccagctccttccccctgcagggaccccttagagcagggcctcctcaccatcactgagcaaacctgcataagtggcagtgaacaaaactgacacctgaatcatgcacctcaactacaacacccacatttgaaaggaaaccttccttgccccccttggaggaagtgagctcagttttgggagaggctggggtgtgtatcaagcaccactctcagtaaagctacagtggtagccatggtaggagtgatttttaatatttcacatacnnnnnnnnncctgctttaagaattgagaaccacgaaaaattgttcttccacgtgaatggctgtgcttccttctctcggggactgtgggtggcttacccatggactcctttgaactggaagccagtgtcatccctgtaaacatgttagtctcctgtgagactgttttcacaaccttttaaaattatgataccgcg

SEQ ID NO: 374006 - DNA, 626 bp, Homo Sapiens
acgatccccttcgcggtatcataactctaagtctaccccagggagcatgatgagacctgggaggggagaagtgttactgtgaaaagaaacatacagtaggcaacatgagaagagaaaggaaaaatcacatcaatttagagagacaggaacatccttgatggaagaacaaacatcagggcaaatttggcttgtaagcatattatcagcatataaaagctgatatcctgtaaatgaaaatatcttccaggtactttctcctagagagagattctgaaaaaatttaatgagaaacaaaattggaaagtattactaatttaatatgcataaaatactactgataatattttaatttagtgtgaggtatcaattattttactttagtgaatataaaacatatatttcacaggtttatatatctacctccaacataagctctcctaaggtctaaattccttaataccaactgtactattgggctttttaaggacttacataactgagaaagaccacgataatttataattgagaatcacagtaacaaaacaaatttatagatactccttgctctaataaactttcaccctatccagatctttgcttaattctcatatttatgataccgcgaa

SEQ ID NO: 374007 - DNA, 185 bp, Homo Sapiens
acccgcgttatataaccatgagaaagacaaaacaagaaatctttctcaggggctctaagcagcccaggactgtcttagcctcagtgtgggtgtctggggtgtggaggcggggggatgccaaagtcagaggtctctccctcctcatgcagaagaacctagcaggagtgtctaatgttttgtattct

SEQ ID NO: 374008 - DNA, 263 bp, Homo Sapiens
tacgtgtacataagtgtgtgaagcagagtcatagcctgttgtctgaagccagctataggaattgtcgtttaggaactcagcttcttagctaattgtctgtatctcacttgaaggattattaaaattatagtctcttcagcttattctgctttcatttatactgtttcatatgtcttaacagattaaagcaaagacattaaagatttggtcaaatctaagattagaaaccaattattttgacttacagtccaatattgtatctg

SEQ ID NO: 374009 - DNA, 639 bp, Homo Sapiens
acgatcccccggtatcataataaaaaaaagagtttaaaaagagacagaagtatccagatgtgtccactgaaacttggcgctcaggaggccaaatgcctttttgaggtccccaaatgcaatcggaatgaaagctcgttaaaaggcagtttcaacacccccacaggatagaccttgcttttcaacttggaatgactattcaggtagctgagtaaaaagtgattttgctgatttctacgtaaggaaagcagactgaattatgttacagcttgtgttctgattgtttttatgacaataggctttctagacatttctgctctgctacaatacaggagttgggacctgaaggggcttgtagcatgtgaacagaacagggaaggaaggagggctactggatgccatgacttatgtccctctttgtgtaaatcggggagaaacacaggtttacagaaatgctttatggtgcccctggcaagcaatagtatgtatcttcaaaaattctatatggtgaaaagtatcataaataatttttgagagatacctgctgaaatagttacagataaaacaatatgatacccaggatgtgcttcaaaacagtctgtcagccaggaggagggagcatcggtaggagttgagactgtg

SEQ ID NO: 374010 - DNA, 155 bp, Homo Sapiens
tagacgatacccttcgcggtatcataagcaaaaaaaaccaacagagtcaggaaacttggatttctttttctaatctgagttatgtcatgaataagctaaattacctccacatttcacttctccaactggtctaacagcttcctgttgtactaatt

SEQ ID NO: 374011 - DNA, 815 bp, Homo Sapiens
  misc_feature (600)..(600): n is a, c, g, or t
  misc_feature (635)..(635): n is a, c, g, or t
  misc_feature (682)..(682): n is a, c, g, or t
  misc_feature (790)..(790): n is a, c, g, or t
  misc_feature (800)..(800): n is a, c, g, or t
caaaagcaacgacgccttggttggacgaaggaagaataagaaatgaatcttgactgttgacttattctgagaattggtgatgtgtaaagagagttggaatcttctacctgggtttttctcagggctaaatggaaaagcacagggcccagaaaggttggagttaatcattcacttaaaagcattaggaggaagtgtcaaagcatcagtcatgaatagattatgtctctctgactacagtcagaccatcaattcactaagaccttatactctgtaagtgttggtaaaggaagaaaactgctaaattgcatgttaccctttactagaaattcattcctttggcacagattttatttatttggggctgtttaatgtgtctgtaaatcatgaaatataaaagcaagattcagtgtaggcagagttgggtgcttcttctgacaagctaacttgaccatatttctttatctgtgctctaacatgtgtcatattgttttctttttgtaaaccataaaatggggtgaacttccaaaaatcaaggggtcatgtttttaaaatcagggaacttttagaaataccatatctgtatctctattcctgcatttnataaatctgtaaaggaagaaaactgaaaggaaganctagactgagtcttacctttctctgacctaaggataaactgataaanctttttgacttgatatttgggaggaagtcattaactgggattctagttaattccccatattggggcagtttaggagggagaccccgcccaacccaaatttatggagcntggccaaatnttaaccttggggggg

SEQ ID NO: 374012 - DNA, 482 bp, Homo Sapiens
gttatatcagccagacttaatccagacagaagggaaaaaacagtctgcctccttagaagaggagacagaggcccctgcaccagcccaggtcccagctcctcttggatcatctcgtcccccttatccaggcccccttttgaacctcatcctgttagaagagttcgacctgatatgcgctccagaatcacttcttcctttacaggaaatgcatagtgaatatggtcctatcaaagtacaagtccccttttctttacaagatttgaggcagataaaaagaaatctaggacaagtgggtcgacctggataggtataatgaagcctttcagaaccttaatcaaatgtctgagctttcatggaagggtatcatgttacttctcaactagactgcttagagcttcagagaagcaggcggctttactagatctctgtagacatttggagatgaattttatcttattatggcacctaccccgggggtagta

SEQ ID NO: 374013 - DNA, 206 bp, Homo Sapiens
tgataaagccacccaaaagaaattagcaagagaaacatggaaatggagtaagacacactttagatagagaacaaagagcaaagacaagaaagaaagagacaaagaaatacacattcattcagactatcctcaagtgctagagtgccaggaatgttgatcttcaggtggcacaggctgacttccttcagtgtgttcaacatgccagg

SEQ ID NO: 374014 - DNA, 102 bp, Homo Sapiens
tgtgaagcacacccagcatggggcattttacttacatttaaacataaggtaatacttagtttctgctacagaatttctaatacatgtacttaagagttttgc

SEQ ID NO: 374015 - DNA, 139 bp, Homo Sapiens
cagagcctgctgactgttgagaccttagagcacaaccaaacctacgagtgcagggcccacaacagcgtggggagtggctcctgggccttcatacccatctctgcaggagcccacacgcatcccccggatgagttcctct

SEQ ID NO: 374016 - DNA, 406 bp, Homo Sapiens
gtggtaaacacaccctgacagctaacagatctatacacaatcactctacagtaatgcttgttattaaattaagatgtaatgacctggttaaccgactctaaatcttgaagatggagaactacatcagcagcagatagttatatgcatgagccaatgttaacataatacagaaagtggaggctttttctgattaaagctccacgcagacccgcacaatgagtggctggcaattcttactgcaagcccagcaacttaagtccacacctggtaaatgaccagctgactggaagacctgtattctagatagacaagtataagttagtgaaaagagaatacatgcacctaatagtatagttagactgatcctgcagtcatagctttccctgtgtaataccataaaattatg

SEQ ID NO: 374017 - DNA, 153 bp, Homo Sapiens
agccccttacgtagctaatgtcactaactcgtatgtaccgtatgtagagagctaatgtaaatgctaagcttctatagataaacaaataatatttgatgtatcacccttcagtgagccgcaaactgaaagaaagattatatgatcaatttaggc

SEQ ID NO: 374018 - DNA, 130 bp, Homo Sapiens
taatcagaagctgcagaggataagtaaacaaatgggtcaggcaacgttcctctaaaacttgatttaggaaaacaggtggtatgctggatgtgaccgctgggccttatagagtgataagggtgtgctttca

SEQ ID NO: 374019 - DNA, 174 bp, Homo Sapiens
tatggtcccatactccagcctgcaatgagtattaaacacacctgtttcatcccagctctttaccacattttctactttaaatgtggtaaatcccactcggtcttcaaaacccaactcagtttcctttctgaactcacctaccttcttcccactagggggatccttagatcgacg

SEQ ID NO: 374020 - DNA, 190 bp, Homo Sapiens
caaaatatctctgttgccacaaggaaaaagtaaaacagtaagcagaccagaagttctttttaatgatgtattcctcaagcaaaaatcagacctcttccctcaataatgggctgtaacactcttgcaaaaaagcgtctatcttacaagagtttaagttcttaccatgtcacataagggtgtgctttcatca

SEQ ID NO: 374021 - DNA, 347 bp, Homo Sapiens
  misc_feature (107)..(107): n is a, c, g, or t
agacatcccctgatgacgcacacccactgacacccctgaaatctgtgcttctaatagtctagcaacattgagtggcacaagtagtcttcagttcagaatgaaagacntataaaatgaaaagcattctttcaaaagacaagactaaagacaagaggcatctcaatcaacagtggaggcatccataccaggctgcaacagcagcaacgcagcagcacattgtcaggcaaaacaataatgctttgaacacaaccaaaaaattttagtacagcatgagtttcatattgcacacattggcatcaaggcagcaacacaagtccacattcaacaatcaacatccatcatcaaca

SEQ ID NO: 374022 - DNA, 309 bp, Homo Sapiens
catctgggaggaggttctggctttgctagagatacggtgatggggtcagttcagtggagacatgtgaaatatggtctctactcaatactttgaaacctacaggtggtagtgtgtctaacacctgtagacaggtagtacaggtagtatatctaccacctgtagtatgtctgccacccgtaggtgaggcagtgactcatccctgtttgggtgaaacaggattgatccttctcttaatgtttcagcagtaagatggccagctgtttttagtcccatgcttatttcccctgtaaatctagggtgtgcttcaca

SEQ ID NO: 374023 - DNA, 321 bp, Homo Sapiens
gtgcacaagagttatagacagaacggtggggtgctataattggccagaactgggtcaaatgcccacttatatgcccaagagactctactctgtaactgaagacatgtggggaaagcttacctggcagatccaaaggataccttgtcactgtctgatgtagtgacgcatggacaaaaatggcctcagcatcttccagtctgtactttctcctgtatactcagtcttggttagtagcaacagcttccatctgattgctaaagccaaaaatctctgtcattctggactccttactttccctcaactcacacatttattcaatca

SEQ ID NO: 374024 - DNA, 152 bp, Homo Sapiens
aggtgaaagccaccctaggtacaatggtgggatagccataggacaactactacagacattctggttcaaaaagaggggaaatgggagacataaaggagttactggtctataactaacaactctgaaatccagctgggaaaatggaagtttct

SEQ ID NO: 374025 - DNA, 167 bp, Homo Sapiens
catcaaaaatctataggaaaaaaatctaattacccatttttaatcagattatcttttaattgggtaattagatttttttcctatagatttgtttgagccccttagatattttggttatgaatcccttgtcagatggataatttgcaaatattttttcccgttctgtg

SEQ ID NO: 374026 - DNA, 149 bp, Homo Sapiens
  misc_feature (74)..(74): n is a, c, g, or t
gatccccggttcagcattgcactccgactgtgctgacccctgcgaatttcccaaatgtggaaatctcgattgcnataatttatggtagtgggggactgcgttcgcgctctcccctgatgtcttgtttaatgataaactgttgcttggcg

SEQ ID NO: 374027 - DNA, 365 bp, Homo Sapiens
ttgcaaggtcagtgagactcgcagttgcaaaagatcatcttgttgccaagaacaaatcaccacctagtgaaacatttagctcagccatgaaagtgaaaccagatgacgaatgaactagtggccacacagaccctaggtgtctcctgggcagtaggtagctattgaaagtgtttagatttgctttttggaaagatcgtgctggctaccctgtggaggatggagttaagagggacaatgttggaagaccacttatgaaggaagtgaagttgtctaggggagggatgcttgaagcctgaactacagatgttggttctcaagagacggaaggaacacgtgtgaaacattttaaggggtgtggttaccgt

SEQ ID NO: 374028 - DNA, 354 bp, Homo Sapiens
gaatacacacccacattagataatctcatcctttgcttagaattccactgctctagaaccttcagtgactccctatttcgattacagtccagaatctaacacctggacatacaaggccttctacaatcagatatcaagttactgttgactcatcttccagtgctgtattatagatagcacactgcttcaaaccaaggagttataggagtctcctaaaatactttccactttcacttatcagtgcttttgcccaacctgttccatcctcaatctggaatgtcctgggccctcctgacaaccttagcattcggttatagcccacctcaaaaatgcaagtgattggactgagtacac

SEQ ID NO: 374029 - DNA, 382 bp, Homo Sapiens
cttgagaaaaggccagagtctctgaacatgccgcttcagggcagactaaggtcctagtgtaccgagtcagtgatcgagaaaggagaagagtgttttttacagagttttggaatagttacatcactttttaaattgatcaatactaacctgtaagtatcaatatcaataacttgcccccactgtatagctaccacgcagatattctctttttgttacttgatctgttcactactttaaggaatacagtttcacaagccatgttgcttccattgccccctctttgtaaaggatcaagtgataagttcaggaatcgctaccttatgctgacccacattcttagcagaccaacaaaaacaaagactcaagcagtccctgcacaatt

SEQ ID NO: 374030 - DNA, 419 bp, Homo Sapiens
tgaaatgtttaaggtctttaatttcaaaacacttactaagcataatatatccagagattggcaattaattttaacaatttaggtctttagtaaaattaatgtgggcagaaaatgttacttcattacaaagtgttactatatactttgtcttgtgactaactagagcttacaggagtataaacaagttaactgaatttttcagtggctgaggattttgtatgcttcctcattttgaacttcaatcatgactatataatcatattcatacatctgagactgaactagatataaagatatcacaacacccactagaactggttaattagatatgcccattatttcttcactatttaccgaagaaaagtatgaagaaaaaaagactaatttggtttaattatggttacataaaaattatgtaa

SEQ ID NO: 374031 - DNA, 607 bp, Homo Sapiens
gaaggctgacttccttcagtgtgttcaaatttcttggacctgctgaagactcagctctctgcactgcttgtaggaagtataatgatttggcagataggaacaatgaagagcttgacgtgtggtggttgtttttgagactttatcttcctatctgggaccaggaaagtatccttgacagaacctcctgacctagggttgttgcccagtggtagtgaccttctcccctggaggatcctcataccccatctccacctagggatcgtcaaagggaatggagcaacaacactgtaaaacaacaagcctattcttcgtgaggaagatgcaagaggagcctaaggagacatgactactaaggacacatgcagcgtggtatcttcaatgggatcagtattctaaagagccagagactcgtcagtgacagctgtccgaggagctagtagggcaaactgctccctgagctggacgatcttttgacatccttctccgagaaacaatattctttttcagattattatcaaagacacgtgctcgcttgtgatgactagttatttgcttgagcagttccatattacataatcctgtgccacagaacagcactgtacactat

SEQ ID NO: 374032 - DNA, 414 bp, Homo Sapiens
  misc_feature (82)..(82): n is a, c, g, or t
ttggcaaaggagcaagtgtcttgacttattcaagctattctcaacttgttcctcttgtcttctgtgaaatggagacaatagntcctatctggtagggaactgttaaatcatttagttcttggaaaacagtagcacttaatttgtggatactgttatcctaaattagagaagatggtaaaggaaggaatggggtagatcgagcttaagcacaggtggtcctggtggacaccagacttgaatggtagcccttttgggggtagtccttgttgcgtggcaatcttccaaccattccaaatgaggggctctggaaaaatggttcccctggtaataagcagtagccctggggttgtgggggctgggggaggtagggatttacttgtttacccatttaccttgtttggcaataaaattgac

SEQ ID NO: 374033 - DNA, 512 bp, Homo Sapiens
  misc_feature (373)..(373): n is a, c, g, or t
gagctatctttcccctctggatccggaagttacctatgagcgctctctacgccttcactgaccacctctagttaaagtccttcagctctctccgttgtacccttctgccttgtctacgtgggtcatcaccttccttcacgatcctccatctggcttcttcttggaccccatctcatacagcaggtccagggcccgcagcctgtattcactcgtccttatcgtcccaggcactgcacgatgaggtccttgtgggactgcacggacttggggtgggtcttcaggatcttggacattgccagcagccccaggtacttcaagttctgatcggagtcctcgatcaatatccttaatttctgaacacaaagctggaatntggcgctgtggttgggcatgccggaggacagcgagatgagcactgcaatcacggtgttcacacattcatagaggagagacatggcagacgtgctgtggatgagattggtgaggggctcgatcagcttcttgcccagccg

SEQ ID NO: 374034 - DNA, 370 bp, Homo Sapiens
tgaaaataggaataaaacagaaactgactcagatgatagcagacaggacattagaacagttgttatatctgtagtccatatattttaaaatgtagctagcagacaggacattagaacaattgttatatctgtagtccatatacttcaaaatgtagctagagcaaagactggacatatatttaaaaaacacgcaaatcaaacttctagaaatgaaaactacaatgtctgaaatgaaaaatacagtggacggtttttatggcagattagatattgtagacaaaatatttgtgaatttaaaggcatagcaacaactgctatccgaaagaaacacagaaaaggaaaaagcaaggaggaggaggagacgagagga

SEQ ID NO: 374035 - DNA, 234 bp, Homo Sapiens
acgttctcgtgagactaggatgtccacgatgagcgaagtgcgtccaattacacggtagtgctgtgctgatcaccgtctggcggagatcgggggctgtgacgcgaggtgcctaggagagcccttcctggaccctgggtagaggcagctccttagtggaaagagccttagactgagtgttaagatagaggctgtcacttcagactccacctgggccactcaaagtctcacggaaag

SEQ ID NO: 374036 - DNA, 168 bp, Homo Sapiens
acttgatgctatagcctcatagtaagtcagtcttgaaaacaggtagtgtgattcctccatctttgatcttctttttcaaaactgctttggccattgtagttcctttgcatgtctgtatacatttgagaacaaaattgtcactttccatgaaaaatctcgatgggtgct

SEQ ID NO: 374037 - DNA, 222 bp, Homo Sapiens
accatgcccggtcctggaatgtgcattttaatgctagaccttttcatgtaaggcattgattcttaaaaacttttcctgttttcaaagataacttatagaaaagtgtgcaaaacagaaatgttctgtttaatgaataattacaaaacaaatgctcaggtaactgcaatccaggtcaactcattttcttgctgctgtatatctcgataggtgtcaggataccga

SEQ ID NO: 374038 - DNA, 141 bp, Homo Sapiens
taaataaaaaaagaatatgagactaagttatggcatggctaagagacactcgatttaaacatgacaagtacactcacggttcactaatgggttttcctgaaaagcagaccactcagtttttcttgtaaatgaatagaatta

SEQ ID NO: 374039 - DNA, 185 bp, Homo Sapiens
atttagtatcggctgttataatcataatattcatcatcaatattattgcctaacttaggtttctttcaatacattacaaaaagcattactagttatggtatttgcgcattttaaattgatacctgccattaaaattctaaagatattatagcttttctcttgataatacttcgggggatcctcta

SEQ ID NO: 374040 - DNA, 282 bp, Homo Sapiens
ctagaggttcccgtccgacggaagcatacttttctttgccatcttcagtgatgagagtaacagagacagaaagataaaaggagttgactgctcacgaggctgttgctggactttttaggacagtcactggaagattctagtgtgtcttctgaattgctgaccataattcattctcttccctcttttgcctggtttgttatttgatccaagactgtgctataagttttgggttgataaaagagagctaagagtccatgaagcgctcacacctcccggtcgaaa

SEQ ID NO: 374041 - DNA, 305 bp, Homo Sapiens
gaggattccgtccgaccggaagcatctttaaacttcagttaaatgcattgtgtgcttgggagtccactcattctcttctcctcaacttaaaaaattctatctgttcttcaagaactggctattccatgaagctgtccgtgttagtttgggttcttgctagatctactttcccacgttgttcaaacttttccaacacttaaacagtctgctgtatatttagacactgattttgtgtcatttgtgtcttcattacttaatgggttcattatgtagattatgacagcagagatctctttcaaaccctg

SEQ ID NO: 374042 - DNA, 276 bp, Homo Sapiens
  misc_feature (261)..(261): n is a, c, g, or t
tctgagaagaaaaaagtgtgtctcagtcctctggtgctgctaaaacaaaataccacagactaagtaatttataaataatataatttatttctcaaagttctggatactggaagtccaagatcaaggcactcgcaagattcatcttgcgaagattcagactctgcttccaatatggagacttgaactgtgtcctcacatggcttaaggtctaagggaaaaaaatgcctcgccagttccctctaatttctttattaggtttcnaacactactagttcc

SEQ ID NO: 374043 - DNA, 244 bp, Homo Sapiens
ccatgatgaactggtcgtcggtggtggccaggtggttgatcagcgcgcggtagaactcggatttgccgtgcttgtagaaaccgatggaggtgtacaactcggcaatgtgcttgcccggcaggatgcgcttgagaaagccgatgaattccgctggcacgggtacatcgaccatgaaataggaacgggtgaacgagaagatgatcgacacgtcggcttcgtcagtgatcaaagcatcgatctggat

SEQ ID NO: 374044 - DNA, 701 bp, Homo Sapiens
ccagtgtcttatgagtatacactagaactgttgggtcatagaacatacatatgttcagctttagtaaatataaccaaatagttttccaaagcagctataaaactcctttagcagtgaatgagagttccagtttgctacatttttgtgaacccttgttattttccacctttttaatttttagccattctgttgattatgtaacaaacaaaattattatggataatatgaaactccagataatagcaaatctctcacaagattaaataatgagaagaagtatgtagctttttaaaacaacatagatataatagcgttataaaaaactcatttcactaataaaatggtagggggaagtaaacacttattaaagaacagaccaaaaaattgctcaattacggagccaccaaataatccttaatagtggggggaaatagaagaaaagacagaaagtaggaagcatggtgagtaagtgaccaatggtctggaaactataacctacagcttgagttctctcattaaatgttatggtccatccttttctataaagacaatagctatttcatttcaggagtacgagtttcagtaaatttttaattaaaaaataatataaaaatatatttcggcaagaacttagggaatagctctcgtatgtgccacagtgtgtatatgatttaatatctgtgaccatgttcgttcatttc

SEQ ID NO: 374045 - DNA, 602 bp, Homo Sapiens
  misc_feature (574)..(574): n is a, c, g, or t
  misc_feature (585)..(585): n is a, c, g, or t
aaatggaacgaacagcttatgtgaacaatgttgaacaataatatgtgctgacatcatcagcataatctatgtaataggaactccctaagacaatcccctatcttcaatatatagcaagcgaaaaaagagatgaagtataaacctggaatctaagagagttaagaaacagaccatccaatcacaatatgtggactctaattggatactgattcaaacaattgcactaggaaaaagccatcgtgatatccacaagacaatggggagcttgaacagtaatcaaatacgatgatattattagagaattactgtttttgtttgttccattttggtctgacaatgattttgtgattatattagaacaaaagttatcttttagaaatattacatacttacagatgaaatgggcagaatggaatttgcttaaaataatacagaagtgggtaagttaatgggggttataaattaaaaggcaattgggccatggaattaattgttgaaagagggtgacgggatgtgtgcccaaggttcattacggcttttcaatttacttttgcccgtggttcaaaattctccntaggtaaaggnttccataccaattatta

SEQ ID NO: 374046 - DNA, 253 bp, Homo Sapiens
aaatggaacgaacatttgctacctataggaccagcactaacaagccttcctctgttcttcccctttaaacctggttttcaccaatactcagttcttgccactgctctggttctgctgttgtggatattgatatgttggactaggtcttcacagtgaagaatgacatttcccagctatcttaaaaatactttatgtgcccttgggttgtggttttaagaaaaaagccggatctgttcgttccattttacatcct

SEQ ID NO: 374047 - DNA, 127 bp, Homo Sapiens
ggacaaatggaattcttttgcacacttaatagcagcacctagactatagtcatgtctggctgctgataggaggtttagaatccttttcctgttttgaatgttcgttccatttcgggatcctcagacg

SEQ ID NO: 374048 - DNA, 474 bp, Homo Sapiens
atctacagatccttacctggcagagctaccttcctgctgtgccccagaacaaagatcctataactgagaactatatcagacaatacatacactactgttacatagtttagcataagcattctaagtctttatgatggccttggccaattttctcatttctatctactgctaaatccatacttttttgtttcctcaactggattatcacaatgataatataggtcaatcccaaattagccgttaaaaataccagtttaacctggccctttcctacaaacactgtcgtttggatttaactggctaagcaggcatcggccttaaaggaatattcttatgtgacagtggattggacagattgctgtccagcagtgggaaaggaaaaaggaagagaacttagatttattctaccaaacatcctttaaggaagtttctaaaagtaaacctggagaggaaaaagaaaaatgaagcttcagc

SEQ ID NO: 374049 - DNA, 317 bp, Homo Sapiens
aaaaatgaaagcaccttagggatcctagcaactgttactgctggaaatgaaagaactgttgtcaaggtgaaactgtgacctagaagcctaaaatcaaaccttggtcattctattcaagcagctccatcagaactgagtataaaaggtctgtgtggaaggagagatgcctgaacttatctataacctattttgtagtgacgcctgtcaaattacattcatctatatttatgacagaaagaaaactaatggtgtcagatctgccttatagtcataaaaagaaaatcagaaaatatactcctcacgcccattaaataagt

SEQ ID NO: 374050 - DNA, 472 bp, Homo Sapiens
ctgaggtgtccggatttggtgagcatccagatggacgactgatcctgtgcagtgtgctgtcagaccagtacacctttccttcctgggggtctactccaacggcaatggtgttcttcatggtaatgttgattggtaccaccacatcagcaaaataagggatgtccagggagaccatgcgaatgtctatcctcctggcgaagatgaggaaactgttcatgcctggtgagcaggtcttgccatcagacagcaggttgatgcctgtggggcaggtacagctgaatccgcttggatttggggacctaagacacaggtggctacagccgccattctccatagcacatggtgtagacactgggggccggcggcggtggaagacatggatgtccattaggttttccaggttctcctgcagagtctcccggtccagccctgtcagccggtcagcgctctgtatgctcttggtctgccagtc

SEQ ID NO: 374051 - DNA, 249 bp, Homo Sapiens
cccgggatgtgggtgagcccccgaatgagttggagtagagatcttgatgggtgaagcgatatatgcaggctctagaaagatattctttattgctcagtggccacctaacaggatgaaactagtcatgtctcatggtctcatgcctacccaatcaacgtatttctggggcctcctatgaaagcaatggtagatcgtaatgtcctggtgttttttgttctgggcttccctcatcctcaggctcaccatata

SEQ ID NO: 374052 - DNA, 712 bp, Homo Sapiens
  misc_feature (351)..(432): n is a, c, g, or t
  misc_feature (520)..(520): n is a, c, g, or t
tttctgccacgatcgacaccggtgaagaagagcagcaagaaagcagctaccctaagccaggagctggagaaattcaatcgagaccagaaagctgaccaggaccgtctggatctggaagaacggaagaaagtagagacagaggcccaagatcaagcaaaaagctgcgggaaattgaagagaatcagaagcggatttgagaaactggaggaatacatcaccactagcaagcagtccctagaagagcagaagaagctagagggggagctgacagaggaggtggagatggccaacgcggcgtattgatgaaatcaataaggagctgaaccaggggcatacctggaccttctgggnnnnnnnnnnnnnnnnnnnnnnnnnnnnnnnnnnnnnnnnnnnnnnnnnnnnnnnnnnnnnnnnnnnnnnnnnnnnnnnnnntacaagcaggttggattattaggtaatatggttcgcagtgtgggactcctgaactccaagatgtctttgaaagtagccattttttttnaatttctaatggtttagtcagactacggattacttaataacagggactatagttcattcatggatatatccccagaatcaggaacagtttctagaatacgcttgagtgctcaatagacatagctattatagttaattgaaatggaattggcaatgtgggaaataagaaatcacatttttggccaggcgcagt

SEQ ID NO: 374053 - DNA, 432 bp, Homo Sapiens
atatatggtgagccactagataatattaataattagtataatgctcacttgtcttgagctactttatgcaagacacattctaagctcttatacccgcataacttatttaatcttcacagtcaacccattttacataccaggaaactgaggtaaagagaggtcaagcaacacgcccaaagtcacataactagttaggaggagagctggaagtgaacccaagcagagggctccagaagtgccgttacccacccactctgatgcagacaataacagacatcacctccaagcacctgctctgagcaagcaatgggctaagtcctttataggattatctcatttaatcttcagagaagccctatgaagtgggtgctaacatcatccacattttaaaaaaagaaattgaggctcacagagatgatgtgatttgcctag

SEQ ID NO: 374054 - DNA, 345 bp, Homo Sapiens
gtatatggtgagcaccatgcccagcctaagtttccttttctaataccacttttgtgctcaaaagctgaagcacagagaagtaaatccctgctgttacacctagccatttggaccagctgttcttgtgacttactaatggacaagcaggagcactcccttggaaccaggggcttgaaaccaaagaggaagttgaagagaatcagcagataacaattctttactacatcacagtgaaatacactgccatagcccctagtgttatttgttgccatttcagcagtcctggggcctcagtaagtggcgcctacacagcccgtcagacaaccagcccaacaaacctgtcga

SEQ ID NO: 374055 - DNA, 202 bp, Homo Sapiens
ctggtgtgggcagctgtgagacccctccttgcccatctctgtcttctaggctcttctagagaaccagtgtcctttgagatctcagatgggatttagaggagggttccacccagaccactttccacaaatttcacttctgcatttcatcttggtagggtgtggtttccaacatagaagcccaaatgagggctcaccatatata

SEQ ID NO: 374056 - DNA, 349 bp, Homo Sapiens
  misc_feature (24)..(24): n is a, c, g, or t
  misc_feature (99)..(99): n is a, c, g, or t
gtctgaaatctcagggtgtggagngcaccacactgcctgtcgcaggatgagattgcttcccttggttccagctcggcctgggatgggaaagcagctttntgttttcttattccatctgcgttttgcttaggggaaggagggtgcgtgcatgtgtgtacatacgtgtgcgtgtgtcagaaaagatggggcagtgtgtccatgcatcctcctacttaatctgagcatatggtaccccaaaagcacacacccactgctctggtggtaccttggaaaacccaaaactgccaaaactgaaatgagggaaacacatcctgtgtgagaccagttccacagcatgaacacacacaca

SEQ ID NO: 374057 - DNA, 692 bp, Homo Sapiens
  misc_feature (41)..(96): n is a, c, g, or t
agattctgggatcaataatataagattaaagccaacctgannnnnnnnnnnnnnnnnnnnnnnnnnnnnnnnnnnnnnnnnnnnnnnnnnnnnnnnagatactttcttgttataaaagatgaagaaaaataaattaaaaagccaaccccttccctttctccaccacattgatatgctcttctcatgttgctgtccttcagactttaaagtgctacactgagttattgagagaattacagttcaataacacttagttggcttcatgaggctcatgttggaaaatgtggcttcacagagaaaaatacttccatttaaatacacagagagcattgctggacgtcttgagcagatcttcagagatggagaagaaagcaaaagtgttgggtggtactctctgataagagtcacacatctaccaccatctttttgtggatatctaggccacctacaacagcacagaattcttcaaaggatattcttccatctccatccttatctgcatttattatggttttgtctacgatttgctgtaactgtgtatctttcagattgttccccaccatcatcttcaatacctggaagagttccccattggaaatatagccatctttatccatgtcatagatacggaaagcaaacctcaatttctgctccttatctcctttgacactgaactaagatgagccggggat

SEQ ID NO: 374058 - DNA, 260 bp, Homo Sapiens; identical to SEQ ID NO: 239569

SEQ ID NO: 374059 - DNA, 301 bp, Homo Sapiens
cctgatacattcatatctcaggccacaatctccctgcttttcacttacttcctaccatctctagggcctacatcaccattctgttatccatatttactacccttctattacagttgttttgcctccacagcatgcatgctagatttccacaaattctttatgtcttatgtagccaaacattctcaattcatgacagaactaaatgtccaaaataattaatatcggggaaaaggaaatagtttgattacagaggaataataattataacatggcttgatcataaaaatatttttatattaaa

SEQ ID NO: 374060 - DNA, 328 bp, Homo Sapiens
tgtccatgttaattatgtgcctcagtttacctttaacaccccgttaatctcatcaatcctgaatgctagggaaaaagtgatttgacaaactgcatgtgagttcagttcccagtcttttccattacaacgtaaaatgcgacagaaaatactggaaactcattaactgtgaatttattctcttcctctcctcctccaactcttccttcaaaacccttaaaactagtggtttctcagaaatcgaagttccctcacttcagctccacaatgttcactatgcatttttgcccaaaaaaacaataccttagtgaaaatatttggaactgaaatg

SEQ ID NO: 374061 - DNA, 287 bp, Homo Sapiens
ctcatttcagatcttctgtagtgacagatggggtgaggcctggattaagtcgctaagatgaggaaaacagtgagaagttacccagataaagatgggactgataaaaaagtgcagtggattccaatttaagagagatcatatatgttaatttacttagggtaactggggaacataactaccttggctatagagatatttagagaaacgtactttggaccaaataacttagcttaggaaggacaaatccttaggaaacccaagtctcagattatttctctaatagatat

SEQ ID NO: 374062 - DNA, 410 bp, Homo Sapiens
aagctggcagtgtttctgctgatacaacattctcaaaaactttgtgggtctcccacacatgttacagggagtaaatccatcaaacaagaggctcttccacaaatatatgcaggataatcccatttttattcctggctcctattgagatctgtgaggggatccatgagacatatacttaatcttttcaaacacttttctgtgtgattaaaatactgaccttatctaaaatcgttccaaggcacaagcaaaagactgctcagccaaacctttggcattctctccagagcatactctcttgtaatcaaatcttctaactttagcagtttttgaaagctgaatagactgagaatttcctaaattatcaagtcctagttcctttttgtctaacagttcttcccttaatctatgtc

SEQ ID NO: 374063 - DNA, 574 bp, Homo Sapiens
ctcatttgagttccatcttcaatgaaggtgaatatgtattatttcgagaaatatttaataagaggccactctgtgcagcactcttcaaggcatagaagatacaacggtgaacaaagtagacaaaagattcctgcgctctggtggagctgacattctagccatggagaatgggtaatcaacaaacaaatactgtacataacgacaatatagtgcaacagatgctgatagtgaaaaataaagtaaacccaggaaaggaagaggagagctgagtctactgcttgggactgtggctcctccaggcacctttgaccattcccaataaggtaccgtgagaccctgagctgccatgcgcagccaagaaaatttttagagaagggaaagacacagtaatgaaaatgatcttcaaatacctgaaaggatgttgcttcagaggtccaaagcagattcagtttaaattactgaggtacaggtctcattcaaaatgagagataaaatacttagagccatctctgatgaaatgggctgcttttggaagtaatgttccctatgactagtatgaagtactatgttacag

SEQ ID NO: 374064 - DNA, 221 bp, Homo Sapiens
ctataatagtctcttgttcgttccctcaacctctctgttctccgcctgaaatcgatttacaattctgctgctcacttaatttatttagtgctttttattgatttatgtcatagaactgaaacgtgcatagatcagagcatgctgagcagagaggggagcccctctccacagctgcttccacagctgcccaaactgaaatgagccggggatactctagagcg

SEQ ID NO: 374065 - DNA, 454 bp, Homo Sapiens
accccagaagtaacgaggagctcctctccccttacttcctttctaaaaggagcttggactgcttttcccacttgccagtaactgtccagtactgtcctccctctgctggaagagtgtcagtggaagtcagctaaaacaacatttaagatccagaggcttactataaaaccgaaaatgtccaggtttaagaaattgaaaatcactcatcatgctaagaacaagaaaaatctcaacttgaatttaaaaagacaatctatggacggtaacactgaaataacaaagatgttacaattatctgccagagattttaaagcaaccaccataaaaatgcaattactaactaatgagcaattactaacacacttgaaacaaacaaaaattacaaagtcagcgaagaaacagaaaatctcaggaaagaaatagaagatataaagaagaaccaaatggaaatttt

SEQ ID NO: 374066 - DNA, 630 bp, Homo Sapiens
gctgaccaaagaattgatgggatctgcacactgtaaagccggtttcaggatggctgagctgacggtcaagaaagaagagaagatatgagccgcctgcattttggggtggtggcagtgaaatttagacttgtgatttggtatgacaatatatggctttttgtgattgttaacattaatgaaaacaagaaaaattagttgctcaaaagttgaaaaatggattcataaactttttattagagtaaggcaaaagaacatattaaaatagaggtaaattagaaatgtcaataagaacccatggacattttttataaggagactttatctgttctgtccctacagtgatttatgctcttggatatttttgctgtcatcctgacaaattctagttggaatatggaacaagcttatttgtagacctagtgcctgtggcttctaaagcaattttctgaaaagagaaaccactgcctgttggaagaatagttgattccatacctcaagctagggaaaaaaaatcagaattagtctgtgaattctagatgttgagagaaagcagggtttcattagggcatcggagagtcacaagtccataggatgcaaaaaggaagatgaaataaaattgcctgaaaaatg

SEQ ID NO: 374067 - DNA, 222 bp, Homo Sapiens
gtcgcctctagcaggatccccctcatccctccttccgtgaagtttcagcttacttctctgtacaacagtaaggaatgttatgaggactgaacaaattgctacatatcagagtccattagaggacttggtacaaaataagactcaataaaatggagctatggtaataatgataaaaccttccttaaaagggggcttaaatctcataggctagattttatgaat

SEQ ID NO: 374068 - DNA, 519 bp, Homo Sapiens
  misc_feature (16)..(16): n is a, c, g, or t
tctgattcctgaggancccctcatccctacttgattctctaagaggctccttccccttgcagttgtaccaattactgctattctctagacagatctccaaagaccaccttcccctctgactctcaacctagggtggcatcaatgggctgccaatgcctccttcccacagcatggcctgcatcatagccagtcaggaaatacgtttcagagcatcgctgcacttgagatgcatcttgtttgcctctgtaggttaaaggtgagctgagaactcctcccttagtatgacactgctcatgtagataggatagagccctaaaatgaggcatcgctaaaggatgagacagtagactcaaagcttagagctcatgagagtcacttgggaacttggcaaagtttgtcatcctgaacccccacaccctgagattctgactaaggacctaaacctgtgtttcagcaagtactccgtgtgattaggatcgggtagtctgtggtccacattttgagaaacagtaggtgagg

SEQ ID NO: 374069 - DNA, 582 bp, Homo Sapiens
tcgggacccctcatccctccttgactagatagagcaacctgttggggacacaaaacttacttaattcacttttgcataaacagtgcctagcacggtgtggtgattgtgtagctattcaagaaagcattattgaacatgtaaataaccaataaacaatggattctgaggttaagttctgattgttattaataaggaacattaaaatatgataatgctttagtagctatggatattgactatagaaaacatgatcagattttgaatcatctattatgctttaaaaaatacacatactaagtctgccacttccctttaaaaacattcacagcagatgaagggagctggcacgtcatcacttagctttattcagcaatggccattcatccacagttgcaaaactcttttcaatatttaggaattttatcactgaacaggaggagtctttataactatttttctttactatactgtcacaaaatctgtgcagtccatgacagccctatagttaatgaactggaatccccttttcagtgtttaagcattctttcttttccaccctccctgcataagcagggatgagtt

SEQ ID NO: 374070 - DNA, 426 bp, Homo Sapiens
actctagagtatccccctcatccctccttgtcatttagttgagaaacatttgccctggaacagcacacagagtttgcattagcatccctgaggacagaactttgaccccacagactaaggaagctacaaatggaaaattccaagttgctgtactcttttattttcatgctaatgcttctgcagagagtatttaaggaaacagatgcacaagaataataaagagctgaggactaagaactcctctggcaactgaaggtatgctccgtccagcatgatcctgtatctccctgtgcttgcacaagtccaggagggtcaaggtgaaaccctgatttcattttatgaaaaagctgaaccagcactgacatagagaacccaggattacatccagtcaggatttgaaaattgtttaagtttcatttcacttcc

SEQ ID NO: 374071 - DNA, 426 bp, Homo Sapiens
ctctagcggatccccatgctcatccctcctttgcattcacaactttctgtctcaaggggcctagctttcactctgtctcagctttcgatacatattcctcactaagcttaatcatttctagcttttaatttcaagcgggagacgtatgactcttcctttcacttgaacacttagaagtcactgcagggttattaataccctaatttcaatattgttgtatctcaggaaataagaaggcccaagaagagggagggagagagatggaagaactgccggttggtggagcagtcagaacatacatatttctcgatcaagttggccgtcttacatggtttgtggtgccccaaaacaattacaacagtaacatcaaagatcactgatcacagatcactataacacctacaataatgaaggaaggagggatga

SEQ ID NO: 374072 - DNA, 399 bp, Homo Sapiens
cgctctagagcatccccatccctccttaataacaccaaaaaagcacatgcctaaagcacaaagcactgatcccatcaccaccctgtttaagaacataagtgagcgccgcatctgagctgcagcataaaatccaaattctttagcatagcattcaagatactattagaagcaatgccgacctgtccatcctgatatcccatctccttaacttcaactaagcaacctcaactaaaggcacataaaaccagcggcttcgcaaacatgtgccatctccgcactggctcttcagctttactatgtagctcctcctctcatctacctgtggatatcctatctttagacgtcaactcgaatcctggctaacacggtgaaaggagggatgagcagtgtaccgagctc

SEQ ID NO: 374073 - DNA, 420 bp, Homo Sapiens
tcctttcgcagaagagctgaggccagatattgagcagaaaggaggctcaatgagaatgagaacaacttccacttaattgagtcagggtaataattctgaagttctcagaaatgcctttgtctccatcactgtcacagaacagtcactgtcagtgaccaagggggagaacagtgtgtggaatgtccctgagtcccttggctaagtccagcaggaggcagcttggagcacggagaggacagagagctgggggttaagactcaggagtgctcatctcagccctgggatttctaatgagtgtgagcctgacacagcaagcctcattcctctcttctggaggtgaatgcctgcggagtgggatcatggcctggagttcccaccagctgcaatcccctatatcccaatgtcccaaggagggatgag

SEQ ID NO: 374074 - DNA, 141 bp, Homo Sapiens
agctcgtaccattatgtgatgctgagtgcttcccacagcatcgcttccatcaaaactgatcagtggttacagtgtgttgtcaacctgctctgtccttcaaaagttttcctcaaaatttcacctacgtgctttagcatcggt

SEQ ID NO: 374075 - DNA, 172 bp, Homo Sapiens
agccggtaccttaatttctaagacttaagatgcaaaagaaaaataacgattattcagctacaattacatgtaaagactttaaagggacagaaaaacaacatattaacccccacatatataatgatcattaaattaaatatatttaactcccagtgtggagagaggggatcct

SEQ ID NO: 374076 - DNA, 376 bp, Homo Sapiens
ggtaccatctctccacactggtaacacttgggcacaccaaaatggctgtaatctgaaaaacagccacatgccacttctaatggtgtcattatactaaaagtgaccttcccccctgaaagtttttaaagtaagctaaatcttgaacaatgactgcctactcttctctaaaataggagctatgacagctaccttaatgggatgcccgataaactcagggcaaggggctcactgtgctgacattctcacctcacctaggacttccgctgattcatcctgatggactgacaagtcactgacttgccaaagaatcttgtgtatgtcacatataaaaacacggtctactccagtgtggagagacggggtatcctctagaccc

SEQ ID NO: 374077 - DNA, 248 bp, Homo Sapiens
tcagctcggtacccgatggatgtgaaggcctttctcgcttttcactctataaacacagcccaggaacaagctgtcttacctgggactctcagtagatgctgagaggcagacttgctgggtgtggcattccaaattttaaaagcagcaggagttggttgattttgaagttgaagactcctaggcggggagctctgtgaaaatgagagccaagtcttttaccagtgtgagagagggtgatcctctagatc

SEQ ID NO: 374078 - DNA, 325 bp, Homo Sapiens
ggtacctctactcacactggctatacaatcatacttcagcaggactccccaataattgtgaaagggatgtaggtgtgtttgtccatgaacttccctagtaatataagatcacttggtgtattatgaaatcccctgagtctctcaaatgtgtgactctccaatcctaaaatcctcatctataaaataaaaatgactacatcccaggcttattgtgaagattcaataagccagtgtccaaaaagggccgggcagacagtcagcagtaaccatgtgctggcttttctttccccatttctcccttcccctttcccccagtgtggaggag

SEQ ID NO: 374079 - DNA, 162 bp, Homo Sapiens
caccacataattattctccacacagcaagccatgcagtttgcgtttaaactcccaatagccccaagggataacaaaaatctattttgatcactttttattttcatcatttaaagagtacatcttattttaattaggcacatacatctccagtgtggagagag

SEQ ID NO: 374080 - DNA, 304 bp, Homo Sapiens
cggcagaggatcccgcacactggtggtatgcccgtagaatgacgaatggtgctaggtctctacccataactgatggcttcatagctcattcctctcctgtctggatcaccccctcctgtagcctacctcttcctgcttaactagctgctcatccttccaaactcagctcagaagcctggctcccttacacacttgagctgggattcatgtcgtgtgggctgtgtttccatagtacccgttgctgaagtttatcactttacgtagcaccagtgtggagagagccagtgtggagtgagcgtaccgg

SEQ ID NO: 374081 - DNA, 280 bp, Homo Sapiens
ctctctccacactggtagtataggagccagatgtggttggggggcctccaggggctagctgcaccatcgcctaccctctcgggcttcccagacaatcacgggagggcaggaagggagcatagaacattaacccaaagtgggaccactctgtacaaggccaccctgggcaggagtgggtggctggcgtgagccaccgcgcccggtctggttgttcttttatctctgacaagggcattgttctctggatgcttaagtttaggaagatccagtgtggagagag

SEQ ID NO: 374082 - DNA, 245 bp, Homo Sapiens
  misc_feature (135)..(199): n is a, c, g, or t
tctctccacactggatggtgctctctagcatggttggggctggctgtggtttctgagcttctaagatcccccagacccctgctggaagtgagttcctgccttgggtgtgcctgagtgtgctgagtcgaaagtcannnnnnnnnnnnnnnnnnnnnnnnnnnnnnnnnnnnnnnnnnnnnnnnnnnnnnnnnnnnnnnnnaccctattctcgggggcgctatttttccctttaaaacacgctgggg

SEQ ID NO: 374083 - DNA, 308 bp, Homo Sapiens
ctgggccatgactggtgactctggcccgagtcttaatgtggagttgacttctggtcccttcagtggggattttgagtctgggcccttctctcgttttgaatgaaatctaacacaaatgaaaggcatcgacaattaatcactggcattcatttccaaagtatgccgcagttccagtcactttgtttgccctactttctccctacgtctgtaagagtacgaaggcaggagagccttgtaagaagcagggctgtcagctcacaatgttcacatgtatttaaaatatgcagtgcaagtgctgcgtatggacg

SEQ ID NO: 374084 - DNA, 440 bp, Homo Sapiens
tctctccacactggagaaaaactattatctgtgcacacagtgcagcaaaagtttcagtcagatctcagacctcattaaacaccagagaatccacactggggaaaaaccatataaatgcagtgagtgcaggaaggctttcagtcagtgctcagctcttaccctacaccagagaatccacactgggaagaaaccaaatccatgtgatgagtgtggcaaaagctttagtcggcgttctgatctcattaaccatcaaaaaatacacactggtgaaaagccgtataagtgtgatgcatgtgggaaagccttcagcacatgtactgatcttattgaacaccagaaaacccatgctgaggagaaaccctaccagtgtgttcagtgcagcagaagttgtagccaactctctgaacttactattcatgaggaagtccagtgtggagaga

SEQ ID NO: 374085 - DNA, 359 bp, Homo Sapiens
cggtaccctccccgtacgcccaatcttaatgtagtcctgtggtttctaccattgtctggagagactctgcacttcatcagttcttttccagtagccatccctccatgtttcaaaattcctcctgctattctacctctcaccaatgtcctgttttttaagggatgctattactttgccacttaatttcagagggaagtgaaatgctgaacccattgaagaatcaatcccttgccaattgagaatactagctcttcccacttccccaggttcattttgctaactacataactcaggtggctcacaccccagaaagtattcttaacggaatctaagaagtataattttttcggcgtacgggg

SEQ ID NO: 374086 - DNA, 123 bp, Homo Sapiens
taccaaaacacgtgtgttgatactacttgccacctaattttaacatctatccattcataaagctgtgaaattcaatgactctactccaatcagcaaactaccagctccccagtgtggagagag

SEQ ID NO: 374087 - DNA, 345 bp, Homo Sapiens
gatagaagccctatgagtgcattgagtgtgggaaggccttcaacctgccggtcatacctcacgtggcaccaacagattcacactggagtgaaaccctttgaatgcaacgagagtggaaaagctttttgcgagagtgcagacctcattcaacactacattatccacactggggagacgccctataagagcatggagtgtgataaggcgttcaaccgaagggcacacctcaagcagcatcagacggattcacactgcggagaagccttatgaaagcagtgaatgtggaaaggccttcacccactgctccacttttggctcgcataagaggacccacacaggagaaaa

SEQ ID NO: 374088 - DNA, 258 bp, Homo Sapiens
  misc_feature (87)..(103): n is a, c, g, or t
gccccgatttcgcaatttgaggctccgtatcccctctttccacactggctttttcccacccgggtacagagtgggaattcctttccnnnnnnnnnnnnnnnnngaatgagtctggcccctttttgtctttctctcatcctctttgcctttcaccatgttatgatgcagcaagaagcccctcatcagatactagtgccatgaccttggacttcccagcctccagaactgtgagaaaataaatttctgttctatgtaaaa

SEQ ID NO: 374089 - DNA, 533 bp, Homo Sapiens
ctctccacactggggacctcaagatctccaccctaaaatagttattttgaatttccccctggcaatgtaaaccgagagcttatctgcacaggtgtgggacagaacccgtccctctgtacacctgagtcaaatgcctatctgactgcttcccctgccctatttatgtaaaaattcagagtcaatgagccagattaaggcataagtgactattcctctactccctctcatatataaattgtgtattcagtgaaaggctgatgagtcactcaaagaatgtgataatttattatctacctgtgacccggaagccccccaattccagtttttccacctttccagaccgaattaatgtacatcttatatgtattgattgatgtctcatgtctctgtaaaatatgtaaaaccaaactgcagcctgaaaaccttgggcacctgtggtcgggaccgcctgaggctgtgtcacaggtgcatttttaaccttggcaaaggagatttctaaattgattgagacctgttagatacttttggttcag

SEQ ID NO: 374090 - DNA, 170 bp, Homo Sapiens
ggttgcactgtgagacagggcagacatgtgcttacctgtctaatctgattcttatcatctatttttaacatattccaaagttcacataagaaaagaaatgtgtatattaaagattttaattaatgttaatctacttgcaaatgcactaataaaaatattattttgagtgg

SEQ ID NO: 374091 - DNA, 344 bp, Homo Sapiens
cactgtgtcgtggtgtagtcacaaaagagaatgctacacagcaatgacaacaaactgtaatgccgcacaacacaggtgaatcttgagaacataatgttggtaaaagaaaccagacacagaagagcacaggctggttgattccaaacaagactaatatgtgctgtaagaagtgggcacagggttcaccctggggggtgggtggttggtagtgactggaagggatacgaaggagcctctaagagggccagggattttctagttcttaatttgagtggaaattccatgagtatgttcagtttgtgacagttgagctgaacctatagatctgaccacgactcaggtac

SEQ ID NO: 374092 - DNA, 628 bp, Homo Sapiens
aaatgcactgctttattctggtctcagtattgtgtgcttaataaggaaatgagaaagggtggatcagggcataggatgaacaagttactgctagacctctcacaatgccactaatggataagattgtattttcatcattcttgtctcttcggaagctaacaccatgctataataggcactaaatagatgtctaaaaacaccttaagtatttgtctagaaatctggtgcattgttcagaaagaaccaaaattcaaaataatttcaaagggcctaaagcactagttaatcaaaattcattagtttttaatggtactaccactctcaaatttaaaatgtcatcttacgttcctcttcctcgcattggatttattgctaaaacctggtaaacacttttaatccttttcaattccattaccactgctcttgtcccagaattacttcgcagactaatagtcacctgacttctccccctgcatcccgatttgctgtctaattctggttacaaataagtaactgccaaactaatctttctaaaaagcaagactgatctcgtcactcctttgctcaacaatgtaaaagctcccattgtctcccaaataaaaccagctttccactgtgtatacaatac

SEQ ID NO: 374093 - DNA, 425 bp, Homo Sapiens
gctgcctctagaggatacacggctgatttagggctgaaacactgtggaggcagtggttgctggaggacatttctgtgagaagtcaaacctgttaaacaccattgaaatcatgttgggtagaaatgcagctgttatgaggaagtctttacctggagatgatatctcaattgggatcaaaagaattcttacaggaatatttatgaaagattgtgatggtgcttttagcgctaaattgtgcctcgggtgccaaagaaacatagacaactgtagaggcaatggatatggaaaacatttttcgtaaaatatgggagaatttgtagaaaagaaaaactcttgaaagtaagaaatgatggcaactcaccaaattaactcatgtatcatacttttatgtcttgagagtcttggagggtcgggtttaatgaaat

SEQ ID NO: 374094 - DNA, 217 bp, Homo Sapiens
actaccaacctggctcggtgcctgacccctggtaggtgcataataccctccccttaggtaatggcattagactttaaaataagtgtttggcccagctctgttaataattagccatttgactttgtgcctgagagtttccattgtgggaattttcaggatgcacttcatgtctgttttcccttaattaaaagcaaataatgaccatttgacctcaggt

SEQ ID NO: 374095 - DNA, 207 bp, Homo Sapiens
cggtaccgctcattcagtggtatggatgggagttcaggctcccaagttctcacaaaaataaaatggggatgtaaaaagaaagtcactgcccccaaatcaaagccctcacagatccctagacaacaagaatactaaaccatgcactagggactggctacagggagattcatgcaatcctccacactccccattttatttttgcgagct

SEQ ID NO: 374096 - DNA, 201 bp, Homo Sapiens
ctcataatgcacagggactaacagaagagagcgctggacgcccaagctgttgtttggaaaagtgtcttggtactactgttccccaagctgtccaggaaggtgggtgtgaaaagagttttccaggtacagaacagcccaagcaaggtgcaagtgtggtgttaccaaggcagaaaatgattggagctagaactgaagtgaggc

SEQ ID NO: 374097 - DNA, 257 bp, Homo Sapiens
aggcaaaggtcagattggtttaggcaaaaaagatcttcaaactattcttatgacagaccctaaactctaagttttgtaccacagaaataatttactaaagagagacgtcagctgggaggagccaacaaaatgctgagtaaatcagatatgacctcagaaacaaaatgaaaattactttgccttcatatgtaaaacagtgtatttttaataaaataccccatacatttcttggcagtgaatttcaaaactctaaactg

SEQ ID NO: 374098 - DNA, 358 bp, Homo Sapiens
aacctgggacatgtatgaactcctggtatcagctgcggctggtgtaatgggaacagctgctgctttgaagtgccttctcctaaaggacacacggctccagggcagagaccacattccctattcccaagtcttcctccaccactgatttgtgtcagagtgaaccctggggaactgctgctgaacaacagaaaaaaggaggctggttctaagatgagcacaactgaggaccaagccaaaggcagaaaacacctaatagcaggtgtcattgcctagaacagatgaaagttatcctgaaagggacatattaatatacagaagagaaaaaaaataaagctgaaatgagccgggaatccgctag

SEQ ID NO: 374099 - DNA, 221 bp, Homo Sapiens
ttgaagtctgcaggcttagaaagtaacaagcattcaggaaaggctaatcaaaaagaaagacccaaatccttactacttatcatttatttgaatgatatctgacagttattaacttgtctaggtagagatcaggataaactctcagagaacagaattaaccaaagcaactgactcaatgccacagaagtctgagaacagttccttaaccaaactgaaatgag

SEQ ID NO: 374100 - DNA, 181 bp, Homo Sapiens
agtggagtattggtcatatctgtgtgtcccagtacaagatcaatcagacatggaacctgttcttagagaccttgcagtactgctagataagacatgtatatatgtatatgtgttggaatgggtgggttgggcagagtaggagacttgagaaagtgatgactagggagctgaaatgagtcgg

SEQ ID NO: 374101 - DNA, 306 bp, Homo Sapiens
tggttaaacacaatcaagattaaatttataaaacgaaaacctccttttgtccatattgccactcccttctgagtgttcttcagaagcttaggaagcgagtgctgaaagcaaacttctcttctcttccagggaagaggggaacgtggggcctcttgacctacaaaactcagtattttggaacatccgtaattccaccaagtctgttgcagtcaaatagactccttttagcaaaccagccagccagggctggagagcaaggctttcatacctaggagttgacaaggacaggacccaagagctccttgg

SEQ ID NO: 374102 - DNA, 154 bp, Homo Sapiens
ctagcacagtgcctggattattcatgtgctcaaaatatattaggtacatgcataaatggacataactatctgataattatttcctaattatctacagtaattaggaaagccttctaacaagagaaagttcatgagaaatgaggggggatcatct

SEQ ID NO: 374103 - DNA, 467 bp, Homo Sapiens
aggtgggagcatacaattgcttatgctgacacctctttcagagctctcacccttattctcccaccttggtctgtcttattaaagggtgctgccctgccttccacttaatttgaaatttctttctaatagacatgtcttctacagagatcagttcaagctagtccaattgataaggttaggctttgtgtccctacccaaatctcatcttgaagtgtcatccccataatccccacgtgtcaagggagagaccaggtggaggtaattgaatcatgggcatggtttcccccatgctgttcttgatagtgagctctcacgagatctgatgactttttaagcggctcttcttctttcactcatcacttctccttcctgccgccttctgaagaaagtgccttgcttccccttcaacttcggccatgattgtgtttcctgaggtctccctagccatgctgagctgaaatgagcca

SEQ ID NO: 374104 - DNA, 414 bp, Homo Sapiens
cttcacctcttcatcatgtaaagcacttgggcctttctaaaagatgcgaatcactctttattattttgatgagctaacaagatgaattcatctctagaacactataaaaactaaattgtgaaaaatggcgccaaccatataacctgtccttgatcatacctattatttggtaactctgtggggaaactagaatcttttagaagtattatttgtgtcctaactatttaagtggatgatttaccctcctctaggaaacttaatattgagagtaggctgagaggtgatcatgttaatctgaaaatttttcataaattaaggaaattgagtttaatagttacagcaaattctccacatgcatcatgtttctgtactgagtgctgaactatacaataaacaaggaacgggtaccgagct

SEQ ID NO: 374105 - DNA, 310 bp, Homo Sapiens
atttcagttactggacccaaagtgacttctgcctgcattctcggggggcaggtccatctatagcagggcaaagagactggggcatcatccattctttcgtatattcacagatatgtatggaatgtcctgccccaggtgatgttctaggcgctagaaacacagcggtaattacaggcaaagcctctgctcttatgctgcttgcccatcagtgtgggagacagacaaggaacaaacaaataaaaagaacaaatacaccaagagacaactgtcactgtcacaggctcagttggaagaaaaatgcatttcactg

SEQ ID NO: 374106 - DNA, 335 bp, Homo Sapiens
tactcagagacaatggtggatgtgcatgcaagtccccactgagtcctacgatatagaaattcctttgatattacaaaatacaaaaatattttatcagaactctcatttacattgcatttacaatggacatgtaaataacttagtcttgggtcctggctaataaacaaattacttactgaaaaaagggtcctaaaagtaagagaaccagagaggataaaagcgagcaggaaacaatttaccatcttgagagatggcaactcaacacagaactgatgggaaggaagtgaccaagcctggcctcgatagagtctactgtgtttccaaactgaaatgag

SEQ ID NO: 374107 - DNA, 146 bp, Homo Sapiens
gtgctggtacttctatgccttctcaacaagttttcctatctccaggcactacccagtccaggcaggcttacacaccacttcctcccagattaatctttataaaatgtcagtttggggagtcactcatcatctcaaaaatcttctag

SEQ ID NO: 374108 - DNA, 504 bp, Homo Sapiens
gattacaaattaaagctcggtaacggcataatttcagttcctttgtctttagtctttcttggaagctctgatatgcattttttaaaaaacagcttagaaaatacttcacctatcatttctagatatttgtctcagtttattttagtctgcattaagctagaactgatacctttcatatactctcatgtctcttctaaacataatacccttcccttccattgcttgtttgcctggcaaaactccacctaactctaatggcccagctttactctcaagttttcctcccaccttgccaagaataatttagaatagttcttatcacattgcattttatttcccccttactggagtatgagcactttgaggatagaaaccagatcttgttcatctttgtgtctgtagctcctgctatagtgcctatcataaagtaggtacttaatgactatgttactgaactgaaaatattttcctgcaaatgtagggggatcctgctagagtcggacc

SEQ ID NO: 374109 - DNA, 381 bp, Homo Sapiens
  misc_feature (93)..(131): n is a, c, g, or t
cgcggtacccctctaatttcagttctcaacccagtacagggactgttacatagcatcttccatttggtgaacgttaagctccaactcccattnnnnnnnnnnnnnnnnnnnnnnnnnnnnnnnnnnnnnnnaggtgagaccccgtgtccaaaaaacaacagagatagagtgaacatgggtgaaagtccttcagcaactgggaaggtaaactttagagaagcatctgctgctgtttgttgagactctaatccatgggcattcactgaaaggcagagatgtatttatggcggctttcatgcattagcacaatgggagttggagcttaacgttcaccaaatggaagatgctatgtaacagtccctgtactgggttgaggggatg

SEQ ID NO: 374110 - DNA, 477 bp, Homo Sapiens
agcttagtcattcagaggaagcaaatcctcatctcagaaaaaaattccccgagaaaagaaaaccagccatttgcaaactaaaagataaaaactatgtacaaggtattctcagcagaaacacatatgcacacacatacttacatagtaataataaaaaatcagtgtccaggctctatgggatgaattaaataaggtagtaagaaaatttattttgctttgcttcctacactgaatgaaatagctgcaattattcctcaacctctttctttgccttctgctatgtgtcctggtagtaattcccatcaggtggttgaacctgagatcactttgtgacttgctttaacagaaaatgtggtggaaaccatgctgtgtcagttctaacaacaggcctcaagaactcttgcatgtttctacattctctcttgaaaccaaacccctacatgtgcataagcctgaaaaggcctgctgggaagtaaa

SEQ ID NO: 374111 - DNA, 463 bp, Homo Sapiens
taaaaggacgatcagagatcctcagagcgtgcatatagttcttgccagcaggaaaaacatggggaagtgagactatgcatgcctcagagcggatgactggagagaaagctgcggcgagggaaagtctatattagtattcaaggccacagaaaccagactcttttacaaattaccgtgtaattaaacagaaggcacatgagatgtattttaagcacatcccctttcctattcttagtattccactcaacgtccaaacccttattaatatctctggccaaaaccacaacttaaaaactgcaaactcattgtactatcaaggaatattttctaattgtgccttaaaaccaactgtccgacaagctgagttcccatcatgaataatggtatacagaggctgactcagcggtaaagggtggagaaaacgcagaaagagggggaaagccgtaggtaagacaagacatga

SEQ ID NO: 374112 - DNA, 631 bp, Homo Sapiens
ctcatttcagtttgtaatcagttctgtgaaggaaacaaataggcagaaatgatgaattgttgtgagtggcaatattgggaggctgctcttgagacctggctgacatccagaagaagaaagtattgttcaggaggtggggtggaatgtcaagaatgtaatgccatgagatgggaactgagtcttaacgaagaaagagattaggctggtatggccgaagtgaagtagctgataaggggtaaagagaaatgaaataagattggagaaatgagagccagatacagcgctgtaagctgcaggttgttatttcattctcagttcagtgagaaggtactgaaagatttttatttggttggtcatttagactgggggaatagtaatagtaaccagtttacgttttttacacaccatttgctgttgctgtggagagtaatctttagaaaggtaagcataaatgcagttgaccagtcaaggggctactatagtagcccaggagaaaggtgatggtggcttgatttgggtgggagctgtagaaatggagaggaattcaatatattgggggtaaattttggagagagtacttagaagacttggtgatagatctgaaatgagccgtggatactctagagcggga

SEQ ID NO: 374113 - DNA, 332 bp, Homo Sapiens
aataaagaaacaccacagattagtgtactatatgactattgttaaaagaaaaaccttagccaaattaagtttgaaaaattaagtggttatattaagacaaacatgaaaatccagtatgctgtatgtaactgatacagctggaggaaatgagaaagcttttacattacaagacctagccaggagataattataaagtccagcaggaagtaaaaaacgtaacacaattaactgcaaattttcttaagttaaatgggatatcttatccatgaaatggaagtttcagtatcttaatttcttggagctgaaatgagccggaaatcctctggggtcgg

SEQ ID NO: 374114 - DNA, 396 bp, Homo Sapiens
gctcggtacccggctcatttcagtttggagggtcatcaaagaccttttgcagtaagtgacatttgatttgagatttaaatgataaaaaagaagtcagcctctgggggcagagagttccagacagaaggaaatgaataagcgaaatagacagatttgacagaacttgttgactgatcagatgtgggagtaagaaataggcctaagatgattcataggatctaaaaaatgttatttctattaactgagcttggagatactgaaaaaagtacagatagtgatgtaaatgatgaattcaatactgaaactcttgactttaaggcacctctcatgcattgaaatacatggatgataactcacctctaaaatatactttctttcattctcatgcataagtgg

SEQ ID NO: 374115 - DNA, 122 bp, Homo Sapiens
aaaaggctgatttgagatcctgaatgtatgccataaagcagttcttgaacaacacatttgaacaattcttgaggattagaaaatgaggtctgttaaccaggtcagaattttaagaaaacaaa

SEQ ID NO: 374116 - DNA, 306 bp, Homo Sapiens
ttagccctgtgtcaagcacaatgcttccttttctttgatctgaaataaccacacatttgaataaagcatcattagtctatctaaagctaataaacctatttatatgaacatccagcatcctcagaaatttatgaatgctaggatgaataaaacataggaattacagatataaaataaagtttactactcacatattccccaaggtgaagggctcagattctacctaaggtgacacaagtcaagatgggggtggtgttgatggtttagagtttttatcatagttaagagggttggatctgaaatgag

SEQ ID NO: 374117 - DNA, 449 bp, Homo Sapiens
ctcatttcagatctctacatcaagtctcacctatcacttcaaaggggtaaaaatactcttctgctcaaactgtattcagtctctcgtgtcaatggaaaatggtgggttacagatagaaaattctaaagaagagctcacatttcaaaagtaatacctaactgtactcagtaattacatgttatttcaaacatatgcccctacaattaggcttgaatttgaatctaagattcataacttccggctaagatgaccatttagtaaactgcctaccaattttagtttacttatctagtaagcaccatagtatttatgagctatataagagtgcaatgaaaactacatttttgtaaaacaccatacatagcgctcagtatgctcttccctcctgccatttcttatattgcttgagtaatacctctaaataactcgaggaactgataatagccgtt

SEQ ID NO: 374118 - DNA, 428 bp, Homo Sapiens
ctaatgagataatactgctgcagggcttgccaaattgtataaaaagttaatcccttccaaagtttttccttggctctgatttcatgagcagctgtaaatgtctttcttacaaagctctcttcacttcctgagtgtgttatctctttgacaaatttcagtgaactctttttcctgtctttacaattctagaaaaatgtgtagatgattaattaggaggtatctgtcagcacatccctctgaaaccattctgagcttcagctcaagcttcgtgttgcttgaaaaatgaaatgtacagctgatctgagtttgttagaaaaagagacataaattaatcttgaagaaaatacatgacaggaaagaataatgctatgagcagaagtcaatgaaatagaaaacaaaatagagaacattaatgactctccggtcgg

SEQ ID NO: 374119 - DNA, 403 bp, Homo Sapiens
gccaacaagagtggaaactctgtcctcaaagaaaaaacaacaacaacaaaactgtgattctcccatctaactttttacaattatcctttcacaattcaagaaagtgtgaatgcaagtcattactaacagtatctcagtaaaagtagtccaaggagcaaatattttctttttaactgggttcccagctagttccattcccttgaattcagtggcaaagtcactgtcaataaaaggtttttactcttcttcctttttgaattgtaacttgcttactgaattcaggaattgggtgatcaaaagataactgcttattatagtaagataaccttggaacagaactgtgattaaaaacctgaataataaaaaacacacaagacccattaaaacctattcctcacttttt

SEQ ID NO: 374120 - DNA, 450 bp, Homo Sapiens
  misc_feature (27)..(27): n is a, c, g, or t
  misc_feature (32)..(32): n is a, c, g, or t
  misc_feature (68)..(68): n is a, c, g, or t
ctggcctggccaagggccaacgggccnaggantggttggggtgactttcacctcctagtcactgtccncagggacaggagtactcccacagaggataaattttcaacctccggggcccacaatagcgagatttgtaagactcccagggcctcccagccgtgaataatctgatggttcctgaaatgactggggaagcagacgcttcgtatggcagttgaagagtgtgtgtctatgtgcatttaaaaccttctttctgtacttacacattcacacgggaagacaggctcattcttgtgcacacttgagagttttacaactgatgaaaattaatttaagaatcagatggagcaacttgacgccagtgggctcaggagcccggggagaaaaatacatcactaatggccagttttccatatggtctgcacgggtaaagaaagtctgcaaaaaaaa

SEQ ID NO: 374121 - DNA, 327 bp, Homo Sapiens
tgtgaaagtacaatagaacacaaacatatactaaaggtattgttttctgcatttatgcatgaacaataagattttaaaaatttttgacttatctgtggaaatatgatagagacaattgtatggtatggtttacgtattattcatttctgcacttagatgaggtaattttttcttttctagataaactctaattccactttttccatacagtacacacatatacatgcaccactatatgtttctgttaaacaagagtagtgagaaaataacaaatgacttacctgtcttcctgaaaagtgtcttgtctgttaatgtcatattatccct

SEQ ID NO: 374122 - DNA, 574 bp, Homo Sapiens
  misc_feature (30)..(30): n is a, c, g, or t
  misc_feature (71)..(71): n is a, c, g, or t
  misc_feature (87)..(87): n is a, c, g, or t
ccagaactgtggaaaatggtaccataagcnattctcccaaataatccataaccccaagaataacttccccngcattccatgggatanggctgtcccaagtaacagcatcttggaacttcccttttgtgtttccatacacaaagtccacaaagaccccttaaagtagcccacactttttggtaaaaaggtagttccgtgaaaaggtttttccttcccaatggattaacttctcccaagaactttaaaaaactgaggacacaaccccagtttttcagcacagttatcaggattttcagtttgccctacagcagtgtaccactgttgtactttctgccttcagcgctgcttcccaggtcctataaggcaaagtaggtcttcgatgtaaggtaggtctgcgatggggaggacttaatagagaagtcattattttcgatagaaaagcattacactgaggcatcagaagacaacggttccaattcgtaaaagactatttctggcaaatttagaatttgctgagctaaacaaaggaaatgcccaatagctggaatttcccacatggtctccatacaagttg

SEQ ID NO: 374123 - DNA, 450 bp, Homo Sapiens
  misc_feature (11)..(11): n is a, c, g, or t
  misc_feature (24)..(24): n is a, c, g, or t
aaattgaggcnaaaagttgaaaanagcatctgtctggtgaaggtgatgggaacaagtgtgccatggggcacccaggagttcctccatccccacctgccttagcgatcaggactttaggggggcctcttcaaagatagtgacccttctgccctgactcctgcccatctaaggacttgatttgctgctttctgaaaaccctggggctgaaaacttcaaaatcagggcctggcagagcctagcttcgccaaggtcagcccaccaggagccctgccttcgtctccataggaaggacacatgtacagcccttgcccccggccctctcattcccacttctgcttggcaatgctctccatctcccttatgtggactcttgttcttgtctgatctcttgtcaaattgttattttgtaatgaatgcgtatccttattaaagaaatgagctgaaaaaaaa

SEQ ID NO: 374124 - DNA, 370 bp, Homo Sapiens
cttaaaaaaaagtaacactatagatttgtttttgttagatgatttgctctatagtagaatatttaagtagactgtgaaatatttattaatatagatgtgaatatcaaaaaatgtttctaaggtattatgatgcatcaactagttcttccatgtaaaataattttagtgcaatatgaagacgtagaaatgtaaaatatgatttgaattgttatcctttatattaagaaaatgttttaaaatgtaagaattccatttattctgtttagagtcctttttatgatttattataagcgtgtcataaatgggaagggaatatttaaagttctgtgttcagaaagagtaatttgtagagctcaaatgagccggggat

SEQ ID NO: 374125 - DNA, 804 bp, Homo Sapiens
ctcatttcagttcatagatcacttagaagagtgttaattcattcttggaatggcaaatgtcctgtcttaagtgactgatggaaaaacaaaatgccatgccaaattcatcagaaaatgtataattgagctataaatacattgtgttcttaactagcatgacatgccaaaaatgacagcttactttggaaaattgcaaaatccaacacatggggtactgaccattttcacttcattacatttgaaagcccatctgttggcaattacgtgtcaacatgggcttctcaaatccatgcaatctaaattacttttagttttaaatgtgaacacatggcaggttttaaaagaattatttcatgccaccagtaaggggagcacagaaatgtgtaacagttctattaatcagctcaagcttagtaatatttctacatcaaaagtagtagagcaaataggctgtctccattgtgtactttggctaacaaccagtattgagatcaccaaataatttaaatacaggaaacggtgatgctttccatcttctttagaaagccaccagtctggttagcccaaatgccacacacaaatggtccttaagttcctggctgttgagtttctccaggactacagagtcagcctcacaggggcctgaagtccaaccaggctccctgagcttgaatctgttccgtgctcccttcttactgatacaacctcgaccagttacttaattctctgtggcacccagtttagtcctcaaacttgtggagattaaacaagattattctcggatcacacaggtcaagcagggct

SEQ ID NO: 374126 - DNA, 497 bp, Homo Sapiens
actctagaggatacacggatcatttgagttcaaagtttgaacgtgaatgtagcaagcataattttattaatgaaaatattctttagacaactgttaatattgacggaagaagagaaacagagacacggaagctaaagagttgggaatcctaaaggtcaaaggatgtttctcagttactctgatgtcgtgtgttttctttcagttggtacaaaatcgtgagtagtttaattatatcctgcagccaaaatgagtggctgtggagggaggtgccgcctgtgacagggccatcttgggtgctggtaaacttgcacctagtcccttttcttccttgcgagataaagttgaggtggtgctgggattatgagttcagagtttaaagacccatcctaaaaatattgttggaaaaactttatgtctcaaaatccatgtattcccattttgttgatgaaaagctagaggtaactcattttgccttaagtactcgcagcatatttaga

SEQ ID NO: 374127 - DNA, 277 bp, Homo Sapiens
ttagggagctccttgtctggcaggcagaaagaaaaacaaatagcagctatatagtgtgatgagtactgtaacaacggttaacatacttcctaccaccctggcataaaggatgacttcagtgggtgaagggctttaaggaaaggaattgctacagctggatatcaaatgatgaggtggaccttgcctgacaaactacagaacaggtgaacggtatataacaaaaatatgtatggaattagcccaattttgtgcagaagaaatttaatgtaactgagtg

SEQ ID NO: 374128 - DNA, 370 bp, Homo Sapiens
cccggctcatcttagttcaataaatgtttgtagaatgagaaatttaacaccttattagtaagtctaaaaatataaattgcttttctgatatttgttctgaatttgctcaacttagaggagtttagactgtggcagtaacattatttgtagctacttctatagttgactgtgacggccttgggagagcagtttatgccacattaacaagggtaaacacaggtcatgaatcattgcatgggaagatggtggctatactgaacatagatacgtactcaggtgactttcatattcccacacacaagatagcatatcctaggggttaaaaccgcagccttgacatcatgttcccttgattcgaattatgtctcca

SEQ ID NO: 374129 - DNA, 566 bp, Homo Sapiens
agcgtgattctcatcaactcctctgaactccagtggtgtgtcatttattcaacgttaaatcaggtcctgctaccctgttttcctttctatgtgcactcacttcatctcaacagtgtgcacatagagttttggacggcgggcttcatgactggttcatcttgcggtctctagaacccagcatagtgcctgggttgatactccaaacatgtttattggttgggttctctcttaccttaaggtggctccaagcccaggaacgaggagggtcaagagccaagctggactcaacagaagccaggagcagggacccaaaaacagagggaggagggtctacaaaagagaaaatggaatgtcccccagtgcctcaagctggcatgggaaccattccaggagtcaaaggctgtctctgacagtttctgctgaaaaatccccagagctgtgggggctcttgcctgcaaggatcatgctttctgtgggacttacagccaaccagctccctaggaacagtttgagggggatttgctgattcatcacgttttaatccctctgggaagatctgaaatgag

SEQ ID NO: 374130 - DNA, 359 bp, Homo Sapiens
attggagctcactggtaatttatggtctacctacatgtatataggagtgtactgggtacttgaaggaagccattaatttttactgtgacctgttttttaaaaagaggaaaaatgttttcagaatttctaacagaccacttaccctaaacctaatttcctggaaaacaccattattatgggggctgacttgaggttttccttcactgaaactggttatggcaactttccaattcagttttttaaaagtttgtcgatatatgttgaatgtaagttctttagtatttttttcttaaacatttgatgcttccttctccttgactactgagtgataacaagaaatgaaattgatctgaaatgag

SEQ ID NO: 374131 - DNA, 429 bp, Homo Sapiens
  misc_feature (281)..(342): n is a, c, g, or t
atggctgagttgggctctggtggggagatcatgggaggtagtttccatagaactcatcactgcttgctctccttcccaacctaacttcacatgagatcttgaaagcagggaactttctctctgagtcagacctgtcgagcagaagaagttagagagatttgagtgatagaggaactcaatgtactgttgtcagagggagtaatatagaaagcatgagaaaaaaccagaagcctccaggagcaaagcccagctcccagctgacaacctcaagaaaatgaggnnnnnnnnnnnnnnnnnnnnnnnnnnnnnnnnnnnnnnnnnnnnnnnnnnnnnnnnnnnnnnttctttcccaggacctccaggaaggaatgcagccccgcccgcaccgtgatttcagcatcctgaaacccttactggaggagctggtgg

SEQ ID NO: 374132 - DNA, 144 bp, Homo Sapiens
caagctgattcttgagtatagacgactcatttcagatcgagaacgaactgatacagcatccatcataaaaatgtattaatgaacatgatgacaactcttgaaacaaatgaaagctcaaaacaatataaagaagaaacaaatggc

SEQ ID NO: 374133 - DNA, 247 bp, Homo Sapiens
attaggaggtagagtcaaattcatttacttgataagcatatatgaaagaactatactatttgcttagaaactatgctaagtgggataacacaaagatgagcaacacaatctctgtccttgagcaatacatactacagtaagagttatttaagtagataaatagcaatacaataacaacatatagcttctactttgtacaacgcattattgtaagcactttccatgttacattaataattcataaacc

SEQ ID NO: 374134 - DNA, 301 bp, Homo Sapiens
cagaggattcacggctcatttcacatcacgggagaatgaggtgtgactgctgtcacacacttacatttcagtgcctctctgggcctgataattaaaatgggtttgcactcctcacattaaaagtttttatttctcactatgaaataaggagggaagttcattttaaaaggagtggcagaataaggagaattggagaaccagtacagaagattcaaaacccagatagtagaagtcccagaaaggaatacaaaaggaaagaaattgccccaaaaaattttcaagaaaatttccaagaactgaa

SEQ ID NO: 374135 - DNA, 714 bp, Homo Sapiens
  misc_feature (626)..(626): n is a, c, g, or t
  misc_feature (648)..(648): n is a, c, g, or t
cagattacccaagccagagctttcagcacagcacctcacatgtggtatttatgaaacggtagtcatattgttgttacacatattattggtgctactaactgtttttaccgtggtagtgccacctagtgtatttacgttttacagggaggcttctacagagcacaactgcatgaggacaaagagtcgagacccgctggccatctactttaccagcggaaccaccggggcccccaagatggtcgagcactcccagagcagctacggactgggttttgtggccagcggaagacggtgggtggccttgaccgaatcggacatcttctggaacacgactgacactggctgggtgaaggcagcctggactctcttctctgcctggcctaatggatcttgcatttttgtgcatgagctgccccgagttgatgccaaagttatcctgaatactctctccaaattcccgataaccaccctctgctgtgtcccaaccatctttcggctgcttgtgcaggaggatctgaccaggtaccagtttcagagcctgaggcactgtctgaccggaggagaggccctcaaccctgacgtgagggagaagtggaaacaccagactggtgtggagctgtacgaangctatggccagtctgaaacggntgtcatctgtgccaatccaaaaggcatgaaaatcaagtctggatccatgggggaaggcgtccccac

SEQ ID NO: 374136 - DNA, 427 bp, Homo Sapiens
  misc_feature (98)..(115): n is a, c, g, or t
  misc_feature (134)..(190): n is a, c, g, or t
attgcccagatggtctcgaacgcctgggctcaggcatctgcccacctcggcatcccaaagtgatgggattataggcctgagtccaaccataagtaagnnnnnnnnnnnnnnnnnngagtcaatctctctgtccnnnnnnnnnnnnnnnnnnnnnnnnnnnnnnnnnnnnnnnnnnnnnnnnnnnnnnnnngagccaccatgccggtcaattaacttttttgtttcagtaatcactttaaatgtaaataatctgaccaatggaaagatcggcagaatggattttttttaaatgatgtaatacacaatccaaatatgcaacttacaaaatactcactgtagacccaagacacaaattgtttcaaaatgaaaagacggaaagagataatccatgcaaatagtaaccaaaagagaggtgggaggagaggaa

SEQ ID NO: 374137 - DNA, 377 bp, Homo Sapiens
tacccgccgttgtcagtggtggtgtgcagagaaaagcaaagtggtcttctgtgtaaagtgagcgcgggaaatgaaaatgcttgtctgacaacaaagcatttaactgcccttggaaaactagaaccaaagctggttcctttggtgattgcatttaggtactgggcaaagctttgcagtatagatcgccctgaagaaggaggtctgccaccttatgtgtttgccctgatggccattttctttcttcagcagaggaaagaaccccttttgcctgtatatctaggatcatggattgaaggattctcattaagcaaactagggaatttcaaccttcaagacattgaaaaagatgttgtgatctgggaacacactgacaacgg

SEQ ID NO: 374138 - DNA, 427 bp, Homo Sapiens
tgtcagtgagtagtcaagggtgggccctggaactcatagccagggtcattgtctgttccagcctgattgttgccatagccttcacctggccctccctggccccatttctttctgccttgcaccgttcaccacaccactgctgccctgggccagcttttcagaaacagatggggcctgagaccccaggacaaaggccaggcttcttaccctggccttcagggccttcccatcagggttctctacttggaaactatacaataatttcccccatagagctctcccgtgtccctccttcctttgagccctgccccacacaaatccacatgctggttctgttggctctgccttcacaatctgtctcagctcccaaaccttcttaccatccagccatcccacagctattccccaagtctggccatcactgaca

SEQ ID NO: 374139 - DNA, 357 bp, Homo Sapiens
tcagtgaaggggcaagggtggagaagccttctggggttatgcatttggagatgagaagctcagacaaaatgctccatgttaaataaaaacaagaccccgtaatcattacagtgagggacaatctacacttctttaactctttgctgtggagattctagaaagttctttgcaagtatccaaatatcatctcatgtgccgcctggggaaattttccaagatgtccaacactcgcactccggctcttaccaccagtgagcaaaattaaagactgcctttgttgggccaggttttcctacctgttgcatgggtgcccatggacattaaaaagaagttgagacgatgatgcactgacaacgg

SEQ ID NO: 374140 - DNA, 161 bp, Homo Sapiens
agttgtcagtgtgaaagaacatgtccagttggtatggcagtagaagttgaatataggtcataaggtagcattatgctagggatgttatgagtagaagccatgaataagcagaggccaacaggagatatgcaaaaagtgatactttttgcagagtaccgagc

SEQ ID NO: 374141 - DNA, 204 bp, Homo Sapiens
gactctacaggatcccctcgttgtcagtgaggccgtcgtcagtgtttcaagatgggtggctgtttctgtagagcagccattggctggggtcccggggctgcccctgtggcagggcacatggtccccgagggccacagatgccctgcactttgtcacctcacatccaacttacttcacctccaaagaaagcacacactgacaacg

SEQ ID NO: 374142 - DNA, 157 bp, Homo Sapiens
ccgttgtcagtggttgaggtgacttgaaaatatcccctatcgatggttcaggcaggatagcccctgagttcctaaggcagagattcttaaatttggtctgtgtaatcttccctctcctcatcatggagtttttccggcaagcacttgatgtttctgg

SEQ ID NO: 374143 - DNA, 311 bp, Homo Sapiens
ttgtcagtgacgaagttctagggcctcagccactcatatcgccagagtagcacatgctagggcgtaggatagtggctcggaagggccaagccccgcgcatcgtgcgtacgaagatctgtgtcttcttggactagatggtgaagcccagtagctgggtttcggaggagagaggacttgtcccggcgctgcgagtcgatgtgggtgccctgccttcccacaggctgtttctggggcagcggcgcactgaccttcgacaggcggtcgtcggccaggtcacagccactgacaacggggaccgtgctcgatttcgt

SEQ ID NO: 374144 - DNA, 529 bp, Homo Sapiens
cgttgtcagtggtggtgagcgggagcggattcgacagcgcatgaagatggtcatcgggcagcttgagggcatccttcgcgagctcaaggaggtggccaaggagctgagggaggtggtgagccagatcgataagctaacctcggacttcgactttgaactggagccggacgactggaccacggccactgtgagcagcacctctagcactgacaaggcgggcatgggtggcccctttgacctgggccacctggacttcatgacagccgatatcctctcagacagctgggagttctgctccttcctggacgtctctaccccctcggactccgtggatggtcccgagtcgactcggccaggggctggccctgactaccgcctcatgaatggtggcacgcccatccccaatgggccacgagtggagaccccagactcctccagtgaggaggcctttggtgctggccccacggtgaagagccagctgacccagcggaccccagggtatagggctcctgggtgtacagagctcgaa

SEQ ID NO: 374145 - DNA, 393 bp, Homo Sapiens
ccgttgtcagtgagacaggcggagggatgtggggaccccgggtggcctgctgggcatccaccatgtggcccactctgtgctgagggggccctaatgctcctgctcatctgtgactccggcctgaggaccctcctctgctctgcccaggcctccagccctcagggagctgcggtccagatggagcctcacgtccttcctggcgttttgtcctgtcctgtgatgctgctgagccaaggtggttcctttccttgaacagttgagatataatttacatgccactaaatctgcctgttctaggcatgaaatgaagtagatttcagtatatttacaaacgtgcagtgattcagcacaatacgttcagaacagagaaacctatgcactgacagggtaccg

SEQ ID NO: 374146 - DNA, 566 bp, Homo Sapiens
  misc_feature (464)..(483): n is a, c, g, or t
tctagctgaatcttgagggtccaattggattctaacccccaatagcctgaggaatctaaaatttgggatcaaattattaaattagtcccaccttcttagcattgacaaataccaaacaattcactgactgtgggtttaagaataatatgtggaaaggtctaatatcaattgtgggcagagctctcacggttcaaatatttcagaaagacagtgtatgagcgtgtgagtgtgatgagtgtgtgagcaccatgcaagaaatgtttatacctttcagtaaaaaggcaattccgcaataaggttattaccaagtaactaaaatttatacagcatattgaaatcaaaggtactctataaatttaaaatactaatatggtattaacttaaagcaaagaacaataattttaaaacatcttacagcccaagtgtattgtaaaccaaatataaattcactgtgggatctgtcnnnnnnnnnnnnnnnnnnnncctctattagggaacccaggtctaaatgaactgttaaacacttagtctaaaggtatgccaaacatttcttaaggtcttaacaa

SEQ ID NO: 374147 - DNA, 134 bp, Homo Sapiens
tgtcagtgaacatttgaaaactggggaaccacaaaacccccccacctcagggctgttctcaggctcgcccaactcatgaaggccaagctgttgccccagaggcctcttgcagaccttatcaaagccagggtccc

SEQ ID NO: 374148 - DNA, 178 bp, Homo Sapiens
cgttgtcagtgttattagggaaggtaaatgaggttaatggagattaattaatgcaaactgggtagaatcatagaaagcgttcaacaactgttagttatcaatcccatttataccagacactctggccctttttaacttcctgacaggtattatagaaaaagtgcatttgatacaaaaa

SEQ ID NO: 374149 - DNA, 115 bp, Homo Sapiens
ccgttgtcagtggtggatcagcctgagtcccaaaacctcaaaagtagggaagccaacagttcagccttcagtctgtggccaaaggcctgagagcccccgacaaaccaatggtgta

SEQ ID NO: 374150 - DNA, 389 bp, Homo Sapiens
ggatcgcttaagacttgacagcgagtctccactctgagctgagccctttcacacgtgagacttgtaggggagcagcttcttcacaaaaccatctttggcctggggaaagaactgtgctcaagggcagtgctactgctgtgctaactcactgggcagggggaggagagaacagagaagtgcatggtctcaccagctggctgctcaagcagcccaggaccctgctggggcgagcattccttttagaaaagaaaacccatcagcaggtatgaagccctcagggtctggtatcaaaggtgggtggattgcaccttggcctcttatgtcattaggaaaggggtttcataaggtcccagagcccaggacaaatccatggacaaataatggtagca

SEQ ID NO: 374151 - DNA, 360 bp, Homo Sapiens
actgctaactcaggggctaactgctgagactgtctctgactggaaggtgatgcctgctgctactgaggcagttgtgactgtggctgctgctgtggtggctgtggtgggggtgacacatgctgcatgagttgaggaggcatctgctgaagtggcctctgttcaactggttgagaaggataacctggtggccggtttgaaaattctggcagtttagggcctgagttatccaagttaattccttgttctacaggcaacggtggctgatcagcctcttccagaccagctgggcgagtatctggggtgtttagatcttgctgactatttttcttcttccgaggagcacacggggatactctagag

SEQ ID NO: 374152 - DNA, 474 bp, Homo Sapiens
cgctctagagtatccccagtcgcgtgtgcttcttcaaaaaatacaaatctttagatctaaccccaatagagaaaaccaaagctgaactgctttggctcaagtaggaggctgtgactctctgtcaccctcctctaagggtgaaccctattgaaagagcagagattttagctctgtgccctttcccagctcttatttttattttcccacagaagaggctagattctttaaggagatataaagaagggagagggaaagatataaagattctttaaggagatacaaagacatcctctcatcagctggaaatgccagctaggtgagacctgactatgcatatgcattgtttgcccttagtaattccatagcaatctgcaaattcaatcagcttcatcagcagaaaactttgatagaaaccatgtgtaaaagggctgtgttcttaaagtggaacatttaaatcgaagtttttcaagcaca

SEQ ID NO: 374153 - DNA, 170 bp, Homo Sapiens
gatccccgcccaatggcagccgaatgatctaacatgcctgaaaccagcagattccaaaatataaaatgtattcatatcctttgtaaaggaacagcatttacatatataatgaagaatgggtctacgatctctcaaatccacacccgctttaaaattgcagaattacaggg

SEQ ID NO: 374154 - DNA, 463 bp, Homo Sapiens
ccatgcgagctcggcacccgcacaatggcagccggcccaatggcagccgaaatgtccattttgtacctcaggagcacatgggaaagatgcagaccattggccatcagaggctttagactaaggagttttcaaagagctcaggctgccttgtagaagcaaaatacaaggtaataatagagtcaagataacaggaagtaaaagaactctgcaaagcacagttagtaccactctgaaaatcactgtttcctgtttgctaacaaatctcattctcctgaaggaccctggtcaatgtgaacaggtcccatttgccagtggctgtaggtcaatttgctgaatgccagttgtttccattttacatgtgtagtccctgccagtcccaccccttctcttcctgtccctctaagtttcttcagttgtttccaatctctcttgttttttttcctttgccgggttggatttccgg

SEQ ID NO: 374155 - DNA, 542 bp, Homo Sapiens
cccaatggcagccgaagttaatggtgactcaaatgaatcagcaggcatgttcacttgggcaccgctgtcaagaagtaacctagctacttcaacatggccatccatgcaagcctccatcagagcagtgtgcatttcatctgttttatgctcttgatccgcgcctgcttccaaaagaaatcgcaccatctctaagtgtcctttgtaacaagctaaggtaagggcactctctttaaattcattagaatgcgtattaatgccagccccattttctagcagcaatctggctacttccacatgtccagcacttccagcttccataagaggggtatgaccattttcattatggtcctcaatactagcaccggattccaagagcacctttacaaaatctacatagcctccagcacaagcatatgtaagtgctgtattgcctgttgaagactgtgcattaaatctgcttatgagctagcagcaacttcacaattatacatgtcctccattagcagcagccattaaaggagggaagagtcagcattgtggcc

SEQ ID NO: 374156 - DNA, 345 bp, Homo Sapiens
agcacttagatatataagtaaatgatgaaacagttcttcctataaaagtttttcaaaattggcaaagcttaatctttttgttccctgtattattttgtagtaaaacatttagaaggagaaactggggtgattataaaataccctttctgttatgactacatactaaaattttgcagtttaagagaagcatgataggcaggaagtataactaaattttatgctagatgattttcagaatgatactttattgtcttttcattttttgaggactttgttttttctgcatacacttctacagtagaacttactttattttataatttcagacaggccacagccggccag

SEQ ID NO: 374157 - DNA, 413 bp, Homo Sapiens
  misc_feature (48)..(48): n is a, c, g, or t
gtgtgtaagcgtgtgagtgttcacatgcagtgagaaccccaagcccangaagacaagtcagagcctgttcaggtttaggagacataccttgggttccaaattcctgtaaacctcactttacttgtctgtaaaatggggattcagtgaggtaatatatgttaaaaagtgcttggcatatagtaagagctcagtaacaacttaggtataattatttttactgctgtcaccataaatattaaaaagagatactaaaaaaattttaatgggcaaaggatttgaatattttcccaaagaagatataaaacagccaataagcacgtgaaaagatgctcaacatcactagtcattagggacgtgcaaatcaaaactactgtgagataccactttacactcattaggacagctattattta

SEQ ID NO: 374158 - DNA, 680 bp, Homo Sapiens
agagaacatgaaattatccagccctcagctctgcagcaggattctgaggagtaaagcaggcctgtaaagtactctaaagtacttcagagaggtaatgccacaaagcgaagaacacctcttggaggcagagcccatcagccctatccaggccagcagtgtccacttgaaatcttgaaagcagcctccctcaccaaaccagcaagatggaaaacctccctgggttggcaagtggccctgggaagtacatgccccatctctgtcaggatagcagtggagaggtttcgtgccagtgccagctccacccacccagatggtactcaagactccaagcctgtcaatggggtggaaactttctggcattttctgtcagaagggtgagttagcactgaaccatctcatgtgtcttttcactgagtaacagcccatatccattccatgaaatgagtgactgctttgttgaatcagatagtaacaaacatttatttgtagtctggttgtgtcatatcatggttgaattgcaaacaggttggatagaagagtcagcaaaaatcaacaaaagcattctgtaaaaaacttttctagaattacaataaatggcattgtatattttatttataaattatgtgctgcacatcatttttatcaatgaaatttataataaatttctgtacatatataaa

SEQ ID NO: 374159 - DNA, 319 bp, Homo Sapiens
gcagccctgggtggttcctctctcagccacccatagctcggtcccttgctccagctgggagatgacttcaggcttcggaagctcaggacctatggagagcaggtggccaaaggtctccagcatcacgtcacggtagaggatcctctgggtagggtccagctgcccccattcctcctgggtaaagtccacagccacatcccggaaggtcactggattcctgaaacatcacacacattctcaatcagctggactatctccatcagtgctttctggcagaggaagaatggaaaaggagaaaacaggcaggcctgtgtcacga

SEQ ID NO: 374160 - DNA, 323 bp, Homo Sapiens
cagactctagagagccccccgatacgagtgcgcggaatgtcagaaactgacaactagttcaggcctcaacgcagtaggaaaaggatgaaaaagaaactcattttaaatcaactaaacaagtgcaaaagccatacatatagaggagaggagatacgaatggcatcacaacataattcctttgccatcgaaaacttccatgcctttgaggttttaaatgaagacttccaaaactgatttacttaagactctacgtaaaacgcctgatctttaaacgcaagaaaagcaagatgaatgtattactttcctggaaaataaaaaggcat

SEQ ID NO: 374161 - DNA, 498 bp, Homo Sapiens
  misc_feature (26)..(26): n is a, c, g, or t
  misc_feature (90)..(90): n is a, c, g, or t
  misc_feature (130)..(130): n is a, c, g, or t
tgttcttgtgatgtagcaacttatgngaccgtatggtcaccataataagcctcagcatttgcactgtaattgagctcagtcaaacaaagntatcttcagtgcggaatttcccctctacaaagcttggacngttttgattttacctgttctcagactgacgctttgctcattataatagtaaaaaaaccacacccatgggtggagacttaagatgctaatgagacatgcaacatatgaacaagcatgtacagctactgtgcatgtgcacacagaagaccacccagaacatgcttactagcaacacctcttcccaccaccttatgaataatcatgtaagactcccataaagggagtctccctactgccagtctctgccatctcacccttatgagcagcctgccttgaaccctctctctcacagtatacagtccattctgcatgtaaatttcaaaatattcttcttcctttgcaataaattactctaccgcaaacagtata

SEQ ID NO: 374162 - DNA, 408 bp, Homo Sapiens
  misc_feature (16)..(16): n is a, c, g, or t
tgtgggtagcagcaancagcataggggttaggagatctacagaccagtcacgacctggcctttcattatcaaaagtcccaagcaatatagaacctttctttcatggatgctatgtaatgagtttaaatggactaaaaaggaaggtctctccttcaacaagctggtcctcagcctgtgtgtgaatgtgatatgttacaaaacagacaatgctgagtggtcgattcaaggaatgacagcattacctccagatatagaaagaccctataaagcagaacctttggtgtgtggcacgtcttcttcctcttccctgcacagagatttctccatcaacttgcttgtttgccttctgctactcagctgcacgctgagcaccaagagcttgtgatcaaaattctgttggacttgaca

SEQ ID NO: 374163 - DNA, 371 bp, Homo Sapiens
  misc_feature (158)..(189): n is a, c, g, or t
tcagtcggtacctgttgtggtagcacaacatgaacaacaaagaaaaaatagcggaccaaggtgaagtcaatcagaaaagatctggcagcagcaagtagtggttgtttggaatttttctaggccaaatgtttagcaaagtctataaacggaccgtgggnnnnnnnnnnnnnnnnnnnnnnnnnnnnnnnngtcaggatttggatggcccaaaatagagtagctttgatgtaaaactaaggaagattttgtgatctattaaagaaggaatacttttcctaaaataaccactaaaaaaattaaatcagtccacttgaaaacagaacaagagctacatgaaaccactactgtgcggtacaagctcgatcgtatta

SEQ ID NO: 374164 - DNA, 339 bp, Homo Sapiens
  misc_feature (130)..(161): n is a, c, g, or t
catgaacaacaaagaaaaaatagcggaccaaggtgaagtcaatcagaaaagatctggcagcagcaagtagtggttgtttggaatttttctaggccaaatgtttagcaaagtctataaacggaccgtgggnnnnnnnnnnnnnnnnnnnnnnnnnnnnnnnngtcaggatttggatggcccaaaatagagtagctttgatgtaaaactaaggaagattttgtgatctattaaagaaggaatacttctcctaaaataaccactaaaaaaattaaatcagtccacttgaaaacagaacaaagagcaacatgaaccactacttgttgggtaccaaactcgagt

SEQ ID NO: 374165 - DNA, 298 bp, Homo Sapiens
tgtgtgtagcacaacataaaatggtctaataagcagataattatatgttaaggagaaggaggcagaaaaaatatttacataagtaatggctgagagctttctaaactgatgaattctgtaagcacacagatccaagaagttcaaccaatctcaagcacacgaaacataaagaaaaccacaccaatgcacatcataaactgttcaaagccaacaagagaaaatcttaaaagcagccagagaaaaaagaaatattacacacaggaacaaagaaggctatcagatttattgtgcaccacac

SEQ ID NO: 374166 - DNA, 441 bp, Homo Sapiens
tgtggtacaacaaattacctcgtggaaatggggaaggcttcatgggaaataatgtttaacttagatttagacatttaactctacttggagtgtagagatttctgtgtagacagacaaaatgattatatgagagacagaagaaactgcacaaagcaagacaagtatgtaaaaggccatgacatctctaaggtagagtgaggtaccttttgtggctgaagcacagggtctgtgagagtgtaacacagatgacattggagaagaggtagaggtgagcctagggacactgggtgccacggtatagccaagaatgggacagagtcaggaagggtaagggcaactaatatatacaaagagcatcttatctttagaaagatcattccagcaacagtaagagaataaatgatagagccagaggctgctaagggatggcaatttttgagg

SEQ ID NO: 374167 - DNA, 425 bp, Homo Sapiens
gaactcgagctggtacccgacaagattaagggagacttaggctgtttataggcagaggggaaggagccagtggaaaagaagatgtggtatagaagaaggggacgaatgactgggtgtgctttggagaaaacaggaggagataatattctgaaccatgacaatagaaagatgtaaattagtgcttctcagactttcatgtgcatatgaattacttggggttgagttaaaatgcagattccgattcagaatctggagtttcgggcaggtctgagattctccatttctaacaagctcctacctaatgttgatgctactggttcactgaccacattctgagtattaagggggtaggacaactcttcctttgtcatgagaagtgcatctagaaataagtttggtagtaaagggaagagaaatcgttggag

SEQ ID NO: 374168 - DNA, 392 bp, Homo Sapiens
acatgatacgactcgagttcggtacctgtgggtagcagcacacacaaggtaacaaaataatgcttagcatcaagaggaaaaagatataggagcaaacgttatggaaccagtttagagggagcaaggaagacaaaaggcatcttggtctgggccagttggtgggcaattggcctgcagtcttacaaggaagagtctttgaggtggcagagccttaggcagcagatgctgagttttgagctgctgaaggcctaatcttttacagttacagaatactctggtgagaactgatagtggaagagtttccttgtttgtgaccttacctggttagatgtagtctttattttttattttgtttgtattcttgagacggagtttcgctcttgtgcacaccc

SEQ ID NO: 374169 - DNA, 479 bp, Homo Sapiens
ttacatgatacaatcgagctcggtacctgtgggtagcaacaaatcaattactaacactgtttcaccaaagtgttatttcaaggttggagttcagggaaagaagtaacagcatttaagtctagctttgctttcacccattggtattgtatagataccaaaacaaatcctaagcctatatatttttataaaagcaaattatctcgagataatttttttgaaatttccttgctatacctagttttcaaacacaattaggtcagaatttaaacaaattttgtccttttattctctgggacagaccccaaaacagaaatgtatacagaacccctgcaatacttgatgagtaagtgataaattcaaaagaaccagtgggaagagtggaagagagaagcatgagtggcagacaacatgcaggttaattttcagctttcaaaaacaaattgtaaaaggttaaaatatttttagggttgtgcatacca

SEQ ID NO: 374170 - DNA, 501 bp, Homo Sapiens
tgtgggtagcacaaagggagaattaatgctccagagaaatgaatggtcatatcctgagcacaccttcctctcagatgcctcggtgccacaatattcactgaaccacctgcctttaaaagaatagagttttgtggcatcagctatgatgctgcttattcttttctgcatagtcagtcatcataaggttggtggctgactgtgcagaaaacagtaaacatggcaggccagagatgactatctttagaaggtaggcctgcaaggttgggcattgactggtaagctgttccctacagccacatgaaactttccctaaacaatcagggtagctcactgtgccttgcaatgtgtgcagtcaatttggtttatgctttccttctgggactgcatagcattggcacccactaggcagagggtgcctaccagcacccaacaaaaccctgagcattgaatctctaatgagcttccctgatggacatttcatatgtgttcgtcctataaccc

SEQ ID NO: 374171 - DNA, 615 bp, Homo Sapiens
ctagagatccgccaattaagggctgtttcggagaatttcacttgccttatccactatgatggctcctatcttattggccaaggaatcaatgttgagttctgccaactcccaagtctgtccaatccaagtatacattcaggtactggcaaaatgaccactgggggcattcatggactcagggaacacaccatagccaaacctgagccaggacttcatttattatgtagctcccactgttcctattctaagaggtcatgatgacaaatatcaacaaatattaattttaattcaaattctgtgtccaatagtccttgaaatatttaggtattcactgtcctcctgtgatgagttactggattaaatggccatagatagttttgacaaagcacaagcaaattattaccaaataatctcaccatgatattggagtcttcctgtttatggcccaggctccccttcattcaaaaagttctgaatctgaaaattggctcagattcagaaactgggcatctattctgctctaagccctaatcaacccttaattgttgctgactatataaattgacatactgttgctgctacacacagggtaccgagatcgagttgtaatatgta

SEQ ID NO: 374172 - DNA, 493 bp, Homo Sapiens
ttagcacatgacagagacggcctggtgatgctgggaaaggggaagatgacacactacatggggcaccctcatagcttcatcccgtgccgggttctcatcatttttttgaaatctcccaaaaaagaagcttcttagaaagacagggcaatagataccagtaaattgcatgtaccgtggcctggcgattaagggtttttccattccctttgcttatttctggaaagctgctgatgtgagtggcagcagagattgagaagggcttgtccctatcacgtgatggtctgaattgaataggataatgcttggctgagcctccttcccacattttccttcaaataaaataccaaccctttcttgacagttctaggacaggatgcccaaagagaaatgggagggaataaaactgcaagtgacttagcagagctgccttggtgttttgggtctacacaaccagattcccgagcacccccttaaggcaatatcctgacttaca

SEQ ID NO: 374173 - DNA, 567 bp, Homo Sapiens
  misc_feature (268)..(339): n is a, c, g, or t
gtatcacaattaatattctagctcctctaaattataaatatgtttccaaaatagtgtagaggaaggaagaactaggacagaatatgaacctttaagcactataataattagtaaaaaggtcagttacacaagcattttcccaaagtttgtcaaaagaaagttgtaaaagagcacataaatgagtttaaaaggcataaaatttgaagtgaccaaaggaaaaattcactccaaaaattgaaacacagcatcacatttcttcacaaatgannnnnnnnnnnnnnnnnnnnnnnnnnnnnnnnnnnnnnnnnnnnnnnnnnnnnnnnnnnnnnnnnnnnnnnnagtttaaatcaacaaaaacaagtgtaactttcttccccagaaaaggatatgatactcataacttgattcagaagctttctttattatactgtttgtgtttagcctccaggtagtttgttttagcttaactcttaacaaatgttgaatggcttgtatcctactcattgtcagatggaataatcaccctttctatattgtaagttcataaaggttgtgttgctacccaca

SEQ ID NO: 374174 - DNA, 389 bp, Homo Sapiens
tgtggttcacaagtagtagtcagctcagcttaagcctctgttcctaaaggaacttggtctaaacttgtaggtctaaagacctacaagtggctctgatggggacctgcagtgatgcaccagcgagcgacaaatggagacatttctttaacaaggaaagcgatacaatttctacatgggaaggatgcattggaagcaacctggttagaagggggctggggactcattttgaaggtctggctgcacaacaggcatcatgttcttacttagatttaagtttctttggaattaataaaaattatgagcaaactgactcctttcctgaggtacaagtttgctctgcggctgctctttctcttctgtgaaaacgtgaagctccagttttgttgcta

SEQ ID NO: 374175 - DNA, 461 bp, Homo Sapiens
aacaagtggtaacacagatgtaatgcaggaatccagattctcaagtgcaaccgtggccgagggccagcaaaaagtttagctaagggaggcttcagtgagaagcagcaccccctcggggacacagccggcactgtggaaatgccacctctctccccttgcctgagtgaagagctgttagatccagaattgcatgttctcataacccccagcctgagagagaaaacagagtctgagctaaagtttgaggaggatgagcgatggattatgatggaggctgagggagagtgggaggaagagaaactgtcagacagggaaaagacttttctgatggcagatgagaagaacagcctggcagatatttttgaagaaagagaacaagcaaacacagcagtggtggaggatggatccgattgcttagctgctgtcttgaggacttttggccacctatctcttggtcagat

SEQ ID NO: 374176 - DNA, 415 bp, Homo Sapiens
ggtgggtgcacaacaatgagacattccatatgagtggtggcctactaaggaataagaactcccctctcactcatccataaccaggaggcacaactcctcagggtcaacagtgatgaaacagtgaagcaggctcctgacaccacctggcagtaatgagatggtggccctctgacttctgccagagcagtgtcagaaaaagccaactaaaatagaactatgaatcagatccagagtcttacaaattagtaccccaaatgtctaggtttcagtaggaagctgctcatcattccaacaaccaggaagacaacagactgaatgaaaaatgtaatcacagacactaatcctcataagatagatatgttcgaactatatgacaaagattatttttaagatggagtctgctttgtgctacaca

SEQ ID NO: 374177 - DNA, 394 bp, Homo Sapiens
  misc_feature (119)..(184): n is a, c, g, or t
  misc_feature (186)..(231): n is a, c, g, or t
  misc_feature (254)..(351): n is a, c, g, or t
aacaagattattgcaaagggcaaaagaactaagcttccacggtgtggaagccaccccaccgtgttgccaatgttggctgagcctgcttttattcccttatctggcaccacccacatccnnnnnnnnnnnnnnnnnnnnnnnnnnnnnnnnnnnnnnnnnnnnnnnnnnnnnnnnnnnnnnnnnngnnnnnnnnnnnnnnnnnnnnnnnnnnnnnnnnnnnnnnnnnnnnnnagttctccaagtccccactagannnnnnnnnnnnnnnnnnnnnnnnnnnnnnnnnnnnnnnnnnnnnnnnnnnnnnnnnnnnnnnnnnnnnnnnnnnnnnnnnnnnnnnnnnnnnnnnnnattctccaagtccccaccagattagctagatacagagtgctga

SEQ ID NO: 374178 - DNA, 566 bp, Homo Sapiens
  misc_feature (431)..(452): n is a, c, g, or t
tcggtcggtccctgtgggtagcacaagactttcagtgaatcagctctggacaggagtaaagggaaataaactctggaactttcgaggaaaaaagtctctgggactctcaaggaataaaatgccaaccaccagaaactacagaacaggctttgggataatctaatggtgctcaccacaaggctgggattcaacctccattaaagggtgacagtgccttttaactcaatacaaccactttaaattgagggacacttcaggtgaaagaccagcttaaatctttatgcccccctcattcaagaaatattcattgagagcctgctgtgtgccaggtactggaaatagacaatgggaggacaaggcacccggaccctgttatctagtggggaaggcagctaagaaacaagataagcacatacataagggtcatttcnnnnnnnnnnnnnnnnnnnnnngggaaaaagttccccgtttggtggccccccagggggttccctaaaaagcaacccgggggctttgaagttgggcacgggccggcggttaaacaagctcgggagggaccccggggg

SEQ ID NO: 374179 - DNA, 282 bp, Homo Sapiens
cacatgaggctccctccagcatgccagtggcatggctcttttttgttaccacgctgttcccttccacttattggtgccagtgcccctcagtcctcctctggtcctgttggtgtccctctccaaatctgaggcctcccttccttagggagagcatcagtcctggagccctccatcgggagctctccattaagaagggcatcttcagaacccagggtggggcccacatcggcagtcagtacacatcggtgcacgcaggagcctcatgtgtaggacctctgtgta

SEQ ID NO: 374180 - DNA, 107 bp, Homo Sapiens
tgtcctagttcttattcctcaaatacagtggattatttctcacttcaggcattgtactagccgttccattagcctggagggggaaacatcatcatagggcctacatg

SEQ ID NO: 374181 - DNA, 194 bp, Homo Sapiens
caaattaaatatgaatactctttgtgaagtgcctgacatgcagtaggcactcaattacttcatctcattccacactactgtgtaataactcttctagtaatcgagattatgttatcatgagactacatgaaaatattatcatgccccttctgagttaatcttattcaacctggtttctcatccgcaatcttctt

SEQ ID NO: 374182 - DNA, 158 bp, Homo Sapiens
ccggacagtacaaccatctatgctaaactgcatattttttccttcccccaggactggaccagggaatctctcaactttctagagtatcctgtctccattgacaaagctgaacagtattaaagatcctgctgcctttgttaggcagatttggaaggaag

SEQ ID NO: 374183 - DNA, 277 bp, Homo Sapiens
gtcctgctagggccacctcggctcactgagtagctaagtggaggagtcttgagataatgatccagatgtagggtggaacaggagagggtggaagcaggacaaagagacattccttcagattatcatccactgagggtggaagaggagagggtggaagcaggacaaagagacattccttcagattatcatccactgagggtggaagaggagagggtggaagaggagcaagaggacactccttgatattatcatccactgagggtggaaggggagtgag

SEQ ID NO: 374184 - DNA, 752 bp, Homo Sapiens
  misc_feature (14)..(14): n is a, c, g, or t
ggtcggtaccgggncagtacggatgtgcgggccgtgaagatgaaaagagcgtagccaccaggcctcgaggatgaagtctcagaaagtacctccatggaaccagcttttcggttacgaatgaggggtgatctcctcgggaggccagggccctcaggaggctggggtgaagtctgcaatgcccggtctggttcatctgatgcctttcctggacacaggttctccatactgccttggttggttttcatctcctcattctcagaagaggctggacggaatccacagccagccggggcactgccttcttcctcaacacctttcactccggggctgaagtgtagctccacatggaaccgttcctctgataagggatcctgtgtgttgtcctcataaagcatgatgacaatctgggtcatgcagttaagctctgagatggcactaagataatccaaagctcgctgccattgtgcatcctgggtctcatcaagaagtcctccataacggaagacactgagcagggagtggacatggctctcactggtgaaatagagacgcgttcgaacgtggcgaactggggagagcacgcctcgggagtacaggggatgcagcttgttgacagactcatcctcgtgggttctctgcaggtcaagtagtatcttccgcaacacaggaagacagaagcccacagcaatgtccagctttcgtccccccgacatcccatactcccggggcacgacagcccaaaaccggagccg

SEQ ID NO: 374185 - DNA, 506 bp, Homo Sapiens
  misc_feature (410)..(410): n is a, c, g, or t
  misc_feature (440)..(440): n is a, c, g, or t
  misc_feature (450)..(450): n is a, c, g, or t
  misc_feature (465)..(465): n is a, c, g, or t
  misc_feature (476)..(476): n is a, c, g, or t
ggaacggttccatgtggagctacacttcagccccggagtgaaaggtgttgaggaagaaggcagtgcccggctggctgtggattccgtccagcctcttctgagaatgaggagatgaaaaccaaccaaggcagtatggagaacctgtgtccaggaaaggcatcagatgaaccagaccgggcattgcagacttcaccccagcctcctgagggccctgggctttccgaggagatcacccctcattcgtaaccgaaaagctggttccatggaggtactttctgagacttcatcctcgaggcctggtggcttaccggctcttttcatcttcacggccacccacagaaatgaagcagagtggcctaggctcacagttgcacagggctgtttcagcaccacagtgctgggtgggttcntccagttgccccgatttttcaggattacgnccgcagcctngcaaaaagttaccanctgccattttnaagcaccgagatgggtttgaagggtttttt

SEQ ID NO: 374186 - DNA, 205 bp, Homo Sapiens
tgaataggaaaagcaagagacttcccctgtgctcccttttctcaaatgccattcgagggacacatgcttggaatgtttatgttaaattttttttaaaaatgccttgtctagctttaaaaatacgaagtaattttgcaatttttgaaaaacactagttttcctttaaacttaatttttcatgttgatcctgaagaatccgttaaaa

SEQ ID NO: 374187 - DNA, 252 bp, Homo Sapiens
ccagaatcggcaggccgtaccactcagctaggttaggagctaaaagtcctcaactgccgtatgtgtcccctacgtccctatgctgcttctaactgtggctcatacttctgcctggaataagccgctcatgcttctagctgcctgattcccagtcacacttcaagactgaacttagcatttcctggccactcttacttccagccatctacactagattcctatcgcatacctgggtactccgacctccatcat

SEQ ID NO: 374188 - DNA, 208 bp, Homo Sapiens
tcactattcaacacttatgtgtagaacagctcagtcatgtctaacattagctacacctcaaacaaaaagttgtacttatcaaattatttccctctattccaaaaaatgcgttataactgatttttttcctccaactggcagtgagtctgaatatctcagctttaattttacctgcacctagatatttgtgtccatgtaaaatttcagt

SEQ ID NO: 374189 - DNA, 320 bp, Homo Sapiens
  misc_feature (57)..(112): n is a, c, g, or t
gtcaatttatcgcatcagctgcgctcatgcgaaaaaaatgccttgaaacatacccannnnnnnnnnnnnnnnnnnnnnnnnnnnnnnnnnnnnnnnnnnnnnnnnnnnnnnnattttgtgatttaaataaaaaagaaagctcgaatcccaagccaatatgtgtatatcaaatccttgaccagccaggtctgtagggcataatcaaatccaaagtgaaatagtatattaacacagtgccttgaactgggccaataacataattgctactcaaaagaatgtactgtttggactctcctagtggtcggcatgaatattctgga

SEQ ID NO: 374190 - DNA, 424 bp, Homo Sapiens
cttgtctgagaaaaacctcatcgatcagtaatcactataagtatttttgatgtaaagatatggttgtagagacatacgcatgccgtacacttaatagtttttccttcactagaatcactagtttgagtttttgttttattctgtttgttcttctcttcatcatctgacgtaatctctccttcttccatgctatcagacgttacaacttcctcctcagtatctgcgttcagaaagatgaaaggtcactggtatgaacagagctaactgtgatgtctgtaagtccatccacatcagaatctatcaaagagaaatcttcttttgtcccttcaacagttttagctttattactgttcttttctgaaggaagttttaaactctctacttctttttcctttgcttgtttttcatctttaactttctgtgt

SEQ ID NO: 374191 - DNA, 255 bp, Homo Sapiens
  misc_feature (154)..(179): n is a, c, g, or t
  misc_feature (240)..(240): n is a, c, g, or t
tatggaatggtggcaaccctctcatactccgtgtttcctaacaccagctaaaggccagtcttataagcagtcctttctaagtatttgcagtctcaggcctgttatattaactttttgtgcacatagtactagaaaactgttggctcagtcttcnnnnnnnnnnnnnnnnnnnnnnnnnnaactgtcaccgataccagaatagctcatctccaaggtaactgtaacagaacactcagcagnttaaacagaaaatac

SEQ ID NO: 374192 - DNA, 322 bp, Homo Sapiens
cccggtaccacagagcaggggctcgtatgcagtgttcccagctgctggtgaagctatctctgcggaccaaatgttcgtgtcggcccctgtgaactccacggcaccagcagccccagccccttcatcctctcccaaacatggcctcacttcgggcagtgccagtccccctcctccagccctgccactctacccagaccctgtgtctcctctgtagtcctcgtggaaatgtgcagccaggaccatgtagtcccgcatctgcttgtgacattcaagacacttgattgagtaccggatgagcctcacagggtctggctagtcgggg

SEQ ID NO: 374193 - DNA, 143 bp, Homo Sapiens
tggtatgtagaacgtcagaatgacaagatggggcggtgagagtcaagtatagacaaggttcagataacagtgtggaagttgagaagacaggtctgtgaaagcagaaggtcatagtgtttggaatcactttgtgaaaataacag

SEQ ID NO: 374194 - DNA, 620 bp, Homo Sapiens
gaagggctttatgctaacctctgttgcttgatgacatgtcctcaggactctgatattaaaactcaatccttagataacagggtagctttatcatggaagtaggtagcaatttggaattagaccattcttagttatttttttcttaatgaattgatacatgcactttaaaaaatatttttgttattttgggaagaaaaactcagacttttaaaaaagtgtatattgtcccattataatatgtatatggaagagtgaaatctgaacgctgtcttatattaagcagtagaattaggtattatcataaaaagtcttaatctgtagggaatatgagtttatgtttatgagtcctgctcagtccctctttgagagaattagttgaaacccagactctaaagtctgcttttatatttgtttgttaagaccacttatctgcagaaggttgccttttaaccccagtggttctaaggtgtggaattgagtgaccctaatatttacataagagacttgttttagtggagcataagggaggggcataagttacaccgttttgtgctgcttgagaactgtcttttaaaattgatcacaacgagggaaaacaaaataaaattagggggcaaagg

SEQ ID NO: 374195 - DNA, 488 bp, Homo Sapiens
  misc_feature (476)..(476): n is a, c, g, or t
acacatggaactacacaggctctacctttaacacacaaactgtctccataaaacacttccttgtctcttcaaaacttagtttaaaatcagaagaaatgctcaaaaatacacatagactcaacaaggcctggacataccccacttcaactagccttgtcttgtaacactgagactcatctgaaacatagagatacattatgccacacctagaatgaccccccagaaaccagactagctccagaacacccaaataggagccacagtatatggacataaccctacatatacaaatccttaaaacaacataacgactaatcccacaaaacactttcttgctccataacaccaacacttacctccctgtgcatagaatcgctggacatacagacacttcttacaattacagatatgattcacaatactaagacttgctgtaacacatgccaacttctccaagccacacagaatcatacatntgtatgtattat

SEQ ID NO: 374196 - DNA, 352 bp, Homo Sapiens
cttatcacagatgtgaaacaagtctcagaagggttaactaacttccctgatgtcacggattgtaagttatcagaactagggtgatattcctggtctatttatagatccatgtcttgctttttctcactaaaccagtgctgttagctattggctgaattatgactacctgtgcttttcaacatacttctagcaaaacacaaaatatataacaacagcataacaaggaaaacaactcctggttgcaaatggcaagtgcaagcagcttcagaacacttattaaccccatctccatacccataaacattccccaagaattcaagcactggcctatggcacgcatgcgtgaaacccc

SEQ ID NO: 374197 - DNA, 309 bp, Homo Sapiens
  misc_feature (95)..(95): n is a, c, g, or t
ttatagtacactacagtatcttctgtgaaccctaaacgatcaaggccagaaatcatcggactgtaataagttatagttccttgtataacaaagtnatgtagtaagtaattaacatgcctttcctgtttgtaacacttttaaggtgtggtctcttagtttatagggcgtgccacagacattgcataaccaaccactgatactgaaaaatcctcagggtctatttccaaacaggctctggcaagttactcaatctctgactcaaaagatccttgttagttatacgtgggtgtcaaagtaaacaaacttgtt

SEQ ID NO: 374198 - DNA, 354 bp, Homo Sapiens
actgctgaggacacagtgaagtatgaaagaacacttccaaatcattcagctacaacagactagaggctccccaaggactggctattctaaccaacacagtaaaagtctgtcattacaagaagtggtttcgtcactgcaggtaaagaccccaacttgaccttaaacttcccattccaactaataatgtcaggagtcactcagcattctgagtcagggaggcagaactgtcttagcatatgagtcatcttctaagacagggactgggttttcatattttaaatatccttctgttttaaacttgggcgtacggggagggtaccgaggctcggaaaaacgcgaaacaggggccaaagc

SEQ ID NO: 374199 - DNA, 407 bp, Homo Sapiens
tctcagaggatctccccccgtacgcccaaggctgctttgctgccaaatctcaacctaatgaaactcagggttgtgtttcctgacaccattcccaccaggcacaagcaagaattccagagccccactttgtttctgaggaaggaaaggaagcatgcaggccagattcacatttgtttctccattactttagcaatcattaaacaagtgtacactacaatcccacaggaaacaggaagatatgcttggggaaggttggtaacaagttgtgtcgcacatcaaaggaaagttgtcttcgttcgtactgctcacatctggagcacccccacgcactgggtgaaacaggaccatcatggtgaacatgctctctcctttttgggcgtacggggaaaggatcctgtagagtcacc

SEQ ID NO: 374200 - DNA, 372 bp, Homo Sapiens
agcgcggtaccctccccgtacgcccaaggcttagtagagcaccctccagtgtatgctgtctgttgatgatgctctccgccaggctatcccatatcaatttcagttccattaatgggtcttgaacagtgtgtttgtcactctcttctgtcacgttctgtagcaaaagcgtctgctgtgatgatgtcagtctttccatttctatgctgtctgttgataggcctcagacttaaattgctttagctcttcaatctgctgcttgacagtttccgagatctgttccaattggagacattgaagctaatgtaccacctgcaatatctacccagtcaaataccgcctgcagtccatcctgtactgcacagcgcctgcatt

SEQ ID NO: 374201 - DNA, 165 bp, Homo Sapiens
tccccgtacgcccaaatggcatgtcggttaggggattttaggctatttgtgggatttctccccctaggtttccccataataagtgaaagcgtaatctagtctctcagaataatgatatacatttgttcaacaatgcttggcgtacggggagagatcctgtagagt

SEQ ID NO: 374202 - DNA, 378 bp, Homo Sapiens
agtagaagtattggggagtgtccctcctcccctattctctagaaagtttgcgaagctttggtattatttcttctctgaatgtttgggagaattcaccaatgaagtcttctgggcctaagcattactttggaacactgactatgccaaatggagactacattgaaggttattttagtggagaatggggatctgggataaaaatcactggaacctacctcaaacctagtctatatgagagtgataaagacagacctaagttttgaagctaggaaacctggcagtgccagctgatgagaagtggaaagcggtgttgacgaatgttgcgcaactggctgtgaggccagccaaggggagtttggcgtacggggaaggatcctg

SEQ ID NO: 374203 - DNA, 302 bp, Homo Sapiens
gcgtgaccctccccgtaacgcccagaattacaacacgacatacacatgttgtaaaccctgtgattttaaactagtgaagccttatgggatggattctgacatttttctagtagcttaataggccaatttctcccaatttcccaaataaaattttcataatgggcaatttatgaagaaaagaagaaatgttgtaatcaaacacattttatatacattttgggacacaagtcaggaaggaaatcactgacctatagaacttttgcattcaaatgtaaaagcactcactcttgggcgtacgggga

SEQ ID NO: 374204 - DNA, 406 bp, Homo Sapiens
gtgatctaccatcgctaacgtagcccactgtacttcccacagggtagtttgttttccacttcagcactgaatattattattattcgattctaaaatggatgcacactcatatatatcgtagaagtgcatgagataaagtccctgtcatcaaacagctgccatgaagtacttctagaatttaactgcacacatgccaacacatatatgccaccactgggtaacacagacattatatattatgtaaactcttttaccaataaaatagaactattattactggatgaactttggccaaatccaacttatatattctaacctataacgaacaccatttattggcatcatccttttcccatggtcccagggaaaactctactattaggaagtaacttaaccattccctttt

SEQ ID NO: 374205 - DNA, 432 bp, Homo Sapiens
aggattgtatccccgtacgcccaagtgtgcactaaacccaggaaagacctgagataggaataatctaggtagctttaaatgttcctgttctctaggatccaaacttagccatccccactaagatgctgggcaaacggttctcatgggtacataagcatcacagaaggctggtgagaaggggaccagccttttctagtcattatcaaataatacagcagcactgtgcctccagcctcaccaggctgctatctgatgggacgggtgtgcaatttgggccacggaccaaaagaccttggttatcaccaagaaccttatcaagaaaagccccacagcattaaacctgagtgcagtattcaaggcaaggttctgatggattcgttcaatagctatgggattcagatggcagacactacatagttgggcgtacgggga

SEQ ID NO: 374206 - DNA, 470 bp, Homo Sapiens
ccgtacgccaaatagttggattaactccactagtagatatatttccacagcagtgaattttcagtcaatagaattacagaggaacctaataaggaagtaagtaatgtgggaagatcgagataagacagggtaggtatttcacttgaccagtgaaacatgaaaatgctcttgggaagccagggcaattctgaattacgttaatggaagactctattcaatgtacttgactactcttcttgcccattttattctctgacttatgaggattaattataactctactaacctgtattttcttgtttagcctattccaggtccttaattctggactaggcatataatttcacaatatacaccaaaaaggctttaatgaagtataaagggatgtaaaaaattcttctaaatcttccctttccctgtaggatatttgtttaaaaatcatcgggcgtacggggagggtaccgagctcg

SEQ ID NO: 374207 - DNA, 240 bp, Homo Sapiens
tttccccgtacggcccaaccgtacgcccaaaaagaagcaatagtaagggctgtttaacgacccccaactccccatccatgcactcacggtcctcttacgctgggtccatccctctcgctgggcagcatctcaggggtgtccgtgaagtcggagatgaagaagcgccgagcccctcctcctccaggttcagggccacctgtgcaagacaaggcatcggaaaaggtatctcttgggcgtacg

SEQ ID NO: 374208 - DNA, 405 bp, Homo Sapiens
aagagtaaattatactgttaaatttattcagatatcttgcagtatttacactcgggtataaaggcctgaactgttttgctcagtcttatattctttaaatgaatcacataatcaatttttacctgtagctttacatgcctttgaaaagtaagaatccacagaagactaactttcacttctttttcatggggattctttctccacacctgaagctgctgaattagttgatgcaaatgtttttcttatgttaacatattgatcaataattgctccatgcaataacttcatttgaaattaaataatatcaccacaaattattgaaccagcttaagatagcattattgaaagtggtttctcggtatccttataattacagcaaagtctacctatcaaaagacgagggac

SEQ ID NO: 374209 - DNA, 191 bp, Homo Sapiens
taggtactacagctgagattgtatagagaatgtatctgggctcagtttcctgacgttaggatagaagaacaaataataagagtttttaaaaatccaatcaaagattctttatgaaaatttatagacagaaatcaattctgtaaccttagtagttgtttgataatataatgctctagcctatcaaaagacga

SEQ ID NO: 374210 - DNA, 277 bp, Homo Sapiens
gtacccacagtcttgttgataggcataggatccctatatgaaaaacagggggctaaattcttgccatcacctcaaaaactttttatattctcatctagccttcctgtccaacttgatccctatctatgctcattaagtgacagttttatactttcccctcctcaaatatgctaagcagttgaactggcttgttcctttagtctgaaatgtccttctctcatattttttatggtaagcttcttgtccttcatgctcttctcatcctatcaaaatttga

SEQ ID NO: 374211 - DNA, 299 bp, Homo Sapiens
ttgactctttaggatccccgctgagatgacagtcggcaggagcttgctgacacctgttccagatgctttccatctactggaacgactcccccaaaagcggcgctattatcaccatttgatgattaagtgcatcgaggataggaagttaagaagcttgaataattttacaactaggaagtgcctggtgtttttactgagggctaaaacaagtatttggcctggttactgacataggtgaagtaacgtgatatacgttaagcatgtatacacactcacacgcacacacgtcagaccccagg

SEQ ID NO: 374212 - DNA, 275 bp, Homo Sapiens
tgatagggatcaaagtggtagaaaatggagaagaatatttacttctcataagatactagataaaataaacttcctaaaaatgttggatgcaattctttttaaaaacctgttctagggcacagctgagtttgcaagacaataagaaaataaaggaaatcctaaaataatagaaagcaagagcaagaatccaagatgggaagcaggctctcaatccagcagctacctcgaggcagttgccagcttcctatgtaacctagatgcctatcaaaagacga

SEQ ID NO: 374213 - DNA, 280 bp, Homo Sapiens
ggtgagtagtcttctgagctctgacatcatttcaaatgtatgaacattggcctgaagcttaataaatttcagccatcgtatattcttagcttttgcttgggctggcgttcctctgcttaacaaaaaacagtcatgagccagatgaaagcaatttacccacatggcaccttcatcttatttaccagtctctgagtaaaagaccgcacctctcaccttgcagctatcacagaacatgggaacattgccgtctgcatgcctctcacagcctatcaaaagacga

SEQ ID NO: 374214 - DNA, 188 bp, Homo Sapiens
caggcagcgagaaagttgaagtagttaagacgagttaagtaatgtctttggacttcttgggaacaactggcacagaggaccatgtcttactcggctctgtcttttgcagtttcatttcactctctctttaaatctttgaaaaccatatgtctgctctggttttattatttgctcctatcaaaagacga

SEQ ID NO: 374215 - DNA, 372 bp, Homo Sapiens
  misc_feature (22)..(22): n is a, c, g, or t
  misc_feature (346)..(346): n is a, c, g, or t
cctcgggctcccccaaaagtgnctgggaattaacagaacgtgaaggcacccacaaccagcctggatgattcttaagggcccttctaggaccaaagttctgggaatttctagcttattctgccccctcatagcccttggcctatctatctttatccacatgcagaaacatctggcaaccccacatggctgagatgacctggtcctaggacacccttggacagaagactggcctacctagcagacctggatttttcttcctgatctgctgcttccaagttgtgtgaccttggctaagtcacttaacctttctgattgtccatttcgctttttaataaagtggggtctnggtgaacaagaaatgttaattaaaca

SEQ ID NO: 374216 - DNA, 540 bp, Homo Sapiens
  misc_feature (25)..(25): n is a, c, g, or t
  misc_feature (79)..(161): n is a, c, g, or t
  misc_feature (506)..(506): n is a, c, g, or t
  misc_feature (520)..(520): n is a, c, g, or t
aaccacaatggctgagatgcctggnctaggcacccttggacagaagactggcctacctagcagacctggatttttcttnnnnnnnnnnnnnnnnnnnnnnnnnnnnnnnnnnnnnnnnnnnnnnnnnnnnnnnnnnnnnnnnnnnnnnnnnnnnnnnnnnntctggtgaacaagaaatgtaataaacacgtggcttgccattcaagagatgagtctgaccattcactttctgtgtgccagagaagagagatcatgggtatagaccagcccctggaaaggctgcttgggtcaaggctgagagcagcttggctcaaggaaattattcacgaaggtgaccactgtctttctgacctggcacagaggaaatgttggctgtgaatgtgaccaatagaaagaagcccgtatttctcagtcagtcctagaaccctgggtaagtaattaacagaggattaaaaattgtgtttgtttaaattgacaaagcagcagtttttcaatttgtaaggtcngctttgaggagccntttgatgtgtgtttcttttt

SEQ ID NO: 374217 - DNA, 245 bp, Homo Sapiens
ggctgctctagaggatccacacgtacgcttcttacatatattgaagctggtacatggtagacatatgatcacaacttttaaacaattttttaaagctgaagaaatactttttctaagtatcaaatccaaatgtattcagcatccacccataaagcgcaactaaaaacttttcacaatgccattaacaacttgtggttaccatcataagcctacagacctacacactaattatctttaaaaccctt

SEQ ID NO: 374218 - DNA, 203 bp, Homo Sapiens
tgcttagaggatcccttcctgtagagtcacactgcaaagtgcagatacaggaagggtggagaatggtggcccttttgcaacttaccgtatacactgcgttagaaataatatggaccgggtcacagatggcagctgtgactgttagctccagcctggtgacttcaggaaagattaaatgagctaatgtgtgaaggcgttacgtg

SEQ ID NO: 374219 - DNA, 234 bp, Homo Sapiens
gagcaggctgccatcaagcaagccaccaaggacaagaagataactaccgtttagcagggcgtactgcggttggtgacgggggtcccctcagtcacactcacttttttccttggtatgttattgagtatattctgagcttagttttctctacagtgatactttagtggagaggaggtgtaaggattctttctctctggttttggcttttcataccactgctgaaggaaggcgtta

SEQ ID NO: 374220 - DNA, 377 bp, Homo Sapiens
acacgtaacgcttctgtaccaattctctcaatccctccagcagatacagacagtctctccttagtagtcagatcaggcctggtgggaggatctaaccttttatggggtgcagtaaacacttgacagcctaaagcaaacgtggagaggggtaaaagggagaaagtaaggccaacaggagtagggtagaatgacagatgtcagccaaagctgcaggggaaggacatgtggtatacagtggtaaatgagacatcatacacaatgcttcgcttcgcacacaaggggctgtcaagccctcaaactgctgttcctgcctctcactcctgctacgtaccaggtgttgagcacacactgctgttcaaagccctccgattttgtct

SEQ ID NO: 374221 - DNA, 301 bp, Homo Sapiens
gcccattttatcctgggtgtgagagggaaaagaaatttacatccctttgctttagagtccgtggcttatatgccacggtgccttcagttcactttatatattcatgggtataatttagtagggacgagggagggtgcaggagggaggcaaattgtcctttcttccagtgaatacaggggaacagatggttgttatttgctgagtgattctggaaaatcactaccttgaattctcagttttgagtctgacatttgttctgtcaccatttccccagtaaacaggaataaaaaacgagccacat

SEQ ID NO: 374222 - DNA, 269 bp, Homo Sapiens
actctagcaggatcctacacgtaacgcttccagcttatcttggtatgttagtagagatggggttcaccacgtgggccatgcgggcacgtgctttttgaatctagaaaaaggcccctagttttatctttggaggtgtccaaaccagttgtatggtgatggcccacaaacttgaaatggtctgatggtttcccccatatatagattctagaaagatagcttggtgagaataatgcgtaggtgataatgcggtgtttaagtgtgtcacatca

SEQ ID NO: 374223 - DNA, 206 bp, Homo Sapiens
tgtcatgcaattctgcctcagccttccaagtagctgggactacaggccctgccactctctcagcctttaaggccactcataatgttttgggaccttatgatttccccttgaggctaaaaataacttctattatgattgttctgttacagtcagtatccaggtaatttttaagaatcgtgtttgtgtgtaatcttgaaggcgttacg

SEQ ID NO: 374224 - DNA, 284 bp, Homo Sapiens
acacgtaacgcctacatctgaagtccatactgccatgggcaatgactctagttaggtgaggcataaggagattcctggtatataattggtgccagtggttatattcaaaggtcatgatgacctagtggtataaatatttccaaaattaacatgctgttttgtagtggatagataagtgaactgggagtgcgggaaatcccatgtactagttccaatcctgccctgacccacaccaacagcaccatgtatgccagaagcgttacgtgtgagctcctctagatcac

SEQ ID NO: 374225 - DNA, 451 bp, Homo Sapiens
acacgtaacgcttcacgagcactggacccatacctttccctgccacctcatcttctttcaactgagacttaaaacatatgaaagataaaaactccattgaaactagaacaaccatggaattaaacatagtggggaaacgggtcccaaagagataaagtgcctggaaccatgatctccttattatcaatacccttttttcctctagacccaagatcttaaaatgaccaaattagaaaaagacacaaccgggtctaactgtatttgatgcctgagggaagagcagccgaaaatcttaaaaaatactatctcctgatggcttatgccccactccctccaacccagtctgcaggtgggtcatagtccaaagaccctatttccaaccctgaggtcccactgcaggcagtactatggcctcacgggaaggaagatgtatccagaagaaggcgttacg

SEQ ID NO: 374226 - DNA, 306 bp, Homo Sapiens
cacgtaacgccttcctcatagttaatgggctgagaccaatttagtgaatcttggttaacatttctaatcaaatttcacaatttatttactgtgaacaaatatacattttaggtgaaatatttacattttgtttgtagctgctcaaataaaaacagctgcaaaaagttcccctacgtctaaacatcttctgagaattgaaaaataatttctgtccataatagataattaagacagtacagaaaaatttaaaagaccaaaatctacatatcacctgataaagacaacccactatgaagcgttacgtgt

SEQ ID NO: 374227 - DNA, 224 bp, Homo Sapiens
gacctagaggacccacacgtaacgcctcagtttgagatctatctcttgtgcctagctggccaacaaaggataggaatatgaagggaataatttctttaaaattctgcttatgttcggaaagagtcaaaccttactatctatatgacatataatcctgatatcagttttgtctacagttactatgtgtttttcagaactgtttattatactgcaaagatcatgtg

SEQ ID NO: 374228 - DNA, 328 bp, Homo Sapiens
gctaggagtatatgtgtgggagggagttctgtgtccacagaaaggcttacgtaggaacctctgctcattgggctacttcatgtcagctcaggaagatatttctagggatcgacaagtaatggggagatgctgagaacttgggaatatttgaaatataataaggttactagatccagaaaaagcatgcaacaggtgggatacacatagttttaacgtgaataaggacatttatcttattctagataagaaaagggctgagaaatccataaactgaatagactgaccctatctagtagattctacctgctgataaaatggaacttcggca

SEQ ID NO: 374229 - DNA, 458 bp, Homo Sapiens
  misc_feature (154)..(357): n is a, c, g, or t
tgacacattactaggacctcattatgtggtagaagtaatgtaggggaaatggcgattatctttttttaaaagcaatagctgttgtatatcaatgataaatgaaaaattagttattcttgtaaattgaagaaagaatggttatcatagagggtannnnnnnnnnnnnnnnnnnnnnnnnnnnnnnnnnnnnnnnnnnnnnnnnnnnnnnnnnnnnnnnnnnnnnnnnnnnnnnnnnnnnnnnnnnnnnnnnnnnnnnnnnnnnnnnnnnnnnnnnnnnnnnnnnnnnnnnnnnnnnnnnnnnnnnnnnnnnnnnnnnnnnnnnnnnnnnnnnnnnnnnnnnnnnnnnnnnnnnnnnnngacactgggctgtttatgagagtgacagattactaggacctcacttatgtggtagaattaactgtagggcaatgcgctcgctcggaggtaaactcggacag

SEQ ID NO: 374230 - DNA, 302 bp, Homo Sapiens
  misc_feature (130)..(130): n is a, c, g, or t
  misc_feature (148)..(148): n is a, c, g, or t
aagaataagccactgattcaatttatctaaaattatgatgttaaaataatttttgaagtttgtttttacatatatctgattatctacctacctatattttattttaccaagttaattgcttttaacttcnagtgttcgttaaaatcanctctcgcctcctgttgcaattatggtataaaaatagaaccatctttttcctatggatttctaaaggctggatgtctcctctccttctctttaaaacccactctgatagtgtggatttaacatgcctaccttccacattttgttatttgtattaa

SEQ ID NO: 374231 - DNA, 231 bp, Homo Sapiens
acacgtaacggccttcaaccggagggtaataaccccccaaaattcagagacgttcaggaagaaggagactcatggggaatccatcacccgcaagtcaaatttccccaagttctataaaattttaattatgggctgacaattaagtaaactgaataactgttgaaatcttaattatttccaccagtgtttcaaatcccacagttaggaggcgttacgtgtgtatcctctaga

SEQ ID NO: 374232 - DNA, 273 bp, Homo Sapiens
tgcagaggcgtttaaggcctgcaaaggttgggaccaggatgtaagcatggggttcaagttcacagtcccattattaacaacactgagcagtaccactgctgcccaagcaaacaggaaaggtccgggccaaaaatgcatatccttctttatttcccagaactggaattcccattcaactgattttctggaaaaataaagtttcattttacgtcgtcatggtgattttcttgagaatataatgccaagagtacagcttcaagatcatcttgttgt

SEQ ID NO: 374233 - DNA, 260 bp, Homo Sapiens
tgcgtttagcaaacctaccgatcgtatatatgtcaaatgggaatgtggacagaatatatgagacaacctgttcacaactgtttaatgaggaggttttccaacattaggaatgatttgatccttcagtaaaaaatggatgtctgaaggttcctaggcataaaagaaagttcagaaggatatgtaggaaatactgttgtctctctggggattgggattacagggtttttttcctcttttacttttagttaagtttgtgtttc

SEQ ID NO: 374234 - DNA, 423 bp, Homo Sapiens
gtgactctagcggatcctctcctacgagcgcagctaatacagagaagagaagtcaaaagaattagaaaaacatcatttctcagactctaatgaaattattgattcaggaaaggactatcagttggcgataaagtcattaaatgaatgattaatgggaagctggatgcttgtagaatgctacataatatcacactcactcttttctatctctaaaggtaaaacaaaactttggcgatggagagatcagactgccttcattgtaatccaaaggtcaagcttagagacactgatgggaggttatccaggtaccatgtgcatttgacatgattcaacatgaagcacaccatgatctctataatggactctagccaaaatgttggtcttgaatcaatcaagcctttctttagagattacagaagatgg

SEQ ID NO: 374235 - DNA, 224 bp, Homo Sapiens
tcctacagcgcacagtatgtgggaggaaagattagatgaagaaggtcatttccatggtctaggaaagtaataatagtcctaaaccactgtagtggttatgggacaggtgagagagggtcagatacaaatcatattttgggaagtagaattaacattgtttggtaacattactgaatatatagatagatcaggagcagggaagaggaaaccctaaggccttgagc

SEQ ID NO: 374236 - DNA, 401 bp, Homo Sapiens
cctacgagcgcacgtatgtaacatttatatatgtgatgactcaaatttaccttttcacaaaaatgcaaaattgctattttccttttaaaactaaaaaattaatgtattaccgttagtgaacagaaaatataaataacaatgtcatataattctttaatacttattacctgagatattctaaataagattctgacttaaaaataccaaaagatatatttactcctaaatcaaaaaattacttcaaaataaatacttttaagaaagtttttaaatattgcctgacagtcactatttgtgtctaggacatctaattattggaaacaatggcaaaaagaagagaaaatcacaaatggctaagtaaaaagcctctgcaaaacagcttatgcaatgcgctcgtagga

SEQ ID NO: 374237 - DNA, 380 bp, Homo Sapiens
cttagagcgccagccaaatgaaagcaaattgcttctgaaattctgtttgtagagatagagaaacctttgccagaatgatagctgcatatcaggtactgaactaagcagatcacatattaataccagctcttccttgtagtcattaagattaaaacacagtcatcctctaaaaatatttgttttctgtattagccagacagttgtattaagtaggtacctgctaggaattgcaatccttgcatctttcagttctttgacaattctttcaggaatgcaaattacttttgtttggagggagagctcctgggatctccatcagacttcctgataaaaactacctgcaactccacctgtcatgcgctcgtaggacggggatcctc

SEQ ID NO: 374238 - DNA, 468 bp, Homo Sapiens
  misc_feature (114)..(221): n is a, c, g, or t
aggaggtagagtagcagaggatgaatctgcctgggtggatggtggtgctgtatttatagctaaaggtaaatcagctggtgcttgtaaagagctgccaggtggcttcacaggatnnnnnnnnnnnnnnnnnnnnnnnnnnnnnnnnnnnnnnnnnnnnnnnnnnnnnnnnnnnnnnnnnnnnnnnnnnnnnnnnnnnnnnnnnnnnnnnnnnnnnnnnnnnnaagtgagatccttcttctgttggattaaacccacagatgtcacaaatacaacgaacccacttattcatctcctcctcgctgtctgctaccaagtagaaaatccggtcaatagtgttgatatcaaaaatgtagctgttttcaaactctttttttgttaaatgtcaatccagcatctacttgttgacataaatttaaatcaatatacgaataggcttcttggcatgatcatttttgttatattccaaca

SEQ ID NO: 374239 - DNA, 1016 bp, Homo Sapiens
  misc_feature (652)..(759): n is a, c, g, or t
tctggatgcaagtgtctagctttgatgtctgtcccaaggttccttctggaaatgttcgtggaatctgataagtattaccaggtgttggaggaatgtcataactaatagatacatgcctcatttgagtctctacactcgatgtcccagatggggtattaaaaacatagagttctccatctgcttcagtacttgatggagacacctttggtaaaacatcatgggaataactcctgggcaggttataaaggctggagtcaactgaagcagatggggcacgtgaaggtggagagtcgtatatcatttgctgctgaaaaaagccattcattccatgtttgctctgggaggaagcaggatttttatgagaagggacgttatcattgcagtctgtttcagaagaggtggattttgcagaatcagcatgcgttctggtgggttcgggcttcttgctttgacagttgatgagcaacaggtagtcttgaggatcctcctgaatgccaagagtttccaggtgtggtggaacattgattagctgatatggaggaggtagagtagcagaggatgaatctgcctgggtggatggtggtgctgtatttatagctaaaggtaaatcagctggtgcttgtaaagagctgccaggtggcttcacaggatnnnnnnnnnnnnnnnnnnnnnnnnnnnnnnnnnnnnnnnnnnnnnnnnnnnnnnnnnnnnnnnnnnnnnnnnnnnnnnnnnnnnnnnnnnnnnnnnnnnnnnnnnnnnaagcgagatcattcttctgatggaagaaacccacagaggtcacaaagacaacgaaaccacttattcatctcctcctcgctgtctgttacacaagtagaaaatccggtcaatagtgtagatatcgaaaatgtaactgtagtcagactcttgttagtaaaatgtcacatccagcagtatacttgatgacataaatgaaatcaataaaacgaataggcatcttgagcatgatcataggtgtaatatgactacatctggag

SEQ ID NO: 374240 - DNA, 481 bp, Homo Sapiens
  misc_feature (294)..(401): n is a, c, g, or t
tgctcgacctctggatgcaagtgtccgtttaactggagatccagatgttggaatattacaaaaatgatcatgccaagaagcctattcgtattattgatttaaatttatgtcaacaagtagatgctggattgacatttaacaaaaaaagagtttgaaaacagctacatttttgatatcaacactattgaccggattttctacttggtagcagacagcgaggaggagatgaataagtgggttcgttgtatttgtgacatctgtgggtttaatccaacagaagaaggatctcacttnnnnnnnnnnnnnnnnnnnnnnnnnnnnnnnnnnnnnnnnnnnnnnnnnnnnnnnnnnnnnnnnnnnnnnnnnnnnnnnnnnnnnnnnnnnnnnnnnnnnnnnnnnnnatcctgtgaagccacctggcagctctttacaagcaccagctgatttacctttagctataaatacagcaccaccatccacc

SEQ ID NO: 374241 - DNA, 557 bp, Homo Sapiens
  misc_feature (156)..(263): n is a, c, g, or t
aagagtttccaggtgtggtggaacattgattagctgatatggaggaggtagagtagcagaggatgaatctgcctgggtggatggtggtgctgtatttatagctaaaggtaaatcagctggtgcttgtaaagagctgccaggtggcttcacaggatnnnnnnnnnnnnnnnnnnnnnnnnnnnnnnnnnnnnnnnnnnnnnnnnnnnnnnnnnnnnnnnnnnnnnnnnnnnnnnnnnnnnnnnnnnnnnnnnnnnnnnnnnnnnaagtgagatccttcttctgttggattaaacccacagatgtcacaaatacaacgaacccacttattcatctcctcctcgctgtctgctaccaagtagaaaatccggtcaatagtgttgatatcaaaaatgtagctgttttcaaactctttttttgttaaatgtcaatccagcatctacttgttgacataaatttaaatcaataatacgaataggcttcttggcatgatcatttttgtaatattccaaacatctgatctccagttaaacggacacttgcatccagaggtaccgact

SEQ ID NO: 374242 - DNA, 890 bp, Homo Sapiens
  misc_feature (276)..(383): n is a, c, g, or t
ttaaagtgtcgtttaactggagacccagatgtgaatattacaaaaatgattatgccaagaagcctattcgtattattgatttaaatttatgtcaacaagtagatgctggattgacatttaacaaaaaaagagtttgaaaacagctacatttttgatatcaacactattgaccggattttctacttggtagcagacagcgaggaggagatgaataagtgggttcgttgtatttgtgacatctgtgggtttaatccaacagaagaaggatctcacttnnnnnnnnnnnnnnnnnnnnnnnnnnnnnnnnnnnnnnnnnnnnnnnnnnnnnnnnnnnnnnnnnnnnnnnnnnnnnnnnnnnnnnnnnnnnnnnnnnnnnnnnnnnnatcctgtgaagccacctggcagctctttacaagcaccagctgatttacctttagctataaatacagcaccaccatcacacccaggcagattcatcctctgctactctacctcctccatatcagctaatcaatgttccaccacacctggaaactcttggcattcaggaggatcctcaagactacctgttgctcatcaactgtcaaagcaagaagcccgaacccaccaggtaaattatatatgcccatgttagagagagacagaggcgtgtgtatgtgtgtacacactgagattcttacctttaaactttttaaatttcgatttgcaggcttgaaagagaccatctgtataggcatatgtttcaggctttatatttcaggtttacattcccctattgatttccgatattcaggagattgtatcgaagagacacaatctctgccatctttggcaaagagcagttttccctacaaggctcttttggaaatctgtctcctattttgtagtct

SEQ ID NO: 374243 - DNA, 233 bp, Homo Sapiens
ctctagaggatcctctcctacgagcgcagcaggtggtttcgacgaaaatagaataaaattctaaaacaggttgatatggaaattattttctaatacagtcttttccaggttgcataaagtacgtcccggaacctacgggcgactcaacaaaaacaagatcaaaaacaaccaggtaccgtcagatgaaaatcttcaacgctgtactgcgagttttacgccccctccaagcgcca

SEQ ID NO: 374244 - DNA, 311 bp, Homo Sapiens
tccttccggcgggagaaccagcacgaaggttactccaagtccccgacccctgtccctctcaaactgggctcaaggtcaacctgggcctctctatatgctctggaggtcccgccagagggtttttgaggaagaaaccccgccggaaagcccgccggaaagaaggcctgaactaacaactgaggcgggagaaccagcacgaaggttactccaagtccccgacccctgtccctctcaaactgggctcaaggtcaacctggcctctctatatgctctggaggtcccgtcagagggtttttgaggaagaaaccccg

SEQ ID NO: 374245 - DNA, 351 bp, Homo Sapiens
agcctttccggcgggcatgtactccccaccctggtccctgaccccagcattctccccagctcagtagcccccaaccttccttcagcagctggagggaagagaatagtaaaaatctactgcggtaataaaaggcattaaccatctgaacactcgcccacagtgcccctgcaaccgtctatcctcaagcaagaaatattgtttaatgcagatggtaatgagtgaatcaaattgtgaaaattaaactggaatttgagcattagtgccaggatgctggcatttggcgagtcaagtggtagtgctgttacctccctcctcaccactcagaggcccactcaccccgccggaaaggct

SEQ ID NO: 374246 - DNA, 302 bp, Homo Sapiens
  misc_feature (158)..(206): n is a, c, g, or t
cggcggggatggtcttctgaatatgcaagtgatgctaagcttcaaatatacacattactgtaatgcaggtagaataaactgcacatgcattgcttgttaggcagctaagaaatatttctcttttgtcaactgcaaaaaacgaagtaatcagaggttcnnnnnnnnnnnnnnnnnnnnnnnnnnnnnnnnnnnnnnnnnnnnnnnnnccccaaattggggggcagggggcaaaccttttccttttaagttaaagggttttcccccccgaaaagggttggcccccggcccaaatttcaaaaaat

SEQ ID NO: 374247 - DNA, 392 bp, Homo Sapiens
gaaaagaggaccagtctctgcgcaggagttttggtggtaaacatgtgaggggggcagagtgtgatgttaatggtggctaatctatttattttgaaatgccaaatggtactaatataaaaacttgttcaacctactttggcaacattaaatatgaagggaatgtaccttcttcccctcctccaaaagtatttacttcaaaaatcgatttcctctgtcactggttattgctgcattttgctcagtgggtctgagaaaccgcatggaaaatcacaatgttacactcgttaaattgaccctgcagggctctaccaccagtacatgcatcatcccaagaggtaaaaaggcaaggctgccaggctcatgctgagaatatcatcatgaaatcaacgagg

SEQ ID NO: 374248 - DNA, 349 bp, Homo Sapiens
ctagaggaccccggcggggacatggagtaaaggaaagccccaagcttggacacagcacagctgcgatgccggcggaaccatgtgaaggccaggggcagctgcaggcacaaagtctgagggacaccaagcactcattgcagagggatggccgcggcagcaggaggcagtatgccttcctaacgaatgcaggaaagccagagaaggctttaaaatgggggggtgtcatggggttctcactggcagagaagttctggaaacgagaccgcaaaagcaaaggtgcacagtggggacagccatagccaacagcctgacatgtgacacagcctgacatgggcccgccggaaaggct

SEQ ID NO: 374249 - DNA, 450 bp, Homo Sapiens
  misc_feature (318)..(318): n is a, c, g, or t
agtaacacaaagcatcatacctgggactgggaaggttaatgtttaaacattttaaatgtggcatgggtttgttgaagacagtcaagcagtaggtgctgcaggctttgttgaggctagaaagctgttggtctttattaggtgatggcaaaacaatggatcacattttcatgtgctgtgtcttgggaggcaaatgatgagaatgtaggattggggaaaatggtaaggaaaatccaaaatgttcatgttttctaaccccttcatgccaatcttaaaagaaggacaaacaggctagattaagcaagtctacagttacaattnggaaggaaacacagccgtactaaggaagtactctgtctgtggcctgcagtctagttttgactaggtcctgttattttgagcttttgaaagagtaaagggttacaagtgctcgtattacccctgaagtagtta

SEQ ID NO: 374250 - DNA, 457 bp, Homo Sapiens
agaggatccttaaaggcgagtcgggtacatgcaatgtgctgcgatcaattataactacctcgggagtcaatggtagccggccggtctcttgcctgggaagctcgggtcgtcctcgtcctccagtgattgttgtccagtaaccaggcctcccgcttctctctctcctgccagagtcttttcctgacatctctctgaacaacgagaaggtgctggtggagaccagttaccccagccaaaccactcgactgccccccatcacctatactggccgcttttccctggagcctgcacccaacagtggcaacaccttgtggcccgagcccctcttcagcttggtcagtggcctagtgagcatgaccaacccaccggactcctcgtcctcagcacttgcgccacccagcgggaggcggcggccatgacatcctccatggcccaccaccatcattcgcctccgcgg

SEQ ID NO: 374251 - DNA, 337 bp, Homo Sapiens
accgaatttcgagcatcggtaccccagtacaaggccccgcaatttgcccacatgagatgacccctagtgccagcactcacttgatggtggcacaagccacactgcccatccctgggctgccctctttcaggtacaactcagaatgctcagtcactggggtcaaaccaccttatccaggacgctgattcaggaatcttccctccttatctttccatccgtcactctcctgcctctggtgtctgatcccacatgtctgcgcagagcacgagaatgaagccagaacaaaggctgggctcagctccttttattcccctcgaacctggcggggccttgtacg

SEQ ID NO: 374252 - DNA, 711 bp, Homo Sapiens
  misc_feature (220)..(291): n is a, c, g, or t
cccgccggttatggagtcctcacagcccgcccaggccaccgccccgcttgactctgggtatgagaagcacttcctgcccacacctgaggagctgggccttctggggccccccaggccacaggttctggcctgaaccacacgtctggctgggggctgccagccaggctagggggatgctcatgcaggttgcaccccagtcctggattagccctcttgatgnnnnnnnnnnnnnnnnnnnnnnnnnnnnnnnnnnnnnnnnnnnnnnnnnnnnnnnnnnnnnnnnnnnnnnnngaaggacccctatagagaagggcttggcccccatgggggaagacacggatggaaggtggagcaaaggaaaatacatgaaattgagagtggcagctgcctgccaaaatctgttccgctgtaacagaactgaatttggaccccagcacagtgctcacgcctgtaatcccttgcatccaggtgcagcatggactgagttcttgacaacagaatgtggtcagaagtgacatatgccaacacggggtctgggtgggggctcccccacatcctttccttgcctatgagctggaacataacacatgcctatgatccagctttggtcatacccaaggggaaggtggagcaagaaatgaaaaggaacctgaatccctgaatgactgcatggatagaaccactaagaaaaataaacttttatatttttat

SEQ ID NO: 374253 - DNA, 306 bp, Homo Sapiens
tagaggatccccgctacaaggccacggggactgagcactcaagtcttcctggcctggtctggtttcagggcttccagcggctgaaggctgcccacgcggccctagaggaggagtacctgaaggcttgtcgggagcaacaccctgcccagctgcttgccggctccaaggggacgcctggaagatttgatcctcgcaggtacctgctggggtggaaggcctggaaggacagatgggatgggcccctggggtccctcagtctccaggagggaggcactttgtccttataattgtacacggggccttgta

SEQ ID NO: 374254 - DNA, 401 bp, Homo Sapiens
cgcctttcacggcacaaggtgctggcggcggcgagtgatggtagcaggcgtcaggcaggaggtcttgatggctggcatgggggcttgtccagaaggagcaggcaggtgcgttggctgatggaggcagggcagggctggggtgctgtccagagctgagtctgacccgggcggctcaggctcttgctgggtctggtctatgtgttccttcagctcttccaggcagcttcccagacggtatatctctgcctccagctccctgcgaggatcaaatcttccaggcgtccccttggagccggcaagcggctgggcagggtgttgctcccgacaagccttcaggtactcctcctctagggccgcgtgggcagccttcagccgctggaagcccttgacttggtcctggt

SEQ ID NO: 374255 - DNA, 451 bp, Homo Sapiens
ggataactaaaacgaggtatgacagcagccagcaccgaggagcaccatcgtctcatacgactccaaggcaggcaaaagcagagattgtgccagacggccaacatgcacatctggacagagaaccgtgtctcctgagatcacttcatcactgtatacctacgggagtacctgggacagagctgagtgggggcatttctgagttttccaacctaaaacttgcagagctagaatgccagtccctccaggacagtttctgtgaagctcccccagccaggcagagcaggttttgccacggggactttttgccacatcccttagagaccaattacttggagctcagctctgggctgtttccacctgccctaaatatctcggcagtgacagtcatggctctccagcagcacaggggagcacactgctcacactcagagccctgtcgggctagtcgtgg

SEQ ID NO: 374256 - DNA, 545 bp, Homo Sapiens
  misc_feature (42)..(42): n is a, c, g, or t
  misc_feature (292)..(292): n is a, c, g, or t
acagtaccgctaggcactgtggcagcgtaccacccatctttncagctgaaacatctacttcagcctcctcaaaaagaatccccgcctgtcctgtggttttccttaggtctcctagagctctgcctgttctggaaagctcagcaccccgggcccagtacaaagcccctgccccccagatacatatacaagaccaagccattgacgagcaaagaccaaagggtggacagaggtcaaaggctctcaaacacccgcagcatcatgcatttcagcactgactttcaacatggtttgnaccctggacggggccatgagaaacaggagatctttttctgagacatctggagagaagctttccccagcctactaggataacaaataagaaatgttttcaaggtaaaatacgttggcaacttttaagaaatgttttcttttgatgtccatttattactgcatcaagggtattaaaatctctggctgaaaagaaaaaaataaatctatattatagccaaccatacagctgctttatggaacatgcagataaaata

SEQ ID NO: 374257 - DNA, 740 bp, Homo Sapiens
ttgcatacaataacaggagatcacagttttgaagtctagcacagattaaaaaccacagatgtaccatttataagacacacactgattgtctcttaaactacatattgactccttatgaacattattttttaaataaagtagtgcatctaggacaatcagtcacacaattcacacagccctgaaaagttttttcagtgccaactaccagttggtcatgaaacgtgaatgagcttgagacactgttcattcctaaaattcaaccaaggattggctaaaacaatggaacacctctgcttaagaaggctatgaccttccctcccttccttcacaacttagttttgtttgattttatttttggtggtgtttggttgcacatggctagaatgcttttgatcactttgcaaatcaggataaccaatgatctaaaactatgacaggatcttaagcagattggtttgtccatttcatgttgctggtttgtaggcccctctaaggcccttcgtttttccttctatgcctctcggaactttgatcagatgagtctgagcatcatcccatctaactcttttaaccaatgcctggctaaaactggaatgtccagcccagtatatttaaaaatcacccacaaaaagaggttctacaggtcttcacaaaacctggaatttccacgaggatgtctgatctttataatccaagcagtcagcattgaagttaagcttcccaggaggcagtttggtcct

SEQ ID NO: 374258 - DNA, 275 bp, Homo Sapiens
cgcgccctctccgagaggatgtgctctactatgcggcaggtctggtggaaagttgacagtctccaggccaagagcaaaagcagccagccctggataaatgacttgaagtacttgctcaagggaccctttccaggtacaggagctcttcttaaccagatttggcctgtgctggcagacagccttgttcaggagcccattaaaaaatcaaaatacagacaccgtttggaaagcatagaaagcttgactctgacatctcatgtaccgctgttcgcttg

SEQ ID NO: 374259 - DNA, 458 bp, Homo Sapiens
acggggatatggtggctggtgccacacagtttaattattatagctccattatgtgtatggctacctggtagaacaagccttctcccaccattactaaagtaaaaatgcttatggagcatgcacggtatgccaatgggtataccaggggaacaagcagctaaggtccctgccctcaaatggcaatgaggatataaactactaaacatataaaaacttgaagtggcaataagtgctatggaggaaaataaaataggaggggaggagagagacgatggctaaaggtcttgggtggtgccataaagcaacccacccatcaccctctacaaaatcccccattgcaatcacaggaacacggggtggcacacagtgactctaagggggggcaacatagagttgattatgtcttcccttaatggacagatgcaaaacttttcaacaagctaaacacaggaaaaaaa

SEQ ID NO: 374260 - DNA, 615 bp, Homo Sapiens
aggatcccccggggatagtgccacagcttcccagctggggtgagaaaactaatcttgaactatgtggctataaatattatttatcagaatttttatattcatttaaaattgagggtgtagagtcctttcattttaagatccagaaacagccttggtccaacatgtgctgtagaagaacttcatcttaatttatgtcacaaaataattcagcaccgtatatagaatttggtccctcaaatcatatccctcttatttgttatgattatctctctcatgccagcaaatttaacattaacagaattacatgcggtgtagatccgcagatcgtaaagatacacatgtcgggtggcaaaagtgactctacagcctttatgcaattctgagaaatgtacctgctaaaccgtcctaatcaaaaggacagtggaatttttctcctgtaatgcataatcaggtcaggccagcccaccccatcccatgcacagcacggtctggggctagaaggtaaaacatagtatggaagacaggtcaagatcaaggaaagacagttaaaactatcattaagcgacgggtacctagtaacccacgaggctactgtgtacatacctttcctcacca

SEQ ID NO: 374261 - DNA, 504 bp, Homo Sapiens
  misc_feature (167)..(167): n is a, c, g, or t
  misc_feature (407)..(407): n is a, c, g, or t
  misc_feature (492)..(492): n is a, c, g, or t
cacaaatttgccaatccatgaaagtatcataggaagtctacctttccaaggaatttggcattgtggccctgctcttgccaaatgctctccagcattgttggtatcaaggtggtctggttgagtaaacttgaccaaacaaaaattaactgttttttgcttttctgttnttgttttgctgatcaaaaaagcccttcagggtcttttgtgcatccaggaggtcattgtagatatcaataatatagtgcctaagtgccactttattgccaagtctagattgatacttttttcagataaaccagctttttatgtaaagagtaagggaaaaagttaaatctttaattctgacctgccataaatacccaaaagatataaactgtcttccaccacccccctccattaacttaggncatccttcctggggtccacttctttaatcatggaaacttggattttcctccaattggggccagtcttctggatccttagggatcntctttagggtca

SEQ ID NO: 374262 - DNA, 887 bp, Homo Sapiens
ggtgaaggctgattggctaacatgatgtccttaagggaagggttgtcttccagaaagttcaggtccctctgaacagaccccatatcatactcagagtccacactgtcaagggaggggctgtcattcatggagaaaattttccctgccccaggcatcacgaccagttgattggtcacttctgacagagtgtgccgtctctgcccgctgcgtgtggactgaaatgcctcaaaggcatgagcggggtcttcctcggcctctccttctgtctccagcccttcgtcaatggaggtctccatcatgttgctgggcagtgactggcatccattccgcaccaggacaggaggcacagggtcaagcagacagccattgacctttggagtgtccacacactcttcttccatgaatgcagcttccgcctgacagccagatgctggaaatgaaaaggcctccacgttggatgcctgggggaggagggcagatcgcagcagcctcatgttcggtgaatgcatggtcactgggagccccacagtctgtgcctgtaaatatggcaagaacagacagtttgggaacatgaataccttctctataaatacacaaagttctaagaataaaataattcttcctgtggcaattaaagaatgaatatttatttattggaaactccagaaagatttagtgaaatatatacatggtgcagacagtgatctgaagcagactcagcaatcggttactctgaaagaggtcgtacagaatttcatttctgcctcatgaggggatgcttgactttcacgcaggtgacgagacagctagcttttgtgaggaatcaagaaagttcctcgttcaattcaacaaacatatttgtctctttcttttgggcggacggggtt

SEQ ID NO: 374263 - DNA, 293 bp, Homo Sapiens
caagcgatcatgcgggatgtttctaatacttaagaaaacaagatgtttccagtcattttaaaagaatgcctaggtgtgaggagttccttttgtggtgtagcagaaatgaatctgactaggaatcatgaggttgcaggttccatccctggcctctctcagtgagttaacgatccggcattgctgtgagctgtggtgtaggttgcagacgtaggtcggatcctgcgttgctgtgtctgtggtgtaggctggtggctacagctcccattcgacccctagcctgccgcatgttcgct

SEQ ID NO: 374264 - DNA, 358 bp, Homo Sapiens
cattgtcaaaaagctcccaaagtgtcacacccagagaccagatattactatacttagtctgatctgcagttagcagtctgtcttgaaagctggttactaattctggagcagtccatcgcagagggaaaacttttttatcatctgtttcaatataatcctccattgtacactgctgaatcactattccagtaatctcccacatttcacaatttaagtcaggaggtgagaaaacaattccagcagggctaaatcactgtgcaggaagtgcagcttgtgcatggcagccagccccacggcgacctcgcacagccaccactctgcagcagcatggtctgtgagtccccccgcatatcgcttg

SEQ ID NO: 374265 - DNA, 295 bp, Homo Sapiens
ggccaggaggttctgggctgcctctggctccgtgggcactgctgcttggctggtggtctccgccactggaaaccaaatccaaacatcttctccttcgcggagaaagctcatttgacctgaagaagccctgtgtgcactggccctagcaacccacccagagccagctcggaagggccccaccgagggcctagctccaaaacggcacaaaacgcgctgctaagagctgcattctgcaaagggaaactgggctcggtgaacaatctcacccccatgcggcttggctcagcatcgcagc

SEQ ID NO: 374266 - DNA, 500 bp, Homo Sapiens
gaggatccccacggggattagtgcacggtagagattatcaagacggctcagaaacaaatcgggtgctttctgtgcatagacatggcagggctgtgttccaagagccatcccaggagtcgaagcatctataaataacacgtctcacacctaatgatgaaggaactaacaagcccaaaggaagaaagcgagggcatcacacatagtgaaaccaattctgggaagacaacacctgaagctttcagagaacaagattttcatgtatcaaggaagctgctaaaaactccttgaagcgacggcatgttacaatctggaatattttttcacacagagaaaaacaaagccaggctttcgaaatcccgagattggcttccgaaaaggcacttaactttgctcaacagttttggggagctctttttgtgtgggcttacagagtggctgtactagactgaatttctttttgcatgggagctggtaactgaaatttaaagtgctttaaaaaa

SEQ ID NO: 374267 - DNA, 557 bp, Homo Sapiens
accccaagcgaacatgcgggatcagaatggtgtgaatgacagccgcactgtgtcatgaaggtggtggtggtttccgcacaagagaccaaataagaagaaagctgagagaggggggaaacgtttttggatgacaaaggatgggtttccatttaattacgcagctgaaaggcatgagtgtggtgctggtgctacttcctacactgctgcttgttatgctcacgggtgctcagagagcttgcccaaagaactgcagatgtgatggcaaaattgtgtactgtgagtctcatgctttcgcagatatccctgagaacatttctggagggtcacaaggcttatcattaaggttcaacagcattcagaagctcaaatccaatcagtttgccggccttaaccagcttatatggctttatcttgaccataattacattagctcagtggatgaagatgcatttcaagggatccgtagactgaaagaattaattctaagctccaacaaaattacttatctgcacaataaaacatttcacccagttcccaatctccgcatgttcgcgttg

SEQ ID NO: 374268 - DNA, 783 bp, Homo Sapiens
  misc_feature (47)..(59): n is a, c, g, or t
atacctagccacacccaatgatagcatcaagtagaaaacaatactgnnnnnnnnnnnnnctagcttctaaatgcaaataagactggatattttcccacgggtacctctatgtatttccagatctgtaacttccataaaggacatttacataaaagtaggatcttggtaatggcagtttaaatattcagtgtgcttggtcctcattagaattcaaaatagagccttgtctgagtctgacagagggcgccaattgtgaaagaccagactaagaattctgaatgactcgggtggatgtacagtctggcttctcagcatatggactattacgtaatgtggtctaagcacgtttatggtgattttagtagtgtttcagtgatgtggttagaaatcaacccagctgacattgcattaatgctgtctcaatcgacgaccatgggatctgccttcagctcatctgaatgtgatcttctaagggagggggggcaggaccctggttaagagtagtagcatgcagcacaggtgtggcgtccgacagtcctggggcacaatttgggatctgccacttacagcctgggtgacttagagagctgcttgccctctctaagtctcagttcccttcactctaaaaggagaatagcaattagtagtacatgtgattgttctgtagactaagtgagaacagttaggtggcacaatgactagtactagtgagtcctttataaatgccagctatgataatacgtgtggtgaggtctgggggatcctctagtacagccagggcaa

SEQ ID NO: 374269 - DNA, 556 bp, Homo Sapiens
taaggagactccaaggcctcaaaacacaaacattgaatggatattataccaaatgtataataaatggctgagaaaatttatggtgaaagtaaaatcccactgaggtataattcaacactcaaagaaaatgacagacagaaaaatcatggtggacacagcactgtgaccatgaagtcaggggggtacacctcttgactggtggggctctccaagtagtgaccccgaaacttttcagggaccactcattgacaccccccaagtgatgaaacatgccacctcctctcacttacagagcacgggggagcacacgaagtgggtcccatgctatcaagaaaccaccatgtatcgatactagtatatgcaaaaaggcagaagtgaatcactgtgaatcacttgccacgttcagacccaagaggaaaacctcgggctctgggctgcggacccttgagaagaaggtactggagggctcactctgctctcgccaggaaagggcgaaaatggaccattcttacctttctagctctctgatgggtaaggtatggggtacgagctcgaa

SEQ ID NO: 374270 - DNA, 483 bp, Homo Sapiens
gagctcggtaccccagacctaaccccaccaaatcctaagcatcttaaggagtctggatagactctgggcaaaactaaacatatatccaagattgtttttagttctcccaaactacctttcagatttcacaactctctttcatccaggtaatttccttctcatctatgtccttaaactttatcacaatctggtggtccaaggcctctcgtctcagtaccctatcaatactgctgtaaccaaaattactcttcccccactgattccactttccatcaaggcatcctttctttcaaagaagctaaagaaaggagaaaagttttcttatgaaacaaatttgctgttaagtgaattccttaaaagtattatttgcaccctcaaaaagaaccctagttaatgtctcaattttatgtaactgcaagcagcaacacaaaataaagaattagtcttcaaaataacttgaagatgggtgtggggttaggtctg

SEQ ID NO: 374271 - DNA, 380 bp, Homo Sapiens
actagaggatccccagactcaccccacgtggttggtatttgggttcaacatatagtagctttgtaactgctggtgtgccactaatgctctccaaatattaaggaaggctttgaatgctattccaagatgtttaggctttcttccacaggcagaagagagcctttgaaagccttggagcagatgagtaacatagtagaaaaaaatacttcgagataacttgcaaagaggagttgtcaatctccaggatttgctcagctccattctccttctgggcacatggaagttctctgtgtctggcactgcattggttctccaaatctcacaaacagtgcactgaatgactgtgatgattgaataattgaccaagaaacccagataat

SEQ ID NO: 374272 - DNA, 657 bp, Homo Sapiens
tagaggatcccccagtactaacccccaccgcttaggagttagctccattatacacaaccaagcacaggagaaacactcaccaggaaaagatgccggaggcttggaagttctcaagggaactgtttagacagaggtacaaacatctccaattcagacttccaaatacactaacaataattaaaaatgtggcctctgatcctcatgtttcctcaccagtagaggcaaaaaaggagattttcataactacatgttaaaaagaacatgttcaagtaaatccacacactacatgtgagtgttgcatgctgttcttccacaatataaaagtataaaaataagatttctgacctttgtatctagacagatctggagaaaacacggttgctactagctaactagctctgtgttatctgagcaggcgcgctatcccagggcctcaccttcctgtgctggctcaagagggcagaggaatggagatggcaatgccttttcattccaggaaaccaaactcagatggcagaaccagccctagccatgtcgcatagcctctccatgggtgacactcctgggacctccaatggatgggagaaagggctctcagcccagcttcacgtgaggcggtgtgggtcatgtgtggggtagggctggggtaccgagtcg

SEQ ID NO: 374273 - DNA, 708 bp, Homo Sapiens
cagtacttggcttccaaagtactggaaatacaggcatgaattaccatgtctggccaaaaatactagtttcaagtcccagtgtataacaatatttctctttgcctttaaaaaataatgacatggttacctctggatctttcaggaatgaatcagcctgttggtgttaccaatcatttactgtccttcctttgttccttcccatcatttggacatttgactctttaccctgatcaaacccatccattcacttctattcttaatagaagttccgggaaactggaagagaacaagttagaagctaaagctgttggtgcaaataaagctttggattgcctgtggattttgaatatcttttccattcctgaccccctcaacggcatggataattcagtatctgaatatatgaatagccacgaatgactgataaagacaaatctctttatgacgcagttcaaggagcagcttgctacagtttccgtttctgctggtgcgctgttcctgagccccacaggcttgccgccttctcatcagctgctgttcctttcagtggggtagggggatgaggcagtgatcacagacacctggctatggcttgcagcagagttacacaactgcacacacaaaatggcagagaaagagcaagagctaaaaagattctggtttgggcccaaatcactagtcatttcacttcatgaagaaaagcaaata

SEQ ID NO: 374274 - DNA, 646 bp, Homo Sapiens
agacctaaccccacactcaaaggggcatgggtggtggagaagcagaaggagcaatcaagcttatctggatatttctttctttatttattttacatggaaataatatgatttcactttttctttagtttctttgctctacgtgggcacctggcactaagggagtaccttattatcctacatcgcaaatttcaacagctacattatatttccttctgacacttggaaggtattgaaatttctagaaatgtatccttctcacaaagtagagaccaagagaaaaactcattgattgggtttctacttctttcaaggactcaggaaatttcactttgaactgaggccaagtgagctgttaagataacccacacttaaactaaaggctaagaatataggcttgatgggaaattgaaggtaggctgagtattgggaatccaaattgaattttgattctccttggcagtgaactactttgaagaagtggtcaatgggttgttgctgccatgagcatgtacaacctctggagctagaagctcctcaggaaagccagttctccaagttcttaacctgtggcactgaaaggaatgttgagttacctcttcatgttttagacagcaaaccctatccattaaagtacttgttagaacac

SEQ ID NO: 374275 - DNA, 419 bp, Homo Sapiens
gggacccccggggagtgtgtgcggactttggccactcctgagagcgttgcacacaggactgacaggctcacattccagatgacaaagtcaatgtggcccagaggaagcaaagaacaggttttatcaagtcctggcagccaccataacaaccactaagtgattcaactcaaccataattgagttgccgggtctacttgctgggtgctgaggaagcaaagacaagctcaagctagccactctcacttaactgttagaggacaccagccaggagaaaaacacggaagttcaggaccaaccaaatgtccaggcaggaaggaagaaccccagccacctccttgtaggggagggaaaaatagtgcatggaaaagggaagatataagcacagaggatcctgcgggatccttctagatcgactacgc

SEQ ID NO: 374276 - DNA, 604 bp, Homo Sapiens
gatttcgtgccaaataagtactgatttctaaaactatctgctgaaaacaattctggaagttttctgctatatcttatgtgcaataggttacatgtcgctaatatgtatcaattacatttggagttcttaaaaacaatgtggtattcaaagtagtcatagaagatattttgtgccttcatggcacttttttctgtcatataacgttgtaattttttggtaagacacatgaaaatttaagttgctttcacctttactgttttctcagagcttggtttctcatttttatgttatagattattttaaaattagatatgaaattcatagaaagtcataaaattgtgactagccatgaaaaagaatggtgcatgagcaaatatttccaagttgacacatcatgggtattcagagaccttcctctgcacaactgttacctatcctcctatgtaattctattaaaagagagtaattccttagtcacaaacctagttcctccctctcctcccacttctgccttggaacacgataaggcattactaagttgaacatcttggggggtccataattaaagattcaacatgtgcacaaaatcccgggggtaccgagc

SEQ ID NO: 374277 - DNA, 258 bp, Homo Sapiens
acggggttttggtgcaacagagggcagtgtaattactcacttataggtctgtctccttaacgaggctgtcactcatggatagatccactacaatccatggagtggccaagccagaaacggggcctgccggggtctacctaatcatgtggatggaatttcgcaaacaactttcaaatcatcccttggcaggtcctataaatgtccagccaggcaattactacagcctcctcactgtgcttcttcgtcgtgcacaaaagt

SEQ ID NO: 374278 - DNA, 218 bp, Homo Sapiens
tggtgccagtgtggcagactcctctggttaccatgtcttcatactcttttgacttcccgggctccggggaggtcctgtgtccacaattcattcccatcccttggcagggctggccctccacaaccgggaatctgtgtcatcctcaagatcttagcatccgattccccgactcacagccagtcccgggtttcggctgcctccggcacaaaatcccgggg

SEQ ID NO: 374279 - DNA, 279 bp, Homo Sapiens
agatatgcgtgccatcgtggagacatcatttattttttaagcacaaaaataatttggggttataattcttagcatacagagacacagatgcctacattctaatgactaatataaaaccttttatttggcaatttggaaataaacactttttagatattaacttatgaaataaggttacagaaaattattcatagaaaatattacactatagatagattactcaaatcactccaatgaagtaatttaattgaggtgttcataaagcagctcagagtctgg

SEQ ID NO: 374280 - DNA, 209 bp, Homo Sapiens
  misc_feature (15)..(15): n is a, c, g, or t
cgagctcggtacccnattactgctcatgtaagtgagagcaggatttggcatcttctggtgtccctgaatctctccagcacaagaacgttgggcttaaagcgacttttccactccataaatttggctaattctgataggattcactggaaccatcaaccagcccgtgtttcttgagcaaggagctgtaacgaggtatgagtattcgtacg

SEQ ID NO: 374281 - DNA, 311 bp, Homo Sapiens
aaggtcgagcttgtcagaggggcagctaaggggtgggaggcacctcttcatctaaatatccagcaaagaagccttaggtaactgttccaggtcaggtctggtgttgaggggtgcaggccagggaaggcttcacagaggaagtgggatctagtctggatctcggggactgagtaagagctggacagagggcgctgagggcttggcagctgtgcaagcccggctatgtgttcagggaaactttagttcagggagggcacttgggcaaagcaggggagggaggcagtggctggagcacaagaggctgaaagtgg

SEQ ID NO: 374282 - DNA, 412 bp, Homo Sapiens
gtcactccaccctgatagctttaaggggaaagaagcaggtgccctgaaatttccattagccaaacctgtagctatacctgtacatccagtaggatgagaaagttgtaaaatctgttttgaaattcatgcaaaatccatacgtttgttttcatgctacagtgttttctctgtacttgacttgccttcgttctctggtcatgttatttttgaaaattttcagcttttgctttacagaaagaaaaggaaagggatttctgcagatctaggccaaggttagctcgggagatgcgaatacatcagagtccagatcaagctccatcaagtgtggccccctcttcctcagctgcgacagacgtgtacgtacacagtcatccccgtagtcattcaatcccgtatcgtgagcccacacctt

SEQ ID NO: 374283 - DNA, 308 bp, Homo Sapiens
ggtctcatgtgctggaaggtgccagggaaatgggcgctgagctaggttctccagcaatttgaatcttgacaagaggtggactatgagacctcttggaagcaagtgcaggtcctgttcaggaggcgctgaggtggagcagattagagaggaggttgggttcacttccttccaggtgtgcgtggttgggaccctcaggcaggcagcctgataataagcactcactgaactcctactccacaccacactgtgctaggcaccacaggggacagagggactagcatacggaactatgaggctcacgcaccttc

SEQ ID NO: 374284 - DNA, 308 bp, Homo Sapiens
aaggtcgagcttcgggacagcaagagtgtgggtggaacgtatcggtgtattgacggatgtgtctcaagctgcatggaatatctagcacccccaaatctagaggctttgcaaactggttatgttctacagagtttgagagggaaaatgaacccataatgaggctttattgttaaagagccttaaccatctaatttatgaataccatctggagacaggaaaacattccatactcacaatgagaaataaaggactttctgaattacagatacatagacatacagatagaatgtgtataccctcaattctac

SEQ ID NO: 374285 - DNA, 394 bp, Homo Sapiens
tcggtaccccatccacccttgaggtgtacattcttaccatttttcttgatcattttcagaagcggaggacactctcaagtccgcccattccttcttgaagggttctaagtttttctattaaacccaaatctgtgtttctcataacatcctctcggctgagatataactaattaatcagctccctcttctagagcgttttcctcacatagaattctttctctttgtggcagactggtaattctcctccacattgtctgtttcacccttcttcaaaagcaacagttttagctgggtttggggttacctagcataagaccatatttcctagagttctttctgctgggtgtggccatgtgactaagctcagacccttccggtctgagttcccctaacg

SEQ ID NO: 374286 - DNA, 907 bp, Homo Sapiens
  misc_feature (757)..(757): n is a, c, g, or t
gctgagacgcgtatggtacgattcctccctggtcactacgcgtggtcctattctcttctttccaggagacgggagcacatgggattgccttggagggtcctttcacaggccccttcatcttgcacttaaatggacatttccccccacctctgtagaaaacacggtgttgctagaaatttagtaaacaaaaaagaaacgtttccagggtgtcggggctctgaggctctgttcccttaaccgacacacagtgactgtttactgtttgctccactctaagttccaggtttaggggcagaagaaaattcctaagcagttgtacaatacattctccaagcatgtccccagacaccgtctcatttaatccatagtaatgaggttgaaggagattgaatgttattgtcatttcacaaagtgactgaagctcaaaggggccaagtttccagggccacagaggggcaggatttagattaaaatttgtcttctgattgttcttcccaccccacatgctgcctttcaaggaaggtggggatgacgggagagctggtaatttccccaaaggcttttttgcctaacagtgaaccagaatgcccactcctggtgcccaagctcttggtctgggacagaaatctattgtgtttactctcgtaatgtccagcctgagttgttcttgccctggtgctgagcaggctgccaagagccatcatgaccttttcctggttctgggggtgatggatgagggtctgagagagagtttgcnctcctgcccctcagtggtattagctggtgccatgcatttctggtactgtatcagtgtcatgtgtcatatgggccagagagttcccagctggttctgggctatttgttgtgaagaagtctgactccaggctctaaaagttagccagagaag

SEQ ID NO: 374287 - DNA, 207 bp, Homo Sapiens
agagggtctgagcttagttgagtgattcctggtaagctgtgtgagttaaggcaaaatggatagagatggtggtaggggtagggatgccagattcagaggaaccccagatgcaggcaggaggtcaatttgtattcatacacagacttggagatcttggccctttaccatcaggaaggaacttagaaatgttgtggaagctcaaccttg

SEQ ID NO: 374288 - DNA, 286 bp, Homo Sapiens
cttctgggaaagtgtgaaaacgtcaggtctccccttcagtggccctggggcacagctgaagcccccgtttaagggctcactttcctgttggatgacagccggctttctggtcctctttcctagttgagtggaaaggcaggaaatgccgtgggggcctggggttttgattattcgaggtttcaatgtttgctgaaactgagaggagaggggccggctagcttgaggtctcagggcctgtccctgcgggcggggcctcccccctgggggcctggtcctttccactgcc

SEQ ID NO: 374289 - DNA, 523 bp, Homo Sapiens
ggtctgagcttgggtaagagcctggtatgttatcaatgataaatgcaccttttttcctttgacaagggagcttttggtcattttactactcatcagtactttctgtgctggggagactgggaaaacagaagatgaaagtaaagtaaaggagctcttctacttgtaacagggctgctaaagcatttagtgggagagaagcttgaaactataggctgaagtcaagctagaagtccctactggttttaataatggtcaccatcacttaggataacgtacatataaatctatccttcctactctgagaatgttgctgtgtcatcctgagacactagctccaatttcataaccaactgtggaagtgaccacagtacacatgccatgcagacacatatcttcagagagggaggtataactgctctgcttatggggcacttactctctgccttctagccctcagtttactccatctcccacaatgtctgaagggaggcgtcactacatctcttatacaacaaaaatcctg

SEQ ID NO: 374290 - DNA, 288 bp, Homo Sapiens
aagtctgagcttccagtgttccagaatgttctctggaacattcagggcaccttaactgcttctcatatgctccagtggcctctggatgccaaatcgttggtgacagcctggcatggccccatcaaagagggtgcctcctctaacagctgcgtcttccacacctgcagaatccaggtccacccaggcactatgtacctagggatttgtatgtatcagatcataacaaaacataggtggacttgttaagaatgatttttgtattccaccgtagaccttaagctcaacctt

SEQ ID NO: 374291 - DNA, 172 bp, Homo Sapiens
aaggtctgagcttatgctcagggtgtgtgtgtatatgtgtatgcatgtgtgcacgtgagtggtgtgtttctttttccagttcctgcatcctattttgacactggttgtaagaagatcttgatacatacaggttagctgttacaaaagataaaagatgaatcttcagtggtaa

SEQ ID NO: 374292 - DNA, 454 bp, Homo Sapiens
cccggaaaggtctgagctagcaactgcaaaggtggagttgccatttacagagatgaggacggtgggaggagcaagttgagaggggagatctgtttgggatggtgtcacggcttcttgacatatctggagctcagaagcgaggcctagactggagatgttaattgagaagctgtcaacctatagatggtttataaagccttgagaatgagtggatgagatcatccaggggatgggcagacagaacctagggcagcaagatggggagaagccagggagggaggagagcaggagaggggcatcctggaagccaggccaggaccaagtccaggctcttaatcagctttgaatagcaaacacctatcattttttaagcagtgaagaaaaaggcaagggtaaaagccaaatgttattctgaggtctgaaatgaaacaatctgaaaatgagccagtttcac

SEQ ID NO: 374293 - DNA, 314 bp, Homo Sapiens
tttttgccttgcggagcattgtgtttgtcagctattatcattctaaatttgcataaaagttatcataatagtgagagacattaaatgcattaattatccattaaaggggtaatttaacagtcattaagagaggcaccagtagatgggtgatcatctttacaaatgatgtacttgatctaagctttatataacatcaaaaagattaatctgccatttgaactttggtaaaatatacattttgtttacattttctggtgttctcgtgagaggagaagagctgaaggtccgcaaggcaaaaaggggatcctcagagt

SEQ ID NO: 374294 - DNA, 475 bp, Homo Sapiens
ggctgccctgcatctctgtttcccttaaggaatcctcatcaactatctctgctggatttgggagttccgaatcgtttagtgtgcatggcatagtctggacatcttacacccggtggtcaagtgtgtaataaacttgagcattctgagatgggagaaaaagcgaaatcgcacaattgacatattttgagtaataaccgtatttttcacagggtgacaaattgggccaataaatctgccatctttgaactcatctttggtggctagactgctacggcagcttctctgatgggaaagttccttttttggcttaacactcaccctttcttcacactcacatttaccaatgactctgctccgtttttggagcagactgttttaagttgctcaggagcctgatggaaccatgaaccgagactcttctctgtttcctgccaagacctcatctgcactaatgccttctccctgaccttgacac

SEQ ID NO: 374295 - DNA, 148 bp, Homo Sapiens
caacaccacttcagtagtagaatctcttccaggaaacaacaccacaaaggtggtggaatcctccagcatcataaatggcactggtcctcaaaatgcaattcactgaattccatgaaaatatgacatacggagtagaggcaaccgcgta

SEQ ID NO: 374296 - DNA, 148 bp, Homo Sapiens
ggtcggaccacagatccggggcatgctcggtaacctcatttccgtgcgtgaagcagtgcatcgcgaaagctacacggatttctaccgtccggccgtcagtcgtttccaactggtatcggaaaggatgcaagtggttgagcggaaagga

SEQ ID NO: 374297 - DNA, 637 bp, Homo Sapiens
gagaggtctattctcacaagattcgaatagaccacgtctgccctaagcaagggtatatatggctaccagtggatcccatggtatgctacttattagtagcatgtgctttattagcattcagtcatctcgaaagcattcttacgacccatccaaaccccaacattacttaaagctccaattcgagatgtatcaatgtgatgctatcagcacagaatttctctatcgtttacacttctacatgaatttagggcagtaatcatggagcttaggtacttctctttctgtaactatttgtaggctaaacaagactgggccgatacgagtttgctgtatttgccaatgcctaatacaacattagaaacaaaacgggtttaaattaagcaaaggctgagagagtaaagttgttattattacaggatgaggaatcaaacccaaaatgtagtgttttgctgctgcttttgaattgttttggcatgtgtcaggtgctgagaataaccattactacatctcagtctgatttaactttcccaaacataaaatactgcagctgctattagaggtaagcaatctatctccttacactacgctgatactgcaaataaataaattagcatacaggagtagagcaacggcagta

SEQ ID NO: 374298 - DNA, 288 bp, Homo Sapiens
  misc_feature (269)..(269): n is a, c, g, or t
caggcatgaattgagaagatcctgagcgaggacccccggtggcaagatgccaacttcgtgctgggcagctacaagacggagcagtgcccgaagccgccacgcctgtgccgccagggctatgcgtgcccacactaccacaatagccgggacaggcggcgcaacccccggcggttccagtacaggtccacgccctgccccagcgtgaagcacggggatgagtggggggaacctcacgctgcgatggcggcgacggctgccagtattgccantcccgcacgagcagtagtt

SEQ ID NO: 374299 - DNA, 642 bp, Homo Sapiens
tacttcctggtcgcaaatgcttctggctcatcgaatgggttcaaatactgtggagtctcgcacctctttaaagggattatagctgttattataaaaagagtcttctgtttttctaggtgaagctgtttcagtgataggttcttctgagtcaggatctccaaatggatttaattctgcagcatcaggatcatcaaatggatttgaattcacggtggccaagtccttttctgcttcatccaaaaagttaagtttgttgataagctcttcagaggaactggctgatttagctgaacgcatatttgcttgctttatgcagtcatcttgatcttcatctaagctgctcagggcattcaactggtttacaatttctgtaattttagctgccttttcttcttggttcactctgttctcatcatcatcttcattatcttcttcgaagtcatctaaattgccaatgtcagcctgcttcatactcatcaaactagccaaactttgcatgtcttcatctgtggcttttccttccctcagaaaaatgcaagataatgaaaactgaagagcggcagatacaacttttttagataatggcttgaattttaacttgacatcagtctgagttggcatagggcttgcatactgtttcat

SEQ ID NO: 374300 - DNA, 801 bp, Homo Sapiens
ggtcggccctgtgacatctatgagctcaaacaatcttggatcttcaatcctgaagaacaaaactcaacctcttaactcctctcaacattacctcatcctctctacctaactggaactcaacctcacccaaacactgactcttgatcacctgagtttgacttttcaacatcatcaaccaacctcggcctctaaatgtcataagccttgtcttctgatccttctcacctcaaccatgtcctctcatcttcctcctacagaccttaaccatcctccttcttttaacctcattcccttgacttcaactgaccttgtcctcacaacttcaatcaacctcattctcttaaccttacctaatcttgttccgtttactttgactccatttcctaaacctcatctggtagctcaacctcccctgttctccttaactgggtgatatggtttggctgtgtctgtacccaaatcttatcttgaattgtagttcccatgtgtcatgggagggacctggtgggaagtaatcaaatcatggacgtggtttcccccatgctagtctcatgatagtaagttctcacaagatctgacggttttataagggatttccccctttgttaggctctcatttctctctcctgccgccatgtgaagaaggtcatgttagcttccccttctgccatgactaagtttcctgaggcctccccagtcttgtgaaactgtaagatcaattaaacctctgttcatgtataaattacccagtcttgagtaggtctttattagcagtggaaacagaactaacagcaactgggt

SEQ ID NO: 374301 - DNA, 540 bp, Homo Sapiens
gtacctatctatggaatggaatcaataatacagcacagttagtgttgtgcaaaccagtttatgcgaatgatatactaaggtccatggccaacagacagaatgactaatgaatggtaacaatttaacagtcatgtgtcataaagctacattcccaaaagctctctagcttcttgtttccaacagtgggattgctcatctctcagtagctaatctgtgaaattcctgaattgtatttgtaatttgtgagcaaatggtgtagcctgtttaaatgaaaggcttcactgctggtaaacagccaggctctaattttattttttcaaaaaggtgatgattggagaagaaggtggagcaagatagcagtatagaaccctgcaaagattgtcaaccctgcaggaacactgaattgaagaactttccatgaaacaccttcataaggactaaaaatcaggtgactgatcacagtacttggtattaacactatattaatgaatggggcactgaagagcacaggaaagacagacttgaatggcttacacaaac

SEQ ID NO: 374302 - DNA, 614 bp, Homo Sapiens
ggtaccctgtaccatctatgtgagaggagggtagggatggagagaaaggttgtaaaagtgaattatttgataaagtaatatttctgcttacattacagaaagctaaatcatcctgtgttctacccccgttgctttgctggaatttcttgtgacagattctgatgcaccagattccaccacctccccgagagtcacctatttgcagaagtcattataagccattgtttaactaaaagcttttttcttttctttccttacaatttttaagaccctgcatctgtatagacctgactcagcagctttctagtttgagaattttttacttcttctcagattctggattgcacttccctaatgtcctgttcttcattcagaaatggctaagactggcccagactttggctccaggtgggaagtagtttcaccacaaaaggacacatttttgtatggggactctgaccccagtccctgggtacctggtgactgagctctccttcccgcctgcttcatgggcagactaacatttttaccagtgtaaatggttacattctctgggaaagtacatttgtcagggtggtaaagcattcgcatagatgttacagggtaccgactga

SEQ ID NO: 374303 - DNA, 490 bp, Homo Sapiens
cagggagagggagggtgttagagaatgagaggaaaagagagagaatacctacatataaggtgaccctaaacgaaaagcctctcaccctacggaagatcttttcattctcattagtctcagcgttgcaaacaccaacttgtaccagagggaagatctttttttaaaagtgtttcactaaaatttgtaaggaaataatgagctagataaaatattacagtgtttatttaatgaatttactcatatttaaaataatatctaaaaagagtaatttaggaatattgaggcaatgagacttgaaggttataaatagtggcagtgagaaaaggaatattatagataagctgttgaaaagaaaagatgctaagttttctagtgcttccttctgtttccaagggattatagaaatcggagtttgtttgacctgtttcacaggcatctcctttgtggactcattgtgtctcttccttaggctaatagtcaccatttatca

SEQ ID NO: 374304 - DNA, 813 bp, Homo Sapiens
  misc_feature (359)..(651): n is a, c, g, or t
  misc_feature (660)..(681): n is a, c, g, or t
gttgtgtactgggaaaacctggcggtattaaattaacaaaacccattagtaatactgtaaacaaacgattagaaattaaaatagtttttgctaatagatttaaccagtagagacgatacagaggttttagtaaattagaaaccagtactgagttcttcctcctagtgagacaaagagggaaatatgaaagaatataaagacaaagaggatgaattaagagccttcaacacacatctgaaaagagttccaggggaagagaatggaaggaatagtaaagaatatttgaagagataataacttagatttttactaataaaaaatgtgagtccttaacataaatactgagtaccaaacaggannnnnnnnnnnnnnnnnnnnnnnnnnnnnnnnnnnnnnnnnnnnnnnnnnnnnnnnnnnnnnnnnnnnnnnnnnnnnnnnnnnnnnnnnnnnnnnnnnnnnnnnnnnnnnnnnnnnnnnnnnnnnnnnnnnnnnnnnnnnnnnnnnnnnnnnnnnnnnnnnnnnnnnnnnnnnnnnnnnnnnnnnnnnnnnnnnnnnnnnnnnnnnnnnnnnnnnnnnnnnnnnnnnnnnnnnnnnnnnnnnnnnnnnnnnnnnnnnnnnnnnnnnnnnnnnnnnnnnnnnnnnnnnnnnnnntccatctcnnnnnnnnnnnnnnnnnnnnnngtagtaaattcataccttgacacatcttttgtaagatagaacatcaagaatcaaaagaaaatgtgaaaagctaccagagaaaagaaacaatacaatgacaggagatacttcataaacaccatagattaatat

SEQ ID NO: 374305 - DNA, 522 bp, Homo Sapiens
  misc_feature (40)..(40): n is a, c, g, or t
ttttaattaaaaaaatgcacattcaagagcacaggaagtntgaactagaataaatgcaaagtcacatcatagtcaaactggcaaaggccaaagagaaaatgttgaaaggcctcagagaagaatgacccatcccatgaaaggggagcttcaataccgccagccactgacttcttagaaacaatggagaccagaaggcagtggagtggcatactcaagctgctcagagagaagaaccatcagccaggaatcaaaaccgttctacacaagtgaaagggaacgaacgacattccctgagaagcagagactggtgggattcattgttggcgaaacctgccttaaaggaaatactaaaggaagaccttcaagttgaatagaaatgacaccagacggtaacttgaatcctcaggaaggaaggacaggcactgcagatagcaagtgtaggttgacgtcaatatcctgtaaatatctctcctcacatcttagttttactggaactacgattgtataatattacactcgccc

SEQ ID NO: 374306 - DNA, 682 bp, Homo Sapiens
tcagtcggtacctgataacatctatgcatttattgaggaccctactatgcactgaactatgctgggagctaaagacacaaaacctatttggagatgtaagggatgctcctgaaatcatagccaaaaaaagaggccaggttgtgtaacttggcaggttggcttacaggccagcacggtgttttgtttcgttatggcctatgaatgcctaccagtgctttaaactgactcaccctggctggatggcagttgaacttgcagccattagaccaggggttctagtctcttgtcactccaatattcttctacgaactaccaggtagtacacattcatcaaatgatgacttagcactgactacagcaaggatatgtgatgggctaccagaagcagccaggtttgaactgagcacagaaaactgcggaagggttggacaggcagagagatgaggcgagggcacccctgccagcaaggaggaaaggggagaccagcttggctaaagaagaaagtgcctctagaagaagagaaggcagcaaagatctcatgatcatttaagctgacatctgaaaagaggaagacaggtgtgcctagccccaaaccaaatacagttcaccactcacctctgctctttcagctaagttaagaactgagatggttgaacccatagatgttacaggtaccgactga

SEQ ID NO: 374307 - DNA, 506 bp, Homo Sapiens
acatctgtgatcgttcaggcctcagggttccgcaatccctgtactcaggcataggcccttctgctcttcccactgtagagcagcacccatccccaccaaacctcacttctgggtgtgacttcatagactgtcgtgttctgcagtaccctcgagtccgaggctgttgagtctgaaggatcctcagaagactggcctctttctgatggtttatggactatggcaaagatgaggaaatggtatttggagaccacatactgggccctaggggtgctctttgcaactgcaacaaacatggacagaattgggaaatttgtttttaatggtaaaaatacatgatgaacagtaccacagagattttatttgatcttactgatcttatgccatactaaaaatctcacttcccaaccacaccaagctaattcattctatacatacaacaaagctaatactaccaccaacaataagaatagtaaaaacaggttaagattttcttttctctataattg

SEQ ID NO: 374308 - DNA, 524 bp, Homo Sapiens
ctcgaccccgttccccgcttcccctccgagtccctacagtccattgtatcattcttacgcctttgcatcctgtgcttctttcttgcctcccatcaacacattctcctactgaagctatggtctttctagaactagtaatgtaccactcccctgatcttactgtggcctagcctgaattcctaggtcttataaacaagactggcttctctattgctccaaactaatatccatagcttaccatgctgttctcatttatatgccctcactcatgatgttctctctgcatggaaatctatcacatccttctgcaccaacgcctattacaagtaaactttctcttgaaagctgagacagatcaaatctagataggtgcctctcctcctagtgcctaaagtcctttatctagctgaattgtaattgcctcttatctctcccattagactatgtgtttaaagaagacagacctatgtcttagtttactgtatattcatagtgcctagcatattcatttaataaatgaactt

SEQ ID NO: 374309 - DNA, 587 bp, Homo Sapiens
tgtaccatctatgggacaacttaaagttctaggaatcagacatgtttgtgaaaaatgtcccactctcatggcctgaatgtattaccatatctcatataaaattatcttcttctagatgatttgtgtgtgtgtatgtttcagcccttaaaccaaaagcacagtacatatgcaactctgattatttaaaattaaggtgctgaggtcagagacacattaggaattttaagacagtgcgagaatcattctttctccttcctactccttcgtatctgctcagtacaacatcagacaagcatgcgcagcaatagcatttgttttgataatgacaacagcaagaacatttgtatgtgcagttttagactgtgggctcatctcagcggcaggcagccttagtcaagggaagaaaaattccaatcctgagttatagagccgattttggtaaaaagcacgttttacacaccaattaggcaaattgttaaatgattttagattaaagagcaaagtagcactcaggataaatttgaaaggatagagggaacctgaataaaaaagaagcatgcatagatgttacagagtaccgactcgat

SEQ ID NO: 374310 - DNA, 562 bp, Homo Sapiens
ataacatctatgcagaggctctatgaggaatcttcaggatatttttcaatagacagaagtaaaagagatgggaaaccagtattaatttataaacagttaggtgcccaacactgtgctaggtcttgccacatgtctcatctcatttaatcttctttaattaggatcaaggtccattttagcaatagtcaaagaacaggacttaggacacctagctcctgatacttaaaattacttaaagtgcattatggtgacacctcagataagtctaaacctctttctaccctgcctaatcaaatattcatttcaaaacactgtatgctgaaatgagccacgtgggagttgaagagaatcaactattcaggtggtgaaaatgtgtgaatgcagctggcagatgaagttccagtgtgatgaattcccagcttgtccttattgctttaggcaacaactgacaggcctgactggtcattggctttccattcctggcattgatatgactgaaaattcttaatgtcacagatccttaaaagctgtctctgttatcatagatgtacaggaccgccta

SEQ ID NO: 374311 - DNA, 546 bp, Homo Sapiens
cgagagacttgatcgccgctcattgtcacctcttcctggaagccttcctgatacccagcagccccatctctaccttgatgttctgtggtcgttgtttattctatggttcacgtgtgtcaacttcctctccctccacacagcacactgaacccgaagagttgagtatcctgtgtcctgaacatgcatacaattgtcagctacagatgctgcccaccccgaggcaggaaggggctcacttccctctcctcgaaggtggccagccccattctcaggaggcaggtctagaaggcaggtcactaggcagtttctgggagcttgagcactggctgctcctgatgtgggcactctgcttcagtggctagatgaggactgtccttactgacagctgatgtgatgcagtggtccaaactctcacacctgtcagtcagccctggagggcccagcccttcccatgtaactcagtcattcaacaaccagttactgactgcctgctctgttgcaccatgcactgtgctagtgctgagatgggctgttaatcccagctaa

SEQ ID NO: 374312 - DNA, 777 bp, Homo Sapiens
ggctgctggtctgtctagggatgctttctgacaagtcacagaaggcggcactgatgactgcagacaccttaactgaacaatccttcagtacttatcactgttccctccaagctactgtctttccagattcactgggcattgtcaatccctggtaaatgaactgtcaacaaccaacaaaaatcttacctgatctaacaagttcaatattccaactaaacttgcttcttgtagaagtctggaaggcttgccctttactcaggcactcatttattcatttatttattcgcaccattcacttatccgatcaacaaatattctcaaccttaaaaaatcctgagatgattctggataataacaagaaagtttagacaaagcagcaatcagcagcacaagagctggaaccaggaactaaaggaatacctaaccacatattgtgcctggaatatctttctgcccaactgcagtgtcactctacaggaatctttctaaatctcattttaggaagaatgtctttggatattcctctattaatatccctagtgtaatgctcatgatattacattgaaattaaccgcttccactcaccagactgagctccttgagggaaaacaactgtgtcatccaatcctctttgtgtccctggtcatccagcacagggcctggcatatagaatttattaccaatgcagcagttctctagattccaatgaagctaacagatttctaggtatgatcagacctgcattgttcagtatgatagccaagcacacacagggtc

SEQ ID NO: 374313 - DNA, 530 bp, Homo Sapiens
aggcatcttcctgcctgattacccaatccacttctctccaatccttccataaaggtgtcatgagacgtttctcaaaatagcttgccagtaattagaggaagattgactattatagctattacactttcaattctaataatatctcacacatattcgtcatggcgtttacctgtgagaaactgatgcaacatgtattgtcttagaatgctgcggttcaggtcttatccacagagtctagcatagggtagcacataggggaggtgctccctgtagacacggtggtgaaaacacagtcctaatatcaactatagtcaggcctgcctcatcctcagcaccactgtgtagaaagaaaactgatatcagagaagatactgggcgagaagagagtcaaggctgcccagctgggaaacttggttatagctaacataacccttagcagaacaggcaattattgcctttttaaaatctgtgattctttcacattattctttttctcattatttcaacaatttcttctctttactataatc

SEQ ID NO: 374314 - DNA, 600 bp, Homo Sapiens
gtagcgtgctcagtttataaccactttcacctcttgattcgtctgaccgacctcaccccagcagcttgtatcccagagcctaataccaggcctggcacacagcaggttaatttgacagacagcaggacagactatcccaatgaaaggcatgggctcccctgagccatctccatccagctttcatcagcatttcctgagctcccaggacaagcctggggctagaccaggcagtttcacctatggttcattattttaacctttccaggaaggtcttatctccattttgcagaagaggaagattgaagtcagagaagcctttccagtctctaatttacatggcaagtgaagctgcaggttcagcctgccccagaactggctcccctggatgcctttcaggtgttgcttctgtagggacggctctaacctatgacagatctctgctgtgggatgagagccccctgaggacatgcagcagatgtggcaccaacatcgtagcccaaacgaaaacttccgcacagcagggcagagccgggcttgggcgcctaaagcttacagagccttggaacggttttttgtcttgtttgtttgtattgttttaga

SEQ ID NO: 374315 - DNA, 1020 bp, Homo Sapiens
ctgtaacaatctatgcaacaatattgagggagaaaaataaatgagaggactgacactacctaacttcaagacttactataaagcgataaatatccagatagtgtggtagttggacaaagggacaaatagacaaactagattcacgtggaatagaatatatatatacagcccagacatagatccacataaatatggtcaaccgatccttgacaaaggagcaaaggcaatgcaatggagaaaacgataatcttttcaacaaatgattttggaacaactggacatctacatgcaataaaatgaatctagacacaggctttatgcccttcacaaaaattaacctaaaaatgaatcaaatgcctaaatgttaaagacaaaactctaaaactcctagaatataacacaggagaaagtctaaatgatttggggtatggagataactttttagatgcaacatcaaaggcatgatccatggacataatcattgatcagctagacttcattaaaattcagaatttctcctttcagaaagatgttgtcaagggaatgagaagacaaaccacagactgggagaaaatatttgcaaaagacatattccataagggactattatccaaaatatacaaagaacaataagaaaatgaacaatgcaatttaaaaatgggcaaaaggacagacacctcactaaaaaataaatacagatggaaaataatcatctaaaaagatgctccatataaatgtcattaggtaattgcaaattaaaacaacaatgagataccactacacacctgttagagtggccaaagtccaaaatactgacaacgccaagttcttgtgaggatgtgaagcaacggaaattctcattcactgctggtggggatgcggaatggtatggtcactttggaggatagtttgtcagtttcttaaaaaactaaacatactcttaccatttaatcatttgggtattgactcaaattagtcaaaagtgtatatccacacaaaactgcacatggacgcgagcag

SEQ ID NO: 374316 - DNA, 248 bp, Homo Sapiens
tgagccaccgcgcccagctggccccattctttccacccttagtcgcttatgttcttttgattcagctgtctaaatacctgcatctctctgtttctggtcaccctgcttggtgcaggccatcattttatctcaactggatcattacagtagcttctgtagggttgcctctgttcctttcattttccttgctacagccagagtgataattctaaaatagcaatcttgtaaatgcggttcctttaaaaatc

SEQ ID NO: 374317 - DNA, 875 bp, Homo Sapiens
gctgacggtgggagctcagtcagtcgggcatggctttaggaaattccttacatcccaatccacctcagtcaagaatttcaacgtcctccactccagtgataccaaacagcattgttagcagctataatcaaacaagttctgaagcaggcggttcaggaccatcatcctccatagccatagcgggcaccaaccaccctgccatcacaaagacaacatctgttcttcaagatggcgtcatagtcaccactgcagctggaaacccactgcagagtcagctacccattgggagtgattttccttttgttggccaggagcacgcacttcattttccatccaacagcacttcaaacaaccatcttccacaccccttgaaccccagcctcctcagttctctacctatctctttgccagtgaatcaacagcatctcctaaaccagaatctattaaatatcctccagccttcagcaggagaaggtgatatgtcatcaataaacaatactttgagtaaccatcaactgactcatctacagtcgctgttaaacaacaatcagatgtttcctccaaatcagcaacagcagcaacttctccaggggtaccagaatctccaggcgttccaaggacagtccacaattccttgcccagctaacaataaccccatggcttgtctgtttcagaactttcaggtgagaatgcaggaagatgcagctctcctaaacaaaagaataagcactcagcctgggctcacagcacttcctgagaatccaaacactacacttccaccttttcaagatacaccttgtgagttgcaaccgaggattgacccatctcttggtcaacaggtgaaggatgcctcgtgtggtgccccagtgatgctc

SEQ ID NO: 374318 - DNA, 527 bp, Homo Sapiens
tcggtaccctataacatctatggatcaaagacgtggtgtttgatactggatgaaaaacaccacttaaaggaggcatttgcttatcagcgacaataagcaaaagcttgaagggtatgttattctctcaatactacttctccacttcgcaggcatatctattcaggagggcatcttgaaagaggagcagggtcacccacgacttcttatatctcctgcagtgcactggccaagtgtgtgtgtattgatatgcttgaagcccctagggttctcaacatgccaaatcacaaaggggttcaatttgtggcctgcaacattgcccccaagcaagactgtcatccagtccctaaaagacttgaagcctggcattgctttggtctacctcatggatcaaagtcctttcaggcatctgtttccagaatagaaaggtttcatccatattgaaaatttgttctggcaagtgattttcctccagactcagcttatctagagtttcccaaaattcttccgctgcctttacatcagcactc

SEQ ID NO: 374319 - DNA, 586 bp, Homo Sapiens
  misc_feature (257)..(519): n is a, c, g, or t
tgttacatctatgcagttgaaggcagtgagactaacaaaacaagaagggcctttatcagacacacacaagcttctgatgacctggattgaagagcagacacaggtgcacacggtgctgtgtacctctcagcaccatgatgatcccaaagcaaaaagtgtgtttgaggtgttgaaagaaaaggctggacctggctgtgatgttggattgactgctagttctgggtggtgtaaacaattcaagaatcgttattcattannnnnnnnnnnnnnnnnnnnnnnnnnnnnnnnnnnnnnnnnnnnnnnnnnnnnnnnnnnnnnnnnnnnnnnnnnnnnnnnnnnnnnnnnnnnnnnnnnnnnnnnnnnnnnnnnnnnnnnnnnnnnnnnnnnnnnnnnnnnnnnnnnnnnnnnnnnnnnnnnnnnnnnnnnnnnnnnnnnnnnnnnnnnnnnnnnnnnnnnnnnnnnnnnnnnnnnnnnnnnnnnnnnnnnnnnnnnnnnnnnnnnnnnnnnnnnnnnnnnnnnctttgtgatttggcatgttgagaaccctatgggcttccagcatatcaatacacacacactttgccag

SEQ ID NO: 374320 - DNA, 605 bp, Homo Sapiens
  misc_feature (49)..(78): n is a, c, g, or t
  misc_feature (83)..(359): n is a, c, g, or t
ctgctaaccatcttgtagtcaatattttcttcaataagcaataacctgnnnnnnnnnnnnnnnnnnnnnnnnnnnnnnactgnnnnnnnnnnnnnnnnnnnnnnnnnnnnnnnnnnnnnnnnnnnnnnnnnnnnnnnnnnnnnnnnnnnnnnnnnnnnnnnnnnnnnnnnnnnnnnnnnnnnnnnnnnnnnnnnnnnnnnnnnnnnnnnnnnnnnnnnnnnnnnnnnnnnnnnnnnnnnnnnnnnnnnnnnnnnnnnnnnnnnnnnnnnnnnnnnnnnnnnnnnnnnnnnnnnnnnnnnnnnnnnnnnnnnnnnnnnnnnnnnnnnnnnnnnnnnnnnnnnnnnnnnnnnnnnnnnnnncatcatcctaaattcctttctatacctcactccctacatgtattccatcaaacagtctcattggctttccctccaaaatactaatatatcatgaatctgaaaacattaagttgctttacttgccaccagccacaccagacttctaatctggattactgcattcgtgtcctgaccattcttacttcctccactcttgccccaatatagtctttctcctagatgttcgggggatctctgagtgactgc

SEQ ID NO: 374321 - DNA, 275 bp, Homo Sapiens
atgagccaccacacctagcgagttttgtgtaattctgtcacgtgtatgtaccattgtaatcaaggtattgaacagattgattagcacaagggtcccaatgtgctactgacttagagccatagttaatctcttcccccatcttggccacctgataacccttcatctgtctccatctgtggtttcgtcatttcaaaaagttacacagatgaactcatggtatgtagctgtttacgctgtgtgccttattatcacttagcatagatgctacacgtgac

SEQ ID NO: 374322 - DNA, 521 bp, Homo Sapiens
aaccccagacatgaaaccagctgggtcagcctgtcataattggatccctcttgcatgtaaagacaaaggttgtctgcttggagatggagaagagttcagcatagctcgctttggggccaactcagagcaagggtgaaccaatcctagctgtcctctgacaaataacagctggagtcctgccaggagctcctcccccaagcacttggctccacaaggcaaaccccagagaagtacaggggaaaagagctctccatttctcagcaggggacaccctggtccccactgccactttgtttgccctccaagggaaaaacctctcaataccaggtccaggagcagctggatgggatcactcagaacccggccgagagctaattccctcttggcttcaaaatccatcctatgcttggagatgctggggctgggattctacaaaccacattctggctttgtgccctgataggctcagcccccagggggagctagaaggatctgctaggtaaagagagtagaagtgcctc

SEQ ID NO: 374323 - DNA, 611 bp, Homo Sapiens
ttggggataggagaacagcaaggtgggcatttcccggaattgtgtgcagatgcatccagtcgtggcattgcaagaagtctgtctgatgaagctcgggaagcatttggcaatattccctttggctgtgttcctgtgttccctgctcccacttttcttcccctggtttgtgattattaggagagaggttttgcaaagactcgttgctgtgaaagaatcttgttttaatttttatcctagagtcagtcacttttattccaggtagtcatgctgatctacttatccaaagccagctaaccaggttcatcctaccatcctcatggaagactgtgtgtatgaattggagtaacagaactgaaatacacttaaacagtgacagcagtacttcccagcgtgggggccatatatctctgtgtcctactctgaggcaacttctcagagatacgagggggctagggttttcccatctgggaaatggggtgaaagtctgcagattgttaaatgaaatatagaatcagagaaagagaaaagtcagtgatataaatagatcatttcatagaaattagggtagatttttatttcaactactactggagaatttaataaaagcatat

SEQ ID NO: 374324 - DNA, 528 bp, Homo Sapiens
  misc_feature (41)..(66): n is a, c, g, or t
  misc_feature (109)..(146): n is a, c, g, or t
  misc_feature (178)..(215): n is a, c, g, or t
  misc_feature (248)..(277): n is a, c, g, or t
ctgtgtctaccctagccccagtggtcccagggtcctgagcnnnnnnnnnnnnnnnnnnnnnnnnnnccttgcctgccggggagccagggctggtcccagggtcctgagnnnnnnnnnnnnnnnnnnnnnnnnnnnnnnnnnnnnnnggggagccagggctggtcccagggtcctgagnnnnnnnnnnnnnnnnnnnnnnnnnnnnnnnnnnnnnnggggagccagggctggtcccagggtcctgagcnnnnnnnnnnnnnnnnnnnnnnnnnnnnnngcctgcccgggagccagggctggaggtaacgagggtgccgtgtgcacactcccgctgtgcatgtgggcctccccctgtgcatgtgggcccaaccccgaccaagttcgggctccgtggctctctcctcagttgtgtttctgtgtggctgaaatcgtcgtcgtaaagttagaagaaaggctgttatggggcctgcgttgcttggcagaatgttccttaccttttgatttgcagggtttagaagatcacaaaag

SEQ ID NO: 374325 - DNA, 532 bp, Homo Sapiens
ttgttatggaagtgaaagcccagtatgttgtgtgagtacatggcaaagatacttaatccagtcttgctgaattgggtaactttttgataactatgatgactgtcaaaatgtgaataagaattaagagatgagcaatgactctctaagcagagttacagtatccacaaagccctagaaagcttgagagggtagagttttttcagggggatgagaggacattcaatgagagtaggatatgagatgttatatggaaggatggagagagatgactacacacacagctattacagagggttagcatgctgttcttagagtttgaacttaacctagaagtcatggaagaatttaaacaatggggtttcaaaataggtgaactcagttggtagtatataggatgaattgagaggaagggagaaacatagaaatacatatacctggccgggcctgctggctcacacctgtaatcctagcacgtttgggaggccaagacaggaagatagcttaaggccaagagtgcaacaccaacctggcc

SEQ ID NO: 374326 - DNA, 455 bp, Homo Sapiens
gacggcatagggctgccatttcccctctcccgccctgcagtgcgagaggggtggggagtatggttatcttgccctggtcatatttgatgctttctatccccgaccaggcaccctcacttagtagaaacaagagcagtcacccgtgccgtgtccacgatgacaactgctgcctgctcccccagcagaagaattgccccctccttactcaccccttcatatccctctggttttttgtcccctgtcttgtctgagctagctccctggtaggatgcaccttatgccacactagagacgcatggggagcgtttggttgaggggtccccagggagtgtctcctggttccgtccctcgcattctcctccgcctggagtaccaccagtagagttttgtcccaattgactgaagcttttgtgtctcagtgacacgcaagtttccccagtggacagggagcgttt

SEQ ID NO: 374327 - DNA, 925 bp, Homo Sapiens
ggccgatgagtgcagagcccttgcctagtctgcagcagatgggcactggaagtctgactgtcctctcaacagatgggcagacaagcatgctcctcagagccaccatcccttcaacaagacaaaaagtgaagaatcacttgcactcccatagctccttggcctagccactgaagactgatgaggccagggcccctgggccccggctcccggcccccactgccatcactgcatcggagcccagggtaactctactagtagcaggtaagctgatctcttttttttaattgatagtggggccacctactcagctttgcctgagttctcaggacccacacatccctctcaagtctcagttgtgggggttgacggactcatctcttgtccgcttgccgccagacctcttacttgttccctgtttgatgccattttctcacactctttccttatcatgcctcatggccccacccccattctaggctgagaccttttagccaaagtcaaagcttctatcaccttttcttgcccccttcaaccagagtcccctcctgctcctctccgctagtccggcccctgacccctttccccagtacccacttcctgcctctctcattaacccttccgtagctgctcaccatgaccccatcagaatccagttaaaagactcttccaaatttcccaacgttcctcaataccccatctctctaacccaccaaaagggcctacagcccatcgtaaacaagctctgctcatgcagtcttcttagaccaacacactctccatataacacccctatcctccctgttaaaaagtctgatggctcataccgactcgttcacaacctccgagccatcagtcaagctgtcctccctattcatcccatagtccataacccctatccacttctctctctcgtcgctaccaacac

SEQ ID NO: 374328 - DNA, 350 bp, Homo Sapiens
agatctatcacctcgggaggatcggacggtggttagcgaactctggtcggggaaggggccagtgtgcaggagcggggacggctctggtggttctgaagtcgggatctagtgtctatgatcgcggcagcctctgtggctgaatactcattccccggatccatacgtggagtaggacctccccggctcagcgtacagtgaagcctgccacagtccctcacgatgcctcccctcaggggggaagcatcgaggtgccaggaggcacattcctgccagtcttcagaaagtcgcgaacttccccctagtcccaggacgctagtccctaagctgtcccttcacaacagttctccgat

SEQ ID NO: 374329 - DNA, 470 bp, Homo Sapiens
tcgtcagccccagacacctttgcctcggaaaactgagaactactttcaaaatcgtcaacacccccatctcctgctacagagcggagtccccactttgcagaggcgcactgcaaggtcgcgggtggttaaatggtgcgccctccttgatgaagatgccttgttctctttcactctctatgtgtgtttaatgttgtgtgttgcgttctctgtgaagcgaaggataaacacgggccctttcaggcaaccgaaggaagaaggcggccagcatcagatcttcccgtgcttcaaggtggagcaccctgcagggcttactgcagcgctcagggtcaaagtgaggatgcagtgcggcaccaaaaggcaaatgcactctggagagccactctcaccttgtacccgtggagtagaccccgaggactggcaagaagcaggaactggtttcaagaagcagaactgggtccgagctcgatcga

SEQ ID NO: 374330 - DNA, 492 bp, Homo Sapiens
cagcgctcggacccagttcctgcttctgaaagatatgattatagttttacagaatttggcaatacaatatagatgaagtaatatacgaaatcactcatactggaaattgtccaagattgaaactttcgaaatgtggagttatccaagatgtgactgtgtaggcttcagacagtttccaggaatgacattcttcagcgtaaaatggaaactccaattttaaaatgcctgtgtaggggttctgttcagttaatattcccaattacatctttttaattgctattttaaattttaaatcaaatggaactcacattgagattgtagatggtagtggctgcagccgtgtttcaagtctccctgaagcttcttcatcccccactactccaataaaaacagacagttggcaaggaatgggccttatttgaatcttgattcaaatgaactgaaaaaaagtcacttaaagacaaccaggaacgtattcaagaagcaggaact

SEQ ID NO: 374331 - DNA, 438 bp, Homo Sapiens
  misc_feature (254)..(392): n is a, c, g, or t
gcattattacgttgcagagctggtcacatcacctatttctcttgaggcagtaaattagctgtatagcccgaggaaaattactctatccaatccaagcagtgtagaaaaaattcagagtaattgcatggccacaatactgtttattgttcaatcttgccctttatgaaactggacatggcaactgctgacacatacaggcaatagctctggtttcagacaaagataataataaatctttaaatattatgtatccnnnnnnnnnnnnnnnnnnnnnnnnnnnnnnnnnnnnnnnnnnnnnnnnnnnnnnnnnnnnnnnnnnnnnnnnnnnnnnnnnnnnnnnnnnnnnnnnnnnnnnnnnnnnnnnnnnnnnnnnnnnnnnnnnnnnnnnnnnntgagccaccacatctggacaaatcagctacttttcaagaagcagga

SEQ ID NO: 374332 - DNA, 465 bp, Homo Sapiens
tccccccagttcctgcttcttgaaacatcatattgttggaatataacttcatcggttatgattcattcattttccaccacccaccaatccaagcatcttaacctcatttccaagtattgtcaaaaatgcagacaaatgcagaccaaatgcagacactgcattgggcttattttttcacaaacttcaagaaatacctgcaggattcagccaaccacaagcaacatccagtcattaatctgactcaaggttttcaatttttgatctatgccattctcctcctcaagaccctccaattctaggtcaagagaggaaagcaaacgttctctagagggttaacaaaatggccacaccaattagctgccacacacctgtggaatagcttggtttttctttcccagcaatgaaaaagtgatatgcagagctctgagtttttcaagaagcagaaactggggccgagctcgatcg

SEQ ID NO: 374333 - DNA, 378 bp, Homo Sapiens
atgacacatctcacgggctcattgtgagagttgatgaaatgatgcgtgtaaagcatctggtagcacagacagagtgctcaatataatgtatactctggattaaggcaagaacgaggcctagtctacaatgagagtcccctggggtccccttcgggtcaacccttctggatggggaaaataaacaacttcctccactcaaaaatcaagttcacaaaaattaagagaaattaaatcattaaataatttaaaacaaatcaagttcagctgaaagccatacttcaaggccacatggtagttcctttgctgtgcttgcaattgtccctaggcctgaaattaatttttaaaaattgcgttccttatatttttgagacagggtct

SEQ ID NO: 374334 - DNA, 489 bp, Homo Sapiens
  misc_feature (366)..(422): n is a, c, g, or t
gccccagtttcgcttctgaaatctgtgcatgctcattcctaagcttgtaataccttttccctattctgtatctcagaaagtgtccttctttattcccaatccgcagttctctctcagtttggaagtaattgttcttttattgcaaattctcacagcacttagatttttatctcaaactctttaatgtaattaattgttttcatccatataatatagtcatgtgtacctttatgtaccacatcttcctttccacataggaagctccttgagggcagaagcgatgctctttgattcattttgtattcttcaagatggactagaacagtgtagtcaccttgtaaacctatgtggtggatagggtcgggnnnnnnnnnnnnnnnnnnnnnnnnnnnnnnnnnnnnnnnnnnnnnnnnnnnnnnnnncagtatataattcagtgttaaattgtgtggttcagactaattataaattcctttaaaagaaatgcat

SEQ ID NO: 374335 - DNA, 388 bp, Homo Sapiens
ccagttcctgcttcttgaaaccagacatgccaagttccaggagggacatcggacagaaactgcccctgttcttctgccccttgacacacccacctttggggtgtgaaaacccaccagttccagccaccatctcatttcagcctcccaaggcctttgctctacttgaaaaagcctcagcagagaagaaagccatcccgggaggatgaaggcagcagattctgctctgttcactgacagcactgatgcccagcacctaccaaacacacagagctcttacacatgttatgggacttatctctattaattcactgagttatcctggtaacctgatgagattaggtcacattatcccatttcaagaagcagaaatgggggccgagccgatgat

SEQ ID NO: 374336 - DNA, 596 bp, Homo Sapiens
agtcaggctcggtaccccagttctgcttctgaaaaatatacaggagctgttagaatattttatagatgtcaaaacaggcccacatggattacgtaacttgtccaagttacctcactaagtaagtgctagggcaggagaagacgggtctctggatttcagtctgaatgctttactcagaagctcatgcctatcctgtctcaaatttcaggtctaactccagactaaatatagtctgcattcttctcattccataggaacatcaccttggtttctccatatttctctttcttataggagatctctgacgaagcccagatagttgggtaagactgagatgctgacagattgagttccatgacatctgtcagttagaaagccaaagttaaccatgtactcttgttttaaaaaaacaagtaacttgaagaggttttctctactttacaagagagcattcctcctttgtggaaaagttatctaccattttccacctagtcttcacacttcagacatatttttttaggtgcgtttcaccctttaaaggggggatgtgaagggtagagctctgtaccagcaatttcagtagccggagctagggt

SEQ ID NO: 374337 - DNA, 559 bp, Homo Sapiens
agtggacagggacattgttgcttccaactgcttacgtgcgcgcgtgtgtgttgtgtgacatgaacctacagcttctacacaccgctgaaggagccactgcattaatgccacatactacaaaactcttcactaactgcccatactgaggcacaattacattgtctaagtcatagctctttcctgtagtaacagctgtcgaactcttgcccaccccggtgaagccagcttctggacttgtggagataccgacagcacgaagcggctacactgccgcagagccaccctgtgccacctcgtcccccctcctctgcagcccagcagagctgacgggggcgggggcgtgcgcggtgggggctgacatcttataatacggatatacatattgtcacgctgcagaatcctccgcggcttctcgtcagcaagtggtagtcaccacactccttcctacagaattaaggaagtcttccaaaaattctgctgttggaactaaacagacctgcctgcagctttcatgacagcacttggatttcaagaagcagaactgggtaccgagccgatc

SEQ ID NO: 374338 - DNA, 604 bp, Homo Sapiens
cgccccagttctgcttctgaaaataatgaaggatagggaagacttatttgaaattttcttcttggcagttcaaaatgtctagtccaaccactaattgaattaacagacaaaatgaaccccaaacagcagtattgctggtacaaaggaaggaagttatgaatacaaattgtggcctcatgatcagttgcagaaaccactcaacacacacataattatagataataaccaataatagagatactgagcatgttttcatttgcacaaaggatcatggcattttgttaggtgagagcatgtttggattgctactgttgtttagaaattaaagtatggacagaaggatatgtagagatgttaactggccaaaggagtggaatatgttagtgttggtgggtcatcctttagcattgattccaaactccttatagaggatcttcctgtattgcagaagctggagagcttaaaaccacatttctgatttcctgaattctaaggtagtagattggatacacatcttacttctcttcctcgtgaaatcctacacaggtacaataaagagatttatctttctaaaaaagatgtaatccctctgggagctggtgga

SEQ ID NO: 374339 - DNA, 385 bp, Homo Sapiens
ccagttcctgcttcttgaaaccagtctcagggaagccagtggcctgacagttaaggcaaatgcacagacttcagaaatcacaccaaagcagcttggcttctaagatgcagccctgaccgcctgactcaaaggaagttggctggcaggttctgcgatccctggagatgggcagggctggggtcagactccggtgacagcagcagtggacacaatccaggacttcccagtgaggtctgtcttttctttgaaagggacagaggagtgtggtccttgggacatctagcccagggaaagaaatcttgcccaagaatacatatgaatatctgcaaaaccaaagttggggtttgatatctttcaagaagcagaaactggggccgagcctact

SEQ ID NO: 374340 - DNA, 478 bp, Homo Sapiens
ggttgggccggctggcgcaaaaagaccagtttcaagaagcaggaactggccagttcctgcttcttgaaagggaagctggcttctctgtaacaattgttgctatctaaagctagtgggaaccagctggtgggaataaactaagcgccccttgataggctgaaacagggtctggagggtgagtggctactctagggggatcccagcactgggttagaggccacagctggattaatctagtcaacacatctctaatgttttcctagcttgagtcagcactgagtcgatttggtataagaaagaaaggaaacatattcctgtggggagacagacagggcaagagcacttcttataaaaattagcatacagaggcgatcattaggctcagcctcaggtggaacaggtgcctactggaaggagcacctcggtttacctggggacagggtaggaaaggtttcaagaagcagaactggggaccgag

SEQ ID NO: 374341 - DNA, 538 bp, Homo Sapiens
aactagttccgtgcttctgaacatcagaaatgttcaaggatactgtagctaccttaattacctgcttgcaattcacaaatacattctttcaaccacatcctcccaaactacagaagtatcccgatgaaagaacaggtgtcaggctcaagggaaagaagcagatctggtcacaggtgtctgcttccttgaaggggctgattcaactatgcagatctaaccctgccaaggtagagcttagttaaagaggaagcctgcctagtgccttccacttctcagtctccaggcccatgtggttaatagcagaataaagtgtttacaattttctaatgaaaattgtgaaggaaggggcttatgtttataagattccagcatctcagttcttcatcatatttcctccccaagacgcgatctctcttccagtctcaggttatgcacatcaaagccttctttcggatcattcattttgaagcataaataatgtcaaataactacatttaaggtcacctttcagagcagaactgggtccgagcctgacgta

SEQ ID NO: 374342 - DNA, 600 bp, Homo Sapiens
tcatcgagctcggtcccccagttctgcttcttgaaagtggtaagaaacactgtggcaggataagttattttccctgttgtatcaggagctcaataaatatttttcagttgtttattgagtggattctcacagcagcgggtttcaccaagccttgaaaacctccattaacaagccaggaactcaagatggagttttctcccactggtctctcctgtagggggcggtgggaagggccgataaatagcactcctctgcccagcctgagctctgtaccaatcgagaatgaagacaaaaggcaagacaaggcagctggagaacaaaatgtcatggttattactaatcatagtgacagtggagcgtgtgggctcgcaaatgctgaaggccaggatgggctgagttgcccactcaggtacaggcagtgctgggctctgcaggaggtggcccctccctgtccttcctgggagagagtggaaaggacgcatgctccctgcaggcacgctggctccccacaagaagggactgagtatactacttgcctatttcatctctcagattcactcatagatacagtcaccaatgcaaggactgttcaagagcagt

SEQ ID NO: 374343 - DNA, 662 bp, Homo Sapiens
  misc_feature (624)..(624): n is a, c, g, or t
tagttcaggctcggacccagttctgctcttgaaatgtctttggctaggtgcagcgctactttgaaaggctcctggttaccatcctgcagcgaacaaattcctgttctttgtctcctcacaggcggttctgaaatccatgtgctgtggcaccacaaaggatgtcgtttgaatttaggtacagcaatatttttcttttgctggggtcacttctcgggcaatctcaacattctggagagcagtctgccgagcaatgaaattagatgtctggtcagttctctctaacgtagaattttgagtagctctccaccctcttttcacaaagctatttccaaaacagttgcaatccactcaagaccattctgtttatttcaagaagtgtggacctttgagcatttcaacccctaccgcacggcccatgatttctcagagcttctaagaacttcgactttactctcctccagaattcctcccagacccctatagaaaaatgattcttgaagttgctgctgagagtttaatctgtgggagcaagagtactcctcagagtcctgtccttagggtacagcagatgtaggaggggaggggtacttttcatcctttaaggaagggggccgggaggaaggngggtaatagggagggaccgcttttagctgcgaggagct

SEQ ID NO: 374344 - DNA, 433 bp, Homo Sapiens
gaaaaagaaagaaaaatatagaagtgaatcatttaccatgaaaaaggcatttccagcctcagctaacctcaactagtttttattgcattatttttgaaatgccaagaaactggctttggccataatacttgctgtccaacaaaatcacagctgttaatatgcaattgcttgcaacaattagctaaacagcattatttgacaaattcccttgaaagagacatagatgctatttaagtgtctagcacactgaatcaagtaactatcagttaggctggggccgcagctagggggaggagagaagtttacaaatccttgtccacagaaagtgtttcacacccagccttaagtttgtgtttcacacacataagtcctgactcgttctacccaatcataccgtatactgtttcctgtataaaggtcgcacggttccaac

SEQ ID NO: 374345 - DNA, 134 bp, Homo Sapiens
tcatcgagctcggcccttcctggtctaaatgcaatacaaatatttttcaaaagatgctaaatattcttgggaattcaacacaataagaactcacatttatacagtgcaaaagattttgtgagtcgagcaatctg

SEQ ID NO: 374346 - DNA, 307 bp, Homo Sapiens
tcggcacctttgtctgaccacctgtacagtaagaacttgggtaggactatattatcccaacatttcttcctgcactgaaattctcaggtttcatgagttagtcccagttagagaaggctgactaggtcacaaggatagcaatttttggaaagttctttggagaacaaagaaaacaatatcacaactgcatagaatgaatacagtttctgggcaatgtggcacgtaacccttccaccatggcggtaggaatagaacagcatttgacaaaatgacacagtcttttcctcatggtgggtcagaacataag

SEQ ID NO: 374347 - DNA, 378 bp, Homo Sapiens
gtaccccttatgttctgacccacccatagcgactaaaccaacaccgatgagagagccctgccgtctcccagcctaacttgccaagcttcattatgagcaaaagatctgcaatgtggcagtgacctccccgcaacataactgcattctgacctccttcttgcagtgccaagagaaatgatggtgaactaagtgcggggtgtggggtcgttctcaaatgcggtcattgctacagaactagggtttttggttagttacattctttgtggaaggacagggtggtgggtacaggtccctgagaagcagacatgtggaattgtttgagacaatcctactcccaggggtattctctgtaagaatagcgtacagagatgtccgatt

SEQ ID NO: 374348 - DNA, 625 bp, Homo Sapiens
ctctggatgcaagtgtcttcaggtttgcatcatcacatcaggccaaacccaactctctgagtctttgcagacagctcaagcaaagcactgagatatcctctgaatggattggcttgggtcatgtgtccatcatacataaataatcacatggctcagagaagtgggttattctgggtgacctagggccgaatcacatgctccttcctaatagcacaagtaccgagtgagcgaaacattctggtctcatcaaggaaggataaaatggatgctagaagctaataacagatacactcaacaggctcacaggggaaattatatctaagctgagaaccatagagagatggctctggacatgtagacagaacagggaataaaggaagggccttatataaggagttttgactttcttaaaaagacaatagggaagcattgagggtttttaaccagacaacaatgtagacatatttctgtttttgaaacaggtcattgagatagcaatattgagaatgggttagaatggagccatggtagatttgcaaagaccaggttttaggctactgatataacagaaaacacttgaatctggagcagtgtagcgtgggacacttcaaccgaggaccggcct

SEQ ID NO: 374349 - DNA, 578 bp, Homo Sapiens
ctctggatgcaagtgtccacaggaggaaaggagacgtgatagaagcttgacagttattaaaaatctatgtattacttctctataatagacttgaaagtcgatactaaaatggaccaactttaacagaaaatacgtattgagtcaaagaggaatttaaagcacaaataaatgacaacttggacagaaattgcttccaaaagaagatccaagtctatatcactggtaaattctgtaaaaagcatcaagacgtaaatattcccgatacagaaaatcttgagaggacctcctatttattaggtataattctgataccaaagcctatccagatagcttgaaaagtaaagtctgaagactgatttcaccaatatagatgtaaaagtcctaaaaccgatactaacaaaccaaagcaatggcacattaaaacgtcatccagaaagtctagaatttgtgtaattaagcaatctatcaaatttatgtcatacaaattgattctattagaaaatattgataatcttgaattttttttcttatttccatacgttcctggggaaccggtggtatcttgttacatgagtaac

SEQ ID NO: 374350 - DNA, 762 bp, Homo Sapiens
aaaaccctgcgacaagtcctcaagtatgttccacataatgaagcacaatcattacagctctcgattcggcagcaaacttgggctgcagtgcatcggtatgcatgagaaaggcatcatatttaacaacaatccagagctctggaaaacaactcgacccttctttatgaaagctctgtcaggccccggaccttgttcgtatggtcacagtctgtgctgaatccctcaaaacacatctggacaggttggaggaggtgaccaatgaatcgggctatgtggacgtgttgacccttctgcgtcgtgtcatgctggacacctctaacacgctcttcttgaggatccctttggacgaaagtgctatcgtggttaaaatccaaggttattttgatgcatggcaagctctcctcatcaaaccagacatcttctttaagatttcttggctatacaaaaagtatgagaagtctgtcaaggatttgaaagatgccatagaagttctgatagcagaaaaaagacgcaggatttccacagaagagaaactggaagaatgtatggactttgccactgagttgattttagcagagaaacgtggtgacctgacaagagagaatgtgaaccagtgcatattggaaatgctgatcgcagctcctgacaccatgtctgtctctttgttctctcatgctatttcatcattgcatcaagcaccctaatgttgaagacgcaataataaaggaaatccagactgttattggtgggtcagaacataag

SEQ ID NO: 374351 - DNA, 749 bp, Homo Sapiens
tagaaacaaatggttctgcatcactcaacagaggcagagtggtggtgacacgtgtatggacactgtgttaatgtctttaactccaagaaaggaaactgggagaaatgtgcttcaagaagtgtaccagacgcagagttgctaatccaaaatgagctgtttaaagaacaaggatctgtttacctttcagaggaaaattagtcttttcagagaagattagtttcagctagtatgcaaactgtattctttgtgtgtggataagccattagaggctgactgaggaaaacagctccaaacaggcaggaaacagacaaagcatctgttgcattaacttcctcctacacatctcacctcacaggcatgaactcagaaggtggttcttctaggagctgagagtgtgtacgtggggggtgggggacactcttgtctgaattcagcttccgtcactgtgaatgaggaaattcttggtgacaacctcatgaaaggtactagaacagagtctcaggtcctgagagagctcagatggctgcggaaatttaactcagtatttcacctcaatacaacagaattctcatttgttctacttatgtgaaactaacatggatatgtaaagggcatctcaaccttgaattatccacacagtctaagatgaattatttgacttgatattccaacctatccctctttccttcctctagcctttggtctctcaagttaatgatgacacttgcatcaagaggtgccgagctgaa

SEQ ID NO: 374352 - DNA, 388 bp, Homo Sapiens
ggtctcatacattaggtaaatgtcaagctttgggtctctggagtataaccttttgtaaccattaggcccattatttgggtaaccagaatttaaggatgatggaatgatggaaggtattacatatttcctaaaaccttaattaagcctcctaggtcagataacaatggagtaaagtgatacctgcatttttttccccagtgtaatcttaatttactattgtatttttcacttaaaattttgtagggaaaaaaagttttcaagggaacactaagattaaattgactaggttcaaatatgcttccttatgagattcaaaatttactgtgtgaaattaaagtttaagagacctaaaaaaatgtactcccaataaagaatccaatactgcttc

SEQ ID NO: 374353 - DNA, 520 bp, Homo Sapiens
tgaggttcaatcgtaagcatgcctcatatctgctgtcctgctgacagattatacagtatctgggtcccatactttgcattgacgcatagcagatgtcatagcccatacaaacattaggccttcaaaatatttgtcaagtatttcttcaataaaaatgaaaacatcccaaatcttgatcccctaaatgttaaatgggacttagttaagcaaactaacatcatgatatactggaaacaggtatctctttcctttacccttgtgcctgctgaagatcttattctcagccttgctgttttaaactcaggggtgtgtgtacaacatatttaagcaaattctggaataccaaagccaagcagtcttccaggggcttcatcctggcacacagcagcttacctggtgggtgttgggtagcacacagtagaatggccgctttgtctctcttgagtgactctggacaagcttcaaaaccaaatccacagtgccctatcctggtgggtcaaaacataatggtaccgagctc

SEQ ID NO: 374354 - DNA, 355 bp, Homo Sapiens
cttatgttctgacccaccactaaagtccaagaagcactagatgcctaggagctgggttagagggatggaagagggtgagccagggagaaaagtcagtaggctgtgcaggaatcttgtaggaggtgatcctagccgggggcagtggggacagcagaagagagcaggctgtagcgctccagctgttcttctgagacactctgggtttctatgtaggtcccttgagacaagcaagggttggagttgagtatggggggatttggtgctgcttcctgttttcaagtgaagcagcttgaatcttttttatgcataaaggttctacataagatttctatttttttactgtttcttctttccc

SEQ ID NO: 374355 - DNA, 656 bp, Homo Sapiens
ttatgttctgacccaccaggggcccactggggcaggagcacttgttttgaagagatccagagggttgggctgcagggctgtaggttgtcctgtgggtgacgcctggcctgaaggttctgagacgggaggagcaaagatgtctgatgcaagcaagtcattggctgaagacttagcagtccttctgcctcttcctggtttggtactttgtggaggtgggataatggctatggagtcatgtggtgaggactggacagagctttccaagtcctgctttacgccattctgtatggacagtcctttgggagggcttcccacaaaagggttcggggaggatttgacagagaagccgttctgttctctttcagataccccattttgagttctcactgctggctgggtttgcgaacttgaaaagggccatgggcctgcctgagcttcctgtttgccagtccggttagagatctggtcaaattgctgaccaaagtagtcaacatcaccattcaggggcccattactcagcggagtagacgagctactcgaattctctttcttctgatctggagatttgagagaatcaaacgaagaaggtgtcgattggtctggctgtgtgaaaggatcgtcacagaaaggatcaggattaggggtgggtcagacaa

SEQ ID NO: 374356 - DNA, 563 bp, Homo Sapiens
tcgtgctcacaatcgttctggagtgggaacacaccgggcgtatgaaatctcttccgatgcatcatcattttatgagcaaaagcaaaagagtcatacttaattttatctctaggcacctacctagacccaccaggggccccactggggcaggagcacttgttttgaagagatccagagggttgggctgcagggctgtaggttgtcctgtgggtgacgcctggcctgaaggttctgagacgggaggagcaaagatgtctgatgcaagcaagtcattggctgaagactgacaggacagggagggagggagaagccttagttactcactaacagtgaaatacagactcattttgtctcctaccctataccccaatttgagagccacaaaaaggaaaacttttttcttgacagatgaacaacaacaactactactacagaaaaagagtcctccaaaaaaagacacagattcctacaacggacggactactgagtcttagtgtctgacactacctaggacttgcaaagtgaaatctactatattcctttacacactcacattggtctgg

SEQ ID NO: 374357 - DNA, 444 bp, Homo Sapiens
ccttatgttctgacccacccttatgttctgacattcttgggaaaaactgtccacagtgtgaagtcatccacttgttgtcctggtttacagtttgagcatctgttgttatggtgtcgaatattttggtgagttctgagtggctcatgcttcacgtacaagggttttcccatgaaatttacattgagttgtccacctccagcttatagggcttctggaacagagtgggtcttgctcttagtgattccatgggagaaaatggaattggaggtactagtagaattcagggaactgtccagtcagagacttcgactgtcatggatttggagctttccttgccagtggctgagttacgaacagagcaaacatagagcccgctatgctttgtagtaatatggcggactaacagacttttgtcatgttacgaccatgatatatcgaattcga

SEQ ID NO: 374358 - DNA, 375 bp, Homo Sapiens
cacccgttatgtgctgacccaccggcacagtattcttggacaattaatgaaaagtttcagctaccaggacaaaagctctttatccgccatattactacaaagcatagcgggctctatgtttgctctgttcgtaactcagccactggcaaggaaagctccaaatccatgacagtcgaagtctctgactggacagttccctgaattctactagtacctccaattccattttctcccatggaatcactaagagcaagacccactctgttccagaagccctataagctggaggtggacaactcaatgtaaatttcatgggaaaacccttgtacgtgaagcatgagccactcagaacataagggtgggtcagaacataag

SEQ ID NO: 374359 - DNA, 387 bp, Homo Sapiens
cccactaggcatactcctatggttgtcaccaagctaggtgctactggtcatctgctcatgttcacaccagagaaccaggctacaagagaaaaagcagaggccaagagtatgagggagaaatagtcggtgaagaaaccgtatccataaagacccgattccaccaaatgtgctttgagaaggataggccttcattaacaaaatgtatgtctggttccccagtagagctctactgcctcaacccaaggggatttttatgtctggggcagaaacactcaagttgattagaaagaccaggccaatgtcagggtacctggggccaaacccacctgctagtgtgaattaaagtactttaatttagttttctgtggaggtgggtcagaacataag

SEQ ID NO: 374360 - DNA, 958 bp, Homo Sapiens
ggcccttatgtctgaccaccaactctccaggcctctctcttgccctgagttatcagcctgtgtggtgttaactaccttagaaggtacaagctaagaaatgtaacagtatcaaccctcccagttgcttaattatacccataggtaatacaaaaagctctgaagacccaaagatgacattactaatgatgtgatttcaggagccacagaagaaccttaccagcttccctcaaatcagtccttatcctctttctatcttcactcccatcatcatctattttcacactatccagctaagcaaagattcctggaggctgacttgtatcttcagactcacagagtgaattcagctcttctgaatcaagacccacccagtctctttcattcagacctgttgctaacaaatttatatttgccaaggatattaggcaaaagaggctacttgattggtggccaacctcgtgcccacatggaaggtatctttaatagggtcttttcaaaccttagtggaggagggtcagctcaatttgggcaatgcatttgttcccagtttcattttcttcctgggaattaactcgtcatttcattccttcagtcatcttctgtgtaggtgaccggagcactgagaggcagctctgatgcactattgtgtgtcagcagctcaaaggccctaaaacactgaaggttctgcatctgaagtattagattgttagcagcaaaatatgaaagatgaggtgggacagtcctctaagccctatttagggaagcttttccaagccacaatcttaactacctacccaaaggatttgcattacccccagattctgtgccaacaacctttttaagggaattacagttccttggggaaatgagtttttgatggtgaatttggggtgtttaaggaagggaaagattgtcatagatggtagggctttgaaaatgcagggtattcagctgccac

SEQ ID NO: 374361 - DNA, 488 bp, Homo Sapiens
cggtaccgttatgtctgacccacctaaaactcagggctcaaatctcctgccctcccactgtgaggtaggtatatagtattatccccatttgcagctagagaaactgatgcaaatgtagaggcaattggataacttgttcaagatcactgagcaaactgctgcctggagtcaaaaattctaacttctgtacaacagggacataatttctcttttggctgttatacatttcttttaaaaagcaagtgattggtgggaatttggcaaaagttgaataagttacaagaacaggcttttattcatttgctatttggtttttatgtttcttgtttacttcgtttgatttgtttctcaaaactcactcagtgggattacctgtctgtcatgtagcagctttttaaaaaactggactgtgcagtgtggttctgagtgcagtctttataaagcccagtgctgtactggtaaatataaacattttataacgtgaaaag

SEQ ID NO: 374362 - DNA, 293 bp, Homo Sapiens
cttatgttctcgacacacccccaagggcaagcagaaagcagctggaagagccctgccctgggttcaaaccaccacactctgaatgtcccagctatgtgacctcatgcaaattgacaccttatctgaggactggttttcctacctgcacaatgggaatagggttgctgggaaaactggagattgtgtacatcaagggccagcacacggtaggggcctaatatcgtgcttgctatcattactatgcaggaggtatccaataatgtttgtgtcatgaggctcatgttcacccaggc

SEQ ID NO: 374363 - DNA, 212 bp, Homo Sapiens
  misc_feature (169)..(169): n is a, c, g, or t
tcggctggtacccttatgttctgaccaccagaatattggctctgcccgagctcccgaccaaaggaagcaagcagccctcttcagggcacagtgccaggcagcaccccctcccatgccctggccctaaccacacagcatgagtggggatcctaaaagcaacagcatctgnaaagacacttgtgggccactagcaacatccgcaccaagcagag

SEQ ID NO: 374364 - DNA, 462 bp, Homo Sapiens
ctagaggatcccctgttctgacccaccaacagctggcacactgagtgtgaaaagctacaggcactcaacaccagcccagcccatgagggcagctgtgggggatagaccctgcacagccacaggtgcagagctgcccaatgccttgggagcccaggcatcacacacctgtgctccagatgtgagatgtagattcagaaaagatgatttggagctgtaggattcaaagactggcatgctgggtttatgacttgtatggggtctgtaagtccttggacattttagtaaatgctggaatgagataagtcattgggggacagtagagaagtcatcagtgtattttgcagtgtgacaaggatacaagatttggggagcaagagccagaataatatgattcgattctgtgtccctaccaacactcatgtgaaattgtaataggggaatgttaaaggtgggtcagaataa

SEQ ID NO: 374365 - DNA, 637 bp, Homo Sapiens
acccctcatggtagtcaagtgtcccctcgaaggcacaaagaagggctgctccgtgtccaccacgctgctcatcatggaggaatttgaccaacacgatggacttagctaagctgagaaccaagaaggccatgcagatggtgaagaagtgccattaaactgaatctgtgcaaatcctccagcgctgctctgcaggatgctgtatgtggaggacacagatagaagttcccactcactgtcattcaaaaacgcctttttgtcatgctgaatgtcttctgggctcctcagaaaggccaggtctacgtcttccactgtatgcagaatgctcttgaaggtcaggctgcaattctggacatcaaatggaaaagcatatgtctctaaactgcacgcagagaccacctggatgggcttatagttctcaatggtcccagatgagttcacataaacatagggaaggtcagggtatctttcaatgtccacaaactcattgatgatgatatcgggggcccagatggcacttagaggtagggagatctctctaatctcatcaaacatgctggagttccaggataaaaattcatcattccagacctcttggtacatacacttgtctttaatattgacacttgcataacgagtg

SEQ ID NO: 374366 - DNA, 491 bp, Homo Sapiens
  misc_feature (81)..(165): n is a, c, g, or t
  misc_feature (476)..(476): n is a, c, g, or t
gagtctgaaatgaaatctctgtttgtgtgtgcagcaccaactatgcacagggcaccctgctgagctctctctaaaccggtnnnnnnnnnnnnnnnnnnnnnnnnnnnnnnnnnnnnnnnnnnnnnnnnnnnnnnnnnnnnnnnnnnnnnnnnnnnnnnnnnnnnnccacccagttaatgtggaagagcctcagcccggagcgggggctgactgggagctgttgcgctcagcaccacagcctcagctagcagcaccccaagtccaggctcctcaagaacagcactcctgtgtcatctgtccgtccatcccagcaccccgcacacagtcagcagggggtgggcagtgatggcattttgtggaattgagtggaaactgccagcctcacccagtgcagccacgttttagttgtagaccacgtcactgctgcgtacctgtctgaatgtctcacacatgcactcactgcaacatcgacactnatcaccagaggtacc

SEQ ID NO: 374367 - DNA, 534 bp, Homo Sapiens
  misc_feature (325)..(409): n is a, c, g, or t
ctcgtgatgcaagtgtcgatgttgcactgagtgcatgtgtgagacattcagacaggtacgcagcgagtgacgtggtctacaactaataacgtggctgcactgggtgatggctggcagtttccactcaattccacaaaatgccatcactgcccaccccctgctgactgtgtgcggggtgctgggatggacggacagatgacacaggagtgctgttcttgaggagcctggacttggggtgctgctagccgaggctgtggtgctgagcgcaacagctcccagtcagcccccgctccgggctgaggctcttccacattaactgggtggnnnnnnnnnnnnnnnnnnnnnnnnnnnnnnnnnnnnnnnnnnnnnnnnnnnnnnnnnnnnnnnnnnnnnnnnnnnnnnnnnnnnnaccggtttagagagagctcagcagggtgccctgtgcatagttggtgctgcacacacaaacagagatttcgtttcagactccaagagccaagcccggtggccactaggaacggagcgaacagtcct

SEQ ID NO: 374368 - DNA, 755 bp, Homo Sapiens
gggtcggccctctggatgcaagtgtcctcagaaccctcaggcatcccgctaggtcagtcggtcctcacattttgacagccccattttacttgtaagaaaactgaggctctggagaccaaagtcacctgggaaatgagtagcagatacagcggactctgtgcagagacctcagctgggctaggccagggcagagagttgaaattgctcctgcttccttgtccaggactgttcgctccgttcctagtggccaccgggcttggctcttggagtctgaaatgaaatctctggttgtgtgtgcagcaccaactatgcacagggcaccctgctgagctctctctaaaccggtctcattgtgtccttctgcagccttgtgaggtgggcactgttatcctcctcatttgacagatggggaaactgggactcagcagaggccacccagttaatgtggaagagcctcagcccggagcgggggctgactgggagctgttgcgctcagcaccacagcctcagctagcagcaccccaagtccaggctcctcaagaacagcactcctgtgtcatctgtccgtccatcccagcaaccccgcacacagtcagcagggggtgggcagtgatggcattgtgtggaattgagtggtaactgccagcctcacccagtgctagccacgttttagttgtagaccacgtcactgtctgcgtacctgtctgaatgtctcacacatccactcactgcaagagcgagacttgcatcacaga

SEQ ID NO: 374369 - DNA, 602 bp, Homo Sapiens
  misc_feature (288)..(358): n is a, c, g, or t
ctctgttatgaagtgtcctactggatgcttcaaatctattctataaataggtgagataggaaacaatgagtaaatatttatcggatcattattttccaatgttaagtgttttaactacagtgtagtatgtttatgattcttgaaactctctttttcatgatatcttgagttattaaacatgcattccactaaaagcatctgaatcatcacatctggcccaaattctgatatatgtacaaatgttcacacattataggcaagattacatataaaagaatggcatacaannnnnnnnnnnnnnnnnnnnnnnnnnnnnnnnnnnnnnnnnnnnnnnnnnnnnnnnnnnnnnnnnnnnnnnagaattcagtgggttggcaatttggggcggattcagccagtcagttctgctgattcagtcactcgtgcagctgcagtccttccgcttttcaggtggggcaggatggcctaggaaggcctcactcccttatgttgatgctggctatcatcttggccacaggtctccagcaggctagccagggcttctttgcacaaaagctgggttccaaaagcagcaagagaaacagagctcctgtgcttaccct

SEQ ID NO: 374370 - DNA, 738 bp, Homo Sapiens
tcgagctcggtcccctcttgtatgcaagtgtccctgacagcaatactactgtaacattcctattttataaaaggtgaagacaaggcacagatgatttagtaatgtgccaccggtcatgcagctagtggtgcatgattctgactctggagcatatgcttattactgtgctgtattctttgtagtgttaaagatgaatattggacccaaatagagccttaaaatattgatatggtttgaattccaggtaagtatatggataagaattccaaggaatagtaacagtaacaatcaaagtgaagagaaatagaaattagcataacagatttgtggaatcaaataccttacaaatgagatgaataagagaatattcagaaatgtttaattctgtggtgctgttctgtcttgcttctcaatggctgcagcagttaccaagatgggaaattaaatctttaggagtatttaacctggtaaaaccgatataagtagccccagactatgttctgaattttgtgttccctccaaattcttatgttgaagtcctaaccccaaggagatggtattaggagatggggcctttgagaggtgattaggtcatgaaaacagaggtgattgggattagtgtccttatgaaagagaccccagagagctagctagtattttccaccatgtaaggatacagcaagaatgcactgtctatgacccagaaagcgaaacctctacagacacttgcatccagag

SEQ ID NO: 374371 - DNA, 605 bp, Homo Sapiens
tgcctctcaattttgctgagaatctgaaactgctcttaatgaagtcttacaaaaataaagaagtctgctttgccttaggttgggtcttcagttacctgcagccaaatgaacacaactggcgtgaggtaaacctctgacacttagtgagcacgctacaatgtagtgctgccacgaaaggaataacaaagaaacagaactcaacaactaaaaccacaaagaactatccctgatccgcgacaatgggaacagtgtctcatgtcaggacccagtacacacccacattttgtctgtgtataaacaaaatttacatgtaagttactacatggcatatacttctcatttttaaaaagaatgctgattgtgacccactacatttatttcatgatgcattaatggttcataacccacaatttggaaagtacggtatacctataaaaaattagccttatttcttgccaaaattgaacacggctatgacctgtgcaagatcgtattttgattgcagtgaaagccacagggtactgagacagactccctaaacttcctttttattcctgatcaaatgcaatgccaagcaacctccagacacttgcatcagaggtgca

SEQ ID NO: 374372 - DNA, 372 bp, Homo Sapiens
  misc_feature (117)..(138): n is a, c, g, or t
ctcgtgtcatgcaagtgtccaagaacaaaaactctgtgcccagtaaacaatagttcctcattccccaatcccctgtccctggttcagttttctattcaattttattacataagcacnnnnnnnnnnnnnnnnnnnnnnaccattaaccagtggtacagtgcaaaaaacttacataaatcttcattaaaattctaggtcagacatttactactgtgagaattcggttaagtaacatctttctgaacatttgtcttctcagctaaaatctaaggaggaggatgatgatgttaatagctaacattcactaggcacatgtccgtgcatttccctttctcaaaaaccctataaaataggttctagtataattttcac

SEQ ID NO: 374373 - DNA, 839 bp, Homo Sapiens
  misc_feature (694)..(711): n is a, c, g, or t
ctacctctggatgcaagtgtctattcatagaagaggtctgggaagacatacagtacactagtgcaataagagtagttactctggagcagggactgagttgagagggcggtagtcatgtgaattttgagttctccctgtaaggtttgatttctttgatttcaactatcgtggaattacaaattaacacattttgaaactacatttaaaatatctaccttctagtgttgtggtgaagactaaaatgcaatgactctagactcattgctgcacaaaggatgctccgtacacagactatataaaccgcacctggtaaggactcctgaaaaaggcaacgggaaccctcatttttgagcatgggctctgtacctggcactttcttcacagtgaccttctctctaaggtagatgttaaatgtggccttgggatacatctctgtgcttccgattcctcatgtaccagtgaaaattatactagaacctattttatagggtttttgagaaagggaaatgcacggacatgtgcctagtgaatgttagctattaacatcatcatcctcctccttagattttagctgagaagacaaatgttcagaaagatgttacttaaccgtaattctcacagtagtaaatgtctgacctagaattttaatgaagatttatgtaagttttttgcactgtaccactggttaatggtnnnnnnnnnnnnnnnnnngcacgtgcttatgtaataaaattgaatatgatactgaaccagggacaggggattagggaatgaggaactattgtttactggcacagagtttttcttttgacactttgcataaagagggccgagcctag

SEQ ID NO: 374374 - DNA, 498 bp, Homo Sapiens
  misc_feature (121)..(142): n is a, c, g, or t
gctcggtaccctctggttgcaaagtgtcaaaacaaaaactctgtgccagtacaatagttcctcattccccaatcccctgtccctggttcagttttctattcaatttcattacataagcacnnnnnnnnnnnnnnnnnnnnnnaccattaaccagtggtacagtgcaaaaaacttacataaatcttcattaaaattctaggtcagacatttactactgtgagaattcggttaagtaacatctttctgaacatttgtcttctcagctaaaatctaaggaggaggatgatgatgttaatagctaacattcactaggcacatgtccgtgcatttccctttctcaaaaaccctataaaataggttctagtataattttcactggtacatgaggaatcggaagcacagagatgtatcccaaggccacatttaacatctaccttagagagaaggtcactgtgaagaaagtgccaggtacagagcccatgctcaaaaatgagggtt

SEQ ID NO: 374375 - DNA, 564 bp, Homo Sapiens
  misc_feature (94)..(113): n is a, c, g, or t
aaaacaaaaactctgtgccagtaaacaatagtcctcattccccaatcccctgtccctggttcagttttctattcaattttattacataagcacnnnnnnnnnnnnnnnnnnnnaccattaaccagtggtacagtgcaaaaaacttacataaatcttcattaaaattctaggtcagacatttactactgtgagaattcggttaagtaacatctttctgaacatttgtcttctcagctaaaatctaaggaggaggatgatgatgttaatagctaacattcactaggcacatgtccgtgcatttccctttctcaaaaaccctataaaataggttctagtataattttcactggtacatgaggaatcggaagcacagagatgtatcccaaggccacatttaacatctaccttagagagaaggtcactgtgaagaaagtgccaggtacagagcccatgctcaaaaatgagggttcccgttgcctttttcaggagtccttaccaggtgcggtttatatagtctgtgtacggagcatcctttgtgcagcaatgagtctagagtcattgcat

SEQ ID NO: 374376 - DNA, 722 bp, Homo Sapiens
ggcacccggtatgcaagtgtcttctggcctcttgcatagctgctgtatcatcaaatggttcaataagatattagacaacaaaagaaaagtaaattgtttctaattttcagctaagctaattaccaaaactttcagctgaaccaactatgaggaacagctgttgatttttatttctatagctcaaggaaactatggataaattacccaatgataatctttcctgcgtcctaataaaggaggcccaaatggaagatggttaagggaaaaacctatctaaccttggagcatgcgtacctggtttcgtgtgagccagagctccctaacatcaaaaatcccattctagatctgatggagaataatgttatcagtgtcattgttttgaggatgaataagagcctttaaattgacacacaggttattctttaaatggacacacaggttattttcttatttggcatacagcatataggaaaaggaggcgatgatatgagagttctggcaaacaggaagaggaagtggaaaggctactccttttgtctcagttgagtatgggaaggggaagaataacagagtggccacatgtgtacatcatggcatctgccttacaggccagaatctcagggatagggtggctaaataggttgaggggatgttggaagcaaagggacttctgcctgctttcttgttggaatctcagacacttgcatccggtaccgagccga

SEQ ID NO: 374377 - DNA, 671 bp, Homo Sapiens
ctctggatgcaagtgtcaacaaagtgggagtgaggaattgcctgtggaatgcctgtgatgtggcacagctgtctgctggcgtggcagcctttgattcttcaatatttaagccacacacaaaggcacagaagggcacaaactcgagaaagacacagaggatgcaaatatgctacctaagggtagctgaaattttattcccttcccccttatgaatctcacagaattggaaaccatgtcagtagctggaataaacatgcagagttagcagtgctgcatgaagaagctcctcttgtccacaccctaagactgctttcttgactcagcatcctcatggaagcatcagggtgtgatctaagctgaaggcaaatgcggcacgtgtgtggggggtggctgctgctccagccagcttgctcttctgtaacccctgaccatctccaccaggctgtgtgagggtagactcttccaggtcccaccaatattatccggcccttctccttcactgaagaagcacagatttgttcatggaagacatgtgcatagtctttggcaagatatcctctttcccagacttccttgcagctagggtggccctgtgacatagctctggccaatgagacatacttagatgtctcctgagagggacctcttgacacttgcatcaagaggggccg

SEQ ID NO: 374378 - DNA, 629 bp, Homo Sapiens
cctctggatgcaaagtgtcttgtgctttgagacacccagggaggaggagagtatttgaaagcccactcatccttgggtaatgcccaggcgatattaagtggccatcaatacgttagacgtaggctgaaaggagatcagaacaagtccagggtttggagtagcagaagctaaacatggtccaagagtgtccttcactcccagctggctggttagtggaccgacctctggatttgagttaggggatggaattctcatcctggctctgccaactactggccaggtggctttggacaagggattgaacctctctgtgccctagttttctcatctgcaaaatgtgagtaatattctaataagtgaggatgagaaagagaatgtgagggtactttttcaatataagatttggaaggatgttcacacaggtgatggacttgtgggggttcatcctgtgtttttttgcttgtctgttatatctggttgtgtatgagagatggcaaggagacagacagagagggattaatagatattgctttagtaatcactcaaatgacaaagttattccataaaatgaaaaaatattacacactagagaaacatgcagtataactgtcactatggttgctcagtca

SEQ ID NO: 374379 - DNA, 712 bp, Homo Sapiens
ggaccctctggatgcaagtgtcagaagagggggcagtttagttaccggacatttcagtaatctttgttcaggaggccagatcagctaggcaagaaagcagcagtaactcagaagtagcttcagtgtgatcttggccacatcctgttagaaatacactttgtttctgttggccttgtcagtgtcctgttggaaacatggttaatgtcttggcatcaacatcagaattctattactaacagtgctgctttccgtggtctcaagtaggagatccttaggacaaaactccaagatattaaaaggagaaaaggagcagcaggcatcagaattttgatattttgtttattttataaatatggcacatgagtttggctggtgaggccaataaaatacagattttgtgtgtgtgtgtcactagtgtgaaaaaagttgtagtggagagcttggtatgtcaggcaatggtgctaggagaggctgtcttttgggaaatatttcataaaatgggaaacacttggaagaattggtagtttgataaactccataaaagtgagttgagtgttggccataggtgagaacagcatggaaggagtggagggagtggagagaaaagaatgtgtcccaggagaaataaagggctgcaatatttcaatgtacagagacctgagtatgtttgggtttaggagacacttgcataacagagggaccgagctcgatc

SEQ ID NO: 374380 - DNA, 577 bp, Homo Sapiens
ttgctattgcaagggcagaaaatggtcttaagaaagccagctttcaaattgaataaacatgactgcgttcactttttgagcttataaatgaagcccgagtgcctgccaaaacctgctgcagtcagcccacgagcagagcagcgtgaggagctgattctcagttttcccggcaaaaggagcaatactgctctgccgtggttccgtgttgtcatctgtgccacctgctcatcactgtcaccgtatttcatcctgatgcttcatctcccacttatcagtcgctgtgacagtcattccctcataaatggcgagccagtgtgattttgacctgactcacactgttgcattagcagatttgtaaagaagtgagcacaaggtccctgcccacgctataaaagctcgcctcatgcccagcgagaacaaagaagaaatacagtctgggcttcctgacggccactgatgaataattattggcatagagtggctgcgttgccaggtttagagatcctgaaggccaaggctgactcttctgttggtgttattttcaattctatttccagtgacacttgcatccagaggg

SEQ ID NO: 374381 - DNA, 545 bp, Homo Sapiens
aacaagctcacatttggacaaaggttaataattcgggtgccccacatgctcgtgtcaccctgatggagcagagggggcatcactggctatctaaccctaagatgttaagatatcaagggcttttgtgtgaaaacccctacataaccctggagactgtgaacactctaaatccagccacactgctgccaacagaatgggtggagcacggaaagccccattgtgtggcccagggtatcactgttgtgtggaaacagtggatgaggttttatcaagccaaaaaaacttaacggactagcccttaagagacccagatgttaaatactttactgatggaagcagcttcatatctgaaggtgtcagacgggctggatgtgcagtggtaacactgaattcagtagccgaagcccgccctctgccagtcggaactttggcccaaagagctgagctaatagctctcactagagcattgctcttagccaaaggaaagtcagtaaacatctatactgactcaaggcatgcttttgacacttgcatccagaggtacc

SEQ ID NO: 374382 - DNA, 667 bp, Homo Sapiens
ctctggatgcaaagtgtctagacaaaggtgacccaaggactgagggaggagatgggagcacagcatcagtgtgggccctgctgtgacagatgtgtagagccccatgggacatgacagcaattttagcttttcctctgagatggggaacctttagaaggttttaggcagaggagtgatgtgaacagattgaagaagagcaaagaggaagcaggaagaacaggtaggaggctcctggaataacccaggagagagatggccaaggtgagggtgtgaaggtgaaaggaagtagtccgatcatatacttcacataccttttgaacggcagaactgaagatatctgctgatgggttggatgtgggatgtgagagaaaggggagacaaagaaactctaaggtgttttgcttgagtgaagcaaggaatagaactaacacaggaagagcaggttggcaagcaggtgggaaaaaatcagggaacaggctttgtgcatgttaggtttgagaagagctgttgcctgtttagagggatatataaattggagtttagggcagaggtccagactagagatataaatctgggcgtcatcgatagatagatgggtttaaacctggaggttgtataagatctcccagggagtgtagacgaaagaagagcctggacacttcatccg

SEQ ID NO: 374383 - DNA, 245 bp, Homo Sapiens
actaattctggcaggaatcagggtggcaataggactagcagcaccctggggtggctttgcctaccatgagttaacgctaaagaacttggctcaaatcctagaatccttagccaccaacggagatcaggcattaaagagaattcaagagttccccagactctggaaaatgtagttgttgataacagactagcattggattatttactagctgaacaggtggtctaaacataaggtaccgagctgat

SEQ ID NO: 374384 - DNA, 605 bp, Homo Sapiens
tcggtaccgttatgtctgaccaccttatctgaagcatctttaagaaattcatatatatcaggaacctgtgtttgtatcatagagctctgttcttcatgagttgacttgctgccatcaacatttttgttggggttttccaattcctccacagatttaaaaactgtgttctgacatgaaatatattctttctctggtccttcatcagcttcctttccatgtctgggcaaagatgtcaataattcatcaggcatcatactctgtttaaggccagaagaggtagacggcgtcgcacgtcgtattttcacaatgaaatgatcattggacttttccattatgacggcatgcataggtagattagggtggtactgaaagcctggagcaacagatcggcttgtccaggaagaagaacaacttgatttactgcttgaattatcagactccagagctaaatgaatatcttgctcagatgcatcctcttcctcaagtaaggcatcttcactaaaatgagcactaatgacttcttcaggagttgaactggacgacatatcaggctttaaaaaactgagatgaccatctgacttcagaggcgatggtactgttgaagc

SEQ ID NO: 374385 - DNA, 824 bp, Homo Sapiens
  misc_feature (55)..(55): n is a, c, g, or t
  misc_feature (323)..(323): n is a, c, g, or t
ttgtattaacaggaagcgggtccttccttcctcaggcagcctcaggctggccggnggagggggtgggggccaggcgcaggcgagacagtgcaagcctttgtcctcaggcaggtacggctgtgggcatgcagccgaggggcaggtggcaggcaggggatggcagccccctctgctttggcaagaggcagaatccagacactggcgggagagcgcctgcctgccgggcgttcctggctcctgctgcaggcaccacagagaccccaggccccgggtccccggggggcggcagagcaaagtcagggcagcccctgcgttcggcaggnagaaaacgcgcgtgtccggggccctctcccgtccttccaccacagagcttccgaggcagggccccgggagggagcgtgaacgctggcacggagacggcgaaggtcctgggggtgcgtggggtactctggaggggcaggacaggggtcagtcactgaagcacaggcaggagaccgcagttccgaaggcggcagccactacacgaaggcctccctggttggacgagccgttgattttgaggaagagtttgtcatcctcctgcctcctgctgcaactgcccgctcccagctggcgccggtagcagatcaggtagagcgggaggcagaagcccagcaggctgagaaggagcagccccacgttcacccacagagggtctccctggagaggacccatcatggccaagaaacagcggctgctgcagaagggcgaagagcgcgctgatcagagactgcagtcccgtgaggctgccgaactgggtggaggggtacacggcagcgtacagc

SEQ ID NO: 374386 - DNA, 493 bp, Homo Sapiens
ggctcggcccctcttgatgcaagtgtcggtacttaagttatggaatgcttataattgcacagcattccagtaactgatagaagaaaagacaatgatagatgctgatccttattccacgtcaaatggccttgtatagacttggcctaaccagagtctcagatcccactgagtgcttttcaaaaggggcatttttccctgttataacacaggtactatttttggcctcacaaagccttcagcctagacagtgaaatcccagctatagacacatgcaaataatcctagaatttgcaaatatgctacagaaaatatcattctctcttttatgtcaaccctcacatcaccactagtactcccataggcaaggggagactggcaaagattctttacactggaaacaagtgattctgatacactgcagatacttacctcaatacaggttgatagctcattaacacagcttagatttcatgaaaaagtctgcttcctggac

SEQ ID NO: 374387 - DNA, 683 bp, Homo Sapiens
caggaggaactgatgcggctttgaactaaggcagtgtcaggaagcactgggaaaagtggcatgggtataagagaggccaggaagagagagacaggactctatagcttggtgggtataaggccaggagagaaggagaaggtggacactcagatttggggcacatgcctctccctgagattcaaacccagtaggaaaaacaggtgcacaggaaaggtgacaagcagtcatctgggaatgtctggtccctgaatggaggttgttttggtgtggatatagctgcaacccacctacagtgctgtcatctgctaggctgtttgtctctatcacactcacctaagtcttgggtaactgatagcaaatacaactttgggattgaagagcacctttagcatcctgccagcgggagcaaggaagaaaccaacgagcccagtggctagggttctccatgtcctagctccaagaacttcacctttgagggcttctgagaggactggatatgttagctacgcaaaagcaggtgcccacgtgtgaaagggcctctgttgctccccctccaccttcctatgaatttaatatgtgtacatcccagtcagtaagtgagttcatctttatcacatttggttccatacctggaggaggactcgatcctttcccatatacagtagacacttgcatccagaggg

SEQ ID NO: 374388 - DNA, 689 bp, Homo Sapiens
  misc_feature (460)..(529): n is a, c, g, or t
  misc_feature (552)..(617): n is a, c, g, or t
ttcggcccatcttgatgcaagtgtcctctggatgcaaagtgtcagattctatctatgggagcaatgggggagcaggtggtcagtgtgctgcatgaccctcgattagttagcagctgcagggaaatgagtcagagcacaccagtgcatgctggttgatgcctgactacaatacaagcctaaagcctggcttgtaattctcattaaccctgtgagggtgggttttcccttgggcttttgccccattctaagcaacacttctatggatatttttgactacatgttttttgtagtgcacactggaaaatattctgtgtgctcaaattaatttttttccaagactgtttctcattttaatatcccagagcttctcttgcattttaggctgcaatgggtgaagaaagttatatcttcattcctttgtcaaaaatttactgagtgcctgggcactcaagtgctgtgnnnnnnnnnnnnnnnnnnnnnnnnnnnnnnnnnnnnnnnnnnnnnnnnnnnnnnnnnnnnnnnnnnnnnnggtaggatcatcttgagaccccnnnnnnnnnnnnnnnnnnnnnnnnnnnnnnnnnnnnnnnnnnnnnnnnnnnnnnnnnnnnnnnnnncctgtctcgaaacacacataaaaccatttattgagtgcgtactcatgttagttaggcgctggcctgacactt

SEQ ID NO: 374389 - DNA, 609 bp, Homo Sapiens
  misc_feature (235)..(398): n is a, c, g, or t
cctctggatgcaagtgtctaattctatatacagaagatccttcatggtgcaagaaagtataggagtgggtgggaagtagaaagacaaggtgaaaggctatagattgagagctttcttttgtctcagatcctgcaaatattaggaagtggtgagatcctgagcttcagaatcagaatgtctgaggatggtgtgtgagaatcttgctagtgtcactaaattgatttaaagcagaatnnnnnnnnnnnnnnnnnnnnnnnnnnnnnnnnnnnnnnnnnnnnnnnnnnnnnnnnnnnnnnnnnnnnnnnnnnnnnnnnnnnnnnnnnnnnnnnnnnnnnnnnnnnnnnnnnnnnnnnnnnnnnnnnnnnnnnnnnnnnnnnnnnnnnnnnnnnnnnnnnnnngtccttgtctcagaaggttagaaaggcaaataaagaagtgagatggatggttggcaaggtgtcagagtagtggaggtgggacttatggtgaaggataaatcatgggctctcgaaagctagtggtctctactctgatccagtggacttttgtatggaccatgtatggaagcagattgccctgggcggatcttccagacttcagagaagctta

SEQ ID NO: 374390 - DNA, 913 bp, Homo Sapiens
  misc_feature (125)..(137): n is a, c, g, or t
  misc_feature (161)..(316): n is a, c, g, or t
  misc_feature (736)..(744): n is a, c, g, or t
cgttcgtcagacaggaatatacttggggatctgccattgggtcagtcctctaggagtgggcagatcttgatcagtacagtattggagtgaggttacataattaatagtttttacatatagccgannnnnnnnnnnnnggaaacggagtctggctcggtcannnnnnnnnnnnnnnnnnnnnnnnnnnnnnnnnnnnnnnnnnnnnnnnnnnnnnnnnnnnnnnnnnnnnnnnnnnnnnnnnnnnnnnnnnnnnnnnnnnnnnnnnnnnnnnnnnnnnnnnnnnnnnnnnnnnnnnnnnnnnnnnnnnnnnnnnnnnggccatgtgggccaggcgggtcttgaactccttgacctcaggtgatcctctcgccttgcccaaagtccggggataacaggcatgagccaccgcaccgggttatatataccagattcttgagcagataattaaacctcctccaccacaaaacttgaaaataaggtacaagaaggcatgacatgagaatccacctgccccttttcccatctgactgtgatgctgaggtgtggtggaattagccaaaagatgtaggaagaaaacttgggtgagctacacccagaataattaatacataagtcatcaagggttgattgtacttgcaggagaacgggtaactcgtcccacataaagctgaaatgctagtacagagaaatagccttccatttgctattacaggatcaatgtgcaggtctgatcacnnnnnnnnngaagcattttcttttgccaagaataaaaatcatgtatagctattgcactaccaataggtcaattcatgctacaaatgtccatgtgtttctaggatgccagtggctactgctaccagaaataactccagtcactcccttgactagtgtgacactttgcatccagagggac

SEQ ID NO: 374391 - DNA, 586 bp, Homo Sapiens
  misc_feature (196)..(351): n is a, c, g, or t
  misc_feature (375)..(391): n is a, c, g, or t
ggcaggtggattctcatgtcaagccttcttgtaccttattttccaggtttgtggtggaggaggttttattatctgctccagaatctggtaaatatagcccggtgcggtggctcatgcctgtaatccccggactttgggccaggcgagaggatcacctgaggtcaggagttccagacccgcctggcccacatggccnnnnnnnnnnnnnnnnnnnnnnnnnnnnnnnnnnnnnnnnnnnnnnnnnnnnnnnnnnnnnnnnnnnnnnnnnnnnnnnnnnnnnnnnnnnnnnnnnnnnnnnnnnnnnnnnnnnnnnnnnnnnnnnnnnnnnnnnnnnnnnnnnnnnnnnnnnnntgaccgagccagactccctctccnnnnnnnnnnnnnnnnntcggctatatgtaaaaactattaattatgtaacctcactccaatactgtactgatcaagatctgcccactcctagaggactgacccaatggcagatcccctactataatctttctgacaactcagtgacaggtaaaatcactctaatattcctaaaatatctagacacttgcatcagaggaccgagctcgatcga

SEQ ID NO: 374392 - DNA, 534 bp, Homo Sapiens
ggatcctctggatgcaagtgtcagatgtgattctgccttccctaagcagtagtttaaagtaaataaaagcttgttgggctctgaagttggactgtgtggattcagatcccagccttaccacacttaccaactgtaagacctgttacttaacttctatgagtgtccattttctcacctcatggacctatggtaaggactgaataagacaatacatgcagagtgcctggtacagaacctagaccacacaagatatgtgataataaatggcagcagctattatggttatggtgctactgctgctgctgcctggtctcaccatgatgtatcattcctggcaatagcactcgaggatatttcaatgtggtagagaactgggccccatcgatcctaggtcacagatattacaacagcacaacaaagagagcccagaactggagtacaggttctccttattagattcgcattgacatgctatgtgacctgagacaagtagaggaacactcaaaatctcagtgtctttatgggtgaaattcg

SEQ ID NO: 374393 - DNA, 673 bp, Homo Sapiens
  misc_feature (325)..(356): n is a, c, g, or t
tggcatggtgatcgacatagtcttaaagaagtcaaggcaaataagaaggaggaggtaaaacaatatgggcaggtctgagatcgcatcgaacagaatgaacaagtcatgatgtcgacctctgagggtaggagaccatagaaccaggctttctggcacagtccccaattcaaagattctcctctgtgctcctagtacatatatcctaataacgatggggtatgacccaagagttgaacacaaaacactgtctccaaatatattaaagtatatagtcctatccatgagagcagggaatcttagcttaaaggtttcgttcgtggcaacnnnnnnnnnnnnnnnnnnnnnnnnnnnnnnnnactatgaaagaggcaggtgttctagctagctagtttactccaaaatgcaatccgttgacatgaaacaggcactgagggtaactacttcctttcattttgaagcaacagtttataaacaggaaagtctactggtttcatagaatctgtcagatttgcttatttgctactggtttcacgcgcgtggactatattccagtgtttctagtcaaagacctttatcctcaaatcatgagattagagtaaaacaactgctgtaaggttgagcatttcatgaccaatgactagaaggcacattcaccaaacacagacacttgcat

SEQ ID NO: 374394 - DNA, 993 bp, Homo Sapiens
  misc_feature (41)..(58): n is a, c, g, or t
gttgatgcaagtgtcccttctcatctgagagagctgatgcnnnnnnnnnnnnnnnnnngaatttgctattgtttggatggagcttgttgattttaaattcttttttcccttgtgggtatgactgtggtgtaaaatgtgtatgggtggatcagcttcatttctgagtgctttcagggcgccaaggctctgtatgggttccttggttgcagataagtttgtgcggtggctgagacgttgcttcttgtagtgatgtaattttgttttgtagtgtaattcaggctgcagcccagtaggtggcacttaagagtgagcgccagaaggtaggggcaagggcagaagcaatggaaaagtctgcaaagtgccctccttcagcgcgtttgccttcagtgggagtggaattgctggagaagccccaaaagtggtctctttcagcccacactctctcggttccgctggggagagccaccttcgagtccgcaacagtacactgaagagggatgagagaggtgagcgatgaccccttctcgacaaccattccctggctttggtggcgcccccttcagtggctagcgcagtgctcctgtttcctttgacccaacctttgacccaagaggggctttagccggctacatccccctcccttaggggccgactgaaccgagggctagatttctaggggagtgggtcccttcccttaccacttttcagagctggtgggttactgtcccccaactgaacaaggaagccgactggggaacccagtagccgatatgtaagggatgctgggaagtgctggataaagaagggtgagtccctggcgagggctccacccccaggcctgtgcaccacggacctaggtgaggacaggcactccagccttcgggccacaaatgctgcacttacccaacgaccaacctagcctaccaggccccctaccatcctgtgcctataaaaaccccaagaccctagcgggtagagacacttgcatccaga

SEQ ID NO: 374395 - DNA, 643 bp, Homo Sapiens
tcggctcggtacctctggttgcaagtgtctgtagggaggtgttgattgtggacacacagcaggcgctatataattccataatcaggaaacccagtaaaactggtatcacacgaaggaattgcaactattgtattagtccattctcacacatctataaagaactacctgagagtgcgtaattaataaagaaaagaggtttaattggctctgcagcctgtacaagtagcatggctggggaagcctacaatcatggcagaaggtgaaggggaagcaggcacttcttacatggctggagcaggaagaagagaataaagggggaggtgccacatacttttaaacaaccagatctcatgagaagtcactcactattatgagaacagcaagggagaaatctgcccgcatgataaaatcacctcccagcaggcccctcctccaacactggggattactattcaacatgagatttgagggaggacacaaatccaaaccatatcacctatggtttgggtttcggtagcacaacactggcacaaactactactcagggatcctcaaactttaatatgcatgctaatcaacttgaggttctattaaaatgcagattttaatagagtaagtctaggtgcactttgtaacaagtacc

SEQ ID NO: 374396 - DNA, 560 bp, Homo Sapiens
gctcggtccctcttgatgcaaagtgtcatcatatgctcagcattataacacatgtgcatgacagttagcacatactgagtgcccatgagtgtgcatgtgggtaatgagtgttttcttgttgttcagcagaggacgaggtcatctcattagtgttgggggaggaagacaaaaaggaggctctttctggaaagatgggggttcttttggaaatctggatgtagggagaacagacagagactttctggactggggattgagtggataaagtctcagggtcaagaagagggaacatggggagttcagatagagtgtaggtgggctgggcacatgctgggcccccagaagatgtgggacagccattgatgacagtgtctccacttgggtgtcacctgtatcagtttcctagggttgttgtaagaaattgccacaaaggtggtggctttgaacagtaaaactggattctctcccagttttggaggccaagagaggctgatgctccctctggactttctaggggtgatccttcctggcctcttttggcttctggggcctccagctat

SEQ ID NO: 374397 - DNA, 532 bp, Homo Sapiens
cgtctgtttgcacgtgtgcatcagagccaccgctccttatgacgtcagttcactactctactgccagggactccgctcggtctcgtcactggtgagcccgccccacacctgtgttgcctctactcccaaggacgccgtcttcaaatgcagcgctcagctcaaacacaatcaggtcacaaggcttttctaaaaagcacttttcagaaacagtgacaccaaggcgccaaaggctgctcaggtgccttagcggccagttctgcggcatgtgtctggggctgacaggagggaccagcgacagccagctctgaggagcagagaccagacgatgaggccctgtctcagctctggaccttgttctctcagctcaaacacttacaatggtttctccactgcctaaaagatactggctgctcacagttctcggtttgaaatgtgacaccccacgatctgctttcttcctgcccctctaaccacagctctttcaactctactaaaacttcaaccaaactgtcctacgtagacacttgcatac

SEQ ID NO: 374398 - DNA, 679 bp, Homo Sapiens
atcgagctcggcacctcttgatgcaagtgtcttggacatcatctggcatggtctgtcaatgtcaagatgttaggtagacaaaaatgaaacaattacaagtagagaggtttcataagcataaatccgatgtgagatccagttatgacgtctaaaatgttactgattgatgtctataatgacagtcttgccaaaaaagtaaaagaataagagtgaaccaggagagaaatgtcaagggtgaaggagaagctcaggtatctgaataccaacagtctgagctcatggaagtaagtaaaaattgcttagggcagaaataactgcctcaaccctcagggcattcatagtccctatgcaggtcacctctgacctcaaacagcttccttcattttctgtagtgtatatgacaaatactatcatttttttgtgtcatgacatgaaaaaggttggcaagccctcgctagggtctttaaatgtgaagaaaacaggagattaagggtaaacctttagaagccaaatctatagttttagtaggaaatatagactgatagatccttcaaaggaaacaaaaaggtaggaggaaaaccagaaaaagaatatatcctatacacaaagacttgggagagtcaggtctggtgtaacttaggaatctcctgacacttgcatccagagggtaccggctcga

SEQ ID NO: 374399 - DNA, 586 bp, Homo Sapiens
agtcggtacctctggtatgcaaagtgtcttgactaagagccttgtgccttctaagctccaacttgacaacagaaaaggtaactcttggtatgcaaaataagagcctaaagcatctgtggctgtaatttggtattcactttctataatcagtaagaccactgattaaagaccatgcagtcgactaccaatagctctaaacaaacatcctattgcagcatatacatagcaaatgccatctctgaccccggaagtttggttgtccaggtaacctgggcagggaaaggtctgagttcaaggtgaaaagtcttccctactgcaggatagaaacactatcatcaataataaatattcacagacctgtagtccctttctgctttggtggttacacagctcccaggtgaactggaagcctaaataacctgagccctaagagcaagcacttttggtccacaggtgtcatagtctctgcttctgcgcccaccctttgttccaccaccattgtagtgagatggtctagtgaagtcatctctgtctggaccaatccaaggctctctcttttgtccttcaccttattgacttctcagca

SEQ ID NO: 374400 - DNA, 915 bp, Homo Sapiens
ccctctggatgcaaagtgtcgattatgtggcaaaaatgaccctaaaccaatggttcagcatttttcatggattcccttctttcaggacattgaaagactgttcttgctagctttgcctactcataaatattaccaggacagaagagcgctaaatgtaacattttatacatgtggcactagttaacataaatttagggggaaacttatcttaaatctcaatttcctcagtatcaaaatattgatctattttctttatgggttgaaagggaagcatgcaatttcaaaactgaaagggaatgaggaatcactcagtaagtacttggattctgcctgcatcctcttctataagcaaagaaaaagcagctcatagaggcaatttgtcgttagtaacataccttcttcaggctgtcctcatcgttctgtttcacttagaaccacgtgtcaccctttccctgctctgacccaaaacattagagggctgagtgacgtggactgtgtcccacgctcctgtattaaggagcttccagctgggaacttgaaaaagatctgcaagtgaaaggaagggaggaaccaggatatttattcccacttatgctctgactcaggctgctacttggtagtggctgagccttttacaaggcttcagcccgccaaagatatccacatgtcttcgataattttataggacgagtcattgcagaagttgtagcattgcgaggtgacttttgtgtatgatggggcaaccagggcagaggacaatgtagaaacagaactaaaggggtatagtatcattgtcgagaatacaactcagactagatgacatgatgcaccagtatggaacgccatacagagcgagatagtactcgacatgcaactactggtatagttgaacataatgcttggtgacacgtcgta

SEQ ID NO: 374401 - DNA, 423 bp, Homo Sapiens
gggcccaagcccacctcccctcatttcttcctcaacacagacctcaaacacagcctcattatcaacccacagaagggaaatgcactttaaataagtggtctgggaaaatgcacttaatgttccattaacaattagcaattgtttgatatttcagttgtagcacaaagcagtatcccatgggtacggctgggcactgaacaggctgcaattcagagggagggggacctgatcatctctgctgacatttcaggggcattgatttactgctcaattatcaagcaagcccagacccagtgagattaaacaggaaatggtcattcatttccagctggctgcagacactcaaaccattgacccaatgccaccgccgcagaagctctggctgataaggcgatgagatcagacaaaaagtggggagacgtc

SEQ ID NO: 374402 - DNA, 518 bp, Homo Sapiens
  misc_feature (71)..(88): n is a, c, g, or t
tctggttgcaagtgtcaggacattcacatattttcgctttcataaccacttacccaagtagggattaaaannnnnnnnnnnnnnnnnncgcgctacataaaaatcagaggcttataaacaaatctgctctttgctgaacacatcatcctacagataaagcatcatgcgatacagcacaatgaaatggatctatggaacttgctagttcatcagcactctgcaaccaaagctacagttattatttgtgggcatttacaaaggtcatttaagaatttactcattctctgcagaaaagaacactgtgcagactggaaaaagataaggaaaaaatgctttgatcgttgaatcaagctaacagtaaaggactaactcacatccccgtaccagacacatgtagatatactgccttcctggaaaaataaaaatcagttccagagaataggtggtgtaatgtgaggacatacaacacaaaaggaatacctgtaaaatcattcattcgtttttcaggatatcacatt

SEQ ID NO: 374403 - DNA, 577 bp, Homo Sapiens
ggtcggtaccctctggatgcagagtgtccagtgtagctaggataatatatataatcgttatattattaaattagctcacctagtttccaaaaatgcccatttagtaaacatgcaaactgaggttcagatagatgcaatatttaggtctcaataatcaagggataaacagagctgaggtttaagttcaagacaatctgacttaacgcttatatttttattatactttgtccctttgacttgtgctgatggattttgaatattgcatcatagaggaaaacttaatgatttaaccttatttcataggattgaaaacatcatccattttaagatacatcattattttatgaaccaataagattttaaatgccgctaagttttgacagtgtttattttatacttagagaattttaggataaacagttttatcatgtcactgacaggtatacctaaacagaaaatggaagcgaaataaattggttagggcagtgacaactctcactactgccaacctcccccaaaaaggtatatattatcgatttaagattcattctgttttcagagatgttagaaaatcggg

SEQ ID NO: 374404 - DNA, 331 bp, Homo Sapiens
tgaattcccacagggctctgctacctgtgggaattcaaagtcacttaactaagcagagatctgactttaggcttcctggtcttgaccactgcctttcaatacataacaaacaacttcttctacccttcatttctgcattacactcatatattaagattatgagacttaagaaagtcaccttgggataattcttggcaaaagatgaatattttatccaatcaaaaaattttctgaaaccagtttttggaactatgtactacctaggagatgatgataacattcttatgactgattgtaaaggacacgttgcaaccagagggtaccgactcga

SEQ ID NO: 374405 - DNA, 666 bp, Homo Sapiens
cctcggttgcaagtgtcaactgacagacaacaggatttctcgggcgtcagggctgcatgtctcttgggttactcgacctgatcagctggctccactgtgtgtttccagtgtgaggtgtgaggtcaccatccgctgccattacacaaagacccatttcccctgggccattgctcaagtatgacagagctgattgtcctgtatggaaactcagccactcacagctctgcccagtgagacaggcaatgactatctgatcatggttgctgacacagtgcttgtggtggggagtgtccctatctggaggcaaacagccgagtggctgctgtgccctcaacaagccccaccctgcttcacggtgaggaaacagcccccacccaaccagtcctctccccagcctccagttgagtcaggtgcccccctccaagtgtttatgtaatttgtgctgatcttaccagggtcaaagcacttaccacattactttgtctaactattattctttcatgacacaaaacatatttattgttgaaaatgtttaaatgtagtaggtaacatctattatcccactacctggaaataatagctgttgacagattggcataactccaagaaatttttttaaatctggaaaacatcgcttttaaactcattattattcagtgatctgtc

SEQ ID NO: 374406 - DNA, 578 bp, Homo Sapiens
  misc_feature (62)..(70): n is a, c, g, or t
cgtgtcactgctctgaggacctagagctagacattggcaagtgtaaatgaataattacgtcnnnnnnnnnggtttctttgttttagcatcagccatattttcaaattggaaagctttaggatttcttaattatggattgtctattcattttacttttcaacttgtgcatcatgtcttacatatttcggcagcctatatgaacaaggacatacctttctgaggttctgcttatctgcccaggatcttctcttcccacatgattaccctcttgccaatcttgccccaagacgaaaaacagcgtcatctgccttttataatgttcaaattttgaggtgatataatctgtattaaaatttttatgtaaaaattaatgtgaaggtactaggattgtatttttgttaatctttccaaatttaacatgtgactcttctaaagagtatgcaggcttatttcagttttggtaattgggtttaaggctcaaggaggaaggaaaacatcttatagttatctttgaatctctagcacccagtatgctgtcatctgcttttgaattgattataactgctgttacatagaca

SEQ ID NO: 374407 - DNA, 588 bp, Homo Sapiens
  misc_feature (427)..(530): n is a, c, g, or t
tacctctggatgcaagtgtcaatatcaaacgacaggcctgtaatgtaggctgtctaatagaagacactctctacaataaaggggagccaaggagctaccaaatctgagtaggtgtgaactaggggtaaaccaacccttttgtagatttgtagcttgagtttgcatcatttgggtaattcagagaacctcaacccttgaacttgattaatattgcttctagactggatgcaaacccaggtactttgcagaagcaaataacattcactaaaggaaggtgccttctatttagacttcaaattatcacagaaaatatattttcagtatcatgacaagcatatagtcagtaataaccaggcatctaaggcaacaggatactatgaatgagaaccaacatgctgtatgttgaatggtgctcccaccaaatccnnnnnnnnnnnnnnnnnnnnnnnnnnnnnnnnnnnnnnnnnnnnnnnnnnnnnnnnnnnnnnnnnnnnnnnnnnnnnnnnnnnnnnnnnnnnnnnnnnnnnnnnatatttgttaagatgagatcatattggaatagggtgggctcctactccaatatgatgg

SEQ ID NO: 374408 - DNA, 563 bp, Homo Sapiens
gtggatgcaagtgtctcctgtcagccaggtctttctttatctgatgtccaacactttaatcttttcctcatagtgctgctctttctgtttcaggtgcacttctaggtgctgggctgagacttgggcctcccgatgtttctcttcgagctcctcagcttccaccagcttctttctgatgccttcagaagaatcctctcggttctgcagcttctccagctccctctcggctcgctccatttgcctggcggatattctgcagcagctcggtggcctccgtgctggcttttacagccttctccagtttctcttggagctcctgaattttgagctgctgctcagcattgatcttctccagtttcgcatattctcccacttcaggcttcccttgatcattagccttcaacagtttatgctgacattctgtcgctttccgcttgaattcttcagcagcaagccgagactctctcagctcagattcgtagagatcactccgtcttcttgctgagacaagatcctcttccaactgattcatcatcaacctcatttcttccacttgagcctgg

SEQ ID NO: 374409 - DNA, 533 bp, Homo Sapiens
ccctctggatgcaaagtgtccctgatgtgcagagcataataatcagccttcatggataatttcaatgttaggcccgagggacagtggctgaccatctttctcccattttaatgttggtggggggatgccagacactctgatctcaaagcagacactttggccttcttggcattctgcattcgccagtaaccttttgaacatgggtcttaaggtactatctgttggaggtgggtgtagggttactgtcagctttgctttacagctgtcttcaccatatttgttccttgccacaacagtatattcagcgtcatcatctgtagtgacactgttgattgttaattggtaaagacccttgtctgactcaaatgtgtacttcttgtcattgtcacctggtttgattttctgacctgatttataccatgttacatgaggctctgggtggacagttatagttactccaaaccggacattttcacctacataagctgtcttattatagagaggcagggtaaattctggtgacctttccagga

SEQ ID NO: 374410 - DNA, 586 bp, Homo Sapiens
tctggttgcaagtgtctagattttctatggcaaatgtctagctcatccagcccccatggtcccctaacggacattgggatgtctttctcctgtcagcacgtggagaaagcttctgaaactgagctccttttaataatagtttgtgctggaaagaatcagaaaaagcaactcatatatcctgatatattctgaagttggacagaacttatttacagattttacccttttttggattatctacaattgtgctccccatcttgaaaaaggacagcatttgctctgaatacaaaaacaaataatgaagatgaagtattatctcagaggtagatctgcttgtactctaaatgtctccattggagaaaggttgaggggcatggcaagcgactatgccatccccaacttcccagagcaatcatggggaaaaagaaagcagagtgaccccctggggcagaggctaaacaatggttactaactagattgttgcttcaagccaagaaccttacggctgggtgaaaattcaagactctgaagactctctgggttagcgttactgggaaaggtatgtgtattttggccaccaaatact

SEQ ID NO: 374411 - DNA, 336 bp, Homo Sapiens
tgctgggatcgcagacgtgagacaaggtggccagcccactttgctcatttttaatgcatgggaagctggcggagatttattttcttcttcttcccccaggaatatgttctcatacatacatactatctaggtccctgtaattccccacttccctaactatccatgttcatgcatatttacatttaaaagaaaataggatcatactggctatgttgattctgtgactttatctttttcactaaataatatgactcaggaacctttcaaggtcaggaatgtggatccacctcattcatctaaaatctactcattctccgcacatgacacgttgcatga

SEQ ID NO: 374412 - DNA, 546 bp, Homo Sapiens
  misc_feature (47)..(67): n is a, c, g, or t
  misc_feature (437)..(446): n is a, c, g, or t
tctctgtaagtgtctatgtcttcatagatgtaaatatgtgctgtatnnnnnnnnnnnnnnnnnnnnntaaatatactttagaatcaacagatgtgcattgtcagatacaaggttgattctggcatctggataaccaagaaagctgcttttaggtgtctggacaactttgtagaaatggttgacgtagaacagtatagaatgtcttaacctctccaggactgctccaggtaactgacattttgtttatcaatactctggttctgactaaagtgaattttgacatggacatgtcatgtcatgtcatacccacacaagggtctaggtctatgctaagcctttgctctctaaagcattccaccttgagagacgttttcactctgtaatgtctggcacaacttttgtaaaaatattagctgtgaaatttttctgtgatcgcnnnnnnnnnnctcctcagtaagcataatatttatccttctaaaaaagtatccaagcgtccttaggatggttcactttctctttctctctagtcctgtgacacttgcatca

SEQ ID NO: 374413 - DNA, 544 bp, Homo Sapiens
  misc_feature (201)..(221): n is a, c, g, or t
tagtcagaaccagagtattgataaacaaaatgtcagttacctggagcagtcctggagaggttaagacattctatactgttctacgtcaaccatttctacaaagttgtccagacacctaaaagcagctttcttggttatccagatgccagaatcaaccttgtatctgacaatgcacatctgttgattctaaagtatatttannnnnnnnnnnnnnnnnnnnnatacagcacatatttacatctatgaagacatagacacttacagagacccacatgagctggcactttctgagcctttacagcctttaagactcggaggttgagaattagagacacaagagaggctgtggatggcctattaaaatgattaaagatgtaaattcagtgccattttaaaactgttcatatttatcaaacattactgtctacagctacattttttgttaacttacttaaagtcatgtcgcaagaaagatcaaacccatgaatgcttagtagctaaggctagtgttcaaaagcactctaaaagacactttgcatccaga

SEQ ID NO: 374414 - DNA, 396 bp, Homo Sapiens
  misc_feature (57)..(77): n is a, c, g, or t
gccagaatcaaccttgtatctgacaatgcacatctgttgattctaaagtatatttannnnnnnnnnnnnnnnnnnnnatacagcacatatttacatctatgaagacatagacacttacagagacccacatgagctggcactttctgagcctttacagcctttaagactcggaggttgagaattagagacacaagagaggctgtggatggcctattaaaatgattaaagatgtaaattcagtgccattttaaaactgttcatatttatcaaacaattactgtctacagctacattttttgttaacttacttaaagtcatgtcgccaagaaagatcaaacccatgaatgcttagtagctaaggctagtgttcaaaagcactctaaaagtgggaccgag

SEQ ID NO: 374415 - DNA, 765 bp, Homo Sapiens
  misc_feature (54)..(54): n is a, c, g, or t
atttacacctaggaagaccatagacacttaccagagaccccacatggagctggncactttccggagccctttaccagccctttaaagaccccggaggttgagaattagagacacaagagaggctgtggatggccctattaaaatgattaaagatgtaaattcagtgcccattttaaaactgttcatatttatcaaacaattactgtctacagctacattttttgttaacttacttaaagtcatgtcgcaagaaagatcaaacccatgaatgcttagtagctaaggctagtgttcaaaagcactctaaaagacattttgtccacattttggaaaagaaaatatttgcatgtttaattcataatttaggctatctttgagtatactgtaaagtgctgtgtgatataatatcaataaagtacttattaaatggcactttaatgttttcttttaaaataacgcactgttctaaacttcagtattgactattgactcgtgcatagaatccaatgctgtaattagaaagtaatcctgtgacctagaatagaccctttgtcccctgttagtagcccctgttgcccatgttccaggcttttaaaaaatgccttttgtgtcacccaaatatatcctataaagaaaacaaaatttctgttccagaggcctctgaaacttggctttccttacatgtggttggtttatgtgacaatccctatgaaatgagtggacgtatgatttttgaattaaatgacttttccatttgaaaaaaaa

SEQ ID NO: 374416 - DNA, 653 bp, Homo Sapiens
tcggtaccctctggatgcaagtgtctatgaccaagactagaaatgaagtttgtggctatccagttactgttcagaaacataagccgtacaacaatggagctgccaatcaaaagtggcattacatgaaaaatataaaagcacttgtggcctttcatagcactgccttggataaggaaattacatcagcaaattatgctggtgtctgtacatcatctgtgattaaagaagaaaacattgatcaaccaggatactgttatctctcacctgatggaaagagaaaaactatgctctgcttggcttgtggacaatccatgagaacagagaaaggactaaaacaattgcttccaggggttccattcctctgtatttcaggcaccaagactcagaagcccttcttacaagggcccttcaaggtcatcagtgtggctgaggtatgtaatgatctgagctctgctaatgcatgtatggcaacaatttggaaactttgatgcattcattatctgccttgcactcaagttcatctccactcatccaattcatcttcctcagatgcacctttaccattctacctgcattgatttccttttccccattgtaatttaaaatgcattgtctattaatagtcatagactctttgaagtaattggacactt

SEQ ID NO: 374417 - DNA, 671 bp, Homo Sapiens
  misc_feature (436)..(473): n is a, c, g, or t
ctctggattgcaagtgtcttacccaagttcattcatcaataatttttgagttataccaagcaatttgcctgcagagattcaatgttgcttaaattaccatgttgcctcaattcttaggaagacttctttttaattgagaggtcttcttgctcctttatgtcagaaggaatggtcacattgctgactttttcttgtttatggactgatgactcatttatgagttatctaaacgtcttgttccttctttctctcttctgccgtctctatcatgggactattttctttctgctagcacttctactagagattgtgaaagggtggtgacagtgaattaactccttgttagcagccttgtctcttgagaggaggctcacccactgctgctgactgataagatgatgacaatctctgcttcctaaaaaatcttctctactannnnnnnnnnnnnnnnnnnnnnnnnnnnnnnnnnnnnnctttgccttccagattgcctcttgcttctctctgctctacttgctccttctctgctggatccccttcctgggtaaacccttaaatgtgttacattctttaggatctgtccttgtctgtctttgattctgcctgctcttctcggtgatcgcagacactcttgtgtcctcagttaccatctatctgacacttgcatccga

SEQ ID NO: 374418 - DNA, 929 bp, Homo Sapiens
aagagtaaactgacggctgctgaagccgggcgcagtggggggacagtaggcacttgtgacgtgtgtgatatgagagctgtcttggctttggttctgggataacccccatcctgcttgctgtggccgccctcctctttgctctgtttttagaaacttcgacaagcagagctcacagaggagtggaagccgcaagagcccctcctgcacctcccaactccctggtgtgtagccgcttccttctctctgcaaggtgcgctttgtgttacaggatctttggggtggtgtttttctggccagaaatctctgtggccggtggcgcctttgcccaagttttgctcaggctgggcctggcaggccacgtttggctcacactaccagcctgggtcccatgcctgccaagggcgagtcaggcatggagtggcgaggggtgtgtgaggagcacggggtctggccacaccagtcaggcacgctgggtgctgcagcagggtgggcagctccaggtgccagcatgggtgcgggctctctgtgaggctgcggccagaccagacacactgcaagcagcttccatggttgacactgaggaacatggtagctcctggaagtttggagataccaggaaccacagggtcccaaagatggagtcacaggcctagctccgggagctcccaggtctgggctccctgaagggctacagctgtcctctccttctcttcacccacagtgtggcgagcagggggcatgtctcagccctgtttgtgctacagctcttctagccccaccattcgacaggtcctgagttcttgttctgcgaccaggaagaatgaggtatggagacaagtggaggatgagcaagatgaagaggggtttatcgagcaatagaacagctcagtctcccacagggggcagctcctctgcagccaggggtccca

SEQ ID NO: 374419 - DNA, 569 bp, Homo Sapiens
attggtggctttcagcagctgtggggaggtgggactgaggagcgactgctaatcaggatggggtttcctcctgggatggtgaaaatgttccggacctagatagtgatgaaggtagcacgacactgtgagtgcactaaatgctattgaattagacactttagaatggttgaaatagtgatttttatgtgaattctacctaaacatgctattacagctcatatatactttttccatctggattcttcacaaaagaatatgttgtgagcatctttccatgatattaaatcatcttaggaaacattattttgtgttcttcaaaatgtgcatgttaagtattcaaatcagtcttaaatttttaaaaatatgtaattttagaaaataatttaaaaggtttgtttcagtttgtaagatttcttttctggcactttaatggcttgaggtatcattatcagttacaaattgagttattcttcatcaaatgacttttggagtagagattttatttttatagcaatagatgcacagatatcctgtaagatacaggtgtggttagacacttgcatcacacg

SEQ ID NO: 374420 - DNA, 587 bp, Homo Sapiens
ttcttaggagatctgatagtttaaaagtgacagtttcgcatgagctctctctctcctaccacctttgtgaggaagatgcctgcttccccttctgccataattctaagtttcctgaggcttccccagccatgtagaactgtgagtcaattaaaactcctttctgtataaattacccagtctcaggtagtatctttatagcagtgtgaacatggactaatacagagaactggtaccagcagagtggggtactgctgcaaagataatctgaaaatgtggaagccactttggaaatgagtaacaggcagaggttggaacagtttggagggctcagaaggcaggaagatgaggaaaagtttggaacttccaagagacttgttgaatgcttttgaccaaaatgctgatacggatatggacaatgtagtccaggctgaggtggtctcagatggagatgaagaacttattgggaactggaacaaatgtcactctcgctatactttagccaagagactggcagcatttttgcacctgccctagagatctgtggaaccttaaacttcagagagagatttaggatatctggcagaaga

SEQ ID NO: 374421 - DNA, 526 bp, Homo Sapiens
ccggcctcacagtctatgagcccttagatcatcatgcatctatcttgtgacaaaagcaccagctattggctttcaaggactcggctggaatgagaggtgggagatgccaactctgatcgaaggatacctgtggaggaatcaaaggtgccacacaggacaatcttctctctgttatccacacagcgaagctgcccaagccctacatcacaatcaacaacttaaaccccagagagaataaggatgtcttaaacttcacctgtgaacctaagagtgagaactacacctacatttggtggctaaatggtcagagcctcccggtcagtcccagggtaaagcgacccactgaaaacaggatcctcattctacccaatgtcacgagaaatgaaacaggaccctatcaatgtgaaatacgggaccgatatggtggcatccgcagtgacccagtcaccctgaatgtcctctatggtccagacctccccagcatttacccttcattcacctattaccgttcagactcgtcgtccgt

SEQ ID NO: 374422 - DNA, 626 bp, Homo Sapiens
cggggtgtatccgtgttctttaaaggtgtaatatagatagcaaggtgttataaaaatggattatgagctacgaatgggcagtcgaatgtggagcctaaattccatagagatctagagttgggttgagagggggctaaacaaatggaggaagggaaaggggtaaacagcgttgcccaaggggagacctcagaggctctgacttgctgaagaacctacccagtagtggagatactgaaaaaaatattgggctggccacttgtctaccactgtaggtggctgactgccaggccaggagcctgggagctcccaattcctttgaccaagagcagcttaggcaagggagttataagacagtacacaggaaggagcttgcaattggctattaggaaaataatactcctaacttcagggtggaaaaagacaagaccaatattcgcctagcgaaaggggtataacccacaatcctagaggaaatgtcagtgctaaaaaccccagagcatctggagggtggcctataataccgatgctgagaacccaaaatgcctgcgtttcagccaacaaggatgccctcgccaaagcagctgtgcacagcagtgccaaaaaccctggggtacccagtgggcggc

SEQ ID NO: 374423 - DNA, 639 bp, Homo Sapiens
  misc_feature (273)..(577): n is a, c, g, or t
tctggatcaagtgtctactgcccacggctggccaggcaggtgcacgacagccttcctcagccctccctcctggctctgcttcagccagccctgcccacagggccagaggcccactgcttttgcttctgggggactctgaacagccagctcccggccctctttcagcccacctcagggaccctggtacacaacaggaagtcatggaggggacatgcaggtggggtgcaggggcaggatttgtccaaaccaccaacagtgtagtttctcttttgnnnnnnnnnnnnnnnnnnnnnnnnnnnnnnnnnnnnnnnnnnnnnnnnnnnnnnnnnnnnnnnnnnnnnnnnnnnnnnnnnnnnnnnnnnnnnnnnnnnnnnnnnnnnnnnnnnnnnnnnnnnnnnnnnnnnnnnnnnnnnnnnnnnnnnnnnnnnnnnnnnnnnnnnnnnnnnnnnnnnnnnnnnnnnnnnnnnnnnnnnnnnnnnnnnnnnnnnnnnnnnnnnnnnnnnnnnnnnnnnnnnnnnnnnnnnnnnnnnnnnnnnnnnnnnnnnnnnnnnnnnnnnnnnnnnnnnnnnnnnnnnnnaaaacacgttatcataatctattattatctaataatgcacgtttaaggagttgccatgtcgc

SEQ ID NO: 374424 - DNA, 563 bp, Homo Sapiens
tctggatgcaagtgtcctgttgaaataaatttggaactgactgtagtaaaacctgttacgtggagaccagccttcctcttctctctggtttcttagaaatatatccaacaatggagccgagagtcctagcatctcaggaaacctatgagcagcggtgagagcagacagtacagaggtacccgcaggagtctgctggcagataggaacagcttgattgacttttcatgaaatgagacagaagagcagggatttcctgggagaggtggagagtaattcaagaagggcactgagtagtggaggagctcatctaataagatggtaaagagcatgtactttggagtagcctaccttcacatcccagctcctctgcttactgactttgtgacataaggcacacagcctctctgtgctgcctcacttgctttctataaagtaggttattgaccctgagaagtcaaatgagttaatacttagcattgtacgtggaacacaggaggcactccataagtgtaaactgttttattttgtgttatacgtatcgacactttgcatccagaggtacc

SEQ ID NO: 374425 - DNA, 652 bp, Homo Sapiens
tggatgcaagtgtcttgtctataaaatgatgtggtagattatgtacatgtcaaggaaccgttctgttctgtgatgtccccaccacccacaagggtccatttttcagtcattctgaccccatttgatgaattcattggacagctctgccaaagtgagggtgagcaaagacccagggtctaagaacctggtgtttctgacggcgtttcctctcctgctcaatcttctgctgcttctccagcttctcggtcatgcgagcttctctcagagtctggcgcttgctccgtttgtatgctttggagttgagagccgtctccagggtcgtgtccctgcgcatgcaggccaccacctcctgtctcagctgtcaagaagagagcagttagacagccttccctaacagaagctaggttcctgaactctggccttctcgcggttgcatttaatggaatagagtggggcggggaatctctacaagcttctcaatcacctttggtttgtattaaatgaaggaactaaaatcatgccaaatgtatgcaatattttcaagaacggtacaagatttttctccccaaataattcaaatcaaaagcaattatagtactgtaacagtaaaagaaagaaaagatgttgtcttggacacttgcatccagaggta

SEQ ID NO: 374426 - DNA, 395 bp, Homo Sapiens
tcaagacaaacgtgttcaagtcttcaataggaaagtgcaaaagatgtacaaataaatgaaatctcttctaagaagtcgtctggaaaaggtggcgagggggcacgtccggcgtggttgtgggggcaacgctgtgtggaagaacacttgaattatgatgaggtggcacttctgggctctggccagctgagctcgtccgttcctccatgtgatggcattactaggtttccctttttgtcccaaggtggcgctggctcctaaaaaggtggcagcttttctctcccatgtgggtcgggcaggtggcccggcaagcgtggctcagctggaaatgagcgctgcaacacagggaagtctcgaggacggctagatatccgtcacatagggccccagggcaattt

SEQ ID NO: 374427 - DNA, 409 bp, Homo Sapiens
gcacgtcaggatgcagatggtcaaatgaaagagctccaggatcagctcgaagcagaacagtatttctcaaccctttataaaacacaagttagggagcttaaagaagaatgtgaagaaaagaccaaacttggtaaagaattgcagcagaagaaacaggaattacaggatgaacgggactctttggctgcccaactggagatcaccttgaccaaagcagattctgagcaactggctcgttcaattgctgaagaacaatattctgatttggaaaaagagaagatcatgaaagagctggagatcaaagagatgatggctagacactatggatccagagaatgtcacaaaaagcagtttccccgtgacgataaccatctcatgcggaacggtgacgaacttggatacacgcaat

SEQ ID NO: 374428 - DNA, 543 bp, Homo Sapiens
attgtacgccgccttaaaggacattcagacacgttctacgacatgaaccttgagaatactgtgctaggtgaaataagccagtcacagaaagacaaatattctgtgattccacttctgtgaagaaagcagcgtagtcaaagtcatagagacagaaagtagaatagtggctgccagggttggggaaaaagggaatggagagttggtgtttatggggacagttttagtccccccccgtcccgcttaccccaacttgaagctcagagtcttagttgtacaagatgaaaagagttctggagatgtgtgggggtgatggccgtacaacatcgtgaatgtacttagtgcccctgaaccacacacctacatatggctaagatggtaaatgttatgctatgtatattttactacaataaaatatgttggaaaaaaaattttgatgtgataatgcaaacttacagcgactcacacctgctttatcgggagtttcagaaggggcaggagggagatggacactgcatccagagacactttgcatccagagggtgg

SEQ ID NO: 374429 - DNA, 477 bp, Homo Sapiens
ggaaccagctcctggccagccgggaggacttcaggcagaaagtcgaggagtgcacactgaaggtccaggatggaaaatttaagctgcaagacctgctggtggtccccatgcagagggtgctcaaataccacctgctcttgaaggagcttctgagccattctgcggaacggcctgagaggcagcagctcaaagaagcactggtaagccatgcaggacttggcgatgtacatcaatgaagttaaacgggacaaggagaccttgaggaaaatcagcgaatttcagagttctatagaaaatttgcaagtgaaactggaggaatttggaagaccaaagattgacggggaactgaaagtccggtccatagtcaaccacaccaagcaggacaggtacttgttcctgtttgacaaggtggtcatcgtctgcaagcggaagggctacagctacgagctcaaggagatcatcgagctgctgttccac

SEQ ID NO: 374430 - DNA, 377 bp, Homo Sapiens
aaataggcctggtcggggctgcccggggcgctcatggtgctggccccgcactcccgcctgagccaggcccgcggggttgtgcgcagaggtggtgccgggcctgttcccaaaaaccacagtcagttgatgggtcgagtaactagggtacaaatctgatgactcctgtcttctgtctagctgactcattattattctttgctcttctgtactatttcttcctcccatggctcaataagaactccttcacccacgtcacactttctcctgtagccagtccacctccatgtgcttgatacagttgacacttcttaccctacaggagattattcagcctatcagccaatctagaaaataaaatcatgaggatccatgtttgg

SEQ ID NO: 374431 - DNA, 323 bp, Homo Sapiens
cgtgggttccttgcagaaaggcctggctgagggagtggccaggggaaaagccgaattccccagagatgttgccggagaaacagggccttgtagaggagacatggctgacagaggaggtgtggccaagggagagaggagagtcggaagagagggcaacgctggattagcttgggtggggggcatactctgcagaggggatgaaactgatggagagaccgaagccacaaaagcggctgtggccagggaagagacgcctgcttctggaaaggacataatacagactgtgtggtggaacttgcgagggggcgtgctggtgagagtca

SEQ ID NO: 374432 - DNA, 424 bp, Homo Sapiens
acacaaacccaggccttctggttccaaactatgcggttatccttaatattcagacaaggttacaacaaacgcttataatcaaggaccacaaagggaaacacgacaagtctctcatggcaaaagagttcaagttcaggttccatttccaacatcactaacccagaccaagagcccctcattttgatggattcttttagaatttaatctattttcttatttaaaactctaacagaatgtgctagataacacacaaaggaaaaagcaatgacaaaaggaaaaattatattgtgagaagtaataggagattcaaaaggatctaatgtttagcagtacagtgtgatatgtaaggctgtatataagaggagaagcactacaatttgctgttattctaaatgtagccaaagtcataatatgtcctcttctg

SEQ ID NO: 374433 - DNA, 709 bp, Homo Sapiens
  misc_feature (611)..(637): n is a, c, g, or t
gagcaacccatagtattcatacgtatgaaaatataggatttaatattttgtgatttccaaagtgttttcaggtccatttaactaatattcattgagggctatgttagatctaagaaacattactgaaattgccaacttcaaataaactaggccaaggttaggttagttcccaagaacacagtgaggttaggttagttaccaagaacacatctgtacatagagaaaggcggtttctagatatagaatctaggattgctttctaccacagttcctgttgctctaggaagagaagaacagagttgattatgtggaataaaaagaaatctactctgtgagccacgattagtcctccacataccatgctggcatccacaatctatcttttgtgtaccatactgtgaaccactatccatcctctatggttcggcctttaagaaatatactgtgattcaccctcttgcagtcacagaaactcatatggctctacataccacaccagccatagttttaatgtttggaagtggaggtatttgaaaatatttctttcttacaggacagttagtaggtgaatctaaaaagttgacaaaatgtgatgtcacacagatgatccnnnnnnnnnnnnnnnnnnnnnnnnnnncgcgcgtacaatgtttatgtgtactattttattttgagatggagtctcatctctgtcacccacggctggtaa

SEQ ID NO: 374434 - DNA, 437 bp, Homo Sapiens
agcatcaatttatctgtaagtattacatttaaaaataggataaagtaaatatgacaaaaatggatacatgttattctctacatttagttagtcttaaaaaaatttttcaaaatgaatgttagaataaaaaaacacgacctaaccactgtttcatgtaaataacagctagggctttgaccattaatagtatgttttccatttctctgccctgtatacaactgcaatgtagctattaggaaagccagtatgttaccagatttcatgaatagtgggtctcaacttcaaggaaagacgttatttccaatcttctctctactaccagactacacttggaatactgtgtccaatgctgggggccacaaagtattgtgagatgtttaagatgaggaaggtcctaaaatcccatcttaaaggtgatatagctaaagtaatagggc

SEQ ID NO: 374435 - DNA, 433 bp, Homo Sapiens
gggccctccgccttggctgttgggagcgtgactggctctctgccctgtgagcttggagagttgttttgcttacagcttcccagtcgttctttggtttgatgcggtttcgccctatgactgggcagcggggtattcagcaaaggcttagggagaccctgatgcaggctccgggagctccctgtatcattccctcctctccagagccctcgcccgaggcttccagctgcctcagcctctgtgagctccctccatgccctcagtgctggagctgcgccagccacgagcctgcctctcgtccagcatctgaaaacagtcgtttcctcttcctttatcgagtttctctcatagtttatgctccaggaggatatgtctgagcctagtctactgcctaatggtctcagaagcttgtgtccacctcttgtagcaatgatga

SEQ ID NO: 374436 - DNA, 576 bp, Homo Sapiens
gagcaccccatgagcatataacatttataagcagaacaatgtgcaaatgtttttatttcagcaaacaaataaatgcacaaaatgtattgcattcaccaaactaataaaatcctaacaaagctcacttctttctatatagtctaggtcttgttttcttttctgacattgcctggaaggtgcactagattaagagtgagaaacaattttacaatttgcaaactggctccagggtttgttcttacaatgacctggcaaattcgttgaggcagaaactttcacagaacttgtgtagatgagagaactgaagtgcaaagaggacacagacttttgcaggggtcacacgggaaaacactggcagagctgaaactgaagcctagctctggtgctttgggaagggtgtggtccaatgaacttgtcaaagcaccgaaaacccacacaggcatttgggagggccctgggatgaaagaatcctggaaaaggacctcctgtggtgctttcagttagagccactccctttacaaacaatgaattaacagcagtcttttaggattcacaggtagatcaaagaccgtataa

SEQ ID NO: 374437 - DNA, 458 bp, Homo Sapiens
ccccatcggaacccaatgagcaattggagcatgcctggcaccaactttgcaggctgcatggaggctgatatctggccctctcctgaaggccaatctagagcaaatggtttgaaaatattataattacatgaaattgaagaagaaactccctgatgattcaggtgattaaacactagagtaggctttcagataattcagaggcctgaagttagaatcttattccagtgtactttgcggcatcctttttggaaacagatgattggactaggttcattcattcattcatttgacaaacaaaaaaaagaaaggcatcagataccaaatccacttcatatctgtgatgcctgaaggattagggggcattaggaacagtgagtactgtacagtgaacaattatctgattataaaccattaaataccaagatccacaatatttatttgttgtctttcatttgccc

SEQ ID NO: 374438 - DNA, 782 bp, Homo Sapiens
agctgagatcctcacacccaagtgtctgggttgcacaagcaaatggcagaagcaagcgggaaaagacgagaaggtaaatgtgggtgctcctggggaatccgtcctgctccccactgaggtcacagactaggcataagccccaccctggatgaaacagacaactttaaagtccccgccatgtggtatccaacctcactgtagtgagctaacctcgtctgcgggacacatcagaagccaggaactttcagagcacatcaagacttccagtttgcattggtccacaggaacatctcaagctccacctacagagctcagaaagattcaggagcgggtttaacggccaatgatgcttccccaaatctttctgtcctcctaattcattctgcatcagggccgtgtgctgtggatgcttaagtacgcaggtgttttcaagactaagaaggtcttctgaaagttcttccccatgaacaggcaaaaatcaccactcattgcagggggaccttatgcttgaggatatcatgggcaagaagctccagccaaactagtaagaaccggccggccaggcgcggtggctcacgccgtaatctcagcactttgggaggaggaagtgggcagatcacttgagctcaggagtttgagagccagcctggccgaccatgtgtgacaaccctagtctctacataatttatatttggagaatgaagtcggcttagtggtggtacggcgccatgaaagtgctacaaagcttagtttgcgcttgtgaaaagggtcgcacggtttcc

SEQ ID NO: 374439 - DNA, 515 bp, Homo Sapiens
gacgctttgtagtccaacgagcgtctgtctgttccttattccatccctgataacatagcccccagtggaacaactacaaaggcattacaaggccttacctcttgcaattgttataggtgtactcattcttgtaggatgctgcatcataccctgtattcatggattggtgcagagacttatagaaacagctctcaccaaaacctttaattctcccccaccttactcagataaactcctacttttagaaaaccaagcagaacagcagagtcaagacatgttaaagagtttgaagaggaagaattatgaaaatcaagagggggaagtagtaggaaacattgagttcctcttcaaagatccattgtcctctattttcaaagcctatcttccttgcctccttgcccctagttatggtaaaaaatttccagccattcccaatctgtaatccacatccattcccaatctgtaacccacatccgttcccaatctgtaacaatccacatctgtgcattacttgg

SEQ ID NO: 374440 - DNA, 611 bp, Homo Sapiens
  misc_feature (21)..(21): n is a, c, g, or t
  misc_feature (40)..(40): n is a, c, g, or t
  misc_feature (50)..(50): n is a, c, g, or t
  misc_feature (56)..(56): n is a, c, g, or t
  misc_feature (66)..(66): n is a, c, g, or t
  misc_feature (87)..(87): n is a, c, g, or t
  misc_feature (94)..(94): n is a, c, g, or t
  misc_feature (107)..(107): n is a, c, g, or t
  misc_feature (118)..(118): n is a, c, g, or t
gccggttaacctaggacttcnggggggaataaaggtcccnatccataatnggccangttatggccngcaatatcctggggaacttanggttagnggccgttgagggngttccggaccnatcttggctggttccatttcaccccggctctgcagagacaggaatatgatggaatgaactgccccattatattaatgacccagttcaaagccagttttgtgctttggctatagataaaatttggcaaaaatactgtaggcctttctggtcccatatttatccttaaagtatttttgccaaatcaataaaaatgaaatatttatccagaaatagaaaaagctctttcctatgacattgacatagaagcccaaatactccttgtttgagaccctgcatgtcttttgtgtttaactgaatcaatgattttttttagttgtgctcttaattgcattatttcacatatgtaacactgggtttgttttggttatatagtattattttactttattctaatttcaactcatgtcactctgtagctcattaagaatttgttcaactgaaaattaaaatgtgtgttaaagcaataaaaatgaaaagattggctatgcatttt

SEQ ID NO: 374441 - DNA, 361 bp, Homo Sapiens
catgtcgtgccatgatcctgctcacttcctcacccacccttcccctgcaatccatccctaatgagcgctctttgaacccatccaactctctccatctctacagccctcgcccagcctcagtttcctcatttgaaagatgggaattctaacacgtgtctgagagggcttagatgagaattaagtttgcaaaactgaaagcagtgacttttgtttgtgttgctcacggaacctacacactgttccctgcttctcaggctcttctctgtccacagttctctccctttctgccaccccttgagttgtcaggctcctcactcctgcttcaggctgcacccttcttcagcttcctccactccctggc

SEQ ID NO: 374442 - DNA, 427 bp, Homo Sapiens
gttatagttcttagcatttgctgtcagcatagacgcgcacttgggcttaccatccttagctttggtttcctcctctgcgatgtaaggaggcttgaactgcagtacctctaggtggtccttccagcgtctaagcttgagaacttaagtttattttagctgaagaagagagatagaaagccccttgaggacaggaaccagcttgtatttcccacagcacctactggtactttgctcctatgggcgccgtgaatatttaattaatgaaacctcttgttactgtttgaaagctcactacttgtattaacctttcctgagtattcttggactctgatccagttttttctatatcacctcttattgtacgaattgtatgtcactttcacgttttgttttattctttatgtgcttcatttacttatttattgct

SEQ ID NO: 374443 - DNA, 510 bp, Homo Sapiens
  misc_feature (495)..(495): n is a, c, g, or t
aacatgggatttcaaacaacagggaaaagtcaaatggaatgtttccaaagggacctaaggtgactgtggacagggcgcagcgccaggaagcgccaccagggggcagcacaggcctccccagcaatcccagacaccctgaggcctctgcactgcaaagccccagggagaccagtggcccttggggccaggggtgtgaccccgtgctccatcaccctcacacagcatctgctggcaggtctgggagcctcgatcagtttgcttgtgcttctaaccaaatcatgtcaccatcttcctcctctcctctctgaaccctgtatctcccaggtcctgaattcagccgagattccgaacgcctgcaaaggcccctctccatcgcggctgggaggactgactgggtatttcctcaggctcctgggcctgtttgatcctcactccagctctggttcaggtcaccctctgaccaggcattcgtccagcctgggtcgtggacaaacnagtccgtggggtgtt

SEQ ID NO: 374444 - DNA, 492 bp, Homo Sapiens
taaacgtggactgagtcttactgtgtctgtagtggatgtcaagtggcaagctacctctacctgccaccaccctggcaaatcccctacctttaaatgccaccgaagaggcttttcccaccacccggccagtccatggcacttcctagttcttcccttctgaaagactcttcacagcaacaatgcaatctatgtgaaattgaattagcagatttgaaaagtgtaatgtgaaagttttaattgtcacttggagtgcgcaaatttggaaacaatttgatcctcccattatttattcttacaaattacaagatttcaaagccagatggctgaactataaactctgctcacccttgaactggtaaaccgaaatagcccatcctttgtccacatcctgtgaatcttttgttgcttgtaggcattggaaggctgtgagtcattttggtaatgattgtgctgttattttaacatacactgttattatgattggaaatcctt

SEQ ID NO: 374445 - DNA, 473 bp, Homo Sapiens
  misc_feature (96)..(179): n is a, c, g, or t
  misc_feature (404)..(404): n is a, c, g, or t
  misc_feature (447)..(447): n is a, c, g, or t
atggcaggcatctgtaagaagtagagaacccagatgatctcttaggaagccttttattcgtgggaactcgaacttgaagcacaagttcctggtttnnnnnnnnnnnnnnnnnnnnnnnnnnnnnnnnnnnnnnnnnnnnnnnnnnnnnnnnnnnnnnnnnnnnnnnnnnnnnnnnnnnncttatggactcgctagtgattaaacgaggcaatgactgtgagcgagcctggcaggtgccccgtggtacattcacagcacgggcacagctgctgtgcaaggactgtgactcattccccagtaaaaggcacttatcgaagctgataaccgtccttcatcaccgaagtgtgagtaagagcatgacttaatctagtattctgcctcaatggggaatttttttgatcccntaaatcaacaacttcagcattggccttaatataaccaaaattncccaaaaacagtgattaaagccaggg

SEQ ID NO: 374446 - DNA, 453 bp, Homo Sapiens
  misc_feature (391)..(391): n is a, c, g, or t
  misc_feature (411)..(411): n is a, c, g, or t
tggcacgagggccgactggactttgtgagctccagctgctacagttgactgagttcaggctccatgtagctgggatatactacatggttacccctcacccctatggagcttccaaaagagaccctccctcaaagcacagccccttctctgagtgcaaataatggccatcagaggtcagtcacaggtgttaggcaggcatctatgaagctggggatgatagcactgacttcagtgcttggacgagaaccaggagagagtgtgtagaaaaagcacagccagcctcccataaaaggacagactcctgtgacaaccttgttcactctgttcctccctgatactctgggggaggtgggaggccagtggggcagttcttgaaagctcagcaggtttnggagccttggggtgtgggantcctctcccagtgtttcctcctggggtgtttcacagatgttt

SEQ ID NO: 374447 - DNA, 362 bp, Homo Sapiens
aaaagggtgacagggagacacttcttagccgatgacttacaggctcccccattcctgcgtgctcagtgcccattttcgaggccacgaggtgttggttggcttcacaccactgtgctggagctcaacgaggccttcaccttgaactgctcacatgagaatggcaccaagcccagctacacctggctgaaggatggcaatgcccctcctcaatgactcgagaatgctcctgtcccccgaccaaaaggtgctcaccatacccgcgtgctcatggaggatgacgacctgacagctgcgtggtgagaccccatcacagggccgcagcctgctgtcgggctagtcgggagactgtcggctagtcgaag

SEQ ID NO: 374448 - DNA, 661 bp, Homo Sapiens
gaatggcaggtgaacgagaaaattggtacaatgataagtgttctgtaatttttatcttgagaaatggaaaagcagctcctgaaagatcctgttagtgatggcgtggtgttggtaggagttggcttgacactcacagatagactttggtgttgcctgttgaacacaaaagtattatagccacaaagaacaaaacaaaagctagtagcatcagtttagatcataacagtgtttcttcctcatctgaaaacctcagatgagccctctgaacttgacttttatccaagaaggaattttcaaattcaaataatctggacaacaaaagcactaacccagtcttcagcatgaacccatttagtgcccaaacctttatacacagctcttccacctcaaagcgcatttccccctgctactttcatgccaccagtccagaccagtattcctgggctacgaccatacccaggactggatcagatgagcttcctaccacatatggcctacacctacccaactggagcagctacttttgctgatatgcagcaaaggagaaagtaccagcggaaacaaggatttcagggagaattgcttgatggagcacaagactacatgtcaggcctagatgatatgacagcctccacccccattaaaactgctctggacttgc

SEQ ID NO: 374449 - DNA, 518 bp, Homo Sapiens
ccaatcttcattctcggggttggcccgccccgatagtcactccatgtcctcgtttactggttcatcttcgtaatctctgtcatggtcaaaatctggactgtggttggctgttgtcactaaggacaggggcccttcagcttcctctggatcgaggggctcttctttgacgtgtacaggatgcacggcttgcataggagatctgcctggactgctgtcactctcgttgctgttggtatgctccattgccccgttcagctcttcccgtattgcgctggctaagttgcccagagtgggatttcccatggaagcggtagtgtatagaggtatagtattctcagccattgaagcctgtaaagctgcattgagaggtgtgcagtaagcgtggctgctctgcatgtttttaataagggaagggttaccaccgatcttttgtggccttcgtttttggaattctacttcatccactgtccatactgtccctttaacgttttctactcgcacaaaacacttgtgaagac

SEQ ID NO: 374450 - DNA, 741 bp, Homo Sapiens
gtgtttttactacagataacctcttacacttttgacgggcgacgccgcatctaccattagcagtgaggccagcgtttgctactatagtcagtatccttacttagtgtatgccactggttgtgaggttgtcccacgagtctgagtaaggaccccaagagctattcctgccctctctgtgacgtgtaaagagaagttttgtcctatgggaaggcttagggctggagcttgagtttgttccttccagtgcccagacttcagggttgattccctccccaagcaggggacaacaaatgggtaacttgttccccatattcatgtagataatagctccagctttggctaatatatccctccctaataagggtgtgggactttcaggcataacaagaaaggcatgtgaaaggagcaaagtctcccaattacaactgaggaggtgggagaaatacctggttacagcctgtcccaggattcctcggatggtaacagaccttgaggacagctccaagacaggaaattaacactgagaaagccacgccagtgtccaggaggaagtcaatttcctggccctcaatggttatacatacccaggactcagtgagagtgatgacatgagctggtgcttttccctgggcaccctcagtcttgttgcatcatctggttggtggcttctgtcccagagaacctttgtcctctggggcagtgtgtcattccagtgatgcctcagcattgtgacatggcgta

SEQ ID NO: 374451 - DNA, 506 bp, Homo Sapiens
ctcttgaaggggacgggatcggccacaatggcacgcaggccaaagcgagcatggagctcacagtaggtgatgtcaccatccttgcactggtccatgtagggctggccattgaacacgagcccactcagatgcccgatgaagttggagggcaccacggagataaaccgccgctccgtcatgatgcccgtctcaatgttgtggaactccagccgcatatgggctcctgccatctgtccctccacagtcacgttgtccacagacagctgcaggctcttgccacgccggaccaccctcaccgtgtgccactcattgtcattgagcttgtgccccgcaaacagcgtttcggggcctttactcggtgcgcggccgacgcgcaggcagtcgacggcctgacagtgagcttcatctgccaccccataccagctccatggcgtagggtgtcgcagacgtggcttggacgtggtgaacagtcatgagtctttcctgtaagaagtcgcaggtttcca

SEQ ID NO: 374452 - DNA, 277 bp, Homo Sapiens
gccacgatgaccaagccttgcagtgtcctgcacggtgcgagctactagacggatccctcttcggggcaattactggacatgggccgagctcagactgatctcgtgctggtctttactcatgtgttctcaggtaaactagaagtcttggctggtgaatagaatatctaggacagtctaatatttctggcagcttggtcgtgcttttggccaggagaacaataggcaactgggccatgtaaagaaccaccaccaaaatgtgctggatgatgacagaggt

SEQ ID NO: 374453 - DNA, 396 bp, Homo Sapiens
  misc_feature (155)..(272): n is a, c, g, or t
ctccacccgacggggtgggactcgggagaagagtacagaacataaaaggccctcttcctctctcaggaaaggacaccaagtcatctagtgcaagttcactttacacttcagatataatctcttggccaggagcggtggctcatgcccgtaatccnnnnnnnnnnnnnnnnnnnnnnnnnnnnnnnnnnnnnnnnnnnnnnnnnnnnnnnnnnnnnnnnnnnnnnnnnnnnnnnnnnnnnnnnnnnnnnnnnnnnnnnnnnnnnnnnnnnnnntgtggtggcacgtgccgtgtagtctcagctacttgggaggctgaggtcaggagaatcgcttggacctgggaggcggagttctgcagtgagctgagatagcccccctgcaccccgtcgggtggag

SEQ ID NO: 374454 - DNA, 476 bp, Homo Sapiens
ctctacccgacggggtgcctgttagttatcagctgcaaattgtgaatttttgttgctccaaaacaacagctggtattgtgcagcctgcaaggagcgctgtggggctaacctcaagtccagagaggcacaaacgccatgctggagtctcagtagccagtgtcagtagccagtgtccctagtcctgtctccttaagcccaccctactcatggtaccaaaggcgcaccagcccaccactctgagcccccgtgactccttctgcaatagctatggctgagtggggtacagacccagccgtccctgggtgtcccagcgagggtgtcacagccctttagctcagagaaattgcccacagctctctgtgtcgcctaagacagggtttcccaaacttgccacattacaacagtcaactccttaaagacacagatgccagggcagctaacagtcagagacttagtccccaccccgtcgggtggag

SEQ ID NO: 374455 - DNA, 392 bp, Homo Sapiens
  misc_feature (91)..(142): n is a, c, g, or t
ctgcctcagtctttcccccaccccgtcgggtggagcgctccacccgacggggtggaactggaggctattatcttaagtgaaacaactcagnnnnnnnnnnnnnnnnnnnnnnnnnnnnnnnnnnnnnnnnnnnnnnnnnnnntaccacatgtttccacttataagtgggagttaaacagggtgtatacagggtcatggagtgtggaataatagacactggaggcttggaaaggtgggagggggtgagagatgagcaattaccttttgggtacaatgtacagtattttggtgatggttacactaaaagcccagatttccccactacacaatatatccatgtaacaaaactgcacctgtgaccaggtgtggtggctcacacctgcaaccccagc

SEQ ID NO: 374456 - DNA, 161 bp, Homo Sapiens
gctcacccgacggggtggggtgaggttactttaattatgatgatagaggcaagtctctctgaggaagtaacatttaagcagagactaaatagaacagtttagggatgttcttaactacatgcagggatgtagttagaattaaaatatgtgtagccagtttt

SEQ ID NO: 374457 - DNA, 433 bp, Homo Sapiens
ggatcccccctggtactgaacttacggacgactgagtgactttcgggcacgattactgtccccctggacctcagtatttccctgcaaatgttaagatggccatgtaaatgttaacaagtaattctctcatttctctccagagggctgtgggtgggtttggaggggagaaatggcatctcctttggcctgggacctcctcccctcttttaccctccatgtctgcctctcctcaaaggcgtctggagtccccaagtcaacatggcaaatggggaagagaagacagggtatggagtacaagaggcctagatcccctataggtctgatctggctggtgctgcccctagccagtaaagccaccctccagaccccttcaagcctgttgtagccttaaccaagatcaaccaacatggaggtgactgatcttggttaaggc

SEQ ID NO: 374458 - DNA, 587 bp, Homo Sapiens
cgtggctctgaacttaggaggctagctccctctattcttcccttcatcttctatgatgaagcacaggaattgtcatttagagaggaaagtaagaaacttttcaatttttcttctcgtctgacaaagttgtgttcccatgaagtagtagtatcagattccttgaaacaatggaaagacagagaagccatcaggaaaattgtatttcctctttgaagtcatctgtgtgtaaggcccacgcgtttctaaaaataatcaagatcctatggtctaccatccatcgaaatcagatggcatttcctcctagttaatccccatgcagatgtcaaattatagccagatccactgccaactggagaagctccccattacctttagtgtttaatacaatcctttcagagccagggacaggacccaagttgcttctactgcctcgggacaatggctgtccatgctgctttgcagaaggtgactggcgataaaggcaaagtgctgggagtactggctcagactgggcccgagagtcaccacactcttgtcctcctcccttctggaccagctggtagtccttcacctaagttcagaccagg

SEQ ID NO: 374459 - DNA, 280 bp, Homo Sapiens
tatctgaacttagggtcgccacatcataggatccatgctgactcacgcttgtcatacgggtctctctggcagtaatgaactttaacactctcatgggcatctcccacccacctgagcacaggctagcgtgcttacattttttacttattgagacagggtctctctagtcgcccaggtctggcaatgcagtaggtgcaggtcatggactcagctgctagcctcaagcctcccagtgctcaaagtgattcctcccacactcagtcctcccgtagcagctgga

SEQ ID NO: 374460 - DNA, 515 bp, Homo Sapiens
  misc_feature (348)..(357): n is a, c, g, or t
  misc_feature (489)..(489): n is a, c, g, or t
ggctctgaacttagggggaatggtgttcccctatttctttgcttccctatttttctcttttcccttctggcccactataggagacatatgcttatctccaaaattctcttctgcttgcagagctgcctgttttagcagcagtgagggcttgacttagcagcaacataacatccccccatatgaggtcaaatacctgagttaaattttggaaagcttctatatacctatttcgggtcattagaaaatcagtctaagtctccttttacttgcctaaggtcctgcaatgagcaggaacttgaaggtgccccaaataagggggacccctagatgatttccctgaaagttacnnnnnnnnnnaattttggggaactgttttccctgggcctgcccaatatggtgctaaaagatctgagttgatcttacaacgcttgcagaggtttattagaaatgcatgtcttctgcaaaagaaaatgagttcttctgaaagtntgaggtaaggagttcagtgtttaggt

SEQ ID NO: 374461 - DNA, 257 bp, Homo Sapiens
tgctgggattataggcatgagccactgcacctagccctgcggcattttttgatatgggatgatgtgtatcatttaaaatctgacttcaactgatttgggcaatatttcttagccatagacaaagaatgagtctgttgtgtgaagatgcctggttgagtgttataggagtcaggacaaggtcacatttactttattggatgttttattccatatcttgactcaaagaaggcaaagggcagataatgaatcgcattggt

SEQ ID NO: 374462 - DNA, 617 bp, Homo Sapiens
  misc_feature (501)..(546): n is a, c, g, or t
cctgggttctgaactagggggaccctatgattgtgctctcaccaatgggattgtgagtataagtgatagatagctcctggcttgaggccattaaaagcaggcatgcattcttccaggacttccctctctcctcctcacccatggaattggataatcctggaatggatgagttcattgagggaagcagctgagttccctgagtcaccactggaaaagacctaccaaggagagcttcttggctcacaccagactctgatgttagtgataagtactaggttgagcccctgagatttcaggattttattttttaaggcagcgaaagtataacagtgcctaagtaaaagagaacccagagcccaaagatgagggaaaacttcatgagaagcgactttatactacatgaggcttggtaagaagttccacatgaagatatgaagtgatgaggaagaacagtttaggccttagtgcagagccaggcctggctctgaacttagggacaannnnnnnnnnnnnnnnnnnnnnnnnnnnnnnnnnnnnnnnnnnnnngggccctactagtttccttttctactataggttccagtatctttgtgtttgtgattacacactcactcact

SEQ ID NO: 374463 - DNA, 332 bp, Homo Sapiens
ctggctctgaacttaggcctggctctgaacttaggcagagatgagagaaacaccctaggaacagccgatgcagcatgacagcgggaggactggacgctggaccccgaggagccaccacaccaaccagcagctgctcgtgcccagacaactgcatgtgacagaaggaaacacatgttggtgatttgggtttctgtgaccacaaatgaacctaagtcctaactgatatatcaggtgccaactagacatctccgttagttcatctcaagcactctcagttcagtttgtcccccaggtcatcttcccccattgcctcccctaagttcagagccagg

SEQ ID NO: 374464 - DNA, 390 bp, Homo Sapiens
cctggctctgaacttagggggaggtgagcctacaaccggattggccactcaagaaagtaaaaggccggcgttcccgcagatcctcttcctgattggttaccacggacgccaattacctaagaggccggcaagaggtggaaacgtctgtaacctcggagcttttatgcgaaagccaatgggcaccaacctcgcgaagccgaactcgctgattgggcaagagatcagcgtgagggcggacctacaaacgtgggcttcgccggcggggtgcggcccgccattaggcggagcgagctagagccccggggtagcagtctttagcttcatggcgccaacttcgttaagcttccacatttcgccacctccacgtgcacagccagacagtattccgcg

SEQ ID NO: 374465 - DNA, 390 bp, Homo Sapiens
cttgcagtcgttctacaggatcccccagtcggactcggcaggagaaggagataagagacacatttgaagcagagaatgacaacactaacaaaggcatagaagtagaggagggtatcataaccaaggtgacaccagagtgagctagtgttgaagaatgggtcaacttcctttagagttggtctgtttagtcaacatttctgttaaaatatggggccccaattgaagatactaatcaaagtgtgatccatctaatcaacacagagcacaaaaggactattaactcctaggacctatggaaactactctcaatgtggcataaggttgctttacctattctttttttgcatgccgagtccgctgcattaatgcagcggactctggggagggtcc

SEQ ID NO: 374466 - DNA, 423 bp, Homo Sapiens
gggggcctgattcctaacgccgcgctgccaccatcggccttgcgcagacgctgataatccccctggcacccaggttcatgcgagcgcttggaacaggagggaagagggagtcaaaccaagagccgaactaattcggcttgggcctgccatttacccagcctgggacccagacgtttccccatcccttagcgtacgccaggacagacatggcgtttaatcctgactccatgagactatcaagctagttacttcctctctttgtaattaattcctcctaatgtagcaacatttcccccttccttctcatctgtcttaaaagtgtgaggttagacctgggcgtgagtttccccacataagagactggatatccctggtcagagaactgagcatcagtcctgcgcgagtccgctgcagttgggatcc

SEQ ID NO: 374467 - DNA, 425 bp, Homo Sapiens
  misc_feature (245)..(260): n is a, c, g, or t
aatgcagcggactcggcagtgcgtagccactgcacccagcccacaagttgtctttttcatatagtggctgcctttcctttgggtagatacccagtagtggtgattgcttggatcgaacggtagatctactttcagttctctgaggactctccatactgttttccatagaggttgtactaatttacattcccaccagcagtgtgtgagtgttccatttgcaccgcatccacaccaacgtctatggnnnnnnnnnnnnnnnnatcaatggccattcttgtgggagtaagatggtatctcattgtggctttcatttgcgtttctttaatgattagtgatgctgaccatttttttcatatgtttcttggccactggaatatcttcttttgagacatgtctattcatatcattgggatgcttttcggtgg

SEQ ID NO: 374468 - DNA, 230 bp, Homo Sapiens
  misc_feature (52)..(87): n is a, c, g, or t
atgatgatttaggctcggtcgctaatccatccgactcactcagcagtcaatnnnnnnnnnnnnnnnnnnnnnnnnnnnnnnnnnnnntgtcctgcagtagtctccaacagttcatccactgttggtactgagaaacccaccctccaaggacctgtagggcttctgacacatacaaaaacaacagcagccttgagcaagctccataacatctctgtcagatgtgtgagtta

SEQ ID NO: 374469 - DNA, 350 bp, Homo Sapiens
  misc_feature (280)..(280): n is a, c, g, or t
ctccggaacccaatgcagcggactcgcgcagagatacattgtgtaccaaaattatagtttctgcagatgctagtgttctctaggatacaattgtgacaaccaagttagtaaacaaaatatcttaacagttcgatgacacaagctacctgatgagggtctggaataataattcagaaggtagtttcatctcgtgttcaaaagagctgccatggggctgttacttttaaagtcaaaattttcttctgaaggctcattttggtatttgatcttaaccaagtgnttattagagaaatgtatcaactccatgccatctcccaaaataattgtctaagaaaacttgaaagtgtaag

SEQ ID NO: 374470 - DNA, 444 bp, Homo Sapiens
gggcgtcgtagctgaagcatggggagaccataaggaaaagcaagcaaacaacagattaagcagaagagtgacgtggttgatagacttatctgtgttatctgaagactggaatgtaggggacaagaatggaatcctggagatcagttaggaggcttttgccacgggcaagaggcaatggtgatttatatctggtggtgataatcaatgtggaggacagattagattcattctagcctgtattttgggaaaaaagtaaaaaggacttgtcagtagattggaaataagaaatgaaaaaggagtattaaggcttttcacactgaataactagatggatggtataagtgtatactgagatggggataacaggaagaggaatggttttaaaggagaaattaagagttttggtgattttgagagtcctagtagatttccgagtctgggcga

SEQ ID NO: 374471 - DNA, 438 bp, Homo Sapiens
aggatgtgatatgtcgtaatccgtaccctctacttctccgcccacttggttccctactcgacgaagagtttaagtgtgacgttaccacaccctcgagcagccgctccacccgctcttcgattgaactcagccatgccgtttccactacagctcttgaggagcaagagctggtagacttcacagccacaactactgcacccgaggctccatcaacccaacaaacagaaaatcctactgagagtgtccggttcaccacacctgggactatgcgcacaacagctgccacaccgactgtctcactgttgatcagaaagttatgacgatgacatatattcaagcctatgggcaccgaatcgctaccagtcatagtccgatccccgcccttaacacgacaggcatggtggttgagaacggcatcgagtatggggcgaaaacgag

SEQ ID NO: 374472 - DNA, 483 bp, Homo Sapiens
actcagagtgacaacccttaaaccccctgcagtagagaagacctcccccggaagggtccgcagctggttgttcttcagctcgacgctggccaaactggggttgcccttaaatatgtcctcagaaagggagcgaagcttgttatcattcaggagcagagtgttcatattggccagcttggagaagatatctggatgtagatcctggatgtcattggacttgagagaaagcttctggaggttgggcaggcagcaaaaaaggtcagggggcagctccctcagcttgttgttgaggtgcagggagagcctctccatcccgctcatgttggcaaacaggctccagggcacggtgctgaggttggtgtcatacaggtagaattccttcatcctgggcatttggcccatcaacttatcaggcagtgacagcagaggtttatgtagatagtgagcttggtgagtttgggcaaaagaggcccgagctcatca

SEQ ID NO: 374473 - DNA, 572 bp, Homo Sapiens
  misc_feature (549)..(549): n is a, c, g, or t
ccaccccgcctgacccggggtcccatctcccccggtgctagtgtggtcagccacagtcgcagggaacctgccacttctcatctagctcttccactttcccctcaaagacttcctcagccctcagctccttggtactgaagacaaggccatgagcatagccagcggcacgcgctgccctcgtgccatcctcctctagagtgacgttcttgccgcaagtactgtggaatcggtgagccacgccagccactggggagtgcagtgggtaggacttctcggtggcagtgttgcttggtcgccagggctgttgcccatggggcccgggtggcattggtgatggacacttggacacactggccatagagatcgactaccgcatacacctctttacccggaggcaggcccgagcaggcagcgccttggtcctggccgttgatgaagtagtgcaggtcgcccttggcagttcgcatcatgccaatgcgtgcacctgtgcccagcgcatacatggtcacacccataactgctgcgcatcgtgttaccgtcttgcatgantggctgtaccactcagcatccat

SEQ ID NO: 374474 - DNA, 274 bp, Homo Sapiens
tgggccaacgcaaccgggaacactcatgaagtctggattcaatatttgaaaattggcagacagcatgaatgctaaaccagagatttacgacggatagcaccattgcaaatcacactcaaacaaaagtcaagatatgactttgggaatataagagaaagcaatttggaagatggagaaattaactcacattgttaaacaatcaacacaactcctgttctcacattgggggatttcttccagtcccttttctctatgtatcttaattactttcttc

SEQ ID NO: 374475 - DNA, 419 bp, Homo Sapiens
cgctctagagatccccgtggccacgcccgacagatattcccactctgccctgccaaagagctcttatctgaggaatactgctgacttcgtgtacctagttttacagagccatctttctgaagcataaattagattacattattctacagcttaaatccctccatgaacttcccatcacccaagagtggatctgaaactccttagagtgtcattcaagacccttctgtatgtggctgccatgcatttttttcaactttatttccagccttgcaatgtacatacatccatctctgtcccacgccctctgcagggctttttggttccagaacgtgccatgtgcttttctcctttggagctctttgaataggatgcccttcctcccttgtctgcctgtagatagaaacatcctgtgcacggtg

SEQ ID NO: 374476 - DNA, 412 bp, Homo Sapiens
tcaacggaccattttgaatgccaaccatgaggcttgagcaggcagacactatttctgcctcgagacacccacgagagcactgggcattagtgtctttttgttggtccctcataacctgaattcacagctggcaactccttcccaccctggtgcctgagagttgagcttgcaaaggacagtgcctcactgaaaggatcccaaggctgcccctgtcctctgcctctgaggagcagggccatgccaaggggcaccgaggtcacaagcacacgctcaccttgagctctccccccgcaccttgaaggccagctacagcaggcagccctgccccatgtttacagccctggaggagcgcatctcattactccggttgcgttggccctccttttatcctctagagtcagctatgagcatg

SEQ ID NO: 374477 - DNA, 429 bp, Homo Sapiens
aaaagacgggcggataatgcttaatataaactatcaggttgctggctgaaaacttcttagaggaacgcacattgagaacccccaaggtaaagagacacatgccatgttttctaaacttatctcaactttaaacaactgttttggagggaatgatacattaatgcctcacttaatattagcaatcaatgcaataaaattaggaaatgctcaaatgattaattcacaatatcaagaactttcactggctgcttcataatggagctgtctaccaagtaatctacaatttttactttgtctgaaatgtctattgtctttccaaggatcatgctctttttagatccttcacaccttcttcctgactgtctccagctgtattggacaaatgtttatcattttctggctcttcagagtctaaagcatctttctgcc

SEQ ID NO: 374478 - DNA, 929 bp, Homo Sapiens
agtcttccacacttgcaggtgtcacgttttgcagggaggtgtttgggcctggggctcagccactggaagacagttgggacctgagggacagaggatcggaatggaaaccaccaacgtgcactggcaccctcagaaggcttgtctcacctccaccggcatccacacaaaaccaaacaggagcaggcgtcatccccactattcccatgaatgccatgtcacccctgagcagaagcagtcaaatcttgggcaaaagaatttcggttagaaaagaaaatcccactttaaaatgccagctgcagataactcaaagccatcccttttttctaaagggcacattgagaatgtcacccatttgtaaactgttctctgatgtccttgtttaaacgataataagaaaaagggcaactccatttgttgagggtctctgtgttcttcaatgagaaatcaaatttgaccacgttgaaattggagctgagtgctgctgcactcaccggcttcttctcactctctgtcgtagacacaccgataggaccaatggccaatagatattaaaagcaaaccctcactgcctgctgtataaagttgccctaatgtaaatgtctattgtttaagtcccctaggtcacctttgtgctgtgcctgtggagttcagaaacggggtacccatgaccctggaatcttttgcctcttgtttttgcagtcttcaaggctgggggccctgtctcattgggaagcccctctttataaagcattatattacttggaatggcttggtcaactgtgttcagttcataaatatgttttacatttttatctgcctgttataaagatgaacaaaaaaacttaatgagaaagatcacagatacgtaataatttaaagtctgtagttgaatttcctaacttaaagaatagaccaaaatttctgtgtat

SEQ ID NO: 374479 - DNA, 234 bp, Homo Sapiens
atggcttattgggtgaaaaatatttgaaagtcgtaccaggtggtggtgtcaactacttgaaacgtggtgacgtcgtttcaaacactcaaggcacaatggatttagaacatttaatcagtaaatttattactggcggtgcgggtaaatccacatcaagctcatcaacagaaagttcagcttctcaacctgctacggatgatgcagaaccttcgtttgttgagtaattcaggttgt

SEQ ID NO: 374480 - DNA, 462 bp, Homo Sapiens
catttcatagctgactctagaggatacacggagggccaacgcaaccgtgcctgattttctttaagtctagcagatggaaaaccagaactctatccaaatgatatagatatcttgactgttaagaggtggagacgtttcagaagttctcacatactcctacggatcccagactgaagcaggaatttacaaaggaagtgagctactactggcttgatacaagctaagacagagacacaaaccgctgaagcctatcaatacttaagccagagacccacctacaaaaagaggattggtcatagcagatccttagggcacagagatgaaccccaaatccaggtggaacaatttaatgcaagatgatgaaactcaaaaatcaagaacaaaaatatagataaccctgtcaacccaatatgaactcctggtaggggcacagcctgataacaagaatgacatcagtacggt

SEQ ID NO: 374481 - DNA, 603 bp, Homo Sapiens
tgggcaccagagcctcatattaagtccctgcctgagaaccccctcctgtggctgggctgaacagagtcgctcagagcagctgaccgagcagagaagctgtggtgggcatctgctgcatgcagggccctgggctggctgctgaggggaccaacgggggcagaaggctgtgctcgctgacccttttcctctcagccaccaggctgacctcattttccgttgagacttcctgttctccagtaattgcttggtgggccaagaggcttcagttccaagtcagcaaatgggatctgagtcatgatgtatatggtaagtgtgcctctggccacgggatcttcaccagctcagcactgggtgctgggcactggggactgggcaggtgaagagggctgccagaggggctgtttcactcacgcaaaagcattgattctgtgtctgctgggtgtctggcaatgtgtgtgtgcatgtgcacttgtcaggatggggaaggcaggagcatggaaatccccatgcaaagttagagctcaaaatggactttgtagcttttggccgcagtggtgccgatgaataggtaggtgccgatgaatagcgagtgtatcctctaga

SEQ ID NO: 374482 - DNA, 194 bp, Homo Sapiens
aactcaggggcgagctgctgatgtcggcgctcgccttcggctgcttcgcttacggtcgccgagtgggaagcgagcctcttcttcctggtttctcgtctccaccacagccacaacagtctggccccccgtttttcgtcccctccgcctcgtacttccgagaccttacaggcagagctgcagctcgcccctgagtt

SEQ ID NO: 374483 - DNA, 381 bp, Homo Sapiens
caagaacaaagaagctcacagtagcctgggagccccggttcacctctggggggcagaggaggttgctgcctggctggagcacctcagtctctgtgagtataaggacatcttcacacggcacgacatccggggctctgagctcctgcacctggagcggagggacctcaaggacctgggcgtgaccaaggtgggccacatgaagaggatcctgcgtggcatcaaggagctgagccgcagcgcccccgccgtcgaggcctagcctctgtcctctcagcctgtggcctccacatccccgccgacgaggcctagcctccgccctctcagcctgtggcctctgcgcctcctgccactgaggccctgggcagatgctgcagcccgccc

SEQ ID NO: 374484 - DNA, 497 bp, Homo Sapiens
agagtactatttgtcaaggaaatggaaaaaagaaaaagaacctcttattagaatcattaaaattctttttcaagagatgctatcaaaaaatataaagttgtcataatttaaggtccatctcctgctagtaatacacttgcccaaatttggataatttaataggaacagttaataggatattaattttgaaattatagtaaacagttgcagaaagcaatgattatataatgttggcatattcgtattatttatagtacagttgaccctccatatgcacaggttccacatccatagattcaatcaactgcagataaaaagatgtagtcaggcttaacaatggttgcatctgtagtgaacatgtacagactgtttttcttattgttattccctaaacaatacagtataacaacaactatttacatagcatttacattgtattaggcattataagtatctaaagatgattaaactatatgggagaatgtgcataggttata

SEQ ID NO: 374485 - DNA, 693 bp, Homo Sapiens
aactgaggctactgtggtccgactgttggcaatcgtcgagcgtggtggcaatctgtggactttggtctgcacgggtgtagttctgtaggcttctacaggcctcttgagtctcggcacaatcctgaaaggtgtcgtcctgttcgctgctctcctgggtcaaagactgaacggcctggacagtctcagagtcgatttccatggttgctgggtttccctctttgaactctgtatcgacttccttgctgttcttttggtcctgcttctgtgcctgttctcctgggggtggctcctcgtcagattcgggtacagcttcagggtccccagcaagctccttgggctcactgttacaagaagctgtcaggtcgacgccacagtccattaagacctctgggttcgagtgaccaggctgcacattaaggtctaaaaaagtctcctggtttcacagtacttctttgaagcattctctgggcagctcttccttctccacttcggcagactccatgtggctgtcatcctcgtcatcggcatcatggtcctcgttgtgggatggctcttcatcctcttcctcctcctcttcgtgatcatccaaacgtgcagagtcttctttttccgtgagatttctggttcctctttttcttggctttagcacatctgatgatcacgaagggggatgacaaagatccgctagatcat

SEQ ID NO: 374486 - DNA, 658 bp, Homo Sapiens
  misc_feature (22)..(22): n is a, c, g, or t
  misc_feature (637)..(637): n is a, c, g, or t
agttcgacggagactctcttangctgcgggacatcaggggatgagttgcaacacatgggagaggaggacagaggagaggtgttccctaatgggcaagaagaatgagtcggagcaggcaatggagcccagcagctaagagaggagagcttgttgagagcaggagggatgcgctgcagtaaaggaggcatgccaggcgccaagagggagggagcagatgcagagaatccagggactttaccccagatggggcaaagtgtgtgacgcagttcatggatgacaaagcatagtgtgggtaagataagcaaggaatgaaggacaggagggaggatggcaatagacaaggaggatgtagaagatgctggcaccttggaaaagctgggcaccacagtgtcaatgaagggcatgggaactgatgaaatgtcaggtggattgactttgagacaggaaacaattgtctccagcatagtagaaccaaaaatgtaggacggttaagggtgccttaagatagcagatggatccaatgctgcatattgtggataaaaaggatggcaatgttggcagcagcaagggcagggcaggaagggagctgacatcaaggaaatgactgcagagtgcagtcattgacttagaaagtggnagaggagggagtggatgctga

SEQ ID NO: 374487 - DNA, 334 bp, Homo Sapiens
  misc_feature (246)..(246): n is a, c, g, or t
ccagcctggtgacagagacagattccatctcaaaataaataaacaaataaaaccctccaatatgaacaccaaactagaatcactccattgacttccctcagccaagcagggggagtgatggtgatggtgcatgagtgtctatttgcattgagtcttaatggaaaataaggttgtgtcactcaaaggaaaaacaaatcacagcccagactggagatgtagatgaataacatggacgagtgttggatnacagggctttcagcagcaatattaaaactgaaaacatacgcaatgaagctcccagccgctttgcgccaaatgatttggggggaaaaca

SEQ ID NO: 374488 - DNA, 155 bp, Homo Sapiens
ggccagggtaatgatgtgggcctttggaaattgacaggatgtgaggtgagcgtgtctcagctcgtctgctatccagctcttactggattatgtcacctggctggtagaaaggtggcatctgtagcctgaccaggcttcagtgccaggcactgaag

SEQ ID NO: 374489 - DNA, 204 bp, Homo Sapiens
ccaaagggtaaagaaaaggtgaccacaggctaggactccacctatactcctagcttgaaacctgcaatgttggggtgacctatccgtgagccattcataaggttgagcgtggatccatcaagaattgtgttcggcttaaacaagacagaaggttatttctcttatatataaaagaattctggagacagacagtccagggaggac

SEQ ID NO: 374490 - DNA, 637 bp, Homo Sapiens
  misc_feature (146)..(154): n is a, c, g, or t
atgcctcatccagtggcataccctcacccagtggcgcatgataaactatttctagttttagttgcctaccaaaataaaattcaattttttttagcttaacacttaagctactcttaattctggctctacaacttgagaattctagnnnnnnnnncttgactaacctcccacatttcttcttgctttactgcttttgtcttttcttgtttcctctacacagaaggtgctatctgtatcttcaaattcacctatcaaactcgtacccatctttcaagacccatttctacttattccatgtaaacttacctgactggctcatccagagtgatttcttttcctcctaagttttacatctgtattccctctggtagtcatgggacttttataacacactgcattgcatgcactggaatcttcatacctgcctcatctcgctgactgtactgtaagctctcagaagacagagactgtggggtttggtgttttaaaaaatgcctgtgtcctacataatacctaacagtatttcctgtggataagtgctaaacaaatagtgacacattttcagatagtgtgtgagagatgcagtatatagtcacagtaaagcacatgggttcccgcagtcagtttcaataagaac

SEQ ID NO: 374491 - DNA, 554 bp, Homo Sapiens
  misc_feature (510)..(510): n is a, c, g, or t
tctgccgtcgtcgcagcccccaaatgtaaaagatagtatttttctaagtatggcaaattgaaattagcttcattttgaaagactattgagaatgttgcaatgacctttgcaataaccggacacaccctgggatcagtaaaccaggtttgaaaattgctgactttatgagcactggacctgtgaaacaaatgcccaggttgggactctacctggaacccattctcgtatcaggtaggagggaacacagcccagaaggacctggttctgcctctgctgtgtcatcttgggcaagccagtgtccctctctgggtctcagactccatgactgtacagatgatggatgctctgtgacctctggggctccttctggccctgatgctctgtgctaatacctgcctcctttaaaaacaaaacctggacccagtgtggtggtcacgcctgtaatcccagcacttgagagtcaaggtgggcagaccacaaggtcaggagttcagaccagcctagccagcnggcataccttgtcactaaacacaaatagcagcgtgtgcaacata

SEQ ID NO: 374492 - DNA, 1063 bp, Homo Sapiens
caaaactgtctgtgtagaatcaaactagatgacagagatgattttgataaatgaaaacacaccaaatatgtcttcatctgcatgaaagtgaacccctgcaatgcagagcctgcacccgggaagcagtaattctttgagtttttgctaaggagggctctgtacagaataatgtggcaactagaacaggttaccaaagcaccaagcttgcagtggcacttcacagacgcttgctgaatgaacataaacaagtgaatgtgacacttgaaaggcagctctacatcagaaagttaagagttgtgggttctagttccaagcatgtcacaaaagaactgggcaaggaaatattaccgtccctttctggacttctaggtccttatctgtaaaacaaagtgcctgagctaagtggcttctggtatccctccaaactcacaatgttttgattctctgatgtgcattaagagttattttcccatgacattgtagaatcaaagatgacatcatttcaatttaatgagagagtcagtagatctcccttaattatcaaaagaatttagcaatcgtggaaaaccgaactatacctttacttttacacacttatattacacaaccttgctgtgtttcctgcttgcgctctgtctcaaaatgtgtagagctgaacagaactactttggcatcttcaggccaaaagccactcaaaatagcctttggctggctgatatttttcagtcataagtaagattttttgacccctgatatgaacataactcaagtgtgggctgatgactagcagtgcagcgggagggtggaggatattgcgcttcaagaaattctgggggcatttcatttcagatgctctcaaagcaccctcaattataatttttttcttagtttgctgttttgcaaagactgttacttacctcgggtttcaaccaggttagggcaattttaaatgagtatttgttgcttcaataacacatttacagcttcagaagcaagcagtgttttgcttcataggacctgatagccatgcatcttgagagtgaggaaaagttacttgcttaca

SEQ ID NO: 374493 - DNA, 927 bp, Homo Sapiens
tgtgatctgtacaagtatgtggagcatgaatgctgactcaagaaacttttactccttctgctcaaggctgatgtttgtaacttatgaacacacgtgaagtgttgagtccaaaagacaaaggggcatcggcatgtcagcgtccttatttattggttcttgaagttttgctgctatgttactgaatcatactaaagacatttgcgcttactttgttgaaaaagaaaaagaaattaaatttgaacacagtgaaagctgcaagtatgccagtgggtccgctcacgaccgtcctgtttcttgctcctgttctcagcctgttatctggcttatccatcagtttctgaaccaacatcaggggcacctgccatgatgagtgtgaagaaatcatttctctatgcaagactggcatcctgggactgcacgatgaactattggagcatacagtactgcggtgtgtctcctcccatacaaagggacacatccttattttgagggtatactcacccgatcattgatttgcatccccatggcatttgcttcatttatttattgcttttgcccatgcattcaatattgatcagctcagcacttccatgggccatagccggtatgcccccagcctgccataagcgtgctttcattttcaagtagcatatgcaagagtccaaacaggctacccaatgttactacttatttttcctctcaggtcttatcagatacggctgtggagaggatgaggcatatgcgttgtcagttggaatccctccaaatggattgcaagagaaatactaaattgattctaaatctgttccattatcttctctgtaggatgcaaaacatccagttgtaatgtataagcatgcacttcatactagcaatcacagcacaggaggacagcattaaattttatatagccaatttgggcactgg

SEQ ID NO: 374494 - DNA, 603 bp, Homo Sapiens
  misc_feature (476)..(500): n is a, c, g, or t
ccgccgaagtgccccgagtggtaatgttacagaaggttgggactcggggtgattttagttgttttgactttcatttttccaaatctttaatgagcatgtgccactctttcataatgaaacaagcaaacaataagtacttactacttactgaatgaatagttgccacttaaacaattatcctaaaattataccaaggaaactaggtttgggcccagcaaatgactcaaatgtaatattcactcgaggtaaggacagtggggtggtgtgggctggcacagcagaaaatttctagaccaggggaatccacggtcctgaattgagtcttggctctgtgtgaccctgggtattgttttttgcagcctgacacatgaatgcttggactagaataatgattcttaatccttagtgggttattgacccctttgtctgtgtctgtgtctgagggttctgggaaccctctctccaggaaaaaaatnnnnnnnnnnnnnnnnnnnnnnnnntgctcacagagcttttagaagcaactctaggaggtacatggactctctggaggtccacggaccaggttaagaacactggtcagaggctgggagtagtggctca

SEQ ID NO: 374495 - DNA, 527 bp, Homo Sapiens
  misc_feature (57)..(121): n is a, c, g, or t
  misc_feature (212)..(221): n is a, c, g, or t
ggagattaagaccagccagggaacaaagtgagatcccatctctgcaaagcaaacaannnnnnnnnnnnnnnnnnnnnnnnnnnnnnnnnnnnnnnnnnnnnnnnnnnnnnnnnnnnnnnnngtgggaggtggaaggatcacctgaattctggaggttgaggctgcaccagctacattccagtcctgggagatagagtgagagcctgtctttnnnnnnnnnngaagttcctatttgactttgacttcggaagtatttattcatattgcagggaaggaagagtggattttcttttctatattttgcttagcctaatataaaaaatttctaactctttaatatttaagacgtcagttgggggatggatgtcaagaatcatgatgaattggactatgaaataacagtatgaatttgaaaatagttaaaagtaaatatattaataaccaactatataaatgctgctataatgataaaacttgatgtttaaaacttaaggctggcatggtggtcataatgtatgcagcactgg

SEQ ID NO: 374496 - DNA, 185 bp, Homo Sapiens
  misc_feature (146)..(146): n is a, c, g, or t
  misc_feature (163)..(163): n is a, c, g, or t
ccgcctcagtctaccagagtatattctggaaagtaaaattacaaatgaaattcagcagggttaaaaataaacccactggcagacaattatcatttttcttcctttctttcctcactatctgtacttggcatatttcctacagtggntgtcttaaagaaaaaanggaaatatgccaagatttactc

SEQ ID NO: 374497 - DNA, 461 bp, Homo Sapiens
gtttcacgccgctcaatctgcgtattcataggccttaaggtcgtatattcatatacatatgtaccacatactgtggttgagctaaagctagtagacatagaagatacagtccccattctcaacttgtttaaaacaagcaaaactggaccatgataagctaatataataaatatgacaaaagtaagtaaaacactctatggaactatgtagtaagaagctgctagcccataattggggtagtaattgaaagtcagggatttcgataacccaagtaacaaacagaaaaatataaatgagattctggatccaaatcacgtaatctaaagataaacagcagtattcaataacataaccaatacactgaatgactaggatatgctaagtgttcacaaccaatacaatcttatcatctaccttagcgatctacaataataataatgaacactcacacctaagaacat

SEQ ID NO: 374498 - DNA, 476 bp, Homo Sapiens
tgtatgcttctcctgctgagacaggtttctcatgtctactcacatacctttgctagcatactacaaccatatccgcgtgtcagccggtcactctgccctgaatgataaccttcaataggtttacaaatgctcattcaagtcacccttcaagtatatcttcccggagccgactaatcacaatgccttcagattcctccgtgtaacaaaaagcaaagcgaagcaagacagctggggaagcagggaggtctcctttatctctggctccagctggactcaggaaaggctctcccaggttgtgcctccccacagcaccttgcctcccagcacaagctggcccaaaagatcaagcgcacctgccaattaccaggaaagcaggggcaagagggagaactgatgtcttctatggaatgaggcactatgctaagagctttcccctcaattacttggtgaaggaggtagtaaatccctatattaaa

SEQ ID NO: 374499 - DNA, 892 bp, Homo Sapiens
  misc_feature (86)..(205): n is a, c, g, or t
  misc_feature (358)..(358): n is a, c, g, or t
ccgtacttagggtgatgaacgaaaaaaggagagggaggagcagctgaagaagtaaaagaaggaagagcgagacggggaaggaactnnnnnnnnnnnnnnnnnnnnnnnnnnnnnnnnnnnnnnnnnnnnnnnnnnnnnnnnnnnnnnnnnnnnnnnnnnnnnnnnnnnnnnnnnnnnnnnnnnnnnnnnnnnnnnnnnnnnnnnnctggctagccttagcaagggatttcagaaagaaaacagatagtctgaaataagagacactgctttctcatccctgagtggcacttggggaaaaatcaagtttatgttcgaatccttctgggcaatacagctctgccaacctagatgagggtgnaacacagttgaagcaaagagaggcctgtttctaggcagacagggctccccaccacactcacatccctggaaacactgctctccttcatcagttcccaggggaggccaccaaactccctgcaactcaactgaattccccctggacaaatgagacgggagagcctggctcgtctctccttggccccaaacatctctgccctgactggggagcactgggagacggtggaacatccatttgctaagcagaccctaaagcactgcttcctgatgtcttaggaccctccagaaaaggcgagttattttaagcctctcctgagcccaaggcctgagcaactgaaacaaatggcttcgggatgagaaccagaaaggttttcaaggcctctcattctgccagaaacacacttaaaatttaaaaaatttaaagctccttgccgcacttgggttcactttgtgctaggctttggttcagaggaagacaaagcaaaaccccaagccctcaaatcaatggatcatgacaaaacactcgccctcttcc

SEQ ID NO: 374500 - DNA, 198 bp, Homo Sapiens
agttagatttggtgtacaagagataaagtgcagaggactggaacagatagacagcagcttcctatagaacgcatgtggctatctacaaggaaagccaatttccttcagacttgtgcagcaatgagaagaatgagacccaccttaaagacttccatctgtctttctctatatgattttcaggtggaaatctaccggggg

SEQ ID NO: 374501 - DNA, 779 bp, Homo Sapiens
gtatgctgtctcacatacacaaacctgttgaatcaagttactttcctcatcctcagagacttgacaattcagagctcacagatggcaggtggaattctcaggcttcccttcctcctgatgacactttttaaaggaagtgatgtggaagttgttctagaagttagatggacagtgggagcacattcgtgagtggggcttgggagagctcaaaagtggcactttgattttaggctgggcaggcagaagtctcacagtaaaatatatttcactagacgtccaaaccaacactgcattgtagtaacctcttctgaagtaactggttaaattaataactggtcccataagtcagggtcaagccacatttataacccattcgggccggccatgaagggttctgactcgacattggtatttaaatgctgttactttcccaatgcttagtagcacttgagactttatttcccatcgacaaaaacctaagaaggcccacagaagtagccctaacagtcctccctggtcatactcgtttcaaacaggtctgcctgtctagacatattcaggcaggaggttgcttgctgctatcttgaaaaccactggaagattcagcttcttggggacctcagagcccatattcatatggaagcccacccatataagcctcacagagcaaatcacagcaatgttgaagttgttattttcaagtgcttatttcacgacattaaaaaaaatattttttcctggtgtattaaaattaaaaataaaatcataacttttgattt

SEQ ID NO: 374502 - DNA, 259 bp, Homo Sapiens
gttgttgttgttgagaaacagtccagcctgggcaacaagagcaaaactccatctcaaaaaaaataaagaacctgcgagtgagttcccacacgttttcctgatgggctgctgctttcctaggagtctctcgctcatagaaaaggcacaaactgaaagaggaagcagatcccattgctgtggaagtcccattgttaggaagctctgcttttctggagttcaaattcgcattcatgatgctttaaaccgtcaagctgggtgg

SEQ ID NO: 374503 - DNA, 612 bp, Homo Sapiens
gttgaaggtggtgaacggatcgagctgagggatgcatctgacaggcttcttccccgtttcagggtgagattttggtctcaagttgaacaactgcaggaagtcctccctcgaggacggcattcctccttgtggagagtctgtctgcgcgctgctggtaccgaaagcagtttttttggtgtgcaccttgcggtgctcaattagactttctttatttggaaataggaagccacaaaccatgcagattttgtaaggagaggagatgctctcggccgcgtgcacctggacgacctcgttgatcgtttgctggactactctccaagccttgctgcagtttgcttctggcccccgatttgccattatgtgtccgcatgtgatttttaaggaaaccaaggctccttgaatcttcttccgcacatgttacacccgtaagtgaaagaatctttgtgtgttctcatgtggatctcaacatcaaaagcgactctaaatgtctgcccacatacctcacagctaaattcattttccttccaattcttttccttgggaggttctgttcgcacttgacttctatcaagcggactgagatactctgcttcaacccgaaccgctgttcct

SEQ ID NO: 374504 - DNA, 511 bp, Homo Sapiens
cgcccgggttcggccagtgagcagcagaggaggataaagagaagagggagaagaggctggccagagataaagggtggggttctggttgtacggtctcaagcaggtcatgtttctaagcttattctcctcctctgtaaaatgtaggatgattctgtaaaatgaggagattggaactaggtgatccgggatattccactggccttgaagaacaaaggcacagaggcgtgacatactggtgcacattctaggatgtactgggaagtcagcacttctagagcccaggctagatgcagggaaggactgaaggagaggctacagaggtggccagtcctgaaggctggtgagcccttcgcacacagagaggggacaagtataatggtgggtgctgcccccatggaaagcaggcacaagttccatcagcggtggagaaacacggatgggttttaaaacatagagcttcgaaaaaaacaaagtgttgggattacaggcgtgagccactgtgccccaccgc

SEQ ID NO: 374505 - DNA, 142 bp, Homo Sapiens
accgtaatatgtaaacaaggttcaagggtggcatctttcacatacgtgcatgaacacctaatcatgatcatgaactatataaaaggatcgttttttacattttttaatggttgaaaaaaatttaagagtattctgtgacatg

SEQ ID NO: 374506 - DNA, 164 bp, Homo Sapiens
gggagcgctgcggtaggccatcaagaagaagaagaacgtcatccagacgtgttctgcaggccatcaggaagaccgtgtgtgactgggagacggggcatgagcccttcaatgacccagccttgcggggcgagaaggaccccaagagcggcttcgacataaaagta

SEQ ID NO: 374507 - DNA, 389 bp, Homo Sapiens
ctctagaggatcgcccctaatcactgcctcctgtctaaacctcctgtatcgcaacttcctccctaggatataaaaggcaaggctgccagggtgagcacaggagagggattttcatgcagcaggagtgtgggaagcaccctgccatctcagttgggatctctagcttgctatatactaagagtaggggtgaaacagatgtagcctgagctttacagagatggcagctcattctttgaacatctcagtccatgtttggattaaagtgatctgttggctccatttatctaaaagaggatacagaactctcctcagaggaaggcagtagcagccagagtctcaggaactttaatgggcattgttcagctttcaacagaaaggaagcatgcata

SEQ ID NO: 374508 - DNA, 174 bp, Homo Sapiens
acaaagtgattcggcttgaaataaaggctggctagtttgttcagtagggaaatacattcagcctgtaagcatggcaaacctttgtctctaatactcaagcccgaaagacaggagctgtgcttggagtctgtgcacatatacagtgagccaggttacatattacgttaggatccg

SEQ ID NO: 374509 - DNA, 261 bp, Homo Sapiens
gaggacccgccacggtagatttcagatagttcctgaataaaaatcaaaatagactatcagttgccattttatatatgttaacatataaagaaaaaagagtcatttgaggatggaagatcagctaaaaagcaagttgtaatatttataatcagttctgcaggtggaggtggcagggattcattaagatcttgatcagagtagggaggaatagagaactcctgacactggatctcaaggttggaatcttcttggtttttcata

SEQ ID NO: 374510 - DNA, 448 bp, Homo Sapiens
  misc_feature (313)..(313): n is a, c, g, or t
  misc_feature (376)..(408): n is a, c, g, or t
  misc_feature (432)..(432): n is a, c, g, or t
cctggctttaaaggaaaaaaatgtcaattcagatataagcatacacaagagaggcacaaaagtcttttttgaagtcatcttgtctgtttaggtataaatctgtcatcatttcatattctctgctgaaacatccagaataagaatcagaaggaagtgatattctcctttcctacagttgtttagttttagaatttttaaaataaaccccaaacccaacaaatactaatgttcccttaatttcagtatgttttgggaaatgaacattgtatgtatacaaactcattgctataagaagaatcatttcttcctgacnaatataaaactccttttatcctgtccattttggaagagtatctgtcagtaaagcagtccttgnnnnnnnnnnnnnnnnnnnnnnnnnnnnnnnnnccagaccacatgtgcatgctgcgnccactcagcttggttt

SEQ ID NO: 374511 - DNA, 301 bp, Homo Sapiens
gccaggccaggtgcctgcttaaggctgcaagctggagaatcgcagaccgagggttcagatcttcccttgacagttcctcactgtgtggtctttggatgggtcatgtactcctcaagcctctgtttcctcagtgtaaatgggggtggtgatcataaccccccccacacacacaccacagagttgaaatgaagagccaaatccacaccggaatatgaagtgcctaccaccgtgccccaggggaacttgcggccgcttttgtccttgtgtgtaccctggcgaggctagacggagatcctctaga

SEQ ID NO: 374512 - DNA, 626 bp, Homo Sapiens
aagggacagcggtttcgttggtggaagtgagtggtggagtcataaaaagagctgttgtttttggagtgggtggaataacatcagatggatgaatgaagaatccaggggcagccactgggttggaaggcacagagttgtgaacaggacctactgctgatgctgctgcagctgctgcagctgttgtctgatgtaacttggcttccagctttgctttctgttgctgaagcttcaaaagctgctgctgtttctcttgcagcacctgtagctgttgctcggctgaagccattgcatgagagagagactgcaaagctacctgggctgctgaactcaggcctgtcgaggcttccccaactgtcccagatgatagtccacctactgcaggagtaaccccgaaggaactcacagtaaacgtacttgcatcatccctttctattctggttccatcacttagttgaccaccacaagttaaaggccagaggttccaactcccaaaagtccagtgaaaagatgtgaaactaccctcaccagctgtgcaactactgacctttccatttcctgaaaggacatctgataaatcaatttcatctgactggacaccgagccgctgttcagatcctgctagagtc

SEQ ID NO: 374513 - DNA, 381 bp, Homo Sapiens
cacccaggcgcacttctggacctggaccaactcctgggagaacttcagacagggcattgatttctgccctgggcagaacgtttcaggggtcacaactcacaatctggaagaccacacgaagctgcccctgatcttccacctgggacgggacccaggggagaggttccccctcagctttgccagcgccgagtaccaggaggccctcagcaggatcacctcggtcgtccagcagcaccaggaggccttggtccccgcgcagccccagctcaacgtgtgcaactgggcggtcatgaactgggcacctccgggctgtgaaaagttagggaagtgtctgacacctccagaatccattcccaagaagtgcctctggcgcggctagga

SEQ ID NO: 374514 - DNA, 250 bp, Homo Sapiens
atgctgtctcagaagtgcttataaaccagtgctggttaagagtctaatttagcttctcctcatgttctttggtcagcgtggtggcagtcttttgtggtcgtgcagaagagcctcagcccctgctgtgggacaaaggggaccaaattgtttgctgtccctagacagcctaggcctgttgcagcccagatggtgctttttgtcagtttagtttattgggattctgccgaatactttgtttgatgagacaagc

SEQ ID NO: 374515 - DNA, 347 bp, Homo Sapiens
  misc_feature (237)..(245): n is a, c, g, or t
gatttcgtagctacaacatcagaaagtgattcttgctgatataaacagggaaaagagaaccaaagagatatcaggtagctcactgactcactgggaggccttagagaatcaaggtcaagaaaatgactaggaacaaatggaaccaaggaagtgagagccacaaccataatcacaccaatgggactacctggtgagaagactgctgcacagctgaatcgtggatatcctggccggcannnnnnnnngccctggatggttgatgctgccacagggaactgttggcctggaaactgcaggagccagtcaccagaaatagattccccactgtcccgagtcgtggcagaaaa

SEQ ID NO: 374516 - DNA, 188 bp, Homo Sapiens
acattacagttgatactaagggaggaaggaagggatggaggataagtgcaggcagctgcttcacctctgctgttccagggagccccaattccacacaccccaacaccacagccccctcctaccatctaccctgagaactgctagagcccctccaccccataataggaacctccacagtggagcagccc

SEQ ID NO: 374517 - DNA, 711 bp, Homo Sapiens
  misc_feature (185)..(185): n is a, c, g, or t
ccaagatggcggcagcggcggaggagcggatggcagaggaaggaggcggcggccaaggcgacggcggttcctctttggcctccggctctacccagcgacagcctccaccgcccgcgccacagcacccgcagccggggtcccaggcgctcccagcccccgcgctggctccggaccagctgcctcanaacaacacgcttgtggcgctgcccatcgtagccatcgagaacatcctcagctttatgtcctacgacgaaattagccagctccgcctggtttgtaaaagaatggacttggtctgccagagaatgttgaatcagggatttctgaaagtggagaggtaccataatctatgtcagaaacaagttaaagcacaactcccaaggagagagtcagaaaggagaaaccattcattagctcgtcatgcagacattcttgctgctgttgaaacaaggctgtcactattaaatatgactttcatgaaatatgtggattccaatctctgttgcttcatcccaggaaaggtgattgatgagatttatcgtgtgttgagatatgtcaattctaccagagcccctcaacgagctcatgaagtacttcaagaattaagggatatatcctctatggcaaaggagtactttgatgaaaagattggtccaattttaaagaggaaattaccaggatcagatgtttctggaagactcatgggctctc

SEQ ID NO: 374518 - DNA, 307 bp, Homo Sapiens
ggtgcttggagtgtggctagaaacagctcttttggatcccacctctttcaaaaacaaaatgtaccaactggtgaggcaggaagccaggtccaggctgggacagcctccttccctagggcagtgcgctccaggtgccggtggggtcagttctgctgtaggatgaggttttccagttcatctgcagagcgcagccaggaaggccaccagactccccggtagcccgccgatgagctgccgcaccggcgctgatctccgtggggctgagctgagcggtgggcacgggcctgctgtcgatcgtgggcagaaa

SEQ ID NO: 374519 - DNA, 347 bp, Homo Sapiens
  misc_feature (26)..(26): n is a, c, g, or t
atggctgatgagttcacatttagggntgtacacacacagatggcagacgtctccccactcatccagccccagatctgagccttgacgcaggccaagcggaaaaatactttcccgcccccctcccctgttcccacttcctcatctggcactatgcatgtctcactcaccctccacagcactcagtcccatcgacgttcactgaacattggctttctctttctgactcctgcctgttttagtccactatatattgctgtatttgcttaaatgctggaaagtaactgttaaaatgtgaaattgtaatttttaaaaaggctacaattaaattttagccaatgccactcacc

SEQ ID NO: 374520 - DNA, 517 bp, Homo Sapiens
ctcgtcagaccacataaactaattaaaatagacatgatggcagtgtgccacagggtcagaaaggtgaagaattcttagggtggacatcgtcaccacagtcaacaggactcacaggaaatgctaagtgctggtcctccttcagccctgtgttacgctgtgtgagtgcctgactctgggcccaggactcagcagcacggtcttccggtcccaaaggcttattccacaaacacatctgtctcagctccggcgtggagagaagacagctcctactcttcctactccagttaatgtaaagtaatgaacagtcctagaatgagctcagatagcttggtccacatgtcactacaagtgtaaataacagactccggatgtgcattagcactgtggcctgtcactgatatctcctacacactttacttggccaacacgaaaccctcgaagacaggttcggtaccgtgccagctgcctcacactctacattggcattcgaaagtgatgtcacaaagaaaactcctgc

SEQ ID NO: 374521 - DNA, 180 bp, Homo Sapiens
aaatagaaagggaaaaatcataaagagtaagtatgagtaggggaaaaaagacatttacttcatggatatatgaaggtggtcatggtaggtaatacttcatgccacagaaaagggcccgattccttttaagcctgaaaatgctatgggtcatagaaagttttttttggagacagcatatca

SEQ ID NO: 374522 - DNA, 585 bp, Homo Sapiens
atctcttcttgccacgactcgcagtcataaagtcttgtgctctgtaagtcaggggcaggtatgagtgaataagggtctgtctgtcctcaaacctcagtataaaaggaaatggaatcctgcctcttaatctactgtttatcctcgacacaccacctgcaagtgcttgtttagggaagtaaaacttcctgcgtggtcacgttgtacatttggattttggatgcatttactaatggaattactgggttgggagacataaccataggtaatttatctctgagggtgcctgcttggaaaaataactctggactgtgtgtatgtttaatgtaaagaccattaacacttttatctctaggttatttaattcagatatttctctgcacacagaagagtcatacaagaaagccccctagtcactgtacaagaaaactggaagaacaggtcagaaggaaaaacgtttctttcacatattccacattaaattatattctctaaacacatgtcaatgtgttacatttactggcagactagtagtagttagattatgagaacagtgtcatactagtcataaagctgtctatttcagga

SEQ ID NO: 374523 - DNA, 270 bp, Homo Sapiens
cccaaggttcccaaaaactgcactgtaaaacttgtttgctgcatctcagctgatcgtgtatgtgagccaggtgagctcatgctgtgaaatgcagacctttctggacgtaccacctcctggggtgaagggaaagaaatgtatgcaggtgtacatcagggtataagctgtcctagagtctggattctttttatccagatagccaatccttccagcctgtgcccttgttgttaagtaccataccccatctatttccacttagtatactgggca

SEQ ID NO: 374524 - DNA, 198 bp, Homo Sapiens
ctagaggatcctcatcacattacatacagtacttgatattctatttaatgatggtggtgggtaatttcttactggtgcctaatttataaattaaaattcatcgtaggtatgtatgtacagggtggaacatctctaatccaaaaatccaaaattggaaccgttccaaaatccaaaactaatcgaagccgcggtgcctgg

SEQ ID NO: 374525 - DNA, 274 bp, Homo Sapiens
tgcagaattcatggtgattcaaacctatctctacgatgtcagcatgatctaaggagctctgacggtcgcatcgtcttgtgcgaccttgtatgggaaagccggtcacgcacatgctttcgcgatagctcacccagcgataagtggccgaacataggtatcagccgaccatctatcatttccgggtagtgtccgcaggtgctggacttgagctgagcctttttctggtccagccactcaaccaagtaaacgcccaggctctgcctatctaaatcta

SEQ ID NO: 374526 - DNA, 224 bp, Homo Sapiens
ggatctgtctagctcgcagttgtgtgattcagccttgagtcccaaggctgagaaccagggcagctgaaggtgtaactctcagtctgaggccaaaagccgggagaacctggagctctgatgcgcaggagaagatgagtgtcccagctccagaacaggtggattctggtcttcctccacctgtttgctctatccaggccctccgtggatgggatggtgcccactca

SEQ ID NO: 374527 - DNA, 438 bp, Homo Sapiens
ttctgcccacgactcggaatatagaagcaggctgtgtgtgccagtattagcagttataatcaaatgagcacagtgccaacagagcagtttcaatacagctggttcttagccctctaggtggacttggggagtggacacaggactccatgagaaccaccttgatgcaaggaaaacattttaaaactgatagatttggatctaaagatggtgctctgttatatctctggctgccttgttcccccaggaaagaacacattgagacaaccctcgcttgataaaaaaatgactccaccttgattgatcatcttcaaacaaaaaacgggccctttccacttaagatggcaccgaagccactaactggtgcctgctaattaaaaatacagcatgtctagcacctaaacatttagcaaaaagttgaaatctggataaggaaaagga

SEQ ID NO: 374528 - DNA, 532 bp, Homo Sapiens
gacaggagcaggcaataaactccttagtgtggccctgaggtcactggctcatgtagagctgagttagaggactggagctgaagagatcccagagctgagtctcaagggtgcagtgagatgggcttggatgcggacatccaaagctacaagaggacagtgagcaggccagagttcaaggggaacacagggctgagaccagcacatgcatgcatcagggaggccctctgagtccatgctgtccactgtgtgtaaggaggggactaagagaacttgaaggagatagctccgtgcagccgacacggtcctagatgcttctacatgctctctatggttcttgctgaaaatctctaaagtaggtgtcatccatgggaaaactttcacctacctttgtatcagttttcatagagaagaaacatcagggaggctcagggcaggtaacatggagttgagagaggtaaggcagctggtatgaggtcgaacatgaattcgaacccaaagtgctggaaaccaacagcatccaagcatggggctt

SEQ ID NO: 374529 - DNA, 239 bp, Homo Sapiens
gagggaaatcccactccccactcattccttcaaaaaggctcgggacgaaaaggcacattctacctgaagtcggctaccctcccgactctgtagaatatggaataaatcacatctttcagcttctatagcactcacccggcatctccaccacagcccttatgacatagctgtggagaaaggtctgtcttcctgggtagatgatgaggtcatgggggaaggttcgagtcgtgggcaagaaa

SEQ ID NO: 374530 - DNA, 313 bp, Homo Sapiens
gctgctagcggaccttcgtaatatgtacacacctaaacagacctttttcaagataaggactggactctctccaaggatcatttaaattccaaagagaactacctacaagttaatttctggttcccggatccagtcattctccctagcaatcatttattacccctcatctaatctaatcccaaaccctaaatctaataaaatacttcttaaaatctgcgaccctaatggcctcccacactcaagcattccacttactttgtactttagagaggcctaaattttgttacactagaggcacagctaatagatgttt

SEQ ID NO: 374531 - DNA, 364 bp, Homo Sapiens
tagtacacatttatcgagcagatatcttcctttttcaaaaattatgtggtaaagttacttaaaacacatctacaggagtactgaatgtgaagaggaatagctgtcatcatgtaaaattctagcagagaagaaattaccagcatagtaaaacaaatttctgctacttcaagcttagattcacaagacaaggaacatatccacctgtcactcagaggaagtccacagaagaagagtgcattaacttttctttcctcttctgaaaatagtagtgagtctgggcagtggagataacttttttcttcagagagtcataatacaaaaaatactaaacagtcttttggtggtggtggttacatattacggg

SEQ ID NO: 374532 - DNA, 515 bp, Homo Sapiens
ttctcctcctcttcatcggctcgccggcgtgtctttggaggccttcccctccgaggggtggtgggaaccgctgcagcctcctgaagctctcgctccaatctctttctggtcactcttggttgctcaacgggctctttacaggagagctgttttcatggtcacccatggttgcatagacgctccttacattccggcgccttgttcggctgagaggcaaacttggttcgggatgttcaaggtctgcagcagagtttttagaagcagtccttgtaatcttctctgcctccatcttcaattccaaaagcttctgtgcttctccccgaggagaattggaccgcttgagtttttcccggtctatcctctcactcttccttgtgacgggcttctccacgatactcactgcagctgcctgaacaggggtctttgaacgcttgcttttgtttggctttttatcctttgcagcaactggaggatcgacctctaaatcttcagaagctgggggctgagaatcagga

SEQ ID NO: 374533 - DNA, 210 bp, Homo Sapiens
tttgtctcaataaaagtataaaggtttaatcaaaaaatgaccctgaaaggaagtagggagacatgcaaatagggagatgggaggcagaaaaatgcatcctgcaattagctgtcacagcaggcaggagcaagagagatggggaagcccaggcccaggaggggaagatgaatgcaggcggcagggaagagagataaagtcagcgaggcggtg

SEQ ID NO: 374534 - DNA, 565 bp, Homo Sapiens
  misc_feature (24)..(24): n is a, c, g, or t
  misc_feature (35)..(35): n is a, c, g, or t
  misc_feature (55)..(55): n is a, c, g, or t
  misc_feature (90)..(90): n is a, c, g, or t
  misc_feature (171)..(171): n is a, c, g, or t
  misc_feature (174)..(174): n is a, c, g, or t
  misc_feature (393)..(393): n is a, c, g, or t
aagtagcagtggatcaacagaaanggaagcaaatncaggatttcccactagcaancaaattggcattaaccatgtctaggccatttggancagctgttattcttaacgctcccataagcctgaatcacagggccagatgagcgactaagctgctcacatcctctctaacanagngcacgtcccgggcatgcacaaagtcatattatagtcttcctaatcactgacccaaacctttgcgttcttactcaagcctcccagaggggaccaccccacttggttaccaccatcacagtcataaagacatagtcccagttccctgacatcgctgcctcccgactcctgcatgagacaggctctcatttctggggtaagtgtatgaaacacctttcaacnggcattcacttaccctttgtgaattaagacacaggcacgattcacaaggtctgcttcccagaaattctattgctgtgctctgttaccagaaatgatatgggggctgaaatccaaagcaaaagaaaccaaagggcgggtaatgccgactggtattggaaagtgtgtgtgtgtg

SEQ ID NO: 374535 - DNA, 394 bp, Homo Sapiens
cgggaacacacagacgctagtatgcacttggcttctgataaattgaaaacaaagattttggtgacccagccttaataaatgaaagcacgaaactagaggtttaaagtaagttatgacattcacatatagatccctcaaacctaagttacttcggagggaagccatgagaggctggatcagtcctcaagcctcagctaaggatggatcctatttcttcccagtgcaaaacaccaaatgtacctacaaggtggagtcggcaaggagagttcccctcttactttgaagcaagagatggaaaaagtcagaaagatttctagacaaaattgagaaaaacaaaaggcaaagtaaagtcaactttaaacaggcctcacaaaaatcagccggaattcttatt

SEQ ID NO: 374536 - DNA, 624 bp, Homo Sapiens
  misc_feature (93)..(153): n is a, c, g, or t
aaaaagtgaagtgcaaaatgtgactgaggagatacagtactctccaaattgcataattttgccaatttttatagaaacctggggagtctgtannnnnnnnnnnnnnnnnnnnnnnnnnnnnnnnnnnnnnnnnnnnnnnnnnnnnnnnnnnnngtgtcagaggtatttgaaccagagcgactcccattttgagtgaggcctgggaaaatgaggctgagacttactggcctgcattctcagaaagttggccattcctaccctctaggattgaattgggacccctttcctgtaacatatttctggtgaccacagaagggactatagtgcagaaacgttgacccaacggctacctttgcgtaagtgttggggtcctgtaacatatttctggcaaaccacagaaaggatgatactgaagaaatccccccaaccccaaagaaatagactgcagcactgattggacgactttgggtaagtgatggggtacccgagtaacaaatgggattgggttagaggcccaacttaggggagttggagtttctcctaagacagagtgagttagaggcccctcttaataaaaggcaaggacacttgactgacctcaggttagaggttactccatctact

SEQ ID NO: 374537 - DNA, 398 bp, Homo Sapiens
gtcacgtcacagtgtgactgtcaagtctctactcaggccgtgcctgtccagagggctctcatgaaggttctcatgaaaggaatctctgtacgatccaagaaaagcaaagaatagcacctgaattatctcaaagtttcaacacaagacagtatataactacggttcaattgtacctaccatatgtcccaaacaatatgcattagctccttcctccaacaactcttttcctgacttcttctctaggtccaggacatcaccatcagtaacttgtattaattcttcacttcctcacacactagacattcagtgaccatctcctcttatttctacaagtatctcttaaattgaatctctcatctccatctctatacttcaatatcctcattctctctctctct

SEQ ID NO: 374538 - DNA, 551 bp, Homo Sapiens
acgaatctgcagagatacagatgtctgcattaggagtgcagagtgataccattgtggttctttcttcactcaaatctgtggagtagtcccccacatttactctgcattctctgttaaaatatgtcgtggaaactatattctgggggaacactggtaactgcacatcttaccacaagtgtcttttatagtataaaccaaaacatggatgccatgactttgtcttttagaagggagtttcttggcatccttgcttagaactcaccctcgaaaagatgttaacgctaatctttaaatttcaacaaggtgtgtagttcgactctaaaaggggaatgaagtagctcagaatgcttaaatctttagcagagcaacccaaagtcaaaggcattataagctgtggttcagctaatttacaaggaggataattgccgaaaaattatcatatcagtttactggaaataaccactaaattctttaacttactgtgagtatagcctaagatacctgctttagttatttactgctatttgacaaactgctggcaaacagtggct

SEQ ID NO: 374539 - DNA, 521 bp, Homo Sapiens
gaatacacccactgtgaagaaaacacaaaacagcaactgctctctcaggccccaccatgaggcacaggacacagagggagtctcccaggaccaaagtgatctctgaggcccctcctcaccctgacgtgctgtgcgtacagcagccaaggaagaggcgcagagtcatgggagagtctcagggccacctgccctaagacaagctcaacagcacagaattccgcatgtgacgaagttggaacttacgccactgaagctgatgcaggttcaaaaaaagccagcaggccaggcgcagtggctcacaaatgtaatcacagtactctgggaggctgagaatgcagaagaatggagtaagagaaaacccgcgaaaatccaaacaacagaccatttgtagctctagtccctgtggctgcagtagagaacagcaacagaaaacacggcctgtatgctgtgatatcaatgacacaattctcggagggagctagcacatgttagtcccttccctgtatcagtcctcacagctt

SEQ ID NO: 374540 - DNA, 467 bp, Homo Sapiens
aggatccccctgtgaaggctctagaagacttcacaggtgagaaggggcttgaaattgaccttgaatgaagcaggattttgataggggttaatgatgggggtggggttgtgagagattggaaagaggtatatttaacgaagatggaaaccataatttatgtctgggggccataaactctctctttatgctggagttgggagaaaagaagattggagaagagattatggaatgttttgacaaagtaggctaacgagataataaagaaccgatgcatctgaataatgtaacaaaatgtatttcttgcttgtttcacagttcattgcagggatctggcaggtagacttccatgtggtaacccagggaaccagactctttcaattgtttgtaaagttcatgactgccttctgcatttacgcctgccatctgtcttacctctcagatgaaaactgacagcccgtttatcgttt

SEQ ID NO: 374541 - DNA, 449 bp, Homo Sapiens
tctcgtctatgggtagaagtggtacacaaaaggatgcccagcaagccccatcaacaccttgaacagctacagacctcacccatggagtctcatgtagtcctcacaggagccaagtcccagctgagggacctgcctgaagtccacatagccgtgcttccccaagaaaaagagcaaccagtgtgacctgccctctgtggcctgcgcagctactgcgctatgccgtcttggaaatggagctttggctggagtgtctcttgctctgggagtgcatagctatgacactccatcactaaggctaagctaccgttgaaccacccgaacccagtggcccgacatccccaagccgagctgccagcaactgttccactcttccccatgggcccaggtgaaggtagagtcacttaatctacctttcaccctccccttcaggccagtgctgaagcagtacc

SEQ ID NO: 374542 - DNA, 729 bp, Homo Sapiens
  misc_feature (26)..(26): n is a, c, g, or t
tgaattactccggtgacggaagacgngactgtgacaatcattttggggcggttaaaggagtgttccattaggcaagctaggcatctggagataaacaggtagtttgcttgatggtggagaaagaaaatgtaaaggacagccagtcaaagccagatccagggcatatccctggaatacgggacgatgtgttctttaaaaatacatgtgacaagatcctctaaagtctgcaaaatctgaattttcttctgcttcttttttgtttcttttaaagcatcctgcctatgtaaatgtcaccacaaaaatatctcaagagcaggtttcccgaaaccctgttggtgtgtatttgtctgcgtgaatgagctgtgtttggctagggcttggtctagccagggcgcactgcgtgtgctgtgtcgctgcttgcagacctggagcggtttagatatgtgtggcattaatagatttctttaagtgctaaatgcaactttgaaaattacctgcaagctccaactgatctttcaactttgaaagtgaagaattacttgaggaattcttgtggtttctttgtcatttagtgagagcccagccagctactgtggaggcaaacctccctgaggttgcctacaaagggcaatgttccagtgtgttttctcttcgagtgtgcttcagccgcacagtacttcctgttattcaaacatctttttaccactggctagacccagggggatcctt

SEQ ID NO: 374543 - DNA, 507 bp, Homo Sapiens
ctttgacccgtgtcactctctccattccccgtttaggtcactcagacaagctttatttagaatgaaatgctaaggaattatccagtccaaacctcatctaaggttgctcaggtcatcctcctagaactacttgttaccctgactcttagctaaacaccacagtccttcctactgcacgaagtctcacggtctagccctgacatactgtcctcctcagttagatcctgaccccctgggctgaatgcctgaatctgcctttgtccatactgccttcctggaatgccctccctttcacttatcagaatcgtagcagacattctgcagattcacacacctagaccccaactgcagacctcagacccagagcccatctgcccctgcaggcaggtgcctcacccagttagcaagcactgacctatatcaaggtcagccttcccaccaaccaagcccagttcaaatcctagtgactaaatgagactcccacacacaccccataatgatagcacc

SEQ ID NO: 374544 - DNA, 401 bp, Homo Sapiens
cggcagttcagatcaactcctcccctgtgctattaggctacttagggagtagcatcatattgaggtcagaggggactatttagtgcagaaatcccgtctggatgaaaaaccaactaggagcacaagatgagtgagtccggggtgttctctcaaattcacctggagatggtattggactgtgagtcagcagcatggtgctgccatgaagaaaagacagctagaaaggaaagcgcaagtcggggtggagccaccaatccgcttgagctaactgcacactggcagaggccttttctgggctgttcaatgtgggggaagatagataactgtgcaccagctttaagcattgtccttgttctatggagcttatagtctatgctaattaagtagaaataagaattaag

SEQ ID NO: 374545 - DNA, 522 bp, Homo Sapiens
gtgaggcaggtatagctcacgatggtcatagtcgttgtattgagctaatagttacacacccttcgttacatgctgggcaatgtgctaagcgatttacacatattcaataacataatcccttaaataacccatgcagtaagtaccatcattggcctcatttttcagatgggggaaagctgaggcatacagaggtgattccatgctgcaaggtcacccagcccatacatgatgggtgcagacctggcacccgggcagtctgcttccagagaacaggctccgtgctgctgcactgaacgctgccccagtggggctcaggaggaagggctttgacctcaggcagcacggggtgtgaaccccaacaccactgccatgtgtaagtcacctcccccaggctcagtatcctctcccacaaatggggctaatgatacttaccccagagggtggctgtgaagattaagcaaaagacatctcaagcatctggcacagttcctggcacttacggggcactaaacaagaggctgt

SEQ ID NO: 374546 - DNA, 749 bp, Homo Sapiens
aggctgagtgagtccacgaatgtactcaggtatagacagaactggaccagtctaggtaaggacgttggagctaaagataggcagacaggtcgagctgagtctgacaagtgagggctgaaaatctgtgattgggtccaggttggagctgtgtccttagggcgatgtctagagcagctctggtgaggtgagcctgggtcccctgggaagagaccagacaaagggatggggtcagacaaagggagtgacgaaccgcatccatcagaaaggtggatgaagcctgggtctggtcgaggtacgtagagcagatctagcaggcgaggtttcaggggttaaggtgagacacaggtatgtatttttgggtctcacaggttaaggtctgagccactgaggtcaggctctggtttgtatcccaagaccgagaagctgtgttaagcatggtgggtagagtttgtcaggtgacatctatgaaaccaggagcatgcaaagataggttgaccggaacagccatggtcaaaccaattaaactgtcctgcagttgaggtcaggcacaggtagaacggatctatcaggtgaggcccaaggagtccggattaggctcatctagaaagacctggatgtggtagatgacctctgaggatatgaagtgaaggcaggtggatagagccaggtctctcaggaggtctgaggagctgggatctggcacagtgagcaggtctggatttcccaggtggtgtcaagacagatgggta

SEQ ID NO: 374547 - DNA, 502 bp, Homo Sapiens
gtgtaggattatctctcaacaacataaatgacattctaaacgtatactcagaattggatagctcctttttattaatatgcctttaagagtcttcatctttaaagtcaacactcttcagctaatcacagatctaagcttacatgaaatctgaaaataaactttactgtgttttcagggtttggccttaaagtaacggtggatggcagatgtagttgtttgactgttgtgttaaacaaacaaacaaataaaagggaagaggaagcagcaatgaaagaccatttccttaccaagcaatcacacagtttattgtctaggaaataaaaacagcaagcaagcaagaacagcaaaggcaacagaaagcacaaaaaagaaaagagccagttttgtgtactgttgagcacacagatgttcctcttggcagccatacagtactagtcaggattggggtttctgcagacgtagaatgtgaggcttctttgttggggacaaagtgttgcctgtg

SEQ ID NO: 374548 - DNA, 560 bp, Homo Sapiens
gcatgtgaagatttgagggcaaaggaattccatatccaggcaaccaccaccacagtcacctgcaaaagctgagcagatgaaatacacacaaaggtacacttaggactttgtcatgattcctttctgtaatcttggctgaatcaaaatcttttgttcaaagaacattggaaatgtttttacaaattatcgacagctacaaacagtcttcaattctaccatgtatttgcagaaaagtggttctttcattgcctgaactcaccctggcatgttctgtgttgactccagagtgttacgttgcctatgtttgatttatttgagaagaataaatctcaggtatatggcaggtttcatcagagttgaagggaaagtatttcattgatttttcataagcagaagcctgccaacttgtaatgtctttttgaaaacaaaccttgcaaagcatgtattgaaaagatgaagtagcaagaggatacttgtatcaaagcactctgtgcagtgttagactatatgcagttttattaatgcaacttttctggtgttttcagccactgcccagtgag

SEQ ID NO: 374549 - DNA, 671 bp, Homo Sapiens
  misc_feature (475)..(528): n is a, c, g, or t
  misc_feature (532)..(532): n is a, c, g, or t
  misc_feature (536)..(561): n is a, c, g, or t
  misc_feature (587)..(587): n is a, c, g, or t
  misc_feature (609)..(609): n is a, c, g, or t
  misc_feature (618)..(618): n is a, c, g, or t
  misc_feature (624)..(624): n is a, c, g, or t
ggaggtgggggtttcagacttttggcatctcaagagacttgagattaccgagaccacgatacccccagagacgtgacgagatgggatcaaggccacgggggaccagaatgctgacccaggcaacctgtccctgcctcgctgccctttgtaatactccttatcatatcatgaggagctattttccgttctccacaaacttggtggtggatggaagaggatatcaagctcaccttgagtgggattgaggtaggaggcggggctcagacaccagaccagattgaggacaaactaaagcaaggtcagggccaaagcagctttccaacagataggaccaccagggtgccacgtcagtttaccgttgccatgtcaataccagggagttaccgcccctttccgtggcagtaacccaataattaccaccccttccctagaaatttctgcataaaccgccccttaatctgtatgcaattaaaannnnnnnnnnnnnnnnnnnnnnnnnnnnnnnnnnnnnnnnnnnnnnnnnnnnnngtgnatannnnnnnnnnnnnnnnnnnnnnnnnnaaactgcaaaactgccctgagctgcncctctctgcctatgggggagcnctgctctgnaggggnagtcacggagctgtaaccctgcctcttcaataaagctgttttcttct

SEQ ID NO: 374550 - DNA, 419 bp, Homo Sapiens
tctcacctctaggagcccatcaggactttagtctagttacaggtctagaagcaaacaggggtgttgggggtagctcctgaggaggatcaacattatcttgcctggaaactacctcaggggaggccatcattgttgcctcaggcagtgcagggtttatctcctcagacaaaggtggaaaggctgatggcagcatggactggggaggcgatattgccactactggggatgggtaagctgtttcctctggcaaaaatacttatcagagtatataaactcagtgccccaacgtcatcagagtcttcccacacctctctattccaagtggcagggtcacattcttttccaatccaatgccctcacttatacagtaaacacctggcatgactgtgcatgcacctttcgttgtgatacctgcgttg

SEQ ID NO: 374551 - DNA, 464 bp, Homo Sapiens
gtaagccatttatggctattgaaggagtctggcttttatgctgaacaaaagggggagcctatgagggatttcaaacaaaggaatgatataattggattaaatattccaaaagagtaacctgtacaatagggcctaaggaatggaaactaggtgacctattaggagacagtaacccagatatgaaataatgttacttggaccattacctctccaaggtggtgagaaatggacaacttctggaattccttttagatgatgccaagaaattttgttgatatataggatgggaggtgagagagaaagagaggagtcaagggcaaccctgaggattttggcttgggcatctggaagaatcgagaaggctgaagggaagggaaggcgacgtgagaagaccacggggaggtgattacaggcagaatcacgagtttgggttgggacatatgtttaagatgctgggagacctc

SEQ ID NO: 374552 - DNA, 367 bp, Homo Sapiens
gagcagagtcccagctgaatctgcattcctcatatgcacatacgtgcacacgcacatacggggcacatgtgttcttgggttgggaggagaagggcaggcagttatcttccagatctccccacacctctggcacatgcctttcctggggtcctggggtagacaggaaggtgaggtgagggaacaagcgggggtgtcgggccctcctcagtccctgttcacagagtgggtgcggcagagacctcaaagggacagagcactcatgagctgagacagagggggagcaaagccgcagaaactgcacacttgcctttcaaaaatggatttcctctcctgagattcagcctgcgagtgcctggcccctcacctt

SEQ ID NO: 374553 - DNA, 760 bp, Homo Sapiens
gagggaagagctatactgaggagagacggctctacttgatgtgcagagatacatcgggcagcttgagttgatctgcaggtacactccagcagggagtttccactagctgcgcaacagcctcagtgcttaagacgaaaccaatcttgcctctatttgtatttcctcctctattgccaattcctcttcaacagagtttcaaatgaaaatctcaggcacctttcgaacccacctcccatagcgaagctatcgctcactcccagggaggctccctcgtgcagcctcctgccctcactcggacccggcagtgtctctggtgcagatgcctgccgcttgcctcttccggaacaatgctcaaagttttctggtgctcagaaacctccaacccacccttcccactgcctgtgcgacaagcttcagacacctcactctggctctgcccactctcctttctacaggattccaaacctatcactctaactgcctacccttccttccttctctcccacatgaagtaggacctgcctgcctctgccttggtcatgccctaggatcaagcaaaatttatgagaattgcaaagttgtgatgttgggagaagttgccagagtattttctcacttttgtctcaactcccttgtaagacggtaaaatcctagagggcagagcctaggtgtgtaatccttcctttgaaattccctattgtattacatctggcgttcatggatgcagaacttgtcaaaactcacaatgagctgagggagt

SEQ ID NO: 374554 - DNA, 413 bp, Homo Sapiens
ggataatactgtagcagtcgtccatacactgagtgaatcagcacaactgctgtagccaggtacagcatggacctttttcatagagctcagcgcaagtccatctacctttattaaagggctcagaactagaatctaacttcacaactctgaacctcgaagagttaaatgtaggttgttgctgctgacttgaaaccgatcccccagtcatccctgcagctgcacttaggaacactgctaacagcagcagaggaagaaatagtaccattgcccatgccactcaagatattcacattaacaccactggtaactccaggcccaacactcacaccagcagcactaggaatattgcttgtacttatattaacattaccaagcatgctgcgtgtcacattaggagtagactacccacagca

SEQ ID NO: 374555 - DNA, 517 bp, Homo Sapiens
cccggagtgacgggatacggtacccggatagtatctgaatagcgtagatgaaaaatagataacctgatttcatactgtacatcagcaatttaatgtgggtgccgggggagtggaagaatctctgctccaagcagtgattcaaggaaccagccttcttccatctagtgattcctcaatgccttaggccttggagtcctctacgggatggtctgcatgcagccagcctacagtggaaggtagtaatccatacagagaactcagtagatagttccttaaggatcaggcctagaagtcgcatccattacttctgcccacacctaacttggaaaggaggctgagaaacgtaatctaactctgttctcagaaagaaagagaaacgggatgacatgaacacatagcattgtctctgtcatactgaaaatgaaacgaccttattaattttaattgatacatatagatatatatattggggagctatgtgtgataatttcatacattggtataatttgtaaagatc

SEQ ID NO: 374556 - DNA, 542 bp, Homo Sapiens
  misc_feature (18)..(18): n is a, c, g, or t
  misc_feature (83)..(83): n is a, c, g, or t
  misc_feature (409)..(409): n is a, c, g, or t
  misc_feature (462)..(462): n is a, c, g, or t
  misc_feature (469)..(469): n is a, c, g, or t
  misc_feature (479)..(479): n is a, c, g, or t
  misc_feature (531)..(531): n is a, c, g, or t
agccactgtcctggggtncagggaaggcaggtgggtggccggtagtgggggactggggaatcatagtggaggctgggttcctnagttcctaactaggtcagaggagccagaggacagtgtccacaggagtccttgccacgctggtgactgccagctcaatggacctactctgagtcacatggatagctgggacaacagagacaacagctctcagctgcagccagggagccactcctcttgcagccagtgtggcaagacttactgccagtcaggcagcctcttgaaccacaacacaaacaagacagaccgacactatagcctgccatgctccaaggagttcttaaatcctgtggaccacaaagagccacagccacaaccacataggacgcccagaccttttgcctgttcntgattgtgggcaaagcttttgagttcccaccagggattgggccagccacttgnaggttcntgcccggggncacaggcagggttgccaggcccagttgggaaggaggcagagtttcccaaagnccgggtttggg

SEQ ID NO: 374557 - DNA, 301 bp, Homo Sapiens
agatccccgaggcctggtgctgggtcagagcagtggagatggcagggggcagaccagcaattcaaacacactgcgggagaggaggtgctagcgcacagcagaggcacagcagggacccaaaccgcctgagagcagggcttgggaaggacagtctctgtggtgtccgagatgagtctcaaaggagatgggaaatgaccagagaggagatggcagagtctgtgtggggggcacaggctgccaggctgttctgcacaaagaccaaaggagagaacagcgcccacgagaccctgggacgccttgg

SEQ ID NO: 374558 - DNA, 413 bp, Homo Sapiens
ccttgagtgaagtcctgggagaccttcactcaaagtctcctagtcactcaataccttcacgggagacccttggagccccatgctactggacaccccaccagagggagatggatgcctagggctggctgcatggggggaagggcctccccatggaaggaaggctggtcaaggcttggtggtgagagcagggcctagcagtgctctactctgcagacattggctgtcaggcccttccctggaagttggctgagcatctcagcccaatgtgaggtgtgggcaggggtgggggtgatgcaggctctgcccatagaggcttgcagtctcagggcagacaccaaccgaaatggagaccccatcgtgtggggaagtgggaggtgctatgggccgggagaccccgacccagcccacgcctt

SEQ ID NO: 374559 - DNA, 277 bp, Homo Sapiens
acgacggcctgggctgcctcagagatggtcccaccagtgacttgaatccatgctcagccccccaggagtttttgccctgggaggggtagaaagggagcttcctgggaaagtttctgtctctgctgattgtaacccctgattttgctgcataactgcccctgtgaccctgagcaccttacctgtaagcagtcatcagatcccacagcaaaccccagaccctccaagaaagatccttaccctggctgggagcccctttgcaaagagcagctactaggtt

SEQ ID NO: 374560 - DNA, 364 bp, Homo Sapiens
caacgaaggcgtgggctgggtcaggaaagggacataaaccagcggcatcccttgattgtcccccttttatcccaactcataggggtgaagtccataattattccgcagagggccagtcctgttttttacttccctaactacgtgctggggcattgctctgagacgcaagaaggcaactcctagggaatgtgtaaataatgcctgtgctctgattgatggctttgtttgcagccagaggaagttgaaactggggcctctgaccctggcctggtctggcttcttccttgaagcctgcagtcatgagcaaggaaatgaaggatcacttcctggggataactggaccaggagaaagcaacaacagccg

SEQ ID NO: 374561 - DNA, 230 bp, Homo Sapiens
aggagaatgagcagagctgggggcgaaaattcccaagaacgttgaagtagaaggacgtggggaggaaaggccgagttcttctcatcccctctaggttttgctcggagctgtggctggtttgaccatgcctcagaggtcaggccctcagccccccgactggctttggggccaatctcaatgccacctccagggtagacttgacctgcgtgcccccatttaccttgggcctc

SEQ ID NO: 374562 - DNA, 444 bp, Homo Sapiens
tccccagagatcagacggggcacgggggaggcacggctgccagagctgagtgctgaggggcaagaaggaatccaccagacttaagtgcacaggacacagaagtgatcaaagggcccaaggccagaagaatttgacaaaggatcttgcaaatgaacaaataagaaatctttgctattaacgatagaggggtttgtctgctgctatgcattttcttgaactctctctctggaatctaactcagcgctcacttgctgggtgtctgcagtatgaaagcacagcacaggcagcagggagaaaggtctgctgtcacacacacagccagcctcgtccttcagtgtccaccccagatgccaccatctgatcattcagcaacaggatctcgagtccctggggcacccgcatgccagcaagcatgcccaagctggagggtgccccctctgatat

SEQ ID NO: 374563 - DNA, 420 bp, Homo Sapiens
agctgacccagctgacgacacgaaatgagaccggccacactgggaggactggatgagggtgaaggaaggtcaaatgcagaaggaccacactcttccggacagtgaaaaacagaagccaggccgagactcatgacaagtcgtaaaaacttcaaaagaacaagccaaaaaacaatgtgtgacgtctgacctcgggaagcacagacaggctgaatggggtgcacatgaggagcccacgttttagtcatttgtctccaaatcgtcccttcctgaggctgtttgctacagccgccacctgtgtgtgcctggcgggtgagatagtttgccatctgagggaggagcagggagacggccgaggtcaaactagatctgcccttacctcggggcctctgcttctcggcgtcatagatcatgactacctcc

SEQ ID NO: 374564 - DNA, 626 bp, Homo Sapiens
ctgtgtgcatgcactcaggtgccctttgtttcatgaacaaatacatttcattgtacatgttttctgtttaaaggattgtataaagtaattgcaggtcagaattataccacagaactgtttaaggagaggcttgtgtcctgttgccacatttcttgaagcatttttaaaataacatgtaacctgtaaccttgttgtttaagttttcttttctattaatactctgtcctgtggtcccgtgcatgctccttttcccagaactcctctctgctgcacccacagcatctgttcccgaggagttatgactcttgacttcctgcagggctggggctcttagccaccagccgctgttccagcactttcagcgcaagatctccctgattttgccacgtggaattgtacttgtatatgattaccttatctaaaatgaataagaggtgatggaccagtttactgcttagaaatagcaagaggcactgcagtaaaacttgtttctcattgtaaagcttcatgtcttttgtttgttggaaactttttacttatagaaactacctattagactggtaaaataaaggccgaaatatgcagatttctaattggcattcataaggtgaactaataataagggt

SEQ ID NO: 374565 - DNA, 406 bp, Homo Sapiens
gtcctggggctcttcctctctctaggcctagcacacacttccagcctgggcatcagggaaataactcaaaaccataacacgctttaaaaaatacactagccagcaactgcaacaacatttgctttgcacaaacatttcaagagaattccccagatagtcttgctgtgggggaattctagccaccaggagaaagctgcccaggccctggcggggcttggcttcccagcggtccctggccaccttgaggacaggaggcgaacagggacagacagcagcagaggggtttgaggccacaacagcatacagaatttcctggcaggatgtgtcattagagctctcctagagacggcccttaccccaccctttccttgacagcctaggacacagtggtgcccctctgatctct

SEQ ID NO: 374566 - DNA, 376 bp, Homo Sapiens
gttaaaacttgatctcccatcagtccctgtatccacatagtctggttcctctgttaagcagtcacataaatatctttaaggcagcaacagtgaaaaggggaaagagagcagcgaattggcctcaaatgaactggcatctctttaaagctaatattcctccttgagaatgctactttaattaaacatgtgccctgcaagattcattattgccttacttgtgttctctgttggttgtctcattcattaatctgccgattagtaaccctgaactcttgcatcccttcctttttttgcattcccttcttaatatactatgctgtttcccctgggacataaactccaggatccgtccctggcctgctcgtgtttgttttct

SEQ ID NO: 374567 - DNA, 172 bp, Homo Sapiens
actgaaaaaatatgtatacccacaaaaagtgaaagtttgatattctttcctctataaagcattctaacaaagtaatgagaaaaagaagaaccacaaaggaaagtagatagaccagaatattaagaattagctgacaggtagaaagacattcaactatatttgcaattaaatc

SEQ ID NO: 374568 - DNA, 373 bp, Homo Sapiens
ggatgaaggcagcaagagggcagcttgaggggagtgagtatgggggattgagaggaggggcagatgcagttgggggaggagtgaaggcgctaaagatgggtgccttgatttctctgaggaccaacatgactcccttccatctagaagggccaggcagctgtccctcggtgcttattaggtatgcatctctccacagcctcttctctggctctggagcttcagatgtgtgtgaaataaaagcagtgagctgagaacatcctgtcatgttgatctgcagctgtctcaggtaccctttacagggacattctgcagaaagcaagccaagactgcattcaggggtattttagttcacagtggcctcactacaactgca

SEQ ID NO: 374569 - DNA, 335 bp, Homo Sapiens
ccagaaggacactttcctcctttgggggtgtccccacgtcttccagcagcgctcaggcactgagtcctcagggggtacctcttcagacacgctggagacttagagattggcaagtctcagtagggcctgccaacctgagcggagtaagcatgaagcaggctgggctggtttcagcccctaccagcttttcctcatgctgcctttggccttgcattcttgcctctgagcgagtccagcaactagggtctgggtggcttcctgcatcccagagcaatcagaagacatccttaaatgatgagggagccctggcccaggcaagtgcatgttcatgtgcg

SEQ ID NO: 374570 - DNA, 369 bp, Homo Sapiens
tttacatgaacagcctcaaggacatcattcacatgggccacccagagggcactgcaccctcctgaggtggctgcccgggcctcatctcacttccatactcccaaactcgagcatgctgttgcaccacctcttccccatccaaactcgggctgctccttgtgcaggtgctaatggagtgctaagtctcagaattcatagcattaatggtactatcaacaatatcagtacctttgataccagcagttaataccaatgatcaatcctaataatccatcatgttagctatagagctaaatggggctcattcctacatgcagaaggagatttcatccctggaaggggaggcaccaggacagagaggttttgggc

SEQ ID NO: 374571 - DNA, 443 bp, Homo Sapiens
  misc_feature (356)..(356): n is a, c, g, or t
  misc_feature (376)..(376): n is a, c, g, or t
  misc_feature (408)..(408): n is a, c, g, or t
agatagaggggcaccccttaatgttacaggtgaggaaatggatcagaaagggtaaaagatctgactgaggttgcagagcgaggaagtggggggacctgaaaccacaggactctgtgatgccaaagcccacccagtctccatggagatgcgagggcatctcctctgaagagtgtccgacttctcatgctgacttcagctgggaagagctctaatgacttggtggcaacattatcctacctgcttccttcaggtgtcaggctcagaacaggctcaatgagtccaggagggcagcatgctggctaggcagacctgagtttgaatctttccctactgcttactaatgatgtgtccctggngaagtcatcgagcccctctngtgactcaattcctcatcagttcagtgagggnatcagtctagggcatcagtttttagaccgagagac

SEQ ID NO: 374572 - DNA, 281 bp, Homo Sapiens
aggggtctctgtctaggaatgagggcctctccttttcagtaccaacagagtgaccgtccccctgtcccaccatcccagggaagaacccaggggccccagggatacaggccatggacgggaaacctacgagcttcctccctgtagctggcttcctgtgcagtgagctcgaacgccataccggtacccagagaaccttgaccaaaaggcgaactcactgccccagggaagacaggccccaccccacagggaccgggttgatttagatctggacgtgcgtcttc

SEQ ID NO: 374573 - DNA, 507 bp, Homo Sapiens
tccagcttcaagtggcagtgccacagccaggccgctatgccctagtggtggagtacgccaatgaggatgcccgccaggaggtgggcgtggctgtgcacaccccacagcgggccccccagcaggggctgctctccctgcacccctgcctgtacagcaccctgtgccggggcactgcccaggatacccaggaccacctggctgtcttccacctggactcggaggccagcgtgaggctcacagccgagcaggcacgcttcttcctggtaaggacccctcaggtccccaccccaaggggtcagcttctttcagaagattttgaaacatgcatgagaggggagaggacagttggggtcccaggtccccaaggcggccacaaactcgctcatgccccagcccagcatgtaccttctggaacccctcctgcaagcgtatagtgcattcagtcccttttgacgtacccccgagctgtcccatgtgctcaggaaagcacctgcagtcacagctccc

SEQ ID NO: 374574 - DNA, 369 bp, Homo Sapiens
tctctgctttgataagtacaggagtgctgataaaaggcgcaactgtatgcatctgaaaatgtgtatataacccctaagattatgcacgctaactttactagtctaagggtcttaagtagtaggtacttccagctgggatgtaaatacagtgggtggggtccttacatggtaaaaaagtacagcagcaaatataagtatgcacattaacagtccaagagagtgaattcaggctagttagaagctcctgcagtaatgcaaatggagcaaggaagcgggactctactctaacataaaggcacatcaactactgctaattatgcgcgtttttacagtataagagaaacggccagtgaaagtgaaatcatggtc

SEQ ID NO: 374575 - DNA, 461 bp, Homo Sapiens
tcagcccatgtacacaacttccccccaaaaactctttaatgaggggaagtgtgtagaaaatgggcaaggataagggaacaaatgaggaatattgaagcggcagaagctagcaatttcaaactctattactgcccccaagttgaagggacaagaggaggaagatatgttgttggagctcataaagaaggggcccccaagcagaagctactgttgggggttgggcaggtacagctacagccagagtcagtactgaaacagagtgaggcatggaaagcaatgcctcaccctacttcctgctctcctggctcctgtggttgcctcctgttgaagcaaccaccaccagggaacactggttatcttactaagctggatttattaaatatgataagcaaggaagagtagtcctgcaacaaatctcagatgtctcacaaaaccgagtagcgaagtacttgtgactggct

SEQ ID NO: 374576 - DNA, 665 bp, Homo Sapiens
  misc_feature (321)..(331): n is a, c, g, or t
tctgagatcctcagccagtcacatcttggtaccttataacggcacctaacacactgaagtatatccatatgtatgtttcctctactactgctcctcccgtgacccttaagaaacactgccatagagccctacagcttgatgggagaagtcctatcccttaggcatggaaagctattaagaatgtgagaactgtgtatgaggaaactaatttaataattccctagaatggaaccagtagaaaatttccagctccacacaactgaagtgaaatcattttttctccactccctactagtaaatttactgttctatgttaaaagnnnnnnnnnnntcaaccagcatttaaattatggcaacctaaaatgtgtcccgtatcttagaataatttccccactgacctattcctctgtaatagtaaaacatatacaccaatgtttatagctacattagtcataatagccgaaaggtaaaaaccaccccaatgcccatcaactagataaatgtatttaaaaaatatgacccaggcgaggtggctcaggcctgtaatccccgcactttaggaggctgaggtgggtggatgaccccggagttcaggcccacctgtgcacctattttctacatactctcatctagttgtgacctggcgtgcgtgatcctctgaacgc

SEQ ID NO: 374577 - DNA, 529 bp, Homo Sapiens
tctagaggaccccacgcccatgtcacaacagaatctctgtatattcatacttctgttaggtaacagggtaggtatgttaggtaacagggtaggtatggaacactcagagaattctggaggtggacatgggcacctgagtgggtgccttcagagttggtgtgaaagcgagggaaccaggctcatccaccaaggagccctgggctgcaaggcctgtcaggtcccagaggtggtggaggtcaggccttgtgggccgccatgtttggaaactgggagctgaagctactgcagggcattgagactatggatctttgctcttagtgcagaaacaaggttaggggaagagagggatccttgccctggaggtctgggggctatgtaaaacctgagaactaatgtctcatctggaggacccaggcctagccaaataacggggcggtggtagtggccacattatcaggcgttatctcttgtaaagaggagagagaatttcctgattattgggtactgcaccgagacaagaaatggtaac

SEQ ID NO: 374578 - DNA, 453 bp, Homo Sapiens
ctggagggaccctccagaaagagatagagttgatctctgtaccttcagggtgaacatattagttcagcaaatacacaaaccactttctctgagcagaagtgacaccttggcagcttcctgcccactggcataagagctgttttcctgctgattggcagcaggctagaatttgccctgtgccaagttcctggttaggactttattgaaaccattatggggacgttttcagtaacacagtggctggacagtcccatggatgagggccagcaagccccagtccttctctggattctgctgttccaagctatgtgaccttgagcaagtccctgtccctttactcctctaagctttagtccctgccttgaataaaagtgcaagactgggtgagttatccaccagtttggtgggctcttccccagcaccttcattcaaggcagggactaaagcttagag

SEQ ID NO: 374579 - DNA, 502 bp, Homo Sapiens
gcgatgtcacaacaactcggaggagcagcagttggcaaaatacacacagacacttctagcattcggtgattgtaaaactcggaggaatacagcttgatagatttttagaaatatactagatgatacttctgcttaaaatctgaacgggaataatgtcagtcagaaagagatggaaatgtcttggctatggatattaaaagcccggaagtaagcaatcaatcatttcaacacaaggacaagcaggaaaaacagaagcagatcatatggcaggaactggcagtatgaaaagatgacatctggaccagtgtggcacggtgccagtcatcatggtcagcactaaatgaaaaacaaaagttaaatgaatgaacagactttctcttggccttaccaaactaatgatttatttctctggtagtgaagaaggatggcaagtcaataccagatacaattattcaattcaacaatatgtattaagccaggaactgatcgaggcccggggaat

SEQ ID NO: 374580 - DNA, 524 bp, Homo Sapiens
ggtcgttctcgaggatccctcgacgccatgtcacaaaggaatcggaaagacaaagagggaggagaaggttacttaatgttttacgctctgctgggggcgacttacataagtgggaatgagctaacacagaactatgccagcgtatggtccccgatactaagtaagtgctttttaatttctgcgtgtaatgtaagatgccttctactcagtccgatttctcacctccatatctcttccaccaagtgaatttcctccaagtcactgccttggccaagaggcagagaaaatgcaagagtgggcagacgaaagggtaactgcaattataggtgacttcgagagtttaaacccttctttatacagagggacatgcatatgcataagtgataccgggaccacacttacaaagaaaacacttattctttacattctctttttacttcatcctcacaaccatgctgtgagaaactgtccagtgttacagtgttctgaaatcatcaggggttttagttcggaagttaaaacaa

SEQ ID NO: 374581 - DNA, 581 bp, Homo Sapiens
gtggtggtgttctagaggatccctcacgccatgtcacaaaataagcattatgtttcaaagaccatgaaaaagttattgtctcttttgggtctcaactagcgagggaggtgagaccaaactgctcaaccgctggacaatctcagcaaacacacccactgttgagacttattgagtgactcaatgttggctagaattgtccatttagctggaggggaagagggagggaaggatggatggaggagtgaagtatggaagcagggatcaggccacttcccgtacctctcccaaactccaaaggcaatgatcacattggagggtcagctaaacacaaagggaagtgaagaaagaagtttgaagattttcctgtttccaaaaatcacatactttcctcttttgagtattctatagaataactctctacatttcctagtttgtggaaattttctctacggcataactactctaaatggtgcaattttcctcatatcagacttatttttctctatacctggttccctagcaaacctgagctttatttatatatctgatatgcaccccatctccacagctggcattcaatg

SEQ ID NO: 374582 - DNA, 442 bp, Homo Sapiens
  misc_feature (20)..(20): n is a, c, g, or t
actgaaccctcccaaagtgnaacaatgccctttgggagtttggggaagaggtaacggggaaagtggccctggatcccctgacttcccatacttcactccctcccatcccatccttcccctcccctcttcccctcccagcctaaatggacaaatcctagcccaacattgagtcactcaataagtctcaacagtgggtgtgtttgctgagattgtcccagcggttgagcagtttggtctcacctccctcgctagttgagaccaaaaagagacaaataactttttcatggtctttgaaacataatgcttatttcgtggtcaatggctttaaaaaaatctgtttcttgttttcttcaacaaactcactagttttcccttaaatgatattgtaaaaattaaagtaatcttgaaaatgttttgacaaaagtaaaattaaagggacatc

SEQ ID NO: 374583 - DNA, 488 bp, Homo Sapiens
gaagtgctccaccagtcattaggcacccaaacattttcacctggggaacactggcatttccctgattagctgtgaagaatctagtggctaagtgtgaaatcctgggtgcgcaggtgttctcactcccgccgtgttctcagtgcagtggtggtcagaggcccttccaaggagacatcactctgatcagttacagatagatgttctggaagatctgcaggtgagtagatccagcagagtttcttcccaccaactctagaagaaagggccttatcagagttgaccctgagcctttggtaaggttttgtgtgcatgcgattcagttatctttgggcaattcttttcttgctgcagtgagagattaattggttgctgatcaaaccgttcatgcagatgggggggactttgggattgtacggctttctcctcttgggctggctttcttttcaggaagtttggactttggccagggtttggcttttcccagagcc

SEQ ID NO: 374584 - DNA, 887 bp, Homo Sapiens
  misc_feature (874)..(874): n is a, c, g, or t
ggtggtgttctagaggtccctcacgccatgtcacaagaaaaagagggggcagaaccctcgggagaccctgcaggactgcaagaactgggctgcatgaagccacccagatgccaggctgcgtgttacggcagctagcctgcctggggaacacacagccccttccatacccgtggctctccttccctgcagagcctcgcaccggtgtgtgtgttggtaaacagggtcacctagtccacacagggagccaacatgcgagggaggagagccaggcctgggtctgctcagactgtgtgctccaattttcagatatcctggacctctaaggaaactggcactggcccaggacacccagagaagctagcagcagtcccggtgtgatcttccttctccatatgaccccacctgagctggatgcagccagcccagcccaagggaagcacccagatggctgtttgattccatacactcaaatcctatatccaccagggaccagacgatccagaccacgtgcttccctccaaaaagagttcgcccagcacaatcagtttagtcgctccgtccaccctaccatttctgacagtagcttgaaagcagtagagccacgaacaaaggatgccatgggcaggcaggagtctgggtttgaatcccaggtgggctgctgagccagctgcaagggtctttgccgacacacttcccatggcatcctttgttcgtggctctactgctttcaagctactgtcagaaatggtagggtggacggagcgactatactgattgtgctgggcgaactctttttggagggaagcacgtggtctggatcgtctggtccctggtgatatagatttgagtgtatggatcaaacaccatctggtgntcccgggtcctca

SEQ ID NO: 374585 - DNA, 384 bp, Homo Sapiens
atgtgtggtgatctagaggatccctcacgccatgtcacaatggtgcgggcatggggcagcctcccgacgtccttcactgtcaggatgaggtgccgagatgacttaagcagcctgacagcctcgtcgtgtaggatgttgagaaagctccgcccattcacttctagaatctggtccccaaccttgagcccgctgccttctgcttcagagcctgggtccacgccagtgatgtaaatgccaaggccgtactcagctcccccacggatcgtgaggcccagggaccggccgtcccccagcaccaggttcacctttttctcatcccctccttgcaggaggtgcagggtgctcaaggttgtgacatggcgtgagggatcctctagacagcat

SEQ ID NO: 374586 - DNA, 524 bp, Homo Sapiens
taggtcccagaggcaaatgtcagaggaaagggtcaaggagggaggagatagagcgtgcaaatagcccagggagcagagctccaggctgataggatgtgcccagccctgaactctgctggagttctccggctccctgaatgctaccaggcgtatcagaagcacttaataaattcttacctaatgtggttcaccatgaagcaacattaagaatgaggaaaacaagaaaggttggtgtattgcagctcaaagtggatagatcaaaatggcaagagcagattcaactgtttgatcaatctcatttatgtaaaaccaagtgtctcaaagtctacaaatgtgggcttgacttttcccatttcacctgtataacatgattcccactccagcctttaaaagcagacgatgagaggcagataacaactgtggactcttcgttgtggttctggttttcatttgacagttacagtgcacttttaaaattcagtacaggttgtgacatgggctgagggatcctctagatcgcctca

SEQ ID NO: 374587 - DNA, 432 bp, Homo Sapiens
tcacgccatgttcacaaagctgagtcttgctttgtggacaattcacccacttgaactccctcaatggagcatcataggcccagagagacatggctatggacttagtaccttggcatcacttttatcccctcatggaggagatggcattttactactgaaaacatagggttctcctttgacacttcttggtgggagaaagcagtgtcagagaaagtgggtgttggagtgctttgggatccctcatgacctctttatgttggtatacattgacagcctgggaagtttagttcttattctgaagcacttgtactactctcatgagggtagagataatggcatagcggacagacattggagaagacgaaacaaagagaacaggtagtgagaagtcgagagtcagtaattttcttacttaatatgtgactggcgtga

SEQ ID NO: 374588 - DNA, 352 bp, Homo Sapiens
ccatttccagttaagtgttccgttcctggtgggcacccagctcaggaacactgcacgtgtgtactgtgagttgccccccatctgaaatattcttcacctgctcaccctccattactgagctgaaacttccacaacaaaccaacagcctccttgtgttgggaaaccgttcccattacagtagatattaacgagccctaaatccaatctaactgaatttggctaattctctaaagttaggattttctcagaagttggcgtgatggtgaagaatcccttttctctggtacccgttatggttgacaatcagtgaagttttccttgtgacaatgggcgtgagggatcctctagatca

SEQ ID NO: 374589 - DNA, 232 bp, Homo Sapiens
tggtctctgccctagggaggctcacagtccatcagggggaaagacaggcacaaataaccttgcagcctttcccagtgcagtgctactctgcagaacacagaagctgatgggagtgacttctcaactctcctgaggatggcatagaaccaaaatcattctggatgcagaagagacaagtcaatgcattgcatacaacagtgccttgtgacatggcgtgagggatcctctagaa

SEQ ID NO: 374590 - DNA, 293 bp, Homo Sapiens
tcacgccatgtccacaatttcgaaagtaagtttaaaatacgtcttcaaaattttggtctggattagcactgatggacactaaggccaaaatatgaagatgcctattcaacattttcaactaaataacctataagtatttcatctcatcacactgaaatcttaacgtagcaacttgcgccacaaaccgtcccatccccctcatgacccttgaccctggaccatactgtctgcaggaccaggtaaatgaaggagacatcagccaagagtgatgttggctagggggaaggggcggt

SEQ ID NO: 374591 - DNA, 316 bp, Homo Sapiens
tcacgccatgtcacaagaccagactgtgtggggtcttgtgggccaaggtgaggtcttggcttttaccctgagagtgattgaggtatttggagggatggtgagcagaggatgacatgtacagacatattttacagggctcacactagctatcatatgatggatacaaaagccaagacctattagcaggctactgcaactggtggtgttgactcagacccagcagcagcagtgaagctgggcagaatatggtagatttgaaatctgtttcactctctgagatggtggggtttgctacggtattgtgtacatggcgtga

SEQ ID NO: 374592 - DNA, 394 bp, Homo Sapiens
gagagtgatcatagaggacccctcacgccatgtcacaaactatccctgagggagctgcagtgaggttcttccttaaagagcaggggcagcctgtgaggtcaacagggatagttaggtgacatgggaatgggttgggcctgaattagcaaagtttgtgtcgtaaggtgagactcatgtaacatttctggaatagaagttattgactgtggacatgcttatcaactccactggccgtcattatccatacatccagcttacatcacttactcactgactttggggttagggtgggtggatggggtggcaattaagcctcctgggaaaaattgggaagctcagtatctcagtaatggttgaggcagcagtgaggctgagcaaaagttaatcagtgatt

SEQ ID NO: 374593 - DNA, 360 bp, Homo Sapiens
cctcacgccatgtacacaagggaatagatcctgtccaccctcagtgtctattattatattcctaatttcagatcacggaaccacgtgccagaaatctgtgggttatcttcaatgttccctctgtctcaccactcatacacttaaccggcatatggctgctaatttttttaagtatttggcaggttttctcccttctcctcattcttactaccactgccctagttcattccttatctcacttgaactttcacaaaaacctcttacctaatctctctgcctccacctccacactgccctcagagtggtctgcagagagcacaaagccgtccacatcactgaatgcgtcatgagctttcagtg

SEQ ID NO: 374594 - DNA, 478 bp, Homo Sapiens
gcggttctagaggatccctcacgcccatgtcacaaggtcagtctccctttacaattagcattaaaacatgcctgttctaattccttgatcagtttagtttagtggttggctttgtcattgctccttaagagactgccagtgtttcatatgagaaagatgatggtgttgaatgcagtgaataatggagcgataccagcagtcatgactgggaggcattttagaaccacgatttaatgagtagcattcattgcaaagtgcaaagaaaggcccatggaaagatgagtaccctctagtctgcttaattcctcactatctttttactgctcccttttccctggcttgattcgttcagtcattggagaagcatttgccaagttcagaccgtgttcaaggcacaaagacagaaaagctcaggtccaacctcagtgaatcagccttaagtatttgctgagcattgagtatgtacgcagtacagagt

SEQ ID NO: 374595 - DNA, 423 bp, Homo Sapiens
tcacgcccatatcacaacatcaatgaacgatgctgttacttgttccaaacacatatcatttaagaggtttggataaacaacaacctaaaataaataagcactaagcaaactcagggctacataaaccctgtggtgaggtaactgacaatgggtacaactgggacactttactgttaaatcacctctatctacatgtgcccaagctgtgaggtacttggttttaatcctaaaaagtcatggtgcacatttattcctgccttccaactgggctctaacgtcacctcctcagagaagcccacttttctgtgcttccactctgctttttttcagcatttagtagagcatcagtcaccatccatatctgggaacaatgattgtaagaaacagaaacccatttgcatgagtcttgtggacatggcgtga

SEQ ID NO: 374596 - DNA, 333 bp, Homo Sapiens
ctgcgtaagaatgcattcccagggggaggcctctaaaatggccactctgggagtgtctgtcttacgcagttgtggataggggatgaaatatgccctggtctccagcagcgcccccaggcttgttaggattgggaaattccagcctggcgaaattgtaggcagactggttctatgctcgtgaaccctgtttcctgttaagatgtttatcaatgacaatctgtgcatagcgggacagtgaacctcatcagtaattctaatttcgcctggcattgtgaccttgcctgcccatttgccttgtgacatggcgtgagggatcctctagatcacctcgca

SEQ ID NO: 374597 - DNA, 495 bp, Homo Sapiens
atagctgttctagaggatacccccatgtcacaagttctaatccatatggaatagttttctttttcctccccgtgaagaccttcagctgggatgagccaagaggcgggggactgccgtgagacttagaagtggacaccccagagcctggtgctgtctctagctcctcacacagactctcctcctctcctccgggactcactgcagggaatggtttctggggaggcgtgatgaagaggccacttcaggatacattgagtttgaagtgcccttgagacctccagggggtgacatagaggatcttcagggtcagaggaaaggtggctttaggcatagttagcatgaggatggtgaatcaaaatgacaggtgtggggatggacatgggtctgtggacatggatgggtgaggagtcagggccgacaggtgtggacgtgggtggatgaggggggcagggctgacaggtgtggacgtggatgggtgagggcaggcctgacagt

SEQ ID NO: 374598 - DNA, 421 bp, Homo Sapiens
caccggagtgcaaacctcaagggcactcttaaggcctttggtcacatggcattcacttgactccattggccaaagtaagtgacttaccaggatggacaggctggggagtgccctcgaaccacgcgggaaggaggtcctgtacgtcatcacccagtggtggagcaggaatttgaacccaagcctgactcagaaggccttggcaccatcggcctctcatctgaggtcatgtgcaagggccctggctcggggatccatggatgactgcccttctgcccaccgtctctcagaggcattgctgacagctcagggggcgggtagactggagcaacagaaagcacagggctgctccgcaatacacagtcggtactacagggtgcctgcgaggctctggcctgactttgtatgaaggctgtcgcacgtc

SEQ ID NO: 374599 - DNA, 484 bp, Homo Sapiens
cgcggggccggaagacacgaggctctcccgccccattgaggattttgcagcacttcttgagcacgatctcagaagcccccttgctgtacatgcggaagctctcgtcgggcagcttgatgacagtgctcatggacttgcgcacggagttgaaggtgtacactttgtacaacttctcctctggcatctggctgcgcacgggctcgtagtcctgcttcaggtccagcacgaagcccagcaggccgcactccgtcttgttgcccacctgccgaggcagggcgccctccttctctgggggcagaatcttggtggtgtaggcgctgttgatggcgatggcattgatcagcagctccatggtcttggtgttgatggagctggggtcggggatctctttatagtggacgtcgccgacataggcctgtaccactgtcatgcgattggtggtcagcgtgcctgtcttgtctgagcagatggctgtggcattgcc

SEQ ID NO: 374600 - DNA, 228 bp, Homo Sapiens
cggagcgatggtgtgcagcaggaagccatcccctccctgtggggaaacatgctgtcactctgctttgagcaccgtgcttacctgatacagggagaaagaacctcacctccttgctttgggtaaacgcctggttcaccttttctgcccctttcttttcagcctttctgcaggaagctgtctcgtggacatctctcgtcaacagcacaaggctggatggttcaacgcaca

SEQ ID NO: 374601 - DNA, 306 bp, Homo Sapiens
tcgggacgatgggctggggagtcttacatgccaaggaagttcacctacccttcctgccttcccggctcgggaagagtcaaagcggtcccctgaagcaatcctggcatggtcagttccgctgggggagaaagtgtcttcccgggacgtttctgggagaacctgtcctccttagttcccctttctctgcccatgtcccttccttatctcacccagggaggttctgcctctcactgccctgcagaaggtctctgcaggtggctgccgctcctctgcagatgtgcatcgtccccagatgcaggaccctga

SEQ ID NO: 374602 - DNA, 421 bp, Homo Sapiens
acttctccatccgaactccctctcaccatcctgcacccttgggtcctaccctgttcaacattgccctctcctgctcacaccctaacccctttcagggccttcccaagcccctgagctgtgcagagatggccagggcgtccactttcacagggacgagctgcaggagggcagcatcacttataccggtagctgcagttgctccccaggcacaagatggatctcataacctcaaagtcacaaatgcacgcccctcgcgacgctctgcctccttcagggctacacccagtctcccagcatgatcagcccttgtgtgccctcacagggtgggctgcacactgatgtgccgaactcaccgcctcctcactcacgcagggtcacacatgcagtcaccccggacacactctcaagtcacatggtgcac

SEQ ID NO: 374603 - DNA, 232 bp, Homo Sapiens
cacatatgtgtgaaagttattggtacaggctagttactagtagcattgcttgaaccaggcaaagactatgacctccctagatgccatcagtagggaactagccaaataaacaatggtaaagccacacaatgaagcaccacgatgccatcccaaacgaagaatgcggaaactctgagaccgctgttataggaagatctcagagatacttagtgaagtgaaaaggcaaggtaca

SEQ ID NO: 374604 - DNA, 204 bp, Homo Sapiens
ggatatgggctgtgctgagaattaagtgggataacacgtggcagccttttgaaacagctttgccatcctgcagggcttcataactccccagctgggtccagccttgacatttacatagaactgtcttatccataaaattgcacctggttcccacaacagccctctggggaggtattcctttctccattatgcaaataatgagat

SEQ ID NO: 374605 - DNA, 372 bp, Homo Sapiens
gacgtgcatacgtcctgctccttagctaaagtaatttcaattcattttccaaatggtggatagttttatgaatttctttgagaaaaagttgaaattatttcataatgaagacgagtcagagagaaaaggattagcctagcatttgtcctctttatataaaggacttcttatagcctgattcctaatgcagagttcagtgaaagtgacatttatttggtaacagcttttgagaaatgttactttatttctaaataattatatacttggcagtttattcttccagttaagtttactaatagttactgatttgttaatataagtttgtaagttgttcttgaaagttaaaatgaagctgggtgtggtggctcacac

SEQ ID NO: 374606 - DNA, 679 bp, Homo Sapiens
  misc_feature (48)..(135): n is a, c, g, or t
gaaatcgcagatcggctacacagaggccccaccttaagaatctcattnnnnnnnnnnnnnnnnnnnnnnnnnnnnnnnnnnnnnnnnnnnnnnnnnnnnnnnnnnnnnnnnnnnnnnnnnnnnnnnnnnnnnnnntattgggaatgtttcccagcagccacttccctccctcttctactgtgaactagctatatagttttcatcccaaattagtctcagtaatcagtttaatcccatttgacttgccacactgatttgttaaaggacaggccacagcaaacaccgatatttttgtttcctgacaggagtgaaggctagaggaggaaggttaaatctcttctaaggaaggtgtgatgtgcgaatacaaactcttaacttctgctgccacttaataactctgagggaagccacctgaagagaagtcaacagtgcataaaggttgcgcctaaacagctgcagtgaaatgaagctggagccacgttcaaattacaccctgaacacatgcccccaaaaactccttttaaattttgtgaaccagccaaattcctttatctcctctttgacctataaaccacagcattctaactgatagagaactccaaaggctgattcaacctcttttcccaagtcatctcccaccacttcataaaatgttgaagtggtgggagcatctggtgtt

SEQ ID NO: 374607 - DNA, 634 bp, Homo Sapiens
ttacaccagatgctcccacccttaagaaatctcattatgtatatgcaaatattccaaaatctgaaaaaacacaaaatcctaaatacttttggtctcaaatattttggataagggatactcaacctgtattgggaatgtttcccagcagccacttccctccctcttctactgtgaactagctatatagttttcatcccaaattagtctcagtaatcagtttaatcccattttacttgccacactgatttgttaaaggacaggccacagcaaacaccgatatttttgtttcctgacaggagtgaaggctagaggaggaaggttaaatctcttctaaggaaggtgtgatgtgcgaatacaaactcttaacttctgctgccacttaataactctgagggaagccacctgaagagaagtcaacagtgcataaaggttgcgcctaaacagctgcagtgaaatgaagctggagccacgttcaaattacaccctgaacacatgcccccaaaaactccttttaaattttgtgaaccagccaaattcctttatctcctctttgacctataaaccacagcattctaactgatagagaaactccaaggctgatcaacctctttcccaagtcatctccacacttcta

SEQ ID NO: 374608 - DNA, 553 bp, Homo Sapiens
caccagatgctcccacccttcaaattaagccatattacagaggaggaaactggcacagagaggttatgttatttccccaaggtcacacagcagagaaagtgggaaaaccaggatttaaacccagatgctccagttccagagcccatgctcttgagaatttagctaagccacctgctgctctgagacaggctcaggtagggtgaacgtgggctgatactgactgtgcttggggaaagcagggggtacgcggggacgagcttgagtgccaggtgccctgtctgggctgcctaggaaggaagagacctcaggatcacgctgttggcatcttgcatttgaggcttggcctgagccgagggctcttgaggtcagtgtggatttcctcttacaccttggcctttcgaggattctgtgatgtctgcagattgggcctggctggatggaggcaggaggaggccagaagtcctggaatcgggggcttgactcctctcggggctactgaagaaccagcagtgatggggaatcactgtgagtgtctggggcaagctgttgagtg

SEQ ID NO: 374609 - DNA, 549 bp, Homo Sapiens
caccagatgctcccaccaaggacgaaaaagtgggccacatgggttattgctcaaggtctatgctgagagcaccatgaatcactaagacatctggcccgagaactttaatcagctgctctacctgaaatgcaatattctgttttcctcccaaactgggtggtcacctgggtgtcggggaggaaagcaaggaaggcttgcccttgtccgtgtgtctgttctgtctctggcacggcaggctgctgagttactggactgtgtccttcaatcactccactttgctttctgtccacttcaccagcccagagcagagccccgcagaagggactgctgaggccaggcagagcggtgatcaagttccaccttccaggaagagacagcacgcccggtgccccatggtggctgcgcatgacagcctggctgcagactactgtgtgcttccatctgtcaccttccaatgcaatgtgacagcagccctccggcgatccatctgcttcactggagctccatcccgactcccccaccccattctgtcggtgggagcatctggtg

SEQ ID NO: 374610 - DNA, 602 bp, Homo Sapiens
caccagatgctcccacccatgggaaaacagtcacatagtctcgtgccactcccccattccctgtgctatttaagttctaaaatgctattgtgggtttcttctgtgctagactcatattgatttatgctcctagctaggaaagaaatgtgtcctcaaagtctacaggaggaaacttctcgtctctggagaatttttgaccatgagttggctttgtaactctaccctcaagagggccttttaaacagctggtggttcttaaagaaatgaaatgcatgatgtgttactgctttgagctccgctgtggcagagcctggagctgagctcttggtgactggtcactgcacaattccatgaaagttcagataatataattgggtggtaaatgacacactaaatgaatctctttgggtgcagttgtttgcatcctaaactccagaatatgcagaaagagatattctgtgatagatatatctgccagttgggtaagcaaacaaaagtagatttgtcttcggcatgtgcaccaatggcaaactgcattcctacctagctttgaaataaattattggaagttctctggtgccttaaggtgggagcatctggtg

SEQ ID NO: 374611 - DNA, 597 bp, Homo Sapiens
ggatatggcttacaccagatgctcccaccacaattcatacagtaactgcaaatttatgatcctcctttttcctcctaccctagggaaaaagtctatcttttggtattctttctgtgcctctcatttagcttataaaaacaatacacaagggcaactttcatgaggctctggctccaaatgccacctgccaagtgctcgaagacaatactaagaggaaaaagccagtctcatttatacaggtcagagaaggctttaatgagtgataacacaggaaaggaaataaaagcttataagttagcagcattcaaggagatgaagtagcttagggagagggagattaacccaaaatgagtttgtaacctactgtttggcttccaaatgacacttgggatgcttttatgatctcagctataggaataccacaatggggtcacacctccctggatcacaaaagctacacagtagggctaacacacagacccacccacttaaatgttcatcagagaattagctataacctcaaaggaaagctgaatgtccaaagggtaccaggttacctcatggcaccaatgtgggagcatctggtgtagccgattc

SEQ ID NO: 374612 - DNA, 379 bp, Homo Sapiens
ttaacagaaatgatgtgtgatctattttataaagaatatcctacaagttagacattcatataaaagatgttgccttttaattcatcactgttagggtggcagagtgtgcacgcctttattctagaatatggcagtattcaaagctttgctggaaattctcttttgtaattcttactctgcagcattttaaagacttttcatagtgtcaaaccttaacattttgagaaacaaaataagaaacaacaaaccttaacatttgagaaagaatttctgtgaacaatcaaatacttttagatctaaacctgctgcataaaatagaaaagcataatttaaaaccatgtattaattagaaatatatatttagtatgttctgtaactg

SEQ ID NO: 374613 - DNA, 344 bp, Homo Sapiens
aggatgaggaaggaggagggaagggaggaggtggaaggttaacactttaccatgattagggagacctcacctccatcactaatccctgggaagagtatgaaaatggggagaagaaagggtaagaaatcaaacctcagcggttgaacaaagggtcaccgagctatactagtcaagaagcagcttctatgtaactgaccctgaggggataaaaacagggaagattccaccatctcccctgtgacctcagcacctaagcaggcactcgactataggctttccttctccatgattccccaactctatacatcttacttccaaaccccattctaagtgcctggcttccc

SEQ ID NO: 374614 - DNA, 360 bp, Homo Sapiens
taaagtaaacaatagttatttgggtttggtatggttattagggaaagaagatgtatgaaagacctttcgaaacagtaaaatgctatgaaaatacagtatttcatttgcaagtatttgactaatcaaatgctaaaagttaaccctaaaaaatgcatcataaggggagacaggaaagtgtaacatgaaatgattagcaatattgactagaaatgactattctattgtgggtcattttgacatgaagttacaaaatggaaaaagaaaatataatagaaagtgctaaatgaatatgcacaagaccttgatttgtgaacaaggcattaaaggctgtagtgtggacagaaaatgtatcgcttgaag

SEQ ID NO: 374615 - DNA, 267 bp, Homo Sapiens
  misc_feature (58)..(89): n is a, c, g, or t
gctttgtttttaccccttcactttctcccctggttttaagatccggacaccattttcnnnnnnnnnnnnnnnnnnnnnnnnnnnnnnnnctaaggcttaatgaagctgactaatttgctcatatctgcaagtccaaaaaataacaaaacattctgagactccagtcttaaactcaactaactgcattaataattttaaaaaaactatctaactgcataaatgataataaaaaatcttattgagaaaaaattatgcctgaagattgaa

SEQ ID NO: 374616 - DNA, 382 bp, Homo Sapiens
agaatggcagcatgcatgccacatccctgggcatccctagggcatagggtatgaggtagagaatggcagcagctggtaccttagaatccagttttgagtgtgataagactgaagtacttctaggctagggatgtccggttgataagtaaataaagagctcagaagataggtcagtgatgaagatatagatttttggagttatcagtatacagatcagaagtagacaaactatttctgtaatggtccagctagtattttagacttcacaggccatagagtttctgtcatatctattcagctttgctgtggcagtgttaaagcagccatagacaatattggaatgaatgggtatagctgtgtccaataaaacttcattacgact

SEQ ID NO: 374617 - DNA, 315 bp, Homo Sapiens
ggtgtctttggcgatgttgagcctccctacaggagcatggcatagagcctagccctcatgctctggaagttagttctggtaaaagctttgcacgatggcgctgtggatgccctgtgctacttaacagtggttcctccttatagaacttggaagacacgtgccaatagggaggaaggttctctgctaagatgcattcatttgtgaacacctctcacagtgtatcactcaaggatataacctgtgaagggaatttcccatttcagttttgggggaaacctggtgagttgcttctcagatgtctaggtcacacactga

SEQ ID NO: 374618 - DNA, 225 bp, Homo Sapiens
  misc_feature (24)..(24): n is a, c, g, or t
  misc_feature (184)..(184): n is a, c, g, or t
ccataactactatcagcctcctcnatctcctacagaagtgttgtagtgtcagcctccttatgggagatagagcctccagaataattctcctcaaacacttgttgaatatcctaaaaacaagggctcccatcccgcccttcctgtggtatatagctgcattacacagaaaagttgagaacctctnaatcttactgttcgaacatccttgcctggcacttcactccc

SEQ ID NO: 374619 - DNA, 349 bp, Homo Sapiens
  misc_feature (30)..(30): n is a, c, g, or t
tgtcactcccataactactagttcaagccnctcctcatcctaccagaagtgtgagtgtcagcctccttatgggagatagagcctccagaataattctcctcaaacacttgttgaatatcctaaaaacaagggctcccatccccccttcctgtgtatatgctgcatacacagaaaagttgagaacctctaatcttactgttcgaacatccttgcctggcacttcactcccgtaacctctcagcttacaagccaccccacactccatccacccttctagacatcccacatgcttaccagcctccttactactcctgaaaacactgtattttcacatctctctgccttcagc

SEQ ID NO: 374620 - DNA, 281 bp, Homo Sapiens
aaatggaaaactcagactcgcaatggaaatgtatacacaccaaaatatagagccccagaatataagaaaatatactgacagaattggagtgagaaagacagttctacaataatacttagggacttcaataacttactttcagtaatgggtagagtcaaagaagaaatgaaaacagaaacttaaaaatatcttcagacaaatgacagtgggaacacaacataccaaaagcaaaacatgcagcaaaagcagttctaagagggaagtatacagcaataaatgca

SEQ ID NO: 374621 - DNA, 372 bp, Homo Sapiens
gagtctcgaatacctgaccccagattgatcagcacctcagctccaaagtgctaggactacaggcatgagccaccgtgcctggcctcattatttgcatttctgattattagtgatcatgagaatgtttttttgtttggctacttctgtattttcttttaagaaatgtatgttcctgtcctttgctaattcaattggattattcgttttttgcttgttgattggtttaagttccttatggattctggacataggacctttgccagatgaatagtttgcaaatattttttctcccattctatatgttgtctgtttactctgttgataatttcttttgctatgcagaagctctttagtttaccactgtgacctctt

SEQ ID NO: 374622 - DNA, 342 bp, Homo Sapiens
acgtggcctgcttttaaaaagctcttaatctcatggggtagacagaccaacctatgaaaagatagatataggtataatgcaggaggtgagtggcgggcaagacagcattactgcttgagctctgccttctgtcagatcagtggtggcactagtatcatagaagagtcaagtgtattgtgaactgcgcatgccagggatctaggttttatgctccttatgagaatctaatgcctgatgaaactacccccaaccatgcccatggaaaaattgtcttccacgaaaccagcccttgagggccaaaaaggttgggggctggtggataatgatcatgatagtgttata

SEQ ID NO: 374623 - DNA, 406 bp, Homo Sapiens
atatcacgacatctatccacccagtcatccatatcaccaggccccacctccaacattggcggacttgcatttcaacatgagatttggaggggacaaatatccaaattatactacatgttaaagttgaaaagcattttcctagcccctggctttgcaagttcccttcttgttcagcagaaaccagggcctgggggagaggggaatcgccctgctcatgttggcgtcagcttctcacagagtcatctcttctaactggccttgcatagcctggattcccaagggcctcccaggaagttccagcaaggtgtgttgaaaaactctagaactgttctgttcaatgcagcaactactagttgcatgcgactatttaaataaaattctttagttcagatatactagtcacatt

SEQ ID NO: 374624 - DNA, 424 bp, Homo Sapiens
tgtgaagcagtcattattggtgctgtctccaggatgaagatcggctcaccatcacaagagtagaagacttgagcgatgctgccatcatctccaccagcacagcagaatgtatgccaatttccgccagcattgacagacatgaagagaatcagctgactgcagacaacccagaagggaacggtgacctgtcagccacagaagtgagcaagcacaaggtccccatgcccagcctaattgctgagaataactgtcggtgtcctgggccagtcaggggaggcaaagaaccgggtcccgtgttggcagtgagcaccgaggaggggcacaacgggccatcagtccacaagccctctgcagggcaaggccatccaagtgctgtttgtgcggaaaaagaagagaagcatggcaaggagtgccccgaaatagg

SEQ ID NO: 374625 - DNA, 489 bp, Homo Sapiens
cgttgcagcgtctcaaactctctgggctacatcctcccacgttggcctcccataagtgctgggattacaggcacgagccaccattatctttaaaaatgtaatagaatggaaaatggcaaagcgcgctgcttttcatagaagagactatcgcattggggttcttctgttgcccctgcctgtgctgcacgtcctgcttcacagtgtaaagcgcaactcttgctgtgccttattgtaacaggtatagggtggatgctgccatcatgaagagagaggagagctctttgcttataaaattccgtagagtggagaacagggtgtgccggcttaggagagggaagaggtacaggcccgctctgcccgagctgcagatgggacacacatttcccgactcagaggggagtcgtgtctttctccagggtcaccgagcagcaagcgcatccactgtgtgttctattttctgagcttgtgacatgacgtgagtaccgagct

SEQ ID NO: 374626 - DNA, 375 bp, Homo Sapiens
ccggccctcatgccatgtcacaagttggtcagttacaagctatatgggtcacattctcctccctgagaccctctaagggttggttccctctgaggtcaagctcgatgtcacctcctcagaaaggccacccagggaactttcttcatctgacttccctgtctttgtgcagcacttctcactgaagttatgctgcaggattactggccgctgtgctaacagctggtccccgcgctgtggtgtaaacttcccacaaatgggaactttgtttgggtgccactgtatctccactaacggcatgcagcgggcatgctagatacttactagttgaagaaaatgaatggaaactatagaaagattcagtcagttagtggcagg

SEQ ID NO: 374627 - DNA, 592 bp, Homo Sapiens
  misc_feature (141)..(392): n is a, c, g, or t
  misc_feature (401)..(421): n is a, c, g, or t
ggaagtcggggaaatctttaaaaggacaaaccaatatagctgtaggctaaaaccagagagcagaaagatgggtaggagtgttaaactgagagcaaagggtcattttaacacttcagtgggccaggtgcggtggctcacacnnnnnnnnnnnnnnnnnnnnnnnnnnnnnnnnnnnnnnnnnnnnnnnnnnnnnnnnnnnnnnnnnnnnnnnnnnnnnnnnnnnnnnnnnnnnnnnnnnnnnnnnnnnnnnnnnnnnnnnnnnnnnnnnnnnnnnnnnnnnnnnnnnnnnnnnnnnnnnnnnnnnnnnnnnnnnnnnnnnnnnnnnnnnnnnnnnnnnnnnnnnnnnnnnnnnnnnnnnnnnnnnnnnnnnnnnnnnnnnnnnnnnnnnnnnntccagcttnnnnnnnnnnnnnnnnnnnnncactccagtggggacactgagcccttggaccagcagaaaggtaggcaagaggaaagcagagcctgagatttttaagtaatgccagggatcctgaaacagctagtcaccccagagacaggcactgtcactcagtggaagctgcactctcaagaaaaagcatccgtgtcccgg

SEQ ID NO: 374628 - DNA, 765 bp, Homo Sapiens
tcccatgtacacaacaataatccaacaacccgtcacaccaacaataggtaaaagggaagaatccagtcatttagacacaaaaggactcaaaaccttacctcccacctgtcacttcttggtatttacttgagaatgggtggaagtaaaaggaagaagtaaacacaaaagaagctataggttctaagcaaaggtgaatccaacctcagaaggcagagaaaagaagccccaaaacaacagccacatgacccagcaagagggcagccagactggagcaagatgatgaagagaaaccctaaagggaatgcctgaccgatggagaggcagggaaatagatacagctataatagaggaaacaaggggaaaaagatggctagaagctccagaaaaagaaagaaacatgtacaagaaagttgatggagtcctggtgcctccctggccttcagtgaacaatatctacatcatcccaataatggaaaacactatttgttattcttcaaattttagagttaatctctagaaaaagcttcaaaaagggcttggtatggttacaaatagaatacaaatgttatcggccttgtcattttaaaagtcaacgcatggatgacagaagcgataggctggagggggaactgcagagtaggaataattttaatatccttatcttatacagtgcaggattaagagatactgttgatatttggtagaacaagaaatcgattacttaggtaatcatagacagactaaaaatagtaatacccctcaatt

SEQ ID NO: 374629 - DNA, 429 bp, Homo Sapiens
gaaatttaggatgggctatagaggaaatgggagagagttttatgtatctcctccaaaaccagtaaaaaggaaaacagttgagctgagctgcaaatgcagagaaatctgaggtggaaggagcaatgttggaagggcttgtcagtcttagtctcagagatgagcaatactaattaagtcttcacttatcacttacttttaattgatgaagtgttttgctgccattctcttaacttggtctcataacattacatgaggacatttaatgggatgaggcactgagtctcaggttaagcaacttgttcaaggttacatgccttggagaggtcatctcctgggaggaggagagtggaaggcatattggcatcttgaagaagaaagatatttcagacagttcatgggagatgccttgtgacatggcatgaggtccga

SEQ ID NO: 374630 - DNA, 354 bp, Homo Sapiens
gcacaaagggtgtgtctgcagatgagggtgtgatgaagtctgaattctgcttttgctaggagggcatgttggtctggtgtctaggctgctggcacacggtcagtcctggagttagggccaaacagctgtccctcatgctgtgaattgctccaaagcactgcggcctgcaaaagcaaaaatgatcccaagatgcccttagggatgttctttctgtgacccagcaatgcccctctgggaatttatctgaagggaggaggcaaataaatgcacagtaatagacatagagcagtactcatcaacaacataattagatgagaaaagcaagcttgtgacatgggcatgaggggccgagct

SEQ ID NO: 374631 - DNA, 340 bp, Homo Sapiens
ccggactcacgccatgtcacagggaaacaggcatcaccaaccattccagaaagctgctttgaacaagccttatataagaaagagagaaagcacttttcccaattcatttcagaattctttccaattgcagtgcttgctacctttgtaccataacccaaacacatcatgtggtgatgactgggaaaataggaacatgagaatcaagagctgtgagccaggcacgttatccctgcccttaactggagaaattttttcagctcaagagttcctgtttcgggtctcagtaaaggagacagattaggaaaaatcagagcagaagaagaattaggagagcattgtg

SEQ ID NO: 374632 - DNA, 453 bp, Homo Sapiens
agaatctttctaccatagaggcatgtgcacacaaatgttcattccagcactgtacacaatagcaaagacatggaatcaacctagatgcccatcagtggtagactggataaagagaatgtagtaaatattcaccatagaatactatgtagccataaaaaagaatgagatcatatcctttgcaggaacatggatagagctagaggccattattcttagcaaactaaggcaggaagagaaaaccaaataccatatgttctcatttataagagggagccaaatgatgagaacacattgatacaaagaaggaaacaacagactctggaacctacttgaaggtaaagtgtaggatgagggagaggagcagaaaaaataactattgggtattaggcttagcacttgggtgatgaaataatctgtacaataaatcccttgtgacatggagtgaggccgagc

SEQ ID NO: 374633 - DNA, 621 bp, Homo Sapiens
  misc_feature (44)..(139): n is a, c, g, or t
gtgcacaccatcacaccctggctaatattttaattttccatacnnnnnnnnnnnnnnnnnnnnnnnnnnnnnnnnnnnnnnnnnnnnnnnnnnnnnnnnnnnnnnnnnnnnnnnnnnnnnnnnnnnnnnnnnnnnnnnntgacacttgcgcccagctatgttaccattttcttgagcacgaaacttgataagatgcaatgcgctttaggtgggtcgtggcaaacatgaaaaggcaagcttccattttagaatccatggctcttcttgaagacttctctaaagtgcatgatccctaacaagcgcggctccgtcctgtgtctgctctccatcctctgtaccgccgccccttgccttatgtgccttacatgacggccttcttgttcttgggtcgttgtgcgaaaaggatctatgtggtttcccccctctccggctgctctttgatcagtacgccaagtgccggtgcttgccagacttcccagcccttaggaactgcatttcctgatgctgctgctttcactcctcctgctcgaaaatggagacgaataacacaactcgcaggataaaaacagaattgggagttttcagactgcaaacctttctgaagagaaagttctaatattt

SEQ ID NO: 374634 - DNA, 265 bp, Homo Sapiens
tagctcggtacctcacgcccatgtcacaacacggcaagaatagtggtttgtctgcatgccaagacggcagaggagaagcagaagtggctggatgccatcatccgcgagcgggagcagcgcgagagcctgaagctgggcatggagcgtgatgcctacgtcatgattgcggagaagggggagaagctgtcccacatgatgatgaacaagaaggtaagcctcatcaaggaccgccggagaaagctgagcactgtccccaagctctgcg

SEQ ID NO: 374635 - DNA, 432 bp, Homo Sapiens
tcggtcctcatgccatgtccacaatattcagtggtttctaagtttttcgaaagtctgtcaatgtaccctgttatcatttcacttattcccaaatgccgtcatccccaacttcaatacgcacatttccacatctgttttatgtactatgatgtgcacttttaagctattttactctccaagctcctctcctcctgccagttcacatttttttaggccttgctcaaactccacctcttcttgaagctttatcatctctaaagagcactcgtcttctgtcggcactagcggatgcataacaagcaccgcactactttcaatttatgctgactggtatcgctgcgtgggatttatgtgtgaatttcatctccctaactggaaggtacgattttgatggaagggactgtgctttacaaatctcttacgctctccact

SEQ ID NO: 374636 - DNA, 209 bp, Homo Sapiens
gacgtctagaggaatccccaggcatactctggacctttctagccatgcgaggatgatctccctttatcagaactgcagagaccctccacaatatggagtggtctcccactcatcagaacctcggggaccctccacaatgcaggatgatctcccctcatcagaacacagggaccctcgatcatgcagaatcccttatcagacggaccggc

SEQ ID NO: 374637 - DNA, 447 bp, Homo Sapiens
  misc_feature (88)..(114): n is a, c, g, or t
  misc_feature (424)..(424): n is a, c, g, or t
tagataagaatttattattgtgttaaataataacataagaaaatatttaaagtactatatatatggttagaactatacgacaataggnnnnnnnnnnnnnnnnnnnnnnnnnnnacaaaccttattttaaaacactgaaaaaagtgaataaaaataccatatatcttctggtccgaagtaactgtaaaacataaagaacaaaatcccaaaaaaggtaacaggtaaagtagccacaagagatctgggacaatagacaggattaaattatgtagatatgcaagggaatcaatagaaaagaaatgtaagcctgttatgaaattcaaacataaatagtccttctctgaaagtgcagagaatatccaattttggtctttctggacaacttctttagaaatccccattaatggttactttcagaaattcnatgccagactggaccttatatac

SEQ ID NO: 374638 - DNA, 198 bp, Homo Sapiens
  misc_feature (68)..(68): n is a, c, g, or t
accttcgtggcatacgctggaccttactattcgctcctagatgagattaaacacgaaaagatccttcnttggctgtacaactaggatataggttcgactgtgggcataaaggaaacatccaaaggaaggagctccccactacctaggtcacagaataccaaaaccacccatcaagttctggttcagtgaatgcgactt

SEQ ID NO: 374639 - DNA, 226 bp, Homo Sapiens
catacctggaccttctccttatctatatctaggctatctccatttccttccagtgtcagatttaccaaaccattgtttttctttcccattctcttctatctcttttctggattctgttctgattactctacaataaatgtaagaaagacgatcggagtggtgacttatgggttggtaaccaggaaactgagagccacatccagaagtccagtatgccgggccggct

SEQ ID NO: 374640 - DNA, 130 bp, Homo Sapiens
  misc_feature (56)..(56): n is a, c, g, or t
ttcttagtattatgtacggtgatgactcagactatactttcgaggtaagaataacnatttagtcaaatactcttcaaaaataaaaatattttccagagcagttacttcagatcagatcaagccaagtttc

SEQ ID NO: 374641 - DNA, 185 bp, Homo Sapiens
ccccacatgtggtaggtccacaaaagtatggcgaagtcatcgtggtcacacagaagcaacaaacaacgaactgaacctacttggcgggatcaacatctctgcggatgattacaacccagagcgcgtcatctttgatatcgacaacgagtcgtatgtaacaaagtcaggtgactatttcacagaag

SEQ ID NO: 374642 - DNA, 288 bp, Homo Sapiens
cggaccggcatactggacttctacatctagatgtagaaggtacacaagtagtaggataactcacaggatggatccactggaggttaagacatgtggtaagacagtgtaataggaagctgctcagttggagaaagtaaggaagcaaacattgttaccgtgggggcaatggagaggacagtgaggagccctttatcctgataagggtggctttgaggtaaaggaaggaaagaggatgccttgagaggccccactgtattagagaggacctagaagtccagtatgccggcc

SEQ ID NO: 374643 - DNA, 594 bp, Homo Sapiens
gtttacattcataattttaatgtggatgatcaggattaaatcaagatatatatctggaacctcttataaatggagcacttagaaatttgttgttctgcacttaacctagagagagaaaaaatgctttttctttgtgaaaaatctgaattcctgtcctgaccttctgtgatgtggaaaccctaggctctgagacacactctctggtgtctgagacagaaccaaagcaataacgttgtgatgcccacaggcctggagccagctagcgaccttgtgccgcccagctgtccatggcccgtgcagagcagaggacagtgagtgtctgcactgagaaccttaaaccacagttgaacatacccacacctgtttgtcttaagctatagtgtaaaaacaaagtttgggacctgaaaatttaactgaaaaagatttccttgttttagtaataggtgagataaagtacttagatttataaggcagcttcccctgtagtgataaattacaagcagacaatcttatatcgtaatgtgatgaagtgatgatgtcttaactctacttagagagtgtatgtctgtctaacagaacaaaaagatgctctga

SEQ ID NO: 374644 - DNA, 531 bp, Homo Sapiens
catacctggaccttctcctccagagacctcagtgactcttggtactctccctttcccaggttctcttcctcttccagattcctttgacgttccttgtctacctcctctggagatctcaaattctccaggtaccaagctcccagagatcacaatgattcctgattctcctcttccaggagtctgaatgtctcatgggttaacttccacagactccaggggttcgtgaatttcctgttcaaaaggattcatggccacctgatttatttcttctggagtccaggggggtgcttgcagtttctggagatttcagtgtaaccaggttctctggtcccgcagacttcagggattctaggatctctgtttctaaagatttgactgcctctacgctctctgctttgagtgacttgaagaactcttgattctcattggcaagaggtctagctatctccgggtcaagagacttcagtggttctagatccagtttttctgggggtcttagggtcatctgatcctgttcccctagagagagtc

SEQ ID NO: 374645 - DNA, 763 bp, Homo Sapiens
  misc_feature (66)..(66): n is a, c, g, or t
ctcattagcacacgaaaatgatactggttgagttcgaaacattgtaatttgtatttatagaaaccntaagtaagatagttcccaagattaaatgctattttaaaatactttttggaacaaaaatacctcattttatcttatatcattaggagtaaacatgatccatataagtgatttttaaaattcataccttaaagcaatgatagtttttaaaaattaaaccattttttaatagaggtgatcttaaaataccttcatttattgccttgtaaaattctacctcctggtcctgacccccaagctttctgtgaaagatccagggtcacactatgaatgtcaaatattataatccattataacaaagtattaacctcagcaatttcttaagtgtaacaaatgtttatcttacggttgctgcttctgtaggcatagatatttcctgattacttcatattattctaacttctagaagtcctgtccctctggtgcttctcacctatttttaaaaaaatcagtacatgtaattttctacattattctagctcaaaagtgctccacactttttctgcagcttaaaataagtttttctttctttccttttgggattaggggaaaggaagacggctgggcttgataacacactcatttgtaggtttgcttcagaggtgctggatatttcctgatgggtaagtttgctaaagaaatacataccaagaggtcgccatgttatcatactgaggacagcaggaaactcttccaggtg

SEQ ID NO: 374646 - DNA, 186 bp, Homo Sapiens
caaccgtgcagtaccatccgctcagcaagcaatgatgcagaggccactcaggaaggcttgccgaaaggcctcggggctgaaagggtcccatggtccacagtcacggcgaccgggcagtgacaaagaaaagccttccagaacaatccattttttggtataaaagccctcctccagagtccaagaggt

SEQ ID NO: 374647 - DNA, 477 bp, Homo Sapiens
catacctggaccttctatttgtcttttgaccttaaacaagttcctttactcccatggattccaggtttcttgtctgtagcaggtgtatgacaaccaccttatgtaaatctgggaaggataatgtatcataaagacatagcaagtgggcttggcacataatatgcatgcaatagcggcaaacctacacccccttagatactgtaactacgcctgtggttacacaccaaatttttaagttttaaagtgctctcatgtatattatctaatttgattctaggaagtaaagaagggagaaagggagggaggaagaaaggaatggatagataaggtcaacaactattatcccacttaacaatttaacagatgaggaaaagtgacacaaaaattggtattacacccaaggtcacatagtaatgacagagattcggattttagaaataatttggtccaatctgttcttttaacaaatgaatagac

SEQ ID NO: 374648 - DNA, 303 bp, Homo Sapiens
tcatagtaattgttctcaaaggttcaggcactttgcaacaggctattgccaatctagaaaaactgacgtgaaagaaataattaggtcatgtaaatattaaatacaaatcatgtgataacattcaaagacatgagatgtcttaaatgaataacatattttcattctgacaagtgcacactagaatcaccttgcagagaagtgcagttgggcagtaccactgtactgtaccactgtaccacttgctgacagtctagagcaggggagacaaactcccaagccagagagtaaacattttaggctttg

SEQ ID NO: 374649 - DNA, 267 bp, Homo Sapiens
tgagcacctgtgcccagcctcacagctgcatcttaaccttacctttgcctctgcctctcaagctggtacctcctaatttacatcctaagagtggaaccatgtgacaaggactggagtgccattggctgtggactgttcaggcagtggaagtacaagaccactcttgtattcaggggcaaccaaaggagagaattacgtacttgttgagtacaaactgcaccaagccctggagacccattaccaccgttaaccctcaatacagctctg

SEQ ID NO: 374650 - DNA, 622 bp, Homo Sapiens
cgagcgcagtgtctgggattcggcttatggcaatccacgcatggacactgagccaacttctcagacatggaagcagcctccttgactagaactagttgtcctgatgatatacagactctaaggaagataaaagtcccttctattctaccacaccaagccctgtcctgggcctgctgggccacaccctgcaacccagtgctttccctcagatttattttgttttagctccacagctgccccctgaattcattcagctactgtttcctttaccaaaacttgctccaggcagcagatctcaaagatcagcttacttactactccactgttatttactctaatgtggattaaagtcagcactgtttaacccagaggtatatacatttggagattctggtttggtgaggaaattaccagagaactattaaagacttggatgctcttctcggctttgctataaagtaagttggacaagttgtttggcttctttgagcctctgttttctccattctaaaattctaaaatgggagtggtcgaattagatcagtggctatcgaactttctgctcctagtagtgagaaaatacctttactccactccctggtatgtacacgcattcttgtgt

SEQ ID NO: 374651 - DNA, 489 bp, Homo Sapiens
gcaatccacgcatgggggagagtcagggggaagcatttatacatctgccctttagaacaatcactgcagctgctgtgcagggcacttggagcagcaagagagctagaggcagggaggagcctggggccacagcccagaaaagaagtgataaaaaccgaaccagaggcagcacgcatagagaggagagaacaaattccagagcaaacctagtgactggattggtttggaggcggtaggaatcaaggatgactctcactccgaggtttctggctgggatggagttaggggaggggtgcccttcgctgagatggggaatatggggagaggagcaagtttgggatcccctaacacgatcgcagcatcccccatgatgtaagtgtctgtgtccctgactgtcaccccaacacatgcacacctcgtggcatcacgtttaggactcacacctcatctctccccatccttgacacagcaccatgcgtggattgccag

SEQ ID NO: 374652 - DNA, 401 bp, Homo Sapiens
catctgagcctctggggtcgaggtctgagtcctggagcagtgagttatccatattccttaccatccgtgcaatcaactcccccatgttcagaccagaaggagaggttccataggtcatgttcgtgccatcatcaatggagcagcccatgagggagcctctctcgatggctttcttcatgatcttgtacatgtcactaggagcatccctgatctcaaaaaactctgccacccctcctgtgaagtcctccatggcctctgtggtgttcccacctttcagagcttcgtaggaaccatggagcttagcataagccttctccagcagagcactccagaactcattgcggtggttggacttggtgaaaaccagttgattgttgtacgttggccgactgtcatctcag

SEQ ID NO: 374653 - DNA, 460 bp, Homo Sapiens
tggacatgatctgggaatgcttctcagtgtgtgcagtcaagagagcgagtggagctaaatcatcaaagcttccatattgatggtgtccaaaatgacagttgtttttcctctttctttagaaagatagaattttcagtgtcttcctatgagaatgttggaaagaaattatccccctctttcttaggtgcagattttgtctgacacttcatgtgtgtttaaagtatttttgatgtcccaaaatagtaatgaggcgattctttaagatggttccatggggtggagctgtagcagtgaaggtgaggaagagcaaatgagagatcagttatgacagaacctggaaatgctcactcacagtattcaggaaccagcagccctacctgcctgaaaccgaaccgagaacaggaacagcccctgtggaagcagccgactgtcatctcagcggggatcctaatagagtcga

SEQ ID NO: 374654 - DNA, 726 bp, Homo Sapiens
  misc_feature (668)..(668): n is a, c, g, or t
gcacccagggcacttctggagctggaaaaatttgaacatcaagggagtcggacaaggagccgggctctggagaggcgacggcggcggcagaaggtggatcatgggtagaaacgttgagaatcttgttcaacaggagcttcagtcaaaaagggctcggagctcagggattatgtctcaggtgggccgagaagaagaacattatcaggagaaagcagaccgtgaaaatatgttcctgacaccttccacagaccacagccctttcttgaaaggaaaccaaaatagcttacaacacaaggattcaggctcttcagctgcttgtccttctttaatgcctttgctacaactctcctactctgatgagcaacagttgtgacagtggcaccaaaggtcatttgtggttgtttttgtttgtttgtttcttaaatcctactatctcctggcctggacctcagaaggagctttttgcctatctatgaattttttcactgccaatttttggatatcctctctcctagagttgactgttaaaaggttggttcgtaaagtccacaccccgatgctcagaagtgtcttgccagcaacattcctgctagcatacaggagtgatttcctaaaccagtttcattctagtctgaatagggacaaacaaatcttgaggaagcccaagngcgtacctttatttttgcccccaccaccctctttctgtacttcaatttttgtttgttt

SEQ ID NO: 374655 - DNA, 436 bp, Homo Sapiens
accgttttcaagtgaccaggatgaagacactccagtttttcttccttttctgttgctggaaagcaatctgctgcaatagctgtgagctgaccaacatcaccattgcaatagagaaagaagaatgtcgtttctgcataagcatcaacaccacttggtgtgctggctactgctacaccagggatctggtgtataaggacccagccaggcccaagatccagaaaacatgtaccttcaaggaactggtatatgaaacagtgagagtgcccggctgtgctcaccatgcagattcccttgtatacatacccagtggccacccagtgtcactgtggcaagtgtgacagcgacagcactgattgtacctgtgcgacggcctggggcccaaactactgatcctttggtgaaatgaaagaataaagattcagtggacatttcagcc

SEQ ID NO: 374656 - DNA, 428 bp, Homo Sapiens
agccccccgcattcaggcgcacttctggtgcatttgaaacatccgatggggaaggtgcatgttctaggtgcttctgcagttcaggaggattggcaatttccaattctgccttagaagaagcctttgtaggtaagcactccttaggaaggccagtcaatgcttgtggaacagactccaatctgttttcctgatcagtgtttgtcttaggctgagtacagctgccttttggctcagtcagaattttcaagtctccagttccaatctgagaggactttgagagcaaccctgctttgcagacatctggttttgttctcagagcttcagactttgtatttagacaggaagaaatttcctctggtaaactttgtttatgacatccttgaggaatttttgctccaaggttaggtggagagaagtgcgcctgggtg

SEQ ID NO: 374657 - DNA, 216 bp, Homo Sapiens
gagcggcgacaatcacttcgggaagggagaaagccagtaaaacacgtacattaaccagcaagttactgctatgggaaacgtgggatgagttgttctgggaagcctttgagaaactctatgaaccatacctgagaattgtcctgttgaggggtgaggaagctagggtatttgtcctccatcccccaccccacaatgattgagggtggctttgagcat

SEQ ID NO: 374658 - DNA, 610 bp, Homo Sapiens
  misc_feature (508)..(508): n is a, c, g, or t
  misc_feature (575)..(575): n is a, c, g, or t
gagagtgtaagagtgctggacaggaacctccaccctcatgtcacatttcttcaatgtgacccttctggcccctctcctcctgacagcggaacaatgactgccccgataggtgaggctggaggaagaatcagtcctgtccttggcaagctcttcactatgacagtaaaggctctctgcctgctgccaaggcctgtgactttctaacctggcctcacgctgggtaagcttaaggtagaggtgcaggattagcaagcccacctggctaccaggccgacagctacatcctccaactgaccctgatcaatgaagagggattcatgtgtctgtctcagttggttccaaatgaaaccagggagcaggggagttaggaatcgaacaccagtcatgccttactggcttcttcttgcttcgaggagccaattaccctgtggccctccactcattctgggttttacagggaactgttcatagtgtttcagttttggggttggtgataagcccattgggnttgtccctttgggggattgaggttaggggtgcaagggacacctgatgagtaggtaagttggagttcntggtatttcctgaaagttgttatttatttgccaaa

SEQ ID NO: 374659 - DNA, 606 bp, Homo Sapiens
gtaccagttcgaggagactctcttctataccctcactagcctcactttctggccttaaggtaatgaggtatagaagagagaacacaatcactgcttgaggttatagaaaaattttgttctcagaggaaaagtaggtttcagctaagataaggaagtaaaggaaatgttctgagcacaatgaacagtagaaagcagcttgaggaagtgaggagaggcataaagattgggtctgaatgggagatgaactggaaaatttggagatgagtctgggtgaaaacaaatatccagtaaggtccactgctaacagtggtgactgaagcaagcaagaataagagacacaggtgggacagtcctcatggatctgagatgggttctttataggactgtggctccctggcgcctagctcagggtgatgaaactgcctagactttagaatccctagagaagggactagagaagtccctagagaaggttcagctagagctgaaccaaagcagcattacttcatctgttttatacagggacttgctcaaaacgttttgtttgaagaaagtggcacgtggctttacaaaattcaaaatactgttacaggtcatcaggcataa

SEQ ID NO: 374660 - DNA, 598 bp, Homo Sapiens
  misc_feature (375)..(403): n is a, c, g, or t
cccagttcgacggagactctcaacatcatcaccaccaatgaggcagcctgggacaagagccttgttcaccagccgacgggctttgcaggtggtcagtaaacaacgccgtgcttcgcacaccgcgttgtgggacatgactagctgccagcgctttaaagcccatccttatcagacctccgagtaaaaatgttttccttccccaggtaagcccttggaaacactcggtaataaagcctattaaacaaccattctttctgggctacactcaataagccatggagtcatcaaagatccaagaccctcctcgcctgggacaaaacgagaggcaaagaaacttctaggataaagaagccacagccaggcgcggtggctcannnnnnnnnnnnnnnnnnnnnnnnnnnnnacccgaatattattaatagcaggactgagattgagatctgctttggaccaagcccgtacatttttagacccttcttggctacagttagtattgcaatgccactagagggcagatcagcccacacaggtgcctgggaaaaaatcacataaatcaacactctgctaaagcgaagcaaatctctccagctagtcccga

SEQ ID NO: 374661 - DNA, 517 bp, Homo Sapiens
agttcgacggagactctccaggcacccgtggcattgtggtgaaattaacttgccagtccttgcatggagagtctcctcaatgttgtacccttgaacaggggtggggtcagttttagggcagtttgggcacaaagcatgcattgatagatcacattttgaatgaccccattgcatgtcggggtcaatcaagaactcacatgccattgaagggttgcatcttttctgtaatggatgctttgatgaaactagctcactatatctttaaggagggcactgggaaccaatacgataccttccagattacatttccagcctggatgggccagggctgggatgtgaatccccattccttggctcactttaaatctcctttggtatagcaaggttggaacttggtcagatcattgtgaggtattagtggggctaagaaagcctcagagtccaatgtttttgtggcttgcttggctgccagggcggcagctaatttcctttgactatcgagagtctccgtcgaact

SEQ ID NO: 374662 - DNA, 426 bp, Homo Sapiens
tcgaatcgagctcggtaccacgtcgacggagactctctaaaccctttatgtgaaggagctggttgtagagcccagagtcagtcctgctgaggaaggaggtgacatctgcccttggtatttcagaagaccagagaatggattctaagggtcatccacaatacctttgctgtgggaaggagcaatagctctagatgggcctgcctgaggtacaagacttcctcttttactgtggggccagtgttgctctggaggtggatgtctaggcaggagatgggtctcagagacacccaggattagtccttgtgtaaaatttgaataataacaggaaaaggatagtgggaagcaggacctgtcaaacatgaatgctctcactcttcagatactcaaagtgcttccattccgaagagtgagagtctccgtcgaccc

SEQ ID NO: 374663 - DNA, 461 bp, Homo Sapiens
tgcaaccgatagtacctgattattgtcagagctgccttggtcttttgtaccgcatgcgggccagggtgccccgccacaccttttgtagaaagaggacaatccttatgagcatctgggcacggagttcttccaaggtaaacaatgttcggggtgttcgaatgaaaattttggtcttcccataagctacatcatcctgaaaaccacaccgttcaattagtttcttgacagcctctttgtctgaaggaaggtcatggttgggccaggtgaattcagagatcatcttatacctgtgaagaaacttctcgtatgtctggcggaaggcaaatcctgcccgacgcactctcacattttccagtagtccaagatattctacttggtgccggcagcgttcatcatcaaatatctgtggagatttcttgtcattgggtttgatgcaacgaacgttgccggctgccattggg

SEQ ID NO: 374664 - DNA, 729 bp, Homo Sapiens
cgcagttggagggaagcagtcagacttgactttttgcagtccgcgtgttgctggagggacacgtgtattggagcccagaagaggggctgtgtggcctggggatataccatgtggaaaggttgggcttcaagttaacaggatcagtacaccagtcaagctagcctcaggtcatcttgcgactccacttgagcagcctttcctgttgtcacatgggttctagtagctactgtagcagggtactacgtcctaggcaggtctgacgtgttacctcccctttaccctgatccgtgtgactctgctagcagtactacctcgaggcaggtataaataggcaaagggtatgggctatgagcgaaggctccagggtccacagagcagggagtgtggagaaggtggaagagctgagctcagaggcagagaagctccttgcagggagcactgggtagatggcctggcccgtcccaggctcctggaggccccacctgccgatcccaggcacttgacctgtattcctgtgggtgacagagatgagaaccagggaagctgtgatccactggccaggacaagtcaacatgggtgagggttgggcaaagggcccttccttcctccccaaccctgtggtctggggccatggcctcaggctttgtgtctatcacaaaagcacaaacttgccctaacccacatgggcctggctgtggggaaagtggggacccaggtccctgaagctgt

SEQ ID NO: 374665 - DNA, 318 bp, Homo Sapiens
ttaaaagacaagaggcagggagagggaacatcaggtagggaaagtgaagtgagcaaagaaagaagagagaatccacatgttcagaggacaaggagactttatatgaagcagaggtctcatttgttcaaaagtcagaagatgtgaggttagagatgcttaactctacacgtggaaggctgaatgccagaccaagttcaaagttcattctatagtccgtagggaactactgaaggtttttaagcagggaaaggggagtgacatttagaatacagcgttttggtactatgaagcaatttgtggatactgacggcagagggt

SEQ ID NO: 374666 - DNA, 476 bp, Homo Sapiens
ggttcaaaggcttggaaatatgaaaacgaaaatgattactcccgatacataatggatatttttctagaattttgcttccatgtacaagatgcacatactgagttcaacactaacaagtctaaatgcccgtgtgaaggccaacaattccacttcaggagccagtcccctgtcaatgctcactcgggcacgtgagcacaggatgcctgaggctgcgtcacctgtacacgtcaaaaagccccatccaccagccaggcacatccacccagcgcatcgccacgcggcctcaccaggagccggcggtccctgccgcgaacacatggagactcgggggacggaggcggaggcggaggtgcggcacgacatgctgcagggagcctataaggaggcctctgtcgacaccaactctggaggagcattcaggaatggtactcgagggaaacagcagggtagattctatttcaatttatttatactac

SEQ ID NO: 374667 - DNA, 447 bp, Homo Sapiens
gcggtataggaaggctcagctccaagtgatcagctctgtcctacagagactgaagcttggagcagctggtgacaggaccacgggcacgtagcctggattgggagaagttgggagtggcgatcactagtgtgtgcggagcactagctaggaggcctgagccaaggatgtaatcttatcgatgtacgtcatctatatctaatcagagcctgccaaacatcccagtctgccccaaagtcccgggcgacacctgtcgccctggcgtcatcattaataacccccggaaggtgaaaactctcagagtgccctagtggagctgagaaggagcacggatacactgagcttaggtcctctgtcgagccctcttgaaatatcccctatgatgtggatgaaccaagctgtgagtcaggggcatggagggacttgcccagggtcaccagctcggaggag

SEQ ID NO: 374668 - DNA, 1027 bp, Homo Sapiens
gaccttaccctggctggggcgatataagaggggagaaaggaatccctcagaagccagcccccaactgtgtcccagagaaaggcggggcacctgggacacctaggccggcagcgaccacagcctccctccgcttatgtgccgagaaagccgcacagtgtggtcccgacattccacctgtccttgccaatgtgtggggaggcacatggccccaagtctattaaacagcaggtgaaatcttcctcatcttggataaacccacaactgtaattccacgtaagtgtgtctatgtgcacacacagtaccccacgttctaccgtagaatgtaaggcgcctgcgtgccaggtgatggctctaaggatgtggtagagaaaaccggagtagacatgagcaagcacagggtaaggaaagaaaacacacgggcctttcaaaagggaagagcaaggggctgggtgaggagaaaggtgacacacagaagggcttggctgtcagctcaggcaatggcatcattttggctggcggctgccagctctggctctgagcccctagttctgtggctttggaggttaagatggagcttgtcagtgacgcccaggaggtggtggttctatccagaggaagaacgcacggaagagtctccccaagcagcccagccgagtgctccaattaaagccacgtccctgctccacttgtttccctataaccagacgccctgagagatctgagagagccactctcctacatggagacacaggacgttctaagatgggtaaaatagctgatgaggaggaggaagcctgaacagaaattcctgaaagggctaagagagactccccaacacagccaagcctttccaaaagccaggaggaggagagaggactccgactccggccacaggcccagggcaacgcgctgggccccggagcgtcctgctccctggggccccagggtaggtgcggcccagctcaccccagctcacgtcacaggctcacatgcagctctcacgcaaacgcggctaatgtaccgagct

SEQ ID NO: 374669 - DNA, 167 bp, Homo Sapiens
ctagccgacagcccagaactacatgggctcaacgcgatcatccactgggcccagcactccaggcccatggtgggcccagtttttctgaggctagatggtgtgtcatcccaaggacttgtgcccttagattctattctgccaataccccactgtcgggctagtcgggg

SEQ ID NO: 374670 - DNA, 439 bp, Homo Sapiens
  misc_feature (406)..(406): n is a, c, g, or t
ctggaagaattcgccgccttcctgccagcccggcagctctggaagtggttcggcaagcccacccagcggcgtggcatgaagggcaaggcccgcaaagctcttctacaaggccatcgtgcgcggcaaggagatgatccgtatcggggactgtgccgtgttcctctctgccggccgccccaacctgccctacatcggccgcatccagagcatgtgggagtcgtggggcaacaacatggtggtccgcgtcaagtggttctaccaccccgaggagaccagcccgggcaagcagttccaccagggccagcactgggaccagaagtccagccgcagccttcccggcggccctgcgggtcttccagccagaggaaggatttcatgggagcgcgcgttattaccattcttcgcntgttggattgaaattgaacgttgcagacggttt

SEQ ID NO: 374671 - DNA, 226 bp, Homo Sapiens
ccccgactagcccgacagtagcccgacagccccgactagcccgacagcaaggggcagaggaaggatggggtggtcttcctcaggggcctctggtgctcaccaccccagacatcagccagggggtacggcacatggccagccagcaatcaggcagagaagaaaagccagaaggtccgctctgggccagtgactgagcaactatctcatgtgccgcccgtcgggctaa

SEQ ID NO: 374672 - DNA, 296 bp, Homo Sapiens
gtgcaggtgaccagctgcagcagccgtggcatgcagccacctgacgggtcgggcagctccgcaggctccagatagacctgctgtgaggagttggctgagaggcgtgctgtcctcgaggacctgtcaccagagcatcacgcattgaacacaaccgcgtgtctgcctccgaagcataaagacccacgcgagcatcccccttaggtggccttgagggccaccctgacagccagctggggccgcgcttcctgccaacgcagagtgggtgccgtcgccgggggtgccactctacctcgcac

SEQ ID NO: 374673 - DNA, 524 bp, Homo Sapiens
  misc_feature (346)..(385): n is a, c, g, or t
  misc_feature (416)..(416): n is a, c, g, or t
  misc_feature (449)..(450): n is a, c, g, or t
  misc_feature (454)..(454): n is a, c, g, or t
ggatttggatccacaatgcagcagctactgtgcattcaaatcctagatggctgagaagaggcatctcacccttcacatctacaagatctccactgctgggtatgagtaaatgtgtgtgtgagtgcgtgtacacgtacatgtgcacacactgtctacatacaaaccatctagatctatagagatgccaggcttcactttacatgtgattacattctacatgaaaacagttgagggctttcgttatctttcacttgatggagtttcactgtattatgttcatgatgggccccagtgaactccatatcaggtatatacatagaatgtataatatatacaaactgttagnnnnnnnnnnnnnnnnnnnnnnnnnnnnnnnnnnnnnnnnaagcctaggggaaacctgtggatgtggggtnagttcattttggccatcccatctcctccatctnnggtnatttcccggggggcaagtattgtttcacacactcccctcaggtggcccagccattccctcttccagtggt

SEQ ID NO: 374674 - DNA, 235 bp, Homo Sapiens
cgcttagtctagatgggagggacgctttactctgcagggatgagtggtcttctcgaaaacccaatgtggccggcagcccctgggcctctgagaccacaaatgccttgacacttgggggcaggagcttgaaagcagagtacctcagacccacaacagcaaggtcaatacctcaggcatccctcattccccactccctggatggggctgtcgggctagtcggggctgtttggctagt

SEQ ID NO: 374675 - DNA, 143 bp, Homo Sapiens
tccccgccgacagccatgctctgcaaatgcctctaccctgtctagggaggcgtgttcatttctgcacctgtgtaaagagtctaagtcctcctataaagtgactacagactgcttatctggctgccctgtcgggctagtcgggg

SEQ ID NO: 374676 - DNA, 270 bp, Homo Sapiens
tgggcgactctagaggacctcccccgactagcccgacagggagaaagctgctgctatcagcggcaaagcagtggcctggtccctgtccttgtggagttctccatcaattcccaatggtcaatgacaaaagagctgcgtggaatggctggagaagccaaatgccttacctgaagtctcttgtgagtgaactaagcacctcataacaagtgttgggacctaattattttgtacatcaaactgtgctagtcggggctgtcgggctagtcgggg

SEQ ID NO: 374677 - DNA, 716 bp, Homo Sapiens
  misc_feature (492)..(492): n is a, c, g, or t
  misc_feature (507)..(507): n is a, c, g, or t
  misc_feature (509)..(509): n is a, c, g, or t
  misc_feature (559)..(559): n is a, c, g, or t
  misc_feature (581)..(581): n is a, c, g, or t
  misc_feature (587)..(587): n is a, c, g, or t
  misc_feature (590)..(591): n is a, c, g, or t
  misc_feature (595)..(595): n is a, c, g, or t
  misc_feature (610)..(610): n is a, c, g, or t
  misc_feature (625)..(625): n is a, c, g, or t
  misc_feature (661)..(661): n is a, c, g, or t
  misc_feature (672)..(672): n is a, c, g, or t
ccccgactagcccgacaggcagagagctctctggtccaacctctcctggtgggtcacttcaggtctcatcacagcaacctgcaccttcgaagtcttgttccctgctgaggagaggacagagcaacgatactcagcgctttccctgatggcgtcctgcagccagctgagtgcatgggccctgccatcgggcagtgcatgggtctgcacagggacacaggtctccagagctcgcccattcttctcccagacaaagcgaatgtctgcaggacctgtggcctggcagaagaggtagaagttccccagggcgtgcacgtgctgtgcctggtcactcaggaagggcggcagcaaggagaccctcgagctgctgtcgggccccgcacccgaggctggccagggggtccagggagaggaaagcctcctgtcccccacatggcccagacaggacagggaagaggagccaggaggagggaggggctttaggagacgagcctntgagacagagaggananaaaagagagggcactgaggaagaagtcgccaggagcacgttacaggccanagagggcaaaacacagcagganacgganatnnaagngcgagcccagctgtnccgcctgggccatgnaggggcgggaggctgcacagcctccgcttaggaatntcttccccaanttcaaggatagaagctttttatttatttgggtactttccaaatg

SEQ ID NO: 374678 - DNA, 185 bp, Homo Sapiens
ccccgactagcccgacagagctttaccaccctgtctataccacaacctcccctccatctacaccatcctcctgtctagaccatccccactgccctatctataccaccaccctgtctacacaatccacccatctacaccatcacctctcctctgtaaataccatgctcctgtcggctagtcaggaa

SEQ ID NO: 374679 - DNA, 567 bp, Homo Sapiens
gctgtactgtgacataatctgaggtcctgcctacatcaaactggaaaaaatgtatgcccgctgttgcattaaaaaagtgtacttttatagtggtttcagattatgtatagcaaggaatgtggattttaaagtacaatgcaataaattattccttcatttaaacatatttgtgtattgcctatcaatggaaatattatgaaagtcatttttgcgtacttaaaggatgaatatgtctgggaaataagtcagcttgagaaacagccaaaatgtaggtaggtatgttctgtagtgaaaagaatattctgtgtgattattaaaagcctggagactaaggaagagagtagaaggaccctgttaaaagtaaccaacaaagtggatcatgccagctatcaggggattataatgcaccaaagccctactcttgggaaatttgaaacataaatatttctctccatattttctacaatttattttaaattctattttttaataacgcatcgaacactattaattcaaaataaaaagcatgggtaatcaatggaaaataacttatttccttccttccgc

SEQ ID NO: 374680 - DNA, 605 bp, Homo Sapiens
cactctagagcatccgtatcatcccccttcgtgtaaagtcttaacaatacagctcctacagtgggggaaagctgccacatgagaggctgagtttccatcgctaatagtctgattaaaaggtattaaagactccacatctgtttcagagacagcccagagtggggcctcatccttgcttgctctgcagcaagtatggtgggtggaagtgggagaaatgccaccagttcctcccctctccctctgaggctgggcctccggttaactcgggagcagaagggcagttaggaggggaggcgggtggagcccctcccaatcagaaaaagagcttggacatggatggattcccaggaggtccccagggggaccagaccagtgtgactatgacaagtgccactatgtgccaggcgctctgctaggcactttacacagattattcccaggcttacaacactggcaaatgggtaaaaccatcccctattgtagctgcagaaactgaggctctgaaagatgaatcatcttgctgcccaaggctgcattggctgtttagtggccaagtcggaatttgaacccatgtacgtatatctcttatcctaggacccagctgg

SEQ ID NO: 374681 - DNA, 1125 bp, Homo Sapiens
tctgggactcaacaagaatgggcccttcaagcctaattactacaggtattaagttcctgtaactcaaaccagaatttttaaggaatagaactccaagccttttctccactactatacaagaaagaattcagcaagctgcttctccaatcaaagctgcctgccgtgctacaccctgtgtgttaggttatttatttattaaaatcaagaatcctgtgcctgtagtgttggcccagagtgtggttactgccctgaggggccatgaaagccacagaggatgggctgaggaaggaaagaaatgcgggttactgctcccagtgcatcatttgcatcattccccattgactgaatcctcagcagtggccgcttctcctctctgtccaggctcacgagttagtccaggcatccatactccctattccctggagttttctggaataaattttcagcacctgcttttctcagcttggcccttccccgcgtgaggcctttttctagagatgagagcaactccaaggtgaacattgaaggggacagacaagttattttccctttcgaaagtttttttctcttagtttcagttgtttgaatatttaaatgcacttgaaataggtgctgagttgtagtttgtgaagaccacagtggggaagagtggtgtcctcttttttcttggtggtcaggtggtgtgtgcagtgtgcaatttccatacttccccaacctgcctggcgcccctcattacagtcagggtaatttacagaagttgaaatggttgtggcttttcagttttttctccttgtatttaatatgctgaaaggcagttttgtaatcaaaccatataagaaatagcttaattgaggtttgctaagtgaaatgcgttccgaaaggcatcagattaacaagcttattatttaatcataaatttaatttgtgtacttatctttgaaacttgcattggttagaaataaattttatccggtattttgaaaagttaatgtgagttgagttgacttatttatatgaaacaaaggcatggcttattcattagaagttaccctcgtgttgcctacattttctcaattgtaacagggggatgatgataatctcattttcttaggactgtgtacaatg

SEQ ID NO: 374682 - DNA, 752 bp, Homo Sapiens
  misc_feature (22)..(22): n is a, c, g, or t
  misc_feature (39)..(39): n is a, c, g, or t
  misc_feature (47)..(47): n is a, c, g, or t
  misc_feature (64)..(64): n is a, c, g, or t
  misc_feature (180)..(180): n is a, c, g, or t
aaaatggacctaaactgaaggncctcaagatactggggnaaaagaantccccaaatggtttggnagggtccaaaacgaagttaaaaaagtccccacttgaagttaaatccttcctcgaatttgaaactttccacaattttccttctgtcccatcgtccacaagtgttatatagatcaaanccactcccacgggaacattgactgttttgtggataaggaggaattaggactcacaagaatttgtagtttactctctggcgcgacacatccatgctgcggcgtgactgtgaggcaatgcgctggccagcacagctcaaatctcagtaacctcacagagttattcacaatctggaaacgtccagtttttgccatgtcacaaggagaaggagctaccagaatcaagtgctcgggtaggacagtccacggctcttcggaggccagctgatccagaggcgggcgagccgcccgtgagagaagaggagaaccctgaggacctttgactggtaaaacatccaaagagacgttgccaccatgtttcccagaagctcccaagtcgcttgtagattccaagctagctttggaagaaggctgaaggaattctctgctagaaatgcaatctctgaattctccaattactgaaagtataattttacacatgcttccataaaagagctgaacatcattaggtcgttggggaagatcatatacttcagttactaatagctcatcttgaaatgcttcaacaaaatgta

SEQ ID NO: 374683 - DNA, 476 bp, Homo Sapiens
  misc_feature (29)..(29): n is a, c, g, or t
  misc_feature (83)..(83): n is a, c, g, or t
gggaaaaccaccaggggcccaaaaataangaactttggccggtggcccccaccggcctatgtgggcctaagatgccacagtgnctgcccctttgaccctcaatgttatgttccccctcctagaataaagagtgacggcttgcataatttgctttcccatgagtactcattattttatctatatgaggacgagtggagaggagatttctaagaagtcccaatgtcttcatcagcacattcaaatctgaatctgataataaccggaatagctgttcagtactcaagcttcgtaaaatatctgcttttattttttgttcagcctgaaatgccatattcattaaagcccaaattccattcactcgtaaagcaggattttcactctgagttaatccacaaagtagctctacggctcctgattccaaaattggctctttgcttggagaaaattcaagaagaagattacacagcatggaagat

SEQ ID NO: 374684 - DNA, 585 bp, Homo Sapiens
cggctctccatcttctggtttaggaacgtctgactgccttgggttccactgattgtcccgataagctggtcttcgtaaagtggaagggcgtgatggacggcctccaggatcccttccaccacgcctgaatgttccccctctgcctctccttgtaggctctcctttaggaagaaagcctggtttagctttatcgtcatcccttacataaggcttttctagcagtctattatctattcgaacatgattatcaggcttgaaagaagaatgaggctttacaggttttttgttttcaggccgttcctctcttttgggaagtttgcctttacttaaactgtccttgtcacttgcactttcatgaatttcactgtctgtgtcagtctctgaaccccgctgtcgtcttcttttggggacaacttcaaaatcagagctctcactccgtgtttcactttcttctcgctgtctgagaggccctgagggtatatgctctgctcttggcttattgtctctatactgaggataatctcgagtgtgtcccctaccacccctgccacgccctccataagaacctctatagcttcgacctct

SEQ ID NO: 374685 - DNA, 375 bp, Homo Sapiens
  misc_feature (301)..(301): n is a, c, g, or t
gactatgcatcttcagaatttgctggactgtctgtaagctcgatggccgactcgccagagatgggcttgacacaatgctgctgtcaggctggatgatgaagcccttctggaagggctgcagggacaggtgctttatgctgtccttggttgcggggagaactgtgagagaaccgcctagggaagcagcttcgaaaggtgacaggctcagcaggttggtgcagccggggtcctgaggtagctgacacttgagtgtctggagctgaattgcctggttgtcatccggcaggggctcctcggcggnggcaggcctgacgtctttggtgggctgcaggccaagcaaggccaggaagcccttctggtccagggcgtcaccag

SEQ ID NO: 374686 - DNA, 306 bp, Homo Sapiens
ctaggattctgtggaatcacctggcaagtaacacctgaagccagtaacttgtacacgtgtattttctgaacttgtaggagtaacagacatgggtcttatacagtcttgcacttcccagattaacttttaggggcaaggcctggaaggaagctggcagtattcccatggaaggatatacatccatcttactgcaccaggtctctgatttccttcttgcctgagacatgcgcctttcacatccaccattttcacatccaccattttcacatccgatactttcagtctgccacttcacatccctagctg

SEQ ID NO: 374687 - DNA, 352 bp, Homo Sapiens
cgggctccggtcggggacggcccctttgcgcgccccccacctctgcttctctttcgccatctctggcctcccccgctcaccagtcctcctctatcccctcccgcctcctccccgcgctcagtgggagacggatgacacgccagaatatgtaagtagcgccccggcccacccacctactgcttgtgcgcatcccacgcgccatgctgtgctgtgactcctgcacgcccctgtatcatcagtagtaaaacggtctcctcctctgggccctcccatgcgcccctcgctctcccattacctcttggagcgcccagcctcgatgtatgcaccagggaaatggatacccgactctaac

SEQ ID NO: 374688 - DNA, 185 bp, Homo Sapiens
gcccttaccctgaatagaaatgcttggtaaccttaacttcttccaatagggaggcaacacagggaaatgacaacttaaaaattactctgagaacagctgcattctcattggtttgaccactagttggatggatgttaagatttttttaacaggtcgaaaacagaaaaattcagggaattcaatat

SEQ ID NO: 374689 - DNA, 251 bp, Homo Sapiens
ccggcccttaaccataaatcagcactaccaattcactttcttccttcctacatcacaatggtttagcacaaatacagaaaaatcactgagtgatccatcacagaaatccatgtcattgggaaaactgatttagctctattcctactctttcttctacatgtagaatatgaatcaggctgagccaatcacggttactctgatgacctactgacaatagggttaaggccccgggggatccttagagtcaccac

SEQ ID NO: 374690 - DNA, 587 bp, Homo Sapiens
ctcatacagcctaaatacttgttaatatgaaaagatttacattatatatacatctcaccatgtacttagaaaatctggtgcagtgagttagcattcttgtgctaacaaaaacttttagcttgcacccaagcctacttgagatggcatatttttgccgtggttcttgtgctgataggctcattccctatgctgaaggatgttaaatgtgttatgcattattcctgtcatcttctccataatatgagcgggacaattcaagcaactcatcaggtggtaagtaaatatttccaaaaaaacttcttgtttttatattttatttaaaaatgtatatgcatttgttatttatattgaaaacattccattgttccttgcagtatagaaggcaaatgcaattatagtctttattatagtaggagaccgattttgtattacacacaaacacgtctgctaatgaactgatgatatgttaaataattaggtcattaccctttaaaatggtgtatattatgaaaaatacttaaaagttttcttttatcatagtgtttaagtgatgactgagaaaataggtagagtttttttaaagggag

SEQ ID NO: 374691 - DNA, 524 bp, Homo Sapiens
ccgagcccgttaaccctcccagtgtggcgggggcagtcttgtctgtacaaggcatgggggacactggaggcccattcatcctgaggccaagttcctccctggctgtgggccagcataagcgaacaaggcgtgtacttccggtatgctatggactgagtgtgtgtctcccctgtatccatatgttgaagccctaaccctccaatgtgatggtgtttggagacgaagcctttgtacaggtagtaagagtcatggcggtagtaagttagagtcatggcggtagttagttagggtcacggtggtagattaggatcatggtggttacctaaggtcatggcagtagttagggttatatcagtagttagggctatggctgtagttagtggtgatggtggtagttaaggtcacagcagtaatttagggtcatggtggtggttagggtcacagtggtagttagggtcacggtggtggttagggtcgtggtggtggttagggtcacggcggtacttagggtcacggcggtggtt

SEQ ID NO: 374692 - DNA, 789 bp, Homo Sapiens
cttgggcctcatgctcctgggatgtagcccctaccctgcccataccaggggttggggtacttgggccaccaaggaatgagatattggggaatctgaaagcatgggatcttgcaatctccatctccagctaatccacaggcccacttcacagctgtcacctggagttcattggaagaacttaatgtttgttccttaaaatgtgttccctgtagtgtggaggtggaaagtggtaaaggatcgaacagagaggggtgcccccacctgtctggagatttcagaagggagggggctgctgctggattagtccctagcagcagagtggagatctctaagggtctgcatttgtgttatccctgggaaggaaaggataggaccactccatctgttttccttgacatcagagatcacaagtcaggatttcagtggttcctggatagggtgtccttataattgattgtccaaacagggaccctgagaatgaaggggaagctaatcagatgggaagctcagattgtgctctaaaacccagatgtatgttcaccctgtacctgggagctcctggggaaggagggacaagtgggcaggagccattaaggctgttgttcaatggctgctctgccaaactcacctttgagactggttagaggcaaggattgcgtgaggcccaagggaaactaggctgccctgctgtgaatcgacacagagagctgggatgaagctggacccaggggtgccatcagggcaggccacaggcttcatcgccaggtgcagtggcacacttaaaatccc

SEQ ID NO: 374693 - DNA, 181 bp, Homo Sapiens
  misc_feature (181)..(181): n is a, c, g, or t
agaggaaggaaggcacagagagctccaggtcaaggcacagtacaaggagtgcaaggatcctgacccggacagcttgttaatgttgagaaggaaggtacagtggggaggggaagtgcagaagtcttccgaggcagccttcaatctgaaaggggtttttgcaggggcgggtgcggtggctcan

SEQ ID NO: 374694 - DNA, 469 bp, Homo Sapiens
agacagagcgaaaccgtctcagactaacaaacaaaccccagtgagggttacagggattcagggaagggaagaggtcattgtggactggagaaatcttggaaaccttcctggaggaggcagcagctcttggcctcaaccctgaagaatggactggggaaatcacagcaggaacgatgacaggaaggaaggaaggagcatggcaatgtcccttcctaggggacacccttctattagaggactgtagtgaaagtggggtgggctgattgtggaggtcgaagggttgaagacttgggaaatagccagagggtatctgacatgatgggggagacaatggggagccattggaggttctatggcagggtgtgatcatgattaaaacagagcttagtccttacaggactagtaagcaggtgaaggaacagcaacaggagatggaacagacagaagacaacaacttccttcccagctc

SEQ ID NO: 374695 - DNA, 561 bp, Homo Sapiens
  misc_feature (35)..(35): n is a, c, g, or t
ctccgggagcccgtaaccctccgggagcccgtaancctggcctctcaggcaaagtttaacgagagtgttccctagttggtgggtgcatttcttctgccatgtggccattccatcttgtgactccactgtgccaggggagctttgccattgtgcctgggtttgcttgctggtgaacagggcaagagagttttcgagggctcacatgggaaggtttttccgggggctaagcctggagggactgaccatcacttctgcccacattctagtgtccataactcaggccgtggccacgcccagcaacaagggaggctgggaaatgtagttcagctctttgcccaggaaggagaggaaacaggttcatgtgaacacacttcagcttctgccgtgtggtcaagctcctcatgagtgatggtgtcagagttgggagttgggactgaggtttgaggtcaggtgtaggactggagttagatctggagatagagtgtgggagttggcttggggttattgatgctccaggttatggtgaatgttagagtcgggattagggtttagggtaaggct

SEQ ID NO: 374696 - DNA, 603 bp, Homo Sapiens
ggatccttcgggagccttaccctcaggagctgagactcacccccgcaaagccagccaggcctctcttctgcttttctatcccatttcttagcctggagctgatgtgctcctttccagccccacctggcaggtcaaagtccttgccctacacttcataggctaaaaaggccagtaatgttagcagctgacatggaaatggtttggtagcaaagtgcgcccctgaatattctcttcctcccagctccccctattgctttctctagcagcccagagcatttattcactcatacaaacaaggcattcggtgtctagggaatcattttcaaggagaagcagggcttagaggcctctcacagagactcagaaagacaccagactgagtcctctggatagctaccaagggtcctagcacacagccacatctacactgccctcaatgatctagatgttgcagtagctgtccacattgttacataatcatgccctgtgcatccatcagtggaatgatgcagggagttctcagctgcaaactcatctggaacatattagactattttaggagtgcagaggagccacagaaagttatatccatttccatgctga

SEQ ID NO: 374697 - DNA, 345 bp, Homo Sapiens
tcttactttacccttgaggctgttgccaagtgggcattttgtatcttttttcctcctacttccctgtcctgatatggccactaagcctccttcccaaacatggttgatacggggctggaattcactgttctgatcaatcagatctattgttactttgttgttggtttatctagtttctcttctttgcataaaagtcaaatgcaaaacctagggccaaaattttcctgtaaaattcagagtcctctctctaactcagtccacactattccatttcagttccctcaactcttccctgcaccacagttgtgaggccttcactgttcccccttccatagtcataaaaca

SEQ ID NO: 374698 - DNA, 393 bp, Homo Sapiens
ccgggagccttaaccctacagtgacaccttgtcttacgtcacatgaattccttatctgttctagatacaagatgctcttaaaaatgtgcagtgataccactatggagtacagattaaactaaatgttactgttcaaaagaatgtattgaatcctaaagcactctctctttactaccattccctctatacttcttccaaaaacaacatatctaacagtaaaattaagaagaaaagtggtattggtggcatggaagagaaagaataaagcagatctgagatttattgaaatagtataagaagaaacttatgttgaggaagtatcatttatatttacatttagatggtgtatttcaccttaaagggttaagggcccccgggagcgatcctctagca

SEQ ID NO: 374699 - DNA, 490 bp, Homo Sapiens
acccccgggagcccataacactggggcctgggatttgtactgagggccgggggtgctcagccagggcagccctggcttgggtgttgggaatgggaaggaggcagggccacaggggctacagggtgccggcaacgtcccgagaggtctggaaaactccaggcaggagagttatggcagctgggctgctaggatgatggagaggaggggcctgtaaggcggagcagctccttctccaggcgggagaactgggctcctggggcagcaggggaaagagtgcctaacggtgatagggaaagctaccagggagccaggccttgagtgccaggccacgggtgtggatttggcaggggtgataacctggagactcagtgggttagttggctgggacttctgtcacaaagcactataggtgggggcatctaaaaacacagatatgtgcctcccatgctctggaggctgaagcccgggatgagggttaaggcccccgtaa

SEQ ID NO: 374700 - DNA, 157 bp, Homo Sapiens
ccttcttgtaatcatagcactacactgcctctttaagagggaaaagggcttactcgctctaaaaccggagagtcccaacctcatctctagccagacattggcacatttcaaggtgtacttccgcataggtgtggtccttgaccagggtaagctcccg

SEQ ID NO: 374701 - DNA, 442 bp, Homo Sapiens
  misc_feature (397)..(397): n is a, c, g, or t
ccagagccaaatgtcgctcccagcttcttcagagaaacagaccgcaagccaggctattcctcagtatgcctatcccttgtcactcccagctcccaatgtggtggtgggaacccagtgggcttcttgagcctaaacaacttcacctagtcaacagctggatgatgaggagacagcaatggagcaggacatagacagtagcacggaggatggaactgaacccagcccttctcagagctctgctgaacggtcctagtgtttggacacaatagtgcactttaaaacctgcttggataccaagtgtcccagggaaacccttgtattttgatgactaaaaagagcactttgcccgtacttaggctgtggaccctaaaacagcagtgtttcaacaagatgtttngcaggagcagctttttaaaacaagataaaactcacaggggaatga

SEQ ID NO: 374702 - DNA, 357 bp, Homo Sapiens
  misc_feature (68)..(78): n is a, c, g, or t
ggaccaatttcccggcaggataaagaaatgccaggtgtatttatttttcgtattgtatttttagcaannnnnnnnnnnggtatagaatgagccaagggcatctagagcaaagaggtagttcccgtgccccgtctccatctccctgtctgcactgcctctcctgctccatctccacaatctgcaccgtctctccctgccccgtcatccatctccctgtctgcactgcctctccggctcaatctccacaatctgcaccgtctctcctgcccagtctcatctcctgtctgcactgtctctccaagaagtgcgaagggtgcgggatcctcagagtcacctgaaactgcaggcttaccccgc

SEQ ID NO: 374703 - DNA, 276 bp, Homo Sapiens
cgagaattttccagtaaagccacctggcgctggagtccctctgttggaggcagtagggtgtgagtgggggtgaggtggcataaataggatggccccaggcctatatcactcctggactctgtgtctcccggccaggtgggtgggccctggaaggaaatgggcccagagtgaagaattgagcatactggattacacccgcagtgaaaagcttctagtacacagaacctcctttcttcccgaagcacatacacctcacgcccccaacgagtctgtctc

SEQ ID NO: 374704 - DNA, 732 bp, Homo Sapiens
  misc_feature (28)..(28): n is a, c, g, or t
accaaaggagaaagttggatttgaaagnaagggcatgtgggcatgggatgaatggatgattggataaataaataatcccagaaaaatgatttgaaaacttagaaaaaagttatgattctaagtttagagacaagatggcaatatggcacaagagggataggaagctctgggataaattaggctatcgcatttgctgaaaatccctgtgcagagaaaaggagagccaaagaaaccagtgtggctctgtagagagctctctgataagttcaaaatttaaaaggtggggtacaagagacggaaggaaaggtgaagtccgtgataaactgagacttggaaaaggtgcagacaataaaagatattgctggttatgttcaagcaagaggaaaaaggagaagacagggttccatctggggatgaagatgtcaggttggcagttttcagagaaagcagaatactcaactctgattttcctctttctcccccgaggaaaagcacttccagactgggaagagttcagcaaaacaggggttagaggacattaaaccccaaatagaagaaaagataagagaaaacctaaccacctagccattcaaaatgagctgcaaatcccaaggtgatgacagacctttgcagataagatccagggacctttgccaatgtggctatgaaagctgcggcgaaaaggacaggggccacagtcctggacagctgcaaataccctgacaaaaaaaa

SEQ ID NO: 374705 - DNA, 308 bp, Homo Sapiens
cctctatctgatggtaaaatgagggagtctggactagatgatcttcaaggtcccgtccagcttggatgttctgggataaagttacctgacccaactaacaggtacccagtgagtgtccttgctcagcttctctaagaccactttgagctggctgtaggcaccctggagatcctccttcaccagcacggcgtctaccaggtgcccgtaatgccggtctatgaaggcggcagaagcggccatctcttgctgctgctcattaaatggggctgctgtgtccttacaagctggggacataggtggcgtttttc

SEQ ID NO: 374706 - DNA, 413 bp, Homo Sapiens
agtccgggtaaagacactagagtatcctaggctggtgggggcagtgagaggactaacgctgttggagccgggtgcccctccccattcctcctcactgtaatgggtgcaggaagccagtccctcccaactccacccctggatcctgaccctgggggagctatgcaaaggtaggggatcagactgtgtaccaacccagggtccctggatgactgggttcttgcccttatttgggtaatttggggaccagacacaaagggaggaggttcggagtgtggaaaccaggtccctaaagatgcctgagactggaggagaactacatgcctcccaggtgactgagtccagcaggacccagagccctggacttggcatcctgaccccaggccactccctgcctcccgtccccagggttcgcc

SEQ ID NO: 374707 - DNA, 326 bp, Homo Sapiens
agcacttctgcagctctctctgatgctctcatgagcacgaaggccagcatatacagctgctagctgtttctctatcaatgaataccggagttcagctcctttccatagttgggaccaaaagcctactggcattcttaggcgctctgtgcatagccacaaagcctcaaccaaaaccgtctgtggccacatgcacctccagctcaaacaggtgcccctggttaattacttgtagggcttgtggctgctgaatagcgcacctggctgcctagtaaggcagtctcaaccacaccatcccagtcccatcagagagataatcgggatgctta

SEQ ID NO: 374708 - DNA, 406 bp, Homo Sapiens
cgagcagggcgtgagtcagagatacctaagtgtttagtgcagcgcagtgtgctttctaaagtggggatggctatttacagactggcctacactgttctggtgggagccctcagtgaccaaggagcagaggtacctgaaacccacccttgaagccatctggatgctccgcttcattcaaatctggggtgttctaacccaaagtaactggccacagactgcaatgtaagatacaaatcttcaggacctagtgtgtgcacatgttggctcttatataagatggcatcctcagtacttgttctatgtagaaaagaatttgtgggcccacaagtccctacagagtctcacactctcatggacaataagtatacaggatacccgactcgcctatacgggatcctctagatga

SEQ ID NO: 374709 - DNA, 610 bp, Homo Sapiens
ggcacctgaatgtaggaatctggagtacatagaaaagaaattggagctagacctaaaatgaggtctttgtagccatggaagtggctaagctcacctggggagataccatttaccaaaggtaagccgagggtacattccagctaactagaagcatgttagaatttggctgcagagaatgccaaaagcctaagagattggtactggttctaaagaaaagacactctacccagcacaagtgagatgtacaaagtgcccatttcaacaagccagagacacacgtggtagtcaggcccacagctctgcattgcctaagtgagattagagctgggacggtggcccggagctgcttctccagtcctaacgcctagaatcatgggatggagattcgtgttagtgcccgacagtcacacccatgataccctcctgctgatgcggaggaagagacctgaggagttcctccgcaaacactcttacccgtactgctagatttacacggagatcacctagcgatatgcagtggatatggacaggcacatggccaaaccccaccactggatctccaccgatcaccacagaccacttgccccaggaatgcgcaggcgcagccgga

SEQ ID NO: 374710 - DNA, 670 bp, Homo Sapiens
actagtccacggttggcttgcaggacacaggtgtggaagcgacggttccctcgtatctctgcctgtgtcctgcaagctcaccgcattttcgggcgctagatacgctcttggggcctttgtgtgcgttctctgtcttatttccgggcgacgtgccgcgtgcgttgtcggacgtgaaggccagtccgggaaaaacgggtgcggccgcctcctgtgtcctacagggggcgccagacgcatttccactcggcttggaggtggatttagtgccacgtgcccgaaagtcttaaattgggtgacctgagctgtgcaatgataatgcggcgattttgtagtacgcagtgtcttgaagagagaatttttaactaggaaagtttgttgcaaagtgtttataggaagcgtaagacaagtaacggaagatggtgtctgttgtttctagtcttgggtgttgtctgtgttgcagcagccaactgttgctttgtagtttatttccccgaatggaaacggtttagaagtggacgtgcattccccacccttttcccgtccctcgtttgggttgttccttgaggggcaaagtgcctgttgggctttctgtgaacctcacctaacctgtgttttttcactcccctgcagttaccggtattgtaagaccagccgtacccggacttgcctt

SEQ ID NO: 374711 - DNA, 476 bp, Homo Sapiens
tcctttagggagtcgggtatggggcacttgaagtcgcccacccttagccaggtgcactcacccctggtcacctcgccctctgccaacctcaagtcaccccagactccctcacagatggtgcccttgcattctgccaacccgccaggaacctctcaagtcgccccaggtcctcggctcctccctcagtgtccgttcacccactggctcgcccagcaggctcaagtctccttccatggcggtgccttctccaggctgggttgcctcacctaagacggccatgcacagcccgggggtctcccagaacaagcagccgcctctcaacatgaactcttccaccaccctgagcaacatggaacagggtaccctcccacctagcggccccggagcagctcctcagcacctcccgccaaccctccagcggcctcatgaaccccagaactaccattcacttcctacccgactcgcaaagatgctca

SEQ ID NO: 374712 - DNA, 389 bp, Homo Sapiens
catgcataaaaagccctaaaataacttctggtagtatgggactcctggggaaaaacagaggaggcaccgcaaaccctgttttcagaaaaagcctgttttcctcatgagaccccaggaattaaaaggagatagatccctctcaaaatcaaaggctttattctgttttgcactgtgttatctgacggttttgagttttgggggttatcagaattactttgcattatgagagagctttggtgtgtaataactaggtagaaaatacacagtaagggatggctaatagcagttacaaaacagagaagcatgctcttggccacctggaagataaggaaacatccccatcccccactggaaaatgagacgcccatcagaagaggctgaaggtcctg

SEQ ID NO: 374713 - DNA, 355 bp, Homo Sapiens
acgtttaaaggcgagtcgggtatgaaatctctgatgattgcttagggataatctatgcctgaagaccttggcacattctttacatttgtaaggtttctctccagtgtgaattagtagatgggcagtaaggcctgaacagtctctaaatgctttgccacattcattacatttgtaaggtctctctccagtgtgaactctttgatgtcgtgtaaggcacggaagtcgactaaataccttcccacagtcactgcatttgtaaggttactctccagtatgtattctctgatgttgtgcaaggtgtgaattgtaactgaagactttgccacattcattacatttgttttttttggttagt

SEQ ID NO: 374714 - DNA, 537 bp, Homo Sapiens
gcgactctagcagatccttaaaggcgagccgggtatatcacggaaaatagagggtctgcaatctgggctcaggatttcctgaaatgtcaagtgcccaaactgatggcaggcagagctggactgctcagagaccacaaagtgcagggacaccagacctcctgaaggcctggctgtcgcacgggtcggagcagccagcaagagctccttattaccgtggcgaggagaccgcgccaagtggaaaaagctatttacagtgttgaagggggaagggctcatcccagtgggtgattttctcatttccccaggctgaacctgacctaaaacaaactttcattttcaaagctgaaaggggaaaacttgctacatacacaaagatggagttttagttcctctgcatctcaaatgtggagtctgaggaaagagccagtaccccgtaagcactggatgttttctgttttagatactgtatcagcccaggaccctggatatgcctagcgacccacctgtgctccaacctgtgctctctgtgtcgtctcc

SEQ ID NO: 374715 - DNA, 338 bp, Homo Sapiens
  misc_feature (43)..(131): n is a, c, g, or t
gctgggactgctgtgcacgccgcacgattggctcatttatgtnnnnnnnnnnnnnnnnnnnnnnnnnnnnnnnnnnnnnnnnnnnnnnnnnnnnnnnnnnnnnnnnnnnnnnnnnnnnnnnnnnnnnnnnnatcccaccagccattctgacagaggagacatggcatgtgataccgtgtctggccatggatgggccagacataagctatcttgtttaattttcattaatgataataacagctaaccttaattgagcagctactctgttccaggcactgtgctaggtgctagtttgccttatgtatactaactcaatccttgcaaacaatgtgatgagg

SEQ ID NO: 374716 - DNA, 358 bp, Homo Sapiens
gtactctacagatcttataaaggcgagtcgggtatgaggaggaggagctgtggcccccagcactgtggcacccaggtggctggaggaggaggccgctctgcagctggccctccaccggtcactggagcctcaaggtcaggtggctgagcaggaggaggctgctgccctgcggcaagccctacaccctctctctgctggatcagcccccgttggaggcagacagacgcccccagatggggggactgatggcaaggcccagctggtgctgcactcgcgcctttgagcacggatgtggaggagctcggccccgggcgctcaggcctgccttggcggtccacgtccaggcggagacggtggg

SEQ ID NO: 374717 - DNA, 450 bp, Homo Sapiens
gtaaggtgtctagaggatcgcttaaaggcgagtcgggtaccgcggaaatgtgaggctgcggacgacaggggcgcaggggcgccgtctccttcccgctgtgctcccctcatcctcgctctgcttggacagagggtggggaagactagaattcagctctcactccggcccgcctgcaaggtgatccaaaggaagtcgcttaccctcctggcatttccctttggaaaagacatacaaaaatagtccccacccacaagccccagaggggcgccccaaagagcaccaacgaagctgtctcaggaaatgctctgggcaatagcagcctgtttgcacgattattactaataatgtcttccttgttcaagtcaaacagacatctgtatgagcacagttgcacgtatgctaagagctgccctctaagtgactctacccgactaactggggtctgaacca

SEQ ID NO: 374718 - DNA, 436 bp, Homo Sapiens
taacagggtacagaggcgagtgtgggtacatctggggtacagaggccgagtgtgggtacatctaggggtacagaggccgagtgcgggtgcacctggggtgaggggctgctggggggctggagagcagacacacctgcaatgcagaaatgaagggagaggcccttccattccctggtgcttactgaacaggcgccaggtggactagcagatgtctgaaaggaaagactctccaggaaacaagtatttgtggaaactcaaaagagccgtcaatgagtgccaccttcacctcctctcctccctctctcccccttgaatccacaccgacaactccatcagccacatgggccaggccagagagggcaggtgtgctaggaacagacatcgcagccacgctgcccgggctcaaacccccacctccgagatccagagccaggga

SEQ ID NO: 374719 - DNA, 211 bp, Homo Sapiens
tgtaatgatgtgattgaccttaaattagattggccagatcatatataaagtattatattcaattctgggcaccaaattttcaatgacgcatatctagagtgtagtgtgtgcaaaggaggaacacttgtagcaaagcaatctggaccccatcctcctgtggcaaccaggaatatggtatatctggaaaagaggaaggcttgggaagctgggg

SEQ ID NO: 374720 - DNA, 469 bp, Homo Sapiens
gcgaatctatctgaggcttgcatcagtctgcaggttgtaggttggaagtttgcaagaggaggttgtgggagtcagtgaccaaatagaggcctacttgctcacttgcccctgggatggtcactgtgggggctgcaactctgaactacctatgaagcttctaggagtagggggatagtactgctgaagagctggggcgggtttgctgggcagtgacctcagcaaggatgttggagtggcaagaggattctcaaggatcatgcactggtggagacattgtgaattgaggatagaggtgggggccagcccaggaaaggggccaagtcactcttttacaactgtgttgctatgaccatgagggctgcagagaaggtttgtgctcctgcagaaatgaggcttgaaatgagcaaaaattatattctccttcctattgtaggatattcatagagctatggattgagtgcataaatgc

SEQ ID NO: 374721 - DNA, 400 bp, Homo Sapiens
cgagctcggtacccccgctctccacccactccggtccctctcgccaaggcacagtcgtccccacagggggcccccgggcctcaccttgcagctgtttgaagcgtccttccagcacgctggcatactgagcagggttgatgaaagcagctggtgaaagcaggaggcccccggggttgtgggccccttccacagcctcatagtaaaactcgctggcctcatgcaggccgttcccgtgcaccctgctcactccgttcccattcatgctgccagctgctagttacagagcccagggcccagagtccatgctcaccgctggcagggggccagtttctcgttaaacaccggaacctcaggctggagtccagcgtcagggaattcaagaatggtgggaatttcacgg

SEQ ID NO: 374722 - DNA, 625 bp, Homo Sapiens
tctgcggtgactctacaggatttcccgctctccacccaccccgactgcgacgctgcgtcaaatgccactgtcaacctggagctccacgcctcctgtgtgtacctgtccatggccttctacttagaccgggacgacgtgaccctggagcgtatcagccgctgcttcctgagaccaatcgcaagagaagagggagcacgcccaagaagctgataatgctgcagaacctgcgcggtggccgcatctgccttcgtgacatctggaaaccagagcgtgaataactgggagagtgggctccaggccatggagtgtgccttccacctgaaggagagtgtcaactacagcctcctggagctgcactcacctggccatggagaagggtgacccccagctgtgcgacttcctggagagccacttcctgaaccagcaggtcaaggccatcaaagagctgagtggctacctgagcaacctgcgcaagatgtgggccacgggaaaccggcccggcagagtacctgtgtgacaagctcaccctgggccgcagtggggaggagccctgagcccagatgggccccacagccacggggtgccttcaacgggttgggccgcagacagggtggcatgttgcctt

SEQ ID NO: 374723 - DNA, 496 bp, Homo Sapiens
tctgcatccagccaccgagtggtaatccgcactgcctggcgcacactctcgcggagctctccaccagctgctcacactgcaccaggctcaccgctggctctgtaagagacggatacagctcagtgaggaccagcatgtagcccttcaaggcctccgcacacaagacactcagaacaggagagacctagccctcagcaattgcaccccccacttgccctcagtcccttcctcttggcttctcttccaacggcctccccaacaccacacaaacaaggtccagaggagacggccagccccaagttcagaagccactgaatgggcaagtgagtcacaaggaaatcatgaaggttagcaggagggtctcaccatcaggggtgtgacttacggacctgcgacaggagcagacaggacaagaaaccccagaagtcgtacccacagaaatgggatggagccagacagcggccaacagagaggggagagtaagggggtgggtgga

SEQ ID NO: 374724 - DNA, 491 bp, Homo Sapiens
ttagcctgtctagttcacattggcctggaggctagggcaggtagtgacatggagcaaacttatggtagttagggatcttctctctcttccttgaggtctcagctaaaccagtgcctcctccaggaagccttccccacctcagaggctgcactgtgtgctctatgtgcaccctcggagcaaccctcccaacacctattaacgctaatgcagtagaccagcaaagcgtcttatctaatgagcacatgaagaaagaggccaagtgtccccaactgacccccaccccaggaccacacacagccagggacacactaccagactctcttcatgacaccaatcttttttggggtgcatcctagaccccggatggtaccagcaacagaatgtcactaagacacagccctgccttcatgaggctcacagtctggtgtgaggggcagaaaaatacacgaatatgcaaataatcaggtggtggggaggtgggaggagaggaa

SEQ ID NO: 374725 - DNA, 549 bp, Homo Sapiens
ccgctctccacccaccccggcctgcaagagaggcctggaagagaagcaactttagttgtgcaagcaccagtggagtgagcggtgccagtgccagcgccagcagcagcagtgccagcatggtcagttctgcaagcagcagtgggtccagtgttggaaactctgcttcaaactccagtgccaacatgagtcgagcacacagtgacagcaacctgtctgcaagtgcagcagagcggattcgggattcaaaaaagcgatccaagcagcggaagttacagcagaaggccttccgcaagaggcagctgaaggagcagaggcaggcccggaaggagaggctcagtgggctcttccttaacgaagaggtgctgtccttgaaagtgactgaggaagaccaagaagcagatgttgatgttttgatgtaataagggtgaatttatcaacgttctttgtgagcattaaaatactccatccttatgggtttacatgcatcttgaccaaaattttggttagggctgtgtgatgtaccattaataatttaagccagtagtgggt

SEQ ID NO: 374726 - DNA, 522 bp, Homo Sapiens
ctctcacccacccccgctgtcattatcaagtgagttcaactaagatttgcttaatgaaaacctaaatcattatggctctcttaatcagagtacctactatgtggctattctaaataggtgttctcattgaacttggctgtctcagtgattcataaagatgggtaatagcaatgaaattttacagattgggaaactgaaaaccggtgatgtgaaggaatttgtccatggccacacagccgtaagggagtagagacctgattcaaatcttgggctagaaggattctcagaatcttcttttctctttgcacctgattggctgtgcctctcgctttattcagtcaaagctcaattcaggacgacgtgaaagaacattaattccaaggtgaaatgtgcaagaggttcagtgaatttgaccaagtttcccattataatttattttgggggaaaatggcttaaaaacataatctctcggttctaacttcacgttcacttgaaaatgaaaagtgagtgttttacagatcc

SEQ ID NO: 374727 - DNA, 509 bp, Homo Sapiens
gtcatcctttcacttgcagcctgttcgtgtctttgaacgtctggcagatcgtgtggtgacaacatggaaatcgtcttttcacccactttgccaatctgccttttgttggagcgatcagtccattcgctttcaaagcagttactgagggggagcttctgccatgtttctggtcgctcacgttctcccttgctacctttgtgtgtagtcgacttttttgcagtacgttgctttgactcccttctcattttgtttttaagacagtcttagggtcactgtggtttcagacagtgttttccagagtcagggggaggatcgcagtgtctgtcacaagttgggccttttgcaggcgggttacagcagcttctcaacactcgctagctcccaaagcaggcagttgtgactgtgaggatgtgagggccgggcagcagcctctgccttctcagtattaggccacttcacaggtgacttggtagggtgagcaaatgtactgccgggcgtgtatggtgagt

SEQ ID NO: 374728 - DNA, 436 bp, Homo Sapiens
tgtgatagccatgaaaataatcaaaagaataattcagtataaattaggaatcattcccactccagtggactcagtcttatggaagtggcacataggagaaacttgggattctgtgatttgtgctgttcatgtacaggtctctctctccctagtgaaactcagctctttagtttgggagcctataccggatctctctgatatccctctccagctctaaacatatactatgtagtcacactgattgtccgttaaatacattcaagtcgttattttccttatgacaaaattcacagtgaaaggccaagtgtccaccagaagaattaggtgcaaatctaaagtgggttagtggcattttctcaggacagagtgcatgggagaaccccatagcactcctgaaggttgacagggtaaaacttttggacaatctgactctgtc

SEQ ID NO: 374729 - DNA, 353 bp, Homo Sapiens
ccgaagatgatgtggtaaacagctcaactgaaaccataaacatcaccttgcttgtgtggggtaaatagtggtataagtacatgtttaatgcattgataggtaaattcctagtagggcaaagataagatcttaattcattcacctatgcatactttgtgctgacgaaatttttaacacgagttccatccctcaaatgtttcaatatcaaaagtctaaaatgcataccatgcttttaccagctgctgggaagttggaatgtatcaaaacgtattcatttctcagttctgcccacactaacctccccattaacttaatattagggagacaagcaatgaatttctggatcagtaagt

SEQ ID NO: 374730 - DNA, 203 bp, Homo Sapiens
ctggtggacttcaaatcttcaaaggaccagcagatctggagggtgatgcagcaataccccacaggatccctaagcaggactccaggtctctgctgcatccctactgggtccagcctttggcctgctcaagacaccactaatatcagtttgtcacagctaacctgacgctcacctcatcaggaaaatccttgcgggtgggtgga

SEQ ID NO: 374731 - DNA, 489 bp, Homo Sapiens
tacacccaccgcaggagacactagctccctcactccagccttcacccctggagcagaagcccccaggaggttactgggggcaaagaacagccaatgacctttcacaagctcagattatctatgctgcaacaaacatttggaagtggcaattcccagcaaattgcaggcaatttagagtcatttgccaagatgcaatctgccctattgctccagggtctttacaaaggccagccagactgcagcccttgcagaccgcagggtggcaagtctcacgccagcctcagagcctcctcagcagaagtctgaatacatcacttacccagaaccaggttgccggcttacagtcatggtccctgaatcctgcataaaactcacctgaaggagaccagctcttagtgttgaagctacaagacgaaaataacaacttctgaaagccacgtcttattaaaaattaaaacactggacacttatcaatctaggtaaggtaaa

SEQ ID NO: 374732 - DNA, 475 bp, Homo Sapiens
tccccccgctgtgcacccaccccagccacccttctcacctacactagtgcaatcctctcccacctgggcctattaccagtgccacctccctattcaaactcctccatgcttcccatggcaaaatcctaagtgaggttacctaatgctttcatccttctaccattttcacttacacacgagccccctttctgggtctggaacacgccctgtacattcctgcctaaggacttcacagttgcgccctcaatctgggtctctcttccttggatgggtacatgcctggcttctcattcttcaagtttcgatgcaagtgtcacctcctcagagaggccttccccctgggtagactcctgaggctacttcttcattgactctgtgataccaccatttatttccttcaatatccttatgtagagagtactctgcagaactttatataaacagactttctaaagaatacctaatgcatgaagga

SEQ ID NO: 374733 - DNA, 422 bp, Homo Sapiens
tcacctctccctatgaaatgcttgatggtgttttgtttaggacctgtgggaaggaagaggagtgaggcataacgcggcctaggagaaggaggggagtttgattaagattctttagtgagtcctgaagcataggtaagagttctccagaacacggaagaggcaaatgaaacagttcattgtaaggtttagagtaagaacaaagtatgagatgtttaaggaaccacatggagtgtcttgagtgacaaaaagaaaaccagtgaccaccagagaaaaaacaaaaggacttttaaaaaattcctgagtcatagtttcaggcaaaacactcaagggagacaattgccaggaaataacatcaagaggatgcctctgagcattcaggtgatgtcatgtttagctcactctttcctggagggaattccacc

SEQ ID NO: 374734 - DNA, 145 bp, Homo Sapiens
gcacccaccccgccgttgcgctgagcatgcgcgacctagctccctgagcatgcgcggggactccttgaagcccgggagctggcgtcgaaaccagtggaggtggctatggctgctctctgcaagctctgcctcctgggttcacgcc

SEQ ID NO: 374735 - DNA, 234 bp, Homo Sapiens
ctgcttagtgggagggaagagccagatgcaaactcgttctgcgagcccgaggttccgttctcatgatccttgctgtgatttctcttttgatgttggcaattttaaaatgacatcagtctatctggacctttttcctaaggctcttgctcagaccactcagtagatagccgccacctgcccagtgaggtgaatcaggcccattaggccatttgtcaggggtgggtggagagcggt

SEQ ID NO: 374736 - DNA, 262 bp, Homo Sapiens
gtggattgtttaaacaggaaaaatttcactgtattgtagaatagtgataaatgtcatcaaaaaggcaaggtttctgaaaaaccaaatttactttcaccatccctgaggctaattatgaaattatatattattaataatgtggctacaaaaagttccatgttatcataatcgcatccaagtattacccctagtacccacccattaaatgggtattaatgcttcagaatgaaaagtgaaaagctggggtgggtgccgacggggg

SEQ ID NO: 374737 - DNA, 438 bp, Homo Sapiens
  misc_feature (216)..(228): n is a, c, g, or t
  misc_feature (244)..(379): n is a, c, g, or t
  misc_feature (381)..(395): n is a, c, g, or t
gatccccccgctctgcacccaccccggggaggcggaatctcacattgagagagggagggaggtgctggggggtaaacacggagctcttacctaaactcagagggagaactcattactacggggaagaagccaagccactcacgcaaggtctgcccccgtgacccagacgcctcccactgagctccacctctagtgctggaacactgggaatcacgnnnnnnnnnnnnngagacagtctcactcnnnnnnnnnnnnnnnnnnnnnnnnnnnnnnnnnnnnnnnnnnnnnnnnnnnnnnnnnnnnnnnnnnnnnnnnnnnnnnnnnnnnnnnnnnnnnnnnnnnnnnnnnnnnnnnnnnnnnnnnnnnnnnnnnnnnnnnntnnnnnnnnnnnnnnnatatttagtaggggtgggtggagagcgggggtaccgagcttga

SEQ ID NO: 374738 - DNA, 212 bp, Homo Sapiens
ccgctctccacccacccctccggcagaggatctggccaagggacagggcctggactggtgcccttgctgcccacccagtggagaggggagggcctgtatcctcagagctgtgccacacagggagcagcatttgagccggacctttcacgagggtctctcacgctgggaggtggtgcagggctacaagggagaggtggtcagcgcaggtgggt

SEQ ID NO: 374739 - DNA, 618 bp, Homo Sapiens
acccttcgcccacacagggagatccccgacccccttggccagcttcaccccctctctactggggtgagacacttcattcagagcactggctctgactcccaggggaaagtcttttgccctttacaactcctcacctcagcctcaccttgactttcacttctcaactgctgaattctataaaatagccttttagcagtgactcagcttttaggtgagcacagataatgaagaaattgaagtgccaccattgcactcccccaagttggggacataaactcgaatttgtacccaggtctgataaaagtaactgattgaggacgcagaaaggtggatgccattgacagcgttgactgttctcacaattcctacagaaatgaaagaaagagaggcccagcagaccacaccgggccatgaaggggaaggatgggagacaggcagaagcaggagtgaggaggaacgtggctcagaccctctactgtatgttctgaaaggaaaggcaagggaaatagctaagactggctggtctgaataacagctcagactctaggctatacaggcggtctctagccatctggcacctagccccgggtcgtttggggtgggtggagagcggagggt

SEQ ID NO: 374740 - DNA, 408 bp, Homo Sapiens
  misc_feature (88)..(88): n is a, c, g, or t
  misc_feature (384)..(384): n is a, c, g, or t
  misc_feature (393)..(393): n is a, c, g, or t
tgttccagcaaatcaatgatagcttccggctggggacacaggaatacttgcagcagctagaaagccacatgaagagccggaagccggngaacaggaggccagggagcctgtgctagcccagctgcggggcctggtcagcacactgcagagtgccactgagcagatggcagccaccgtggccggcagtgttcgtgctgaggtgcagcaccagctcattgtggctgtgggcagcctgcaggagtccattttagcacaggtacagcgcatcgttaagggtgaggtgagtgtgggcgctcaaggagcagcaggccgccgttcacctccagcatcattgcaggccatgcgcttcagttgctgggcacacctgttcccttttggcccacntttgatttnccaggggcccagcaa

SEQ ID NO: 374741 - DNA, 230 bp, Homo Sapiens
ctctagaggatccttattctcacccaccccggggcctgcgtaagcaccggggctgaatcggcaaaacaggctctctcatcccccgacgtgggtataaagctctgtggattccaaatggcaccatcaggctgcattcctccatgagccggctcttgagcagtgacaggacataaatcaatgtgttaagaagtcagagtcagtgtggaaaatgaggggtgggtggagagcgt

SEQ ID NO: 374742 - DNA, 455 bp, Homo Sapiens
gaatgcccaagtctgcctgggtgagtcagagagggcttcataggagaaacaccagcaatggctcagttaacagatgaataggacttaacctgctggatactcagaggaagggcatggaagcagctgttttcctgtcatgtttgcaggagtatgtgtagttcagcactgccaagacataaagaacagggctggaacatatttgagaatgggaggcagcaaggaaacaaatccgaaaagtcacgtcgctggggagataaagctctatatgttggaaacagtccttgccagatgctctctgatcctcaagtctaggtaagtgttagcgaaccaccaccatcagaatcctctagtaatctcactggcccaagtttgttattgtggaccagcagcattagtttcacctaggagcatctgttagaactccagtgtctcaggcccaatccgtaactggcccg

SEQ ID NO: 374743 - DNA, 302 bp, Homo Sapiens
agtgttaggacacatcctccgtttctaggtccttgatcattcactagtacataacctagagcctccacttccacttatctgccttgcctgcccgtcttacctggctagttttacctgtgtcctaccacctgcatcctactttgctactctaaattcctagatgttgcatttgcctgaaacctagaacctatttcttgtcctgtaaacttagaacctatttcttgtacaacctggtcctgactggattctgaacacagtgcttattctatctagagtagaggcaaccggagtagaggaaccgg

SEQ ID NO: 374744 - DNA, 577 bp, Homo Sapiens
  misc_feature (69)..(69): n is a, c, g, or t
agtaccgggcagtaggatgtgcaagccacactgagcaggttcctctgctattttattttagttagggcntctacaattgggctgacaaaataattttagactacgtaagaactcaagaaaacaaatgactttcatggcttgaagctcctgcgtagacccaaagaggcttccaactgattcctacactttgacaactatgcctgcactctagcgtagggatcctacaaactaatgtctggcatgttggaaaaagtaactggacagtgatgtaacctcatctcaaaccagaaacctgcatgcaaaaacctcacagaggggagatggccaactcttcatttagtgatgccttcagacagacctgcatgggatatctctgattgttctctcagggattctagtcaatacattaggaaactttaaaattactttagaagtggcaattactgaagcatcattaaaaatgcatcgagccacatgtgtaagaaaaactgcacccgctggcctactgctattctaaatggctttgttactcatacttttggggtaaaccaggctgacgctcctgaaagagcctgca

SEQ ID NO: 374745 - DNA, 186 bp, Homo Sapiens
ctgctcactgcggtcacttcctaggactcagacggtcctgctcccactgcggtaacttcctaggactcagacagtcctgctcccagtgcggtcacttcctaggactcagacggtcctgctcccactgcggtcacttcctaggactcagacggtcctgcacccactgcggtcacttcctagactcag

SEQ ID NO: 374746 - DNA, 539 bp, Homo Sapiens
aaatttcatatagaaatgaatggtaatttattaactcggtaatttatttactctgtgccaggcacagtgatagtctatgcgcacaatctcagtcattccttagtgaatcctgtgaaaggattatttaatcctatcaaaggctagggataggaaactaagctccgaaaagttaaatcacttgtccaagctagtccaatagtttagctgtcctgtccttttggtgcttttgctaagtgttcttccccaccacaaatgagtttttcatttcttgaaagggaaatatgcactcttatgagaaaaatcaattttcttgcctttattgcactggaataaatcataaagtttggtcacaaattataaagcagaaagaagccttccatgttccataggtcataagattggaagaaggaaaacaaaaccgagctgagtagcagaaactgtggaaggacacatacatggcaagacattattccaaactagagggaaatcccagaaccataccaaggcagcagaaataaaattacagaccccagtgtgac

SEQ ID NO: 374747 - DNA, 528 bp, Homo Sapiens
  misc_feature (142)..(152): n is a, c, g, or t
acggggtaactgctattctgacatctaacaccaaagattagtttttacctgtttttgaatttcatataaatataatcttccagtatgtactctttttgttgtttcatacaatatttactcttgtaagcaaatcaaagtgacnnnnnnnnnnnaacgaaagaaggtcaggttacgggattggcaattaaatcaaatctttagatcggtatattagagaaataattcagtaaaataatcatatccatagctatccaaatctttcgggataaaccatccggttttctagatattagcacaatcttaggctcataaacagagctccacatcatttcattccttttggtcaggtgattaaggtttaatttaattcgtatttaacctttaagttcagaagtatgtgtgcaggtgggttatataggtaaacttatgtaaggggagtctgtggtacagattatttcatcacccaggtattaagtctaataaccctattactcatttttcctgatcttctccctcctcccaccttcc

SEQ ID NO: 374748 - DNA, 620 bp, Homo Sapiens
ccatacatttccaagtctcaacatgcatagtcctgacaagccacacatctgttacctctgcattcgtactcatgcttaaagctgtgctagcatgtgctcttttaaagcggtagctggccaccattcacaagcaaaccctcataccaccccgcagagactggaccctcagatttaaatagcaacatctctctcctggtgcccttcagaagccaaactttgaacacagttcctgaaatgaaagacctaacactagcctagctacaaatctctcagagacggcttgttagaaccttcaacagtcaccccaccctcagttcacacccagcaccctgggcagaggcagggaggaaaggcagaatctcccacagccttcccttggtgggatctctccatggctcccccgcctgaagtaaggacccaagggccggctgttcccaccaccctggactcccaatccttccatctcagaggacacttcttccatgaagtcctctggctctcccaagcattgctggattcttctcatcccaggggctggagcttgagctccactgagggaatggattgcatgggacccacttcgtgtaggccccagaatgggtggactgatggggacggtg

SEQ ID NO: 374749 - DNA, 268 bp, Homo Sapiens
actgttctttgacccagaaatttattttaaatcttggtcttacatatggaatctttcttaacgctgaaatcacttggaattttaccattgttcttatcgctcacaactgtatcttgggtttatttaatacattatactggtcactcactgaatcttgtcatttgtataaacttgctcttcagatacgggaaatattactgaactgattcttctttccccatctaccatctcgatctttgttctcatggaattcttgtttgggtataag

SEQ ID NO: 374750 - DNA, 632 bp, Homo Sapiens
tccacagggatggtgttcctctgtctcccgatccattattactttgttgctctgttatggtatacatcacagtcagtctgtaattagagtttgtttgtgtacatattttctgccctcactccaaggccagcttaaaacttataaatcgttaaatattttggcctcctaaaaattaaacagtatcattcatagtttccactattaaatattttatgcttttggaataaaatatgtcattcgtcaccccctctcccaaaaaccccaaaactttgttcctctgcttttctagtttcccgtgtgctgcttagtgggttttccagcagccctggtcccaagcacaagaggcactgttagcattttcaagacaaaagtatccttaactcctcttcatgagcctgcgaagattaaacacggagctcagaacacagtatgaacacaataaatgtatgatgaaatgaatagggctagcattaactaatgagagctcctcaatgatgagcaagaagaaggtgaaatcatgccatccaaggcttcacagtgcccctggagaccacacagcccctttacacaggaaatgacgtgattcctgataagcaagcagtacacactgcacagcttccttcccttcctcc

SEQ ID NO: 374751 - DNA, 536 bp, Homo Sapiens
cacaggggagtgctctggggatttacaacaccttatggggcttaatttatttctggctttgatgcaagtttatgtttcttccctttgaaagtttattgtgtacattttgcatattttctaaaaatccaacacattttaaattatttctttggtctatttttcagatctttgtccttcctgcagtccctgaagactttaccaagtacttcagtttacagataaacaaacactattttcatacccctaaacccacaacagataactgaagtatttagtaagttataagtatgtacaaaaatattatatacctaaaccactttgcccaaaattgatgatgggaattaatatttattatttacacatgagaaagatatacatatttatttctctttaatcctatcactgtttcataaatattgtacttaatccatcaataatacaagatgctttttttaatcccaagaaataattagaaaacatttatgataatgataatattactttgtacaaatattatacaaacccattaaacccct

SEQ ID NO: 374752 - DNA, 473 bp, Homo Sapiens
cacagttggaaagggtcaggagatacgtcactatggcgcatcagtgaggacttaatgagggtaagagactaggaggccacaggaggacgaagtatgacctgctttcagtgttacgtgaaaatggttcaagggactgagccttgaactggagtggagctcttcctgctcatcaaaggagcgggagtgcagagacctaattctgaaagctacctagggtttctgaaagccagaaggaagatggtatccttgtgactagatgtgcagtatcctaatacttctgtttgaaagaaacacagtaatcaccaattttaagggcttatttagaactgagtaacttgggagttgaagtagacatcaacctaaacaggaagagaaaacaaaagaagaaagagatttcacacccaatgaccatgcaggaacagacatgaaaaagaactaataagaagtctcagaaatggaaaatactgtctttg

SEQ ID NO: 374753 - DNA, 354 bp, Homo Sapiens
aggaaaatagaacatgcaaagaaatgtgttacaaaccaaaacaattgagctttgcaagcataaaaatgattaaattctagtcttagataatggaggttaaatgagtagaagacaatgtaattttgtcaaaaacatgcataagcgggaagggggcaaagttttattaatcgggaatgaatctgtggtaaaatccattactattacttagaagatgagagaattcagtctaaaattctatcctctagaaaatttgaagacacttttaagagatatacttcaaaaaaacaatctgtacctatggcattaaaagcatctttcaatcatgtctggcaaatacatcatgttggtaaagaa

SEQ ID NO: 374754 - DNA, 491 bp, Homo Sapiens
ggtaaatagagcctctctcatttccagcacaagaagtcactcactgtggcgtccaagtcggccatgagaaagttgtgataccaaagtctaggtcaaagtcgggaagcgactggatctaacaccagctcattcccctactcacaggtgcccttagtggaccgcagtacacctcagtcttctcaggtcttcaacaaagggactgcagatatgtaaggtctcttctacttccgtaattgcatggttgctagtaaatgaaataaatacaactcactcttataccaactgtaacatattttcctaaactaatgttctgaaaacatccaccacttacaaacaacaggagagctcattttaatttacagccgtcagactggttccttcaatagctgcagatctaactagagatcttgactccagcagcatcacttcagtagttttgtctaagtcaaggaccgtctctgggtgaaaaataacccggccggccgaccaca

SEQ ID NO: 374755 - DNA, 575 bp, Homo Sapiens
cacaactggtaggataagacctttaaatacatttcatatttaagcttctccttatcctagtttggaaatgataaaagatggattgatagagaaaaactaataaagggcttcctgctacatcacaggaggatctggctttggtactgatgaggtataaacgtgaaaagtaagtttcacagtcattccaaggtcatgcctgctactcaacaaatgtgttaagaggtgaagattccatcctccaatttctaaaggacaatgacctccagctgctttcaaaatgaagcctattgcaccaacatcacatttgggaagcccagccactaggaacagagaaagcaattgaaagtgaagaaaaagcaaaccaggagacaagtcttcctgttttagtgactaccaacaaccactagagggtgagtctggtgcacactattatttattcgtaactaccaggaaggaagaaacccagtatctgtgagctcatctctttctggctcccacaggagaggataatctattgtgtggagctctccaaataagccattgtgtgttctacaaaaccagctcccactgtcaac

SEQ ID NO: 374756 - DNA, 537 bp, Homo Sapiens
aataccaaaatgtttagcccaatcataagccaactatattctaactcattgataaactgacccatgtccagaaggaatacttaaaaatgcattgaataaaaataattgtaacatttggaataaaaaattatagcacgattacagactagtatcctttggcaaatagcagaaaagttagttcaaaaccttaaaaatgtgttagtctagggagagttacgattatgagtccagagaaaacacaggacacaggggggcgtgccaggacacaggagggtacaacagcaacacagaaaacaactacgaccccgataaagaaatcagcactccatgaccaacgtgctcacagcacgagggacaggtagcacagggcatgtgagggatagtacaggacctgggaaaatagtacaggacacgggaatgatcatacaggaactgcgaaggtagtacagggcatggaggtatagtaacagggcctgggaaggaagtataggacatggagagataggacaggacctgagaaggtagtagaggaccctg

SEQ ID NO: 374757 - DNA, 427 bp, Homo Sapiens
ggcgaggtactttccacaggaaccatagatgaggaggaagagaggagggacttgaccaacagtaaatctcctggttggaacaactctgttcccttgtctctgtgacatcctttgggtaggtttttaacgttttgttggtattttgccaaagaagttatatctttgaccaacttggccgtttcctgatcaagtaagaggccatttgtgagaaaaggtcatccatacagcacttcatatggactgagccccattttgtgaggagaattttggattctcaacaaggccatgggcaagagagtaggccatgggagatgagtttcttgtgttcgtttccttaagtgcctcttgagtgtttcgtttgccttctcagccttccctgaggattgtggcctccaggcacagtgaaagtgatattatatccctagtg

SEQ ID NO: 374758 - DNA, 226 bp, Homo Sapiens
tttccatgaatgcttaaaacaaacaccaaccaaaaaggtactgaagagtttggtaaagaattcccatcactactgtggaaagagtttccaactgtacccagagaccatgtgtaaaccctaacccctggaaggaagtgagaagcggaaaagagggatgcatggggaatcctcagagggtgaaatctgtccacttaagtattaaagaacacatgtggaggatgtatcc

SEQ ID NO: 374759 - DNA, 393 bp, Homo Sapiens
caggagctcctctgtgcccgtcatcaccccctttatatcacacatattcgctctcattctgggctacctggtccctgtcagaagggaatgtttgagttgatgctctggtacaaccacagatgtggttttcagactctcttgcttttttgtgagctcaagctgatcattcctttttttcatcagaacgcccgcagtcttacacaacagtttcatttaacgcttgctcaagctcgcatgattattaaaactcgtcctgattcccaagggcattctctctccccttactcattggaacttggtgccaacccatgaggtctaggtacctaatgctatctggtacacttgatattactcagcatccacctttgaatgctttaaatttctccacgtcct

SEQ ID NO: 374760 - DNA, 397 bp, Homo Sapiens
ccttgcatatcacactcccttgtctggttcagtcctattcatgtttccgatcatcgcttcctcggggaagcattcctcccctccatattgaggctaaagtatttccaggggacaaatcctccattgcgtttgtcacgtgttgttgttttacattgatttggtggcaatctgacaagctctgtctcctgcagaagactgtatgctccgcacaacagggcctgtgtctctgttctccatctcatctctggcacctcacaaggttggtactcagtaactatttgttagacactaaatgaatggaatgaatggatccctgacaaataacttcaccaaaatcttttattaaagacttgcctttgcaaggaaccctgtggaatacgccaaaagacatggttct

SEQ ID NO: 374761 - DNA, 734 bp, Homo Sapiens
aaggataaggaagagcatgtacttcacatgcaacagggaattatattttttacagttttacacccaactccatattcgttttcctatgcactattttaacatagtccaaaacttctagagtgtgtggacatctagcagaacatcacaacgatccattatatccaccaaatcatgctgatagagaagcaaaagtcacagttggctaatgtgctgtttgcattagtaggaatcatgcactccacaaagagagaaataaaccctacaacaattcaaggacctgtctcctcagcaacatttttaggagcccagtagtcagggggtacactgagatatcccctccaagtaataattagtttgctgcatcttatactcactaccattaagaaaaaagcacgatacctgaacagaaggttgtttgaattttggagggaacacattctacacttacgatgctcgtccagcctatatgccaggtaacatggaagtctgccagatttgagagttatgtaaaacagaaaagagttccggatcaggtttcagatgcagtgcaaggagctctgactcttgggccatattattctatagacctattgtgttggtggtgtcactggtgggataagacgcaatgtggagcatatggcaaaccacagtgagagggatcccctgtggaaaagtaagtccctgtggaaaagtaagtccctgtggaaaagtaagtccctgtggaaaagtaagtc

SEQ ID NO: 374762 - DNA, 329 bp, Homo Sapiens
ccaagagatagagagactcagaatcaagacaggcagacatggacagggacaaggagacaggggcaggtggtggcaaaggtggaaatggagaaaggaaatgaaagtgagggtgggtggaacttggccaaagtcccacagggatgaggtgagcctggacttgaatgcaggtcaatatgactctaggcccccgatatttgtactgtcagaggacagagcaagggccagagacagaaaaggaggaaagagacaagacaaggagacagacacagagtccaggatatggagaaactgagagagagtcagagagctgtaaagaccctgtgtggaaa

SEQ ID NO: 374763 - DNA, 440 bp, Homo Sapiens
actgacacagcgtaagtgcagtcagacgagtgtcaacctccagcgtcagcctttatgagtggttccaggaaggaggtgtgtggcattgtcaagggagaagcaaacagggaaaacaacagtgatttccaactattctgtaaacaccagcttatcgtcaaggctctgagctacagcttctgcttctatcatggtggcaaagaagtgcctacaatcttcttcagggtaaagtcgcttttctgtcacttaacgagttcccctggctcaggactccaggagttttgctctttgaaataaaactctaataccccaatacaggcccagttaccctacatccctatctgctctgcactacatgtgaacattgacgctttttacccagtttgtgtcactgtactcttaacatactcttaacatttctttcaggcacaggcaggaagccc

SEQ ID NO: 374764 - DNA, 422 bp, Homo Sapiens
agtgtgagccactgcgcccggcctagatgaagttttaaaggctctccattctctttctcgctggagttcacactttggtattcttaatgataattatattcgtctgtgtctcttccctagcttctttggaacatctcagggccttttgagttctaactactcttcttgttttatgtgggctctatctaatacctctagattaattcagaacatatttaatccttcttgtataatagccttcacatgtgtgaaagcttgatctctttcccagtcttaaaaactctccagcaacttcatccttccctcaccaaaatgcaaatttccttctgcttgaaccgtgatgtttaagttccctttcatagtggagtatccagaagggaacacattgtagctagcttgttgtgggttaagactgtcacttt

SEQ ID NO: 374765 - DNA, 386 bp, Homo Sapiens
gcaaatggcaatgtgctcccaacttaccttcttgcttctgcccttgttcctaaatacagcaaccagagtgactctgttaaggtataaggtagataatctcactcctctgctcaaaaccctccaatggcttcccactccttaccaggtgaagctaaacgccttatgagagccctcaagatcatccatgatctggctccctatctgactttacctgcccttactctctcctttgatccctctattccatgcatgttgggtgccttgctgttccttggacttcacaggcattctcttgccttagggtctttgcaggctttttctggatctctctccagtattctttttactcaagtcctttaaaatcttgacgttccctgtgaaaagta

SEQ ID NO: 374766 - DNA, 162 bp, Homo Sapiens
  misc_feature (111)..(121): n is a, c, g, or t
ggtacccttgcagaagcagaatttacatgagagaaaaacttccacttatactgcaaagaagaaaaccaaaccaaacccgacctcctcagagccatgaacttggtaacaggnnnnnnnnnnncccagagcctgacacagcagtaacttcatgtattatattca

SEQ ID NO: 374767 - DNA, 410 bp, Homo Sapiens
catggtggatgtacttcgaaggggacacaacatgaaaaccagcgactagtttaggtttaatcaatacatttaacaactatcccctggccatctactccgaggaacgtactatatggacaagagacaaggtcacagggcctggacacactggcaggtcaatgaccactgcactgtcaccccatttcctggattctaagatgtcctaacatttctgaatctaatgggaatttcacaccgtatgttcccaaagatgtgtccatcaaaggtgccgaggatccaggaaacacagcacagagctaacagctgactatgaagtgctgaagacgctcaagaggctgtgggcagcaaccaggcaggcatgaggaacactaagtggggtgaggccagtctcctggcaaccaagaaagacc

SEQ ID NO: 374768 - DNA, 279 bp, Homo Sapiens
gcagaacaaaggcagctaatcaaactgtgacaggttcatgagccaggattacatatgacccttgctgtgcagctcacatggctgttatctaggcttgctcaaaagagcctcgcatgggcttatctcataacgttcgctatggcacccagactgccgcagcccaggcctgctcaggcatgtcttacaaccttcactgtgctgcttagttaaaacagagtacttgaagttactggttacagaaaaccggaatctataaactcatatgtttactcataaggg

SEQ ID NO: 374769 - DNA, 397 bp, Homo Sapiens
aaatggggaagaggaggagctgcccaaggaaagaggacaggaagggagagagagaagcagacagacagatggactgggcctaaagacagcatgaactcctgggagagggacttgtggtagaggccaggggagactgcctggggtcacctggtggttggttagtccatgatggaaaattttgtctcaaatgaggctgtcattaggatgcacatggatgtccctctgacataagttccaagaaaattaaccaataggaactgaatgataagacatgaaacagattcctaattaagttacctgactccagactgactgcagctgcaggttctgaaatgggtttgcatgggaggctacaggcagtatggaatgggggaaaataacggggtttttggtcaac

SEQ ID NO: 374770 - DNA, 243 bp, Homo Sapiens
ccagacacaagggcagtgtccaacactagacaggagatgaggcgagcagcggggccctattttgtgaatccttgagatgaaggcaggaatgctatctctagggcaggttatgtagtagcaaagggctggcccccaccccacagggcagggcctctaagactttatgatttatattgatgaataattttctactacataatatacacatataagcaagaagttggtaaaaacttgcaaaaacat

SEQ ID NO: 374771 - DNA, 159 bp, Homo Sapiens
ctgtgagccccgcagtgtgcatgttctccacaaggctagtctccgggcaagctgtctttggtttttgtgatgactttccctgatctctggatctctctaaattcaatctttgctctcgtgattattgtttattctcttgcacgtttaccgactttcaga

SEQ ID NO: 374772 - DNA, 527 bp, Homo Sapiens
gatttcgtggggacacagatccaaaccatatcacctgctttctttgctgactattagctagggaatgctctctgctcctaaaaatcacctgcattcttcccttcccgtgtggctctccatcttcaaattggcagtggcatgttagatccttgtcaggatttgattccctttgacctctcctctgccaccagccagacaaagctctctgcttgaagggcttgtgtcattctatcagtcctacctggataacctttctgtctttgcatcacccgtgcctgtgttagtctcctagggctgctgtaacaaggtaccacaaaatgggtggcttaaagcattgggaatgacttattctctcacagttctggaggctagtggtctaaaatcaaagtgtcctcagggctgtgctccctccaaagcctctaagaaaggaggccttcctgccccttccagcttctggaagccccaggtgtcccttgccttatggcagcatcattcgcatctctgcctctgtcttcacatggtctctt

SEQ ID NO: 374773 - DNA, 211 bp, Homo Sapiens
agcgtgctcccgtccgaggcttactttcccaccaccctgaagaagttaagcatcgcactacgacatgcttttgtcaataaaaggtgagcagaagtaatgtgtatcactcctgaacagaaactctaagaacccaagcataattcaccctgttctctttttcctcagttgtagcaacaagaaatgttccagaagcaactgctccaccagcctg

SEQ ID NO: 374774 - DNA, 128 bp, Homo Sapiens
ggaccacgtattctggcgcatttcaggcagcatcttttccagatcccggacatgccggtcataaaggctcagctgtttcgcggtcatgtctgctgatccagaccatacgctttgtggtgtgccccctg

SEQ ID NO: 374775 - DNA, 744 bp, Homo Sapiens
  misc_feature (654)..(654): n is a, c, g, or t
  misc_feature (680)..(680): n is a, c, g, or t
  misc_feature (712)..(712): n is a, c, g, or t
ccaaagtgcttgactgactccatcacttgcctcctgagtgagcttccccagcttagtctccccagtggacagcagatagcacgacccccaggcacctttctcttgatggaggtggctgacacaacaggcatatcccccacagtggtaggctgttgtggcctagtctggtgtggtggagagcagacttggcagtgtatacttagtgccctgatggcatcccttccttatgagtaccgcctgcagcaccggacagtcgctgagctcaaccacatggctgaggttctggtgcctgcaacattgcgattcctcacctgccaaggtgtcagctctctgctgcaggtacacgggcaacaggctgtttgtgcaggtgtggcagaagttaccagcatggcacgcatcttgcatagtctgcttgacctccaccttcgcctaaaggaggagaaggcccctggcccaggttctggcccatctttgataccttcataagggattctattagtcgcctctccaactaccctgagccaccaccctcagccttggtgtttgatctacatgtaagccctgaagatggaacactggtccccttcactggccaatacctgaggcagccacatcaaaggaactttggggcacctttcacccttctatccagantgaacggctcttgtatgtgggtgganctgcttctgttcaggggggacagccagtgttnctgggttggagagggcagcaacaggggaagtc

SEQ ID NO: 374776 - DNA, 156 bp, Homo Sapiens
aattaagacgtgggaaaatggtctcagtttttcaggtgcttgttaaagatgctgagttttctggtcaccattcttggaagccctcacacagcagattgaaagtgaggctcagaatcttcatttttaaagcatcctcaaataattctataccctgac

SEQ ID NO: 374777 - DNA, 436 bp, Homo Sapiens
  misc_feature (28)..(28): n is a, c, g, or t
  misc_feature (124)..(124): n is a, c, g, or t
cccagcttgctgtccctgcctaaaatgntccttggataatcatgaccatcctctgttgaaaatgggagtaaaatcccaacctatgaaattagaattccgcagggccttgtgaaattaaaaaaanctgattgttgtaaagaaaatttagagaaaccaaggagtcccaggggaagttactggctttggagagcctctcagtccaggtgaaataaggtttatagaaaatcaggaaaaatacggtgaagcttccagaataaagattgaacccagtccattaaaagaaaatactctaaaatcttgccaaatacatgtaaatggaagtcacagtgatcatccagaaattaactgccacaaagttgtaagggatattctattagagcagtcactacagagccacaagaaactcaaactaactaaaatgagggcaaaaaagaag

SEQ ID NO: 374778 - DNA, 412 bp, Homo Sapiens
  misc_feature (22)..(22): n is a, c, g, or t
atgggccctgtagggggaaaanggcaaccccacaaataaacccagtgaccatatatagttttaaaaaccctacaaatttctgatctctctctcctgtttaatatataagccctaatttctgtgtatgtgagtaaaactgcagcctgagtcatttaggaagtaagtattgagtttttttaatcataaatatactagaataaaacagcactccctaacaattaaaaaagagttttatattactttagaatgtaataggtttttgtccttattttatgtcctgtaaattattagttcaatactgttagcattcccggataatgcacacatgatttctgaatgttttctgtaaatgacaatcaatgtttatgaagttccctcctttaatgctgaacaaaattaaaagaagaaaaag

SEQ ID NO: 374779 - DNA, 617 bp, Homo Sapiens
  misc_feature (20)..(20): n is a, c, g, or t
  misc_feature (134)..(134): n is a, c, g, or t
  misc_feature (185)..(185): n is a, c, g, or t
  misc_feature (262)..(262): n is a, c, g, or t
  misc_feature (310)..(310): n is a, c, g, or t
  misc_feature (395)..(395): n is a, c, g, or t
  misc_feature (404)..(404): n is a, c, g, or t
taaatgcatcagccaatggnaagtgaaggaattgggtgtcctgatgcagactgagcagtttctctcaattgtagcctcatactcataaggtgcttaccagctagaacattgagcacgtgaggtgagattttttntctctgatggcattaactttgtaatgcaatatgatggatgcagaccctgtncttgtttccctctggaagtccttagtggctgcatccttggtgcactgtgatggagatattaaatgtgttctttgtgngctttcgttctatgattgtccaaaagtacgatgtggttccttttttanttttattaaacaatgagctgaggctttattacagctggttttcaagttaaaattgttgaatactgatgtctttcctcccacctanaccaaatantttagtctatttaaagtacaaaataagttctgcttaagaaaacattgcttacatgtcctgtgatttctggtcaatttttatatatatttgtgtgcatcatctgtatgtgctttcactttttaccttgtttgctcttacctgtgttaacagccctgtcaccgttgaaaggtggacagttttcctagcattaaaagaaagccatttgaaaaaaaa

SEQ ID NO: 374780 - DNA, 435 bp, Homo Sapiens
  misc_feature (24)..(24): n is a, c, g, or t
  misc_feature (35)..(35): n is a, c, g, or t
  misc_feature (48)..(48): n is a, c, g, or t
  misc_feature (53)..(53): n is a, c, g, or t
  misc_feature (70)..(70): n is a, c, g, or t
  misc_feature (78)..(78): n is a, c, g, or t
  misc_feature (86)..(86): n is a, c, g, or t
  misc_feature (118)..(118): n is a, c, g, or t
agcctctctgggccaaaacccagnaaaacctagcnaccaattctgtgnggtgncatctcctgatgtcccnacatgggnggactccnaactgcatgaaggaagtcttaccccggtgcancctctgcaacccaactctttgttcatgcaggtgccctttttccttcttctggggtttgcctgtgtgactttatgccaggccctaccctaggctggctaatcagagtggccggggaggactgggggctggaagacaaacaggaacaactcgcaactcacagaaccatccgccccgtggatcccggagtcccacagagagggagcacgtgtactgggcttcccagcactcccgccgcctgggccctgtcagccatcgcggcatttgatgtccaggttgatcacagtcccatgctgtatgcaataaataattctgttttc

SEQ ID NO: 374781 - DNA, 418 bp, Homo Sapiens
  misc_feature (27)..(27): n is a, c, g, or t
  misc_feature (57)..(57): n is a, c, g, or t
  misc_feature (132)..(132): n is a, c, g, or t
caagggcaaataagtaaacagttaccnctttaaaagcaagttacccttttagtttantcctggtttggagtcccctcccacccaagattcagtagaagaaatacagactgtagaaatgagaggactgctaantcttcagaactgtaggaatattgggagctaggagtctgaacctgaagtatgtgattggaccccagaatgtatttgaaggctctgaaattgtacatgcaaattggtacatatgcatttttctggagagagcctgtgaaactgaacagattttcagtgggatctgagacttttctttgtttagcaccccgttttctgagtacatactgatctttcataatccattcagaggggcagattgagaatgttttacacatgctcttcatataaatgctacagaaaaaccttt

SEQ ID NO: 374782 - DNA, 396 bp, Homo Sapiens
  misc_feature (103)..(103): n is a, c, g, or t
cccggaacacccacccctcagtcacaggcatggggccccactgcaaaggcaacaaccccactcccagagctccccaaggcccgccctccccctgggaccctgncagccagctggctcccataactgcttttcccgtttccctcccaggcattttcatccctagccctactttgtgctgggatctgagggggatagcaagcggagaaagaagggatctagagggagaagattctagatccttcttttgactgccagctgattttgattgccagctttacctgcttcatgagctcagccaagtcacttaacctctcagagcttcactgttctcatctgaaaaatggggatgaaaatggtatctcattacagagtagaattaaatgaattattataatt

SEQ ID NO: 374783 - DNA, 398 bp, Homo Sapiens
  misc_feature (58)..(58): n is a, c, g, or t
  misc_feature (62)..(62): n is a, c, g, or t
  misc_feature (75)..(75): n is a, c, g, or t
tcagttgttttaaatgggcatgataattgtaaaagtaatactaattgtaaataattcnaacncctcagaaggacncaaagatagatgaaggtcagtctttgtctctgctccctcaatctgctggaatctgcctccgcccaagaggtcattaccataagcaatttggtgaatatctgcacatatacatgaatgtgcacatgttttattctttacacaaatgaaaacatatgctatagactgttctgtagcttctttttcatataacaaaacgtcaataagtttccagttcagcttatgttttgttgtaactgcatagtatttactagtatttcattatacaaatgtattagaatttagtaaacagactaaaaaaggttacatcctttttctaaacatcc

SEQ ID NO: 374784 - DNA, 437 bp, Homo Sapiens
  misc_feature (34)..(34): n is a, c, g, or t
  misc_feature (48)..(81): n is a, c, g, or t
  misc_feature (135)..(135): n is a, c, g, or t
  misc_feature (152)..(152): n is a, c, g, or t
ctgcaaaaaaacaaaaggaatgccccaaaaggtncaagggctggctgnnnnnnnnnnnnnnnnnnnnnnnnnnnnnnnnnnaagaagaaagtaaggcacagaaccccctaaaaggcgaactcctgccctacccanaagccccggtggggaancatctgcagaacttcccctcaggggctggggcaggcctctcctgtttgtctttgcctccaagttgaggaagagcagggactggcctctgcaggctctgcagtttgtgcaggtcctggcttgtggccctctcctaggacagcccctgacctttgtctctctggttttccagaggaggaagccaagggtggcctgcctcggtgcaagcagctgcttctctatggtggcaaaatttggaattaactgccttgtgacaggatggtttaatgatatttatttgtgttttc

SEQ ID NO: 374785 - DNA, 267 bp, Homo Sapiens
  misc_feature (14)..(14): n is a, c, g, or t
  misc_feature (23)..(23): n is a, c, g, or t
catatattctctanaatctctcncagcccaccccctgcattaggatttcccatatttaaaatatttgtacactgactggggaagggagagattgcactataaacaagttcagtggatgtttgtagcaatgagtaaaactgtattctaaattaaaaatcaaatatatatacacgcagttatacacacacattttttaaaaggaggaggaggaaagagagctattgtccattcctacattttgaaataaacttgtcaagattacgcatc

SEQ ID NO: 374786 - DNA, 348 bp, Homo Sapiens
  misc_feature (17)..(17): n is a, c, g, or t
  misc_feature (183)..(183): n is a, c, g, or t
  misc_feature (209)..(209): n is a, c, g, or t
  misc_feature (308)..(308): n is a, c, g, or t
tgatgctcagcctccgnaatcaaccccatcctatccctccttccccagaagacccctccttcggcctcccacccctccccacaggaagaaatcaacaaccagtgtgccgacacgatactgaagtaacaccatccataggcacctcgggttcctgtccaggctgcctgtcccaaccatgagaantctgggcccagggccccaccctcccntagctcccgccctgctgctgcctctactctctctcctgctgtgctgattggggcaagcctgggaacggctgccccccacctccccacccaggccctgtncctgcgggacaatgctgcctaataaactcacctgcatcca

SEQ ID NO: 374787 - DNA, 454 bp, Homo Sapiens
gcaggctgctcaaccgctttgagcctcagtattctcatctgtcatggcggccaagacagaccctgttccttcgaggaatggggagggagggagggaccaaagccgtgaggatgaggacaactccaccctccttccttccccacaggccaaccaaccagctgctgacaggggacctggccaatctcaggacaagagaatgcaggcaggcaaatggcattactgcccctgtcctccccaccctgtcatgtgtgattccaggcaccagggcaggcccagaagcccagcagctgtgggaaggaacctgcctggggccacaggtgcccactccccaccctgcaggacaggggtgtctgtggacactcccacacccaactctgctaccaagcaggcgtctcagctttcctcctcctttaccctttcagatacaatcacgccagccacgttgttttgaaaa

SEQ ID NO: 374788 - DNA, 495 bp, Homo Sapiens
ggaaccctgaggaataagcgagggtctagtcccctcattcttggagtgtggagacaggggacttgctgctctcaaccagtcctcttacaatgattgtgacctatttaaagcattcagagaagtaccagagatggtgataaggaacattggatacccacccagcccagctttgcccaaatctttacattcctatatcccatattttatacttgcttgaaatttttatttgaagaaatcataggtacagtccaagcaccctgtgaacctccccccacccagagcactcttcctcctgcctttccttgagctactaataatctggtgactatgtccccaaaatgcatatctttatattttaccacagatataattacatatggacgatatataatcttgttttgcatgttttaaaactatgtaagtggatcttgctgtatgtatccctctgttacttccaaaaccttaaaaaacctaaataacattagagatttatag

SEQ ID NO: 374789 - DNA, 483 bp, Homo Sapiens
  misc_feature (41)..(41): n is a, c, g, or t
  misc_feature (48)..(48): n is a, c, g, or t
aacttcaaaactatgtaaaaccctaagggttcgaacagaanactttgnaaagcttggggctgtggcaaagctaaactctgtaagccctctctttcgaaaagggccccaccctgctagcctttgaacttggaagcatcgcccacaaacaccagtgccaccctctagccttgagggaccatatatgtctctgtgaatctccgttgcattggacagcttctctcccaagagctgctcttataaaagagacacaccacattttaatgagcttcgctctccacagaggcctgcttccatcctaattgagcaagtagactttagtaactttggaactcactcaccccgtgactaatacaccctgtctacccagcgcattccctgtgagatttgttcatgttgttctccccctccttaagcattgtgaacctaggaaaaatatcatctctgtagggcaataaaccatgtgatttgtgaaatcaaaaaaaa

SEQ ID NO: 374790 - DNA, 504 bp, Homo Sapiens
  misc_feature (110)..(110): n is a, c, g, or t
  misc_feature (286)..(286): n is a, c, g, or t
aactttgtaaaaaccctaaggggttcggaaaagaaaactttgaaaaaccttggggctgtgggcaaagcctaaaactctgtcaagccctcctccttcgaacagggcccccnacccctgcctaagccctttgaaacttgggaaagcatcgccccacaaaacacccagtgcccaccctcctagcccttgagggacccatatatgtcctctgtgaatctccgttgcattggacagcttctctccccaagagctgctcttataaaagagacacaccacattttaatggagnttcgctctcccacagaggcctgcttccatcctaattgagcaagtagactttagtaactttggaactcactcaccccgtgactaatacaccctgtctacccagcgcattccctgtgagatttgttcatgttgttctccccctccttaagcattgtgaacctaggaaaaatatcatctctgtagggcaataaaccatgtgatttgtgaaatcaaaaaaaa

SEQ ID NO: 374791 - DNA, 485 bp, Homo Sapiens
gcagtgaggtcatctagcagtgacaggatcccatcaggctccttggaaagtgcttctacttccgaagccaaccctgaggggcactcagccagctctgacccaggaccctgtggcagacagagagggcagcccggtctccggcagcagcccccttcccagctcacggctttctccgatgaagacattatagacttgaagtaacagagttgaatctcatttgccatctttagttttcttatggaggtttatactctttaaacagttctgatgtaatttctcaacaaaatgtggcttttagcctgtcagtgatctattggaccaaaccttctgcacactcggccagttccctctccaatgtccggtgccatctttcctgacctttgtttctttctgttcaggaaccatcagtccccttgtaataaaggtggtagatttcattgaggttttagattgaaactttgaataaatcaaaaatactcattctt

SEQ ID NO: 374792 - DNA, 245 bp, Homo Sapiens
ttatatattgtatgtgtttgtatgtgtttatcctacatatattatatctgttaaccttcaagttaaagtgtgccaaaggaatctgaaatttgctttcaatattgcagtctatcttcaatttacagaccttggcttttctaccccaattcaagaagtcacttcttcagtcaaccaaaccaattacaaaattgtgttccaatgtcacatgttcaaaaataaacagttcctgaaaagatgtaagcttt

SEQ ID NO: 374793 - DNA, 132 bp, Homo Sapiens
gcagccatgaagatgattttatttatctatagttatggttgacatttttcatgcataaaaacttctattgctcaagaaaaaagttaagtacttcctatggaaacaatagacaaatgacaacaagaaatttac

SEQ ID NO: 374794 - DNA, 370 bp, Homo Sapiens
  misc_feature (18)..(18): n is a, c, g, or t
agtgtggcaccccatggnctgcccttccccatcccccccctgcctctgaaataggacatttttccctacagtaacaaaacaggaatcaaactcaaggctgtgaacaaacatacgctgctttattctttccaatgtttctcttgttttctagaactcttatccatatgtttttaaaataagtacctaaaagtggtttgatagtgtcctaaacgacttttttaacttcctaaatggaaagagcataacaatgtagttgattggtaagatttacagggatttggtttctgagtttgaggcacattcccagtgaataagctgagtcccataccacactcaaaaggttttaataaatctaatcctatttcttctt

SEQ ID NO: 374795 - DNA, 335 bp, Homo Sapiens
tcaaacctgccacccaaaccccacctatggttgtaaatgaccggacaagtatagtttacatgtgaatgttggttggtatttttgtttacattagtgagaaagatgaaagtgaaattacccaagatgtgttgaaacttcatgcattcatcagcgatgtgagtggctttgttgaattggataatagttttggaatactggaagagtatttcttcaacattttttgtgctattcacagtgtgacagctatagacatgatatattttaaagtttcatctgtagtattgtcatattttccatgtctttcttaagtctaggcaataaacaaaacaataaac

SEQ ID NO: 374796 - DNA, 460 bp, Homo Sapiens
tactgtgctgcttgtgggaaaaccttcagcccaacggatcaaagttggatcaaacaccagttgattcacacccagggaataggctgttgggctggcaggagtgaaaccgagcatagtttcctctccaactcctctttggccattgtctcagcctctgccacttcccagaccgaaagcctggactcagctcactgcctacatccagtggccacatagcctgggaccctcctttgaaacatcctttacaggctcccttctcactgccactgctcttgcctcttgtgatgtcttgggtttgggcttgtttttacagcttgtgaacggactgcacgtttgttacaagggagaagattatggaggctgcatattcatgaatagagtttattattataatgaaaagttaccaaaaaagtaaagtgacgtttggtttgagataaccatagtagtttgtttgattggt

SEQ ID NO: 374797 - DNA, 417 bp, Homo Sapiens
taccagggacatttagccaaattacctaagccccacccaggagtaaaaaattagtgtttaatggtgttccctccctttgcctgccctagcaatcctaaaatgatatatgatatgcatgcagacagcatgccacaaatacttttcctatgcacccagcagttttcccagtaagatcgtaaaaatcagtgcatggcattagagtcttgtgatgttaaagggccttctcaataaatattggatgttggggcagggaatgatgaacttgagcagtaaaaacttaaccacaaaaggttattggtggtggagtagattatgttcttttttaaagttaatttttctattgtatattttaattttaaaaattaaggaggaaaccagaaaagtgaaataaataaaaatgctgtctataccctttag

SEQ ID NO: 374798 - DNA, 305 bp, Homo Sapiens
atccatgtggtgaatatgttttcattttcctcctaataatgtttctcttttgttaacttatttatttttcaaacactgagccatagtcttaaatttaaatgctaaaaacaattgtatcatgtagtcgggcagcctattgatactgtcaggggaaaaaaatgggtcagaactcagcatctgtcatgaaaaaaatcaattgaaaaacaagcagattttaaattttgaagtaatcaaaataatggaaagtgtctgttttgtggtgtatatactatgaataaaatcacagcattttctaagcatttccc

SEQ ID NO: 374799 - DNA, 446 bp, Homo Sapiens
acggaaaaccccaacagtccaaagtttggatgagggaaacagaatattttaccatattccggcaagtgtttccccccacacattacctttttaattaacaaaaggtggatataacccttaacccaagcaattaaagcctagccatcacccaatattgggatgaatcaacatcatatgccctcttgatgtgatatactaagaaggacaaagtgtcaattcctttggtattccctgtgaaaaatttataacttgaatcttaggaggaaacatcaaacaaatccatgttgagggacattctacaaaataacttgcctgtacctttcaaaaatattaaggtcaagagacagaaaggctgaggaactgttccagataaaatgagactaaagagacataacaactaaatgcaatctgtgatcctgggttcgaacctggactaggaaaaaaaa

SEQ ID NO: 374800 - DNA, 223 bp, Homo Sapiens
tggatgagatgctgctcttttgttattcagacaaactgatatgacgtgagtcttgtgctgtgaaatactgaagagctttccgagaaatcacacaagagatttctggagcctgtcacatcctccctacctgtcctcatctcagctctctagaactccttgtagcctaatcagtaatgtcatcaaacctcaacaaaccattactctggtatttcctgttacacca

SEQ ID NO: 374801 - DNA, 208 bp, Homo Sapiens
cttttgagcaggagtgaaagtattaaaaagctttagagcaggaatgaaaggaaggaaagtacacttggaagagggtcaagcaggggacttgagggatcaaatgcgtggtttgaccttttgacttggggttttatatgttggcatacttctggggtcttgcgttacttctcccctgattcttcaaaaagcacctatttcttaaggatcc

SEQ ID NO: 374802 - DNA, 313 bp, Homo Sapiens
  misc_feature (36)..(36): n is a, c, g, or t
  misc_feature (65)..(65): n is a, c, g, or t
  misc_feature (92)..(92): n is a, c, g, or t
ttaaaatggggaggtatggaaaaaaataatttaccncccgaaagggcatttaaataccatagagncctacctatatggtttttgttattttncctcatattaagaaaactatgattacccaatttagaagagatttctaaatatagctctctagaatacaatattcttaataaaaactaatctgaatccacagctgttgaagtttaaccggccacttttttgatataattggtagtcatgcatttgtatcagaatgtgtagttatagtttgtctttacaatgcaatcatatgcattgtcttcatgtacacacc

SEQ ID NO: 374803 - DNA, 446 bp, Homo Sapiens
  misc_feature (21)..(21): n is a, c, g, or t
tcaaaacctttgttgaacaangtaggataatgcccaactaaccctttgaacttgaagtgcttagccatgccccaaccccaggcagcatgaagaatgcatcaagaaggggacaccctagtggcagttgacctttgaggatctatcctaggatcaggttactgatttgggacctctgaatcagtacatcataacatcgagagtgatctctgccaaaattaaaattctgtcagaacagtataagcagaaggaagacattaggtctttctgaaatatggagctgataacttctatcagttctgaattctgtactgtcccacccccaaatcatctatattgttgcatgtgcttagctttgtgccttgaattgctatttcctttttatcttgcactcagatggtatttttagagatgtttcttcaatcaaaacaagataaagttaaaaaaaa

SEQ ID NO: 374804 - DNA, 430 bp, Homo Sapiens
  misc_feature (23)..(23): n is a, c, g, or t
  misc_feature (83)..(83): n is a, c, g, or t
ccacccaaaaaggtcaacttccnctccaaactcggtcctgaaggaaaaacctggattaatccctttcctatgccagacgtttnctggtttaacaaaaggacgcagccccggactacaagtctggaactgacaagttccttatgaccttgacaaatcaccttaacccatctgagccttaaattctcatttatttcctgcataaggagatttggctaaatgctttctgaggtcctttggagtcctgtggctccatggtaatgtgctcctttccttgaagattgggggttttgtaatgttgagatactttgcctctatgcttgtcagctcatgaccagtcctagaagaggagtcgagacataagccaccttcagaggttcaatggaaactttaaaaccataccaaactcttttttaaaattagaattaacaag

SEQ ID NO: 374805 - DNA, 603 bp, Homo Sapiens
  misc_feature (41)..(41): n is a, c, g, or t
  misc_feature (56)..(56): n is a, c, g, or t
  misc_feature (72)..(72): n is a, c, g, or t
cctttaaagaaaactggccttttcctttttaaaagtttacnattaaaaacgtcctncatgagtgaccctaantgtgtgactcattggccctagcaggtaaccattgcaagccaacacctatctggcaaacaaaggctgtttaacttttcttccatcaatccccaccccagcccctctttttaagtccaacattcttgaaagcgggcactgctgaatgctgccccaagaaaccaatgtgaaacctaaaaggcaagtatccccataatgcatcctcccaccaagttagtttgctgcagagcacagggtctccatctgccacctatgttcatatccctggaaggtagaggtttaaggagccatactctgtgagtcagggaggaaaaacagagactgcctgaccttgtgaaatgaccctgaaggacaagaggccccaatcttgtgagctatgtattgctagaactcaagataaatgttaaactaaatttcctcagtaaatccaaatgtagaggaaagggcaaaccaagctagcactgtgcatgttgcccacatctaaattcctttattcaaattcgggaatgaccgataagtagccatgtgccaagg

SEQ ID NO: 374806 - DNA, 546 bp, Homo Sapiens
  misc_feature (44)..(44): n is a, c, g, or t
  misc_feature (48)..(48): n is a, c, g, or t
  misc_feature (50)..(50): n is a, c, g, or t
  misc_feature (70)..(70): n is a, c, g, or t
  misc_feature (75)..(76): n is a, c, g, or t
  misc_feature (93)..(93): n is a, c, g, or t
  misc_feature (110)..(111): n is a, c, g, or t
  misc_feature (151)..(151): n is a, c, g, or t
  misc_feature (153)..(153): n is a, c, g, or t
  misc_feature (155)..(155): n is a, c, g, or t
  misc_feature (159)..(159): n is a, c, g, or t
  misc_feature (163)..(163): n is a, c, g, or t
  misc_feature (174)..(175): n is a, c, g, or t
  misc_feature (182)..(182): n is a, c, g, or t
  misc_feature (185)..(185): n is a, c, g, or t
  misc_feature (198)..(198): n is a, c, g, or t
  misc_feature (200)..(201): n is a, c, g, or t
  misc_feature (211)..(211): n is a, c, g, or t
  misc_feature (213)..(213): n is a, c, g, or t
  misc_feature (218)..(218): n is a, c, g, or t
  misc_feature (225)..(225): n is a, c, g, or t
  misc_feature (230)..(230): n is a, c, g, or t
  misc_feature (232)..(232): n is a, c, g, or t
  misc_feature (235)..(235): n is a, c, g, or t
  misc_feature (237)..(237): n is a, c, g, or t
  misc_feature (241)..(242): n is a, c, g, or t
  misc_feature (245)..(245): n is a, c, g, or t
  misc_feature (247)..(247): n is a, c, g, or t
  misc_feature (249)..(249): n is a, c, g, or t
  misc_feature (253)..(253): n is a, c, g, or t
  misc_feature (527)..(527): n is a, c, g, or t
atcatgcatataaaatactgctattagaaaaacttcttttactnacanantggcttacctgcctttaaanagaanntacggttactaaacccngtaagggccggttttannttgtgcataggaccccgtaattgtttctttacggcacttngngntttnttgntattgggtaanngtggttngcnctgcctttatggntnnggggcttttntnggtgntccctgnggtgntnccngncatnntcncncncccnccaagatttcatcaagtttatttttcaaaaggagaaaaattagaactcagagtgcttaacgtaggattcacaaagcttcaaaggtcagtgttcagaggaaatcagatgacaactgcattttaaaattcttgattctgcccataattccccaagggaaaatctgtagctctatgtgctagttcagaggtgaattttttaaaaaagaaactttcttcctactctgctatttattcatattttataagtattcagaagtaatttgacatctataccngaatattaaaaatacagct

SEQ ID NO: 374807 - DNA, 457 bp, Homo Sapiens
ccccagaataccttccatccaccttggaaaacaaagataggcctctttccgtgcctgtgttatcctttatagccaacacctcatcccttaacccaacctaggtacccgtgagtttaccatacaggagaatgatggaaggaagggaggaaggaaaggaggagaaaaatgtgtccttcagctggcagcatttattttaaatccttagcactgagtttgaatggtataaaaagtataacttccatagatgagctgttgttaggaaggcaccaaagaacctcctctgcactaaacaggagaatggaaagaaaagtctccattgagtacatatcatgtcagtttagtaatcaattatgttgatattgttaaactggttcaaagaaataaactggcaatatgtaaagtaattcctcatttgtgtcactatgatatagagatattaaaggaatgttggtttgct

SEQ ID NO: 374808 - DNA, 231 bp, Homo Sapiens
gaatgtcaaaatagaaaacaaattaggctcctgcactgtttcttaatacagcttctctggggctttgctttgtaggccttgtgacatgcccattgagacaaaaagattgtgttctccatgatacactcttcacaaggcagcagatgttctcagaaacaatgtctatgtccttggaaccaagagtttctctttcctcctgactgtaataatattaaacttttttaaaaaacc

SEQ ID NO: 374809 - DNA, 401 bp, Homo Sapiens
  misc_feature (17)..(17): n is a, c, g, or t
  misc_feature (28)..(28): n is a, c, g, or t
  misc_feature (74)..(74): n is a, c, g, or t
  misc_feature (80)..(80): n is a, c, g, or t
  misc_feature (99)..(99): n is a, c, g, or t
  misc_feature (117)..(117): n is a, c, g, or t
ttgaggctggaattccnttttcccccgnggccggttcaacttgacaattttggacttgaagttttgtcccccanttgtgnatgccggctttgagactgnaagccccgcggtgcaggncagttcaccgggtcctgcaggaccaggtgccagccactaaggggggcaccgccgatgccaggggttttgcccacccgggccccagcgttcccagagccaaatgacactaacttatagaaggggagggggcaaagggcttcttcctcaggccagctcttctgaggagctctgccctctccagaggtgccagaccgcggattttatttagcaagccacagccttccggtctaacgtctcacaccacgacggactccccttcctaataaaactcaaagacaagatgc

SEQ ID NO: 374810 - DNA, 465 bp, Homo Sapiens
  misc_feature (329)..(412): n is a, c, g, or t
ccggaaacaaaaatgctaaaaccaataggaaacccagggactctctgcctacaatcagatcctgtgtcgtttgtgaaaaatccttaaaccggccccaaaaacccccttttcccccaagccttcccatggggcttcggcgcccaaaggtgacccgcgcccaacctccctcccccccagtgcctatgacggcggcacagcagccagcgggtgggggacgcctgtgttcacccatggtgcccatgtcgttcttctctccctgtgacacagcttgtacagtctgaatctttttatctggggtaggggggcttttatgtttgtccgatggagannnnnnnnnnnnnnnnnnnnnnnnnnnnnnnnnnnnnnnnnnnnnnnnnnnnnnnnnnnnnnnnnnnnnnnnnnnnnnnnnnnncatttatttattcgtgcttcaaatcacagtcatattaaaagctggtcttgtgg

SEQ ID NO: 374811 - DNA, 622 bp, Homo Sapiens
  misc_feature (203)..(203): n is a, c, g, or t
  misc_feature (209)..(209): n is a, c, g, or t
  misc_feature (345)..(357): n is a, c, g, or t
  misc_feature (515)..(527): n is a, c, g, or t
  misc_feature (582)..(582): n is a, c, g, or t
atactttaagtcatttatagattacttgtaatgcctaatgtaaatgctatgtaaatagttattacaatgtattgtttgggaataacaagagttcagtacagacaaccatccatttctctccctcaaatattttcaatctgcagttgattgaatctgcagatacggaacccacagatacgaagggtcactgtacaccaattttncttttnaacataatatcagtctctgtgatgtataccaaatttttattgttttagaatttacaaattctttaaaaatgctttttaaggcatttacctatttactatattatcaatttatctacataaatcacattcattatannnnnnnnnnnnnagacacagggtctcactcagtcgcacaggctggagttcagtggtgtgaccacaggctcactgcaacccaggaaccactgggttcaactgatcctcccaactcaggcctcttaagtaactagggactacagggcacacgacaccatcggccaggctaannnnnnnnnnnnngtaaagacaggggtctcggctttgttgcccggggtgggtcttcaaactccggggncttcatggcaatcctcccactttgggccttcccaaagtgt

SEQ ID NO: 374812 - DNA, 442 bp, Homo Sapiens
  misc_feature (17)..(17): n is a, c, g, or t
  misc_feature (23)..(23): n is a, c, g, or t
cccgggcccggtgggcnctaacnccaaagtgggaagccccccaaatacagatttttttaaagggaaaccttcaggtagtttattttcctcacctatgaaagaaagaaaatagattttaaaaggaaaattactataaaaccactaccagtaaaattactattaataatttagtaaatataaatttaaaaatttagtaaatatcagacagtctttatgtctctctcactcttgacatacatatacataaatctattcattgtaccaggagtgttttgtcatcttatttaaatatcatttaaatattatttgacaatatggctgggcagaatggctcacacctatagtcccagcagagtgggagccaaggcagaagaatcacatgagcccaggagttcaagacaagcctggacaacaaagtgagactccatctctacaaaaaaaa

SEQ ID NO: 374813 - DNA, 413 bp, Homo Sapiens
  misc_feature (12)..(12): n is a, c, g, or t
  misc_feature (61)..(61): n is a, c, g, or t
  misc_feature (84)..(84): n is a, c, g, or t
  misc_feature (110)..(110): n is a, c, g, or t
  misc_feature (115)..(115): n is a, c, g, or t
  misc_feature (121)..(121): n is a, c, g, or t
  misc_feature (127)..(127): n is a, c, g, or t
  misc_feature (205)..(205): n is a, c, g, or t
  misc_feature (319)..(319): n is a, c, g, or t
ccccacccctgncagactcccgtgtgaacccccggctgtgaaccctccccgggtggggtgncccctgcccgccaggagagcccnctttcagagatgcccctgaagtgaancgtcncccagnctgcanccctgcaaacttcatcttgctgtccctgtggcttggagagcccagtcagctttgcttgtaaacatacatgttacttanagttgtatttggtcatgccagatgaaattactgtttttagaggtcaaagtgagcaagtagcaactttatatggttccagctaatatttatgttacatttatgttctgatgaaanacttttgtgctactgacccatttttgtggatgactgcagaaaatatactgaaacttaatgatgacaatgaaaacctcaaacctaaatgtaaaat

SEQ ID NO: 374814 - DNA, 475 bp, Homo Sapiens
  misc_feature (419)..(419): n is a, c, g, or t
  misc_feature (455)..(455): n is a, c, g, or t
ctgctttgccagtccagcctagcatccaggccacttagtcacagccacggccttgatcagtcagcaagacttgcatttattcagtaaagattaattgacaaaggttgtgagtaaacacaactagagggtaattgacattgcagacttcccggacttcctgagtagaaagcaattaagcacctgtggtagatcaaaggttagtcttaggaccacatgagtaaacaaactagtcaggtaaactactctaccttcctttgtacccactttaagctatttactcaaggtatggattaggttgccttcagacataaccttatcctgagacttttgcaaaacccttcaggccttccaagaaggtttgtgggcttataattttccccaccatcctggactaaacccctacagcaggaccgaatggnaaattctatttcagtttgccttagaaatcataccgntttcccacagtgggctggta

SEQ ID NO: 374815 - DNA, 433 bp, Homo Sapiens
  misc_feature (27)..(27): n is a, c, g, or t
  misc_feature (35)..(35): n is a, c, g, or t
  misc_feature (61)..(61): n is a, c, g, or t
  misc_feature (100)..(100): n is a, c, g, or t
  misc_feature (134)..(134): n is a, c, g, or t
  misc_feature (170)..(170): n is a, c, g, or t
  misc_feature (211)..(211): n is a, c, g, or t
  misc_feature (264)..(264): n is a, c, g, or t
  misc_feature (269)..(269): n is a, c, g, or t
  misc_feature (282)..(317): n is a, c, g, or t
gggccttaaagccatttgccctgaaantcctgggnaccctccaagttcctcagccttaacnctatgccagctgtgttaaacccaacgggctggaaaaaanccatctgaaccctcagttaagtcttaaatcacanactgtttttatggatgaggggcccgaaaccctgaanaggtgaagtgacttttccctaaggtcgcacggcccagtaancggcaaaagcacaagtgcccctgtcttcccagtctggtgttccttcccaccanaccanactgcccaggagnnnnnnnnnnnnnnnnnnnnnnnnnnnnnnnnnnnnagtgggaaacaaatttcgtgttgccctaggtcttcctgggatatggggacaaatacagtaagaataatccttcccaatacttcttgccccaaataaagatgaactgtactatgggc

SEQ ID NO: 374816 - DNA, 505 bp, Homo Sapiens
atcttcttcaaggactactgccagaaaatattttaataaattctcttagtggagcttttaaatacagtgtataaagcatctcacagcatacaaaagagagttttcccagactttaaatgagaaaagagaggtttccatggacctttcaaaaaccactcaacacaagcattcctttgtatacataacacaacaacaactggaaagtccttaccataaaactcatacacatgtgacacagcacgtctaacttctttgttaataatcaaaaataccatgtttatgaaatgaataataaagcagccacttcttcagaagtggcataattttaaggtcattttgaagagagtggtaaaatagactgcattgacaaaacaaaattttaagaccaagacatttttattctagtaatctattattttcatcaatcttacttacctttgaagatttcctttgtgattttcttcttcctataaagaagaaataacttcatctgaatcggttaatt

SEQ ID NO: 374817 - DNA, 259 bp, Homo Sapiens
tcaaatcaaagtattgtaagtactttcccatgtttctatctactgtagtcattaagaacttgaggtctgaagttttgaatactaccttcaccacctgtgatcttgggcaagttactaacacatttccttgtctatatctagctaccttattagatattaaatgatcgaatgagggttaaatgattatttcatgtaaagctcttagccctgtgcctggtacatagtaaatgctaaataaatagtggtattcttactgttt

SEQ ID NO: 374818 - DNA, 402 bp, Homo Sapiens
  misc_feature (53)..(53): n is a, c, g, or t
atagagattggagtttacttaaagaaatcaaaggaagctgtgtgggaaggtanctttgtttaacatctgtctgccatttaccaccatttgtaccccacagggagaaaggagaggctgcctcagagctaaatttaagttgcaagggtataagcagcacttttaaaggaagacagataacagcttcctgtctgggaaagattactgaaaaggaaactttgattcaacatttccttactcttttggtgagaatgattcctactccctacataaagtccagggaggagctatttgtagctagttaagtaagatgttttaagtcctcataagtcttttcttcaaagtaaatatttattctcttcaaaagccaactagtgtttaaaatcttcgcttcttttattttct

SEQ ID NO: 374819 - DNA, 233 bp, Homo Sapiens
caacttggtttaagtttgaaggctctaaggaagaggaatattagaacaaattatgtattctctatgttctactccacttgtttgtaatatactcctgttctgagagttatggtaaacctatataacacgactgttccaagtgccaagtgagaattgtagtgactcacagaacacgtctcatgactatttatcaaaagaaatgtgctgattaaagaaaaaaagtaaaatatctt

SEQ ID NO: 374820 - DNA, 324 bp, Homo Sapiens
cccttgagccattttatcaagtagactttgtgaataactaagatgatatgaacagcagaagagcaatgatacaatttatgaaagatagcaaagactgaatagaaagtttcttgcctggcaggggccaagtgaaggagggtgtgccgcagccaggcccagaatgcccaggacagcctacctgacctctttcattcatgtgtttgctgaaagtaaataaaaattaaataacatttgttctgcattatttctcttggcacaacaaagagacttttagcagcagaatatgaccagcaattgcttacggcgcaagaaagttcaattcca

SEQ ID NO: 374821 - DNA, 505 bp, Homo Sapiens
tctttggggactcagtttagaactaatacgccaagcaagtcgtgctgagtgtctgggcttcttctaggaaggtatttccaatcatcaaatgtgccattaaaaaaaatgcatgtcaggtaagtgtgcactaagcctggaccacatgggacatagtggttccaataaacacgaataagccagttttcacattagagaaataccagtttcttgcagaaatgcggtgcttttaaaagaggttaattaataaacagcaggtaattgttcgtggcacgttgtggcagagggtaattttcattttagaggatggaagggccaaatacccctccccactcagcatttttctgtaataatcacctcagcttcacctccgcctttcatttttacagctggagctgtttatcatcgctccaactttcactaaaaaggaaaaactatcacttaaacaaagccattgaaaccccagcatcatgtgtggattttttaacataaataaatcatacaaact

SEQ ID NO: 374822 - DNA, 455 bp, Homo Sapiens
  misc_feature (26)..(26): n is a, c, g, or t
  misc_feature (35)..(35): n is a, c, g, or t
  misc_feature (49)..(49): n is a, c, g, or t
aaaccggaattggtaaaaatgggccnccttcaagnccttcctttccccngtagcccctagccagggagaaatctgacccagacccccaatttgaagaaagggtccagcccctacactggaatgaactttttaacattagggcatttgtatttcccctcacaatacttgcccacattaccttggcataggagagatgccttagtgtaattataagttaacaagcctttggatcagggcttgactcatgatagacaaagtatatgcctgtctggatggaagaatctcttgggcgagcaccatttttctttccatcacctttccttgaaaatatatcttcagctttgggtaggaggaatcttggtgtatgaaatcattgcaaatttacttcatcttttctggagtttgaagttgtgactctcctgctaccaattaaataaagcttactttgccataac

SEQ ID NO: 374823 - DNA, 410 bp, Homo Sapiens
  misc_feature (14)..(14): n is a, c, g, or t
  misc_feature (27)..(27): n is a, c, g, or t
  misc_feature (71)..(139): n is a, c, g, or t
cccgaagttttaangtaatattgtttnagaccttgggtcccctcgcccccggatacgtccatgtaccatgnnnnnnnnnnnnnnnnnnnnnnnnnnnnnnnnnnnnnnnnnnnnnnnnnnnnnnnnnnnnnnnnnnnnntactgcctcattaaaccctggagtttcttatagagagaaattttaggtggttgaaatgattaaatggaaagagatttattttcataagctggtaattttttaaagaaagcagactggaaaaatatttagaggataaaaactaaaagcacataaagcattatgttaacatttcttgttttagtttttcggaaagtattcaaaaattaacatttgttagcttttttgatatgtctattatagaacgtacaggaaaataaaagcaaactaattt

SEQ ID NO: 374824 - DNA, 415 bp, Homo Sapiens
  misc_feature (27)..(27): n is a, c, g, or t
  misc_feature (83)..(83): n is a, c, g, or t
  misc_feature (280)..(280): n is a, c, g, or t
  misc_feature (308)..(308): n is a, c, g, or t
  misc_feature (330)..(330): n is a, c, g, or t
cctttattctaggcccagggatgtagnagggggaaggaggaaacaggaagcccagagagggcaaagggcctacctcggggcgngaaccatgccccagactattatctcagggctttctgggcactgcacttcaaccgtggcccacctgcccatgccctgaggccagttggcgaggggtggctcctgagggtttttataccctttgtttgcctaatgtttaattttgcatcataatttctacattgtccctgagtgtcagaactataatttattccatttnctctctgtgtctgtgcccaagaaacgcnaggctctgggcctgccccttgncccaggtaggccttgccagcctgtgtgccttgtgggaacaccttgtacctgagcttacaggtaccaataaagaggctttattttt

SEQ ID NO: 374825 - DNA, 521 bp, Homo Sapiens
gctaatttcaaatttgcccctaatttagagcttgtaactaaagcctcctttattcattctttggaagggaagactttgttcagaatctgtgcttctgatcaaccgctgtctttgctgcacgatgaaggcaagaggagaagctgaccagcagtgacccaggagtgacccaggacagggccagacgcctccgtcaccaggcaggacactgagtgggcagccagcctcacctcctagagcaggccagaactgtggtgctcccctgtcaacagtgacatgcccttcctaaggggaggtctgtatcctctgggtgccgtgatgaagagatgtcacactattagtgactcccgtggagtcggaaacacaggaccccaaatgaacaacgtctggaaccaggggaatctcccaactggtttcaactgccccagacggctgtgctcaagacacagagcttctgcttcctaaagccagagcaatcacacatagtctcctaggataagagaaaaccaagtgtccaaaaaaaa

SEQ ID NO: 374826 - DNA, 443 bp, Homo Sapiens
  misc_feature (36)..(36): n is a, c, g, or t
  misc_feature (77)..(77): n is a, c, g, or t
  misc_feature (120)..(120): n is a, c, g, or t
  misc_feature (163)..(163): n is a, c, g, or t
aaaaaaacaaatcgtcccgttgaaaaacccacctgnttttttataagccatgaaaaatttaaaggccctataaattnaggaaaggagttttccacagaaacccctcccctcatgaacagnatttgaactaagcctggtaaatagtttggtgttgcctcctcantctgggtgaagatttcaatgtggaagatctagcaaatgctttggaaaggcctgtgaatggtgtgctcccctctgtgtctccatggcctgcagtccatgctcttgtgaaggagtttgggacactggctgttgcccggtgtttcagcactttcagtttaggggaaatgtgaatcaataggtatgatccatttctaatcaatttggccttctgctgctggaagtaactttacttataagtaacttgccatcagagaataaaagcaatatcttttaagttcctg

SEQ ID NO: 374827 - DNA, 396 bp, Homo Sapiens
  misc_feature (22)..(22): n is a, c, g, or t
  misc_feature (29)..(29): n is a, c, g, or t
  misc_feature (74)..(74): n is a, c, g, or t
  misc_feature (84)..(84): n is a, c, g, or t
aaccaagatgttgtgaaagccnggttccntccccatagaaaatgtcctgaggagcaaccctcaaaatccccctnaccctgactnactgatgaaaagtgtttgctcctccctaaggcccagtcagtaaagacccagagggggtgactgtttctttaaatgcaaaggcagcagcacaataattcaagaaacatgaaaaatcaagaaaacatgacaccaccagaagaacacaatcattttccaataaccaactccccaaaaatggagatttacaaattggtttataatgaattcagaacaattatgttaaggaagctcagcaaactaaaaggaacaccaatagactactctgtgaagtcaggcaaacaattcatgaacaaaactagaaattcaaaaaaa

SEQ ID NO: 374828 - DNA, 452 bp, Homo Sapiens
  misc_feature (13)..(13): n is a, c, g, or t
  misc_feature (31)..(31): n is a, c, g, or t
  misc_feature (60)..(60): n is a, c, g, or t
  misc_feature (85)..(85): n is a, c, g, or t
  misc_feature (93)..(93): n is a, c, g, or t
cgtgtagggtgcnattttaatacacgcttanatttaactaccccaaaatgggcaagaganatattctaatatctgcccttatcanatgagganactaactcaaagagtaaattacttgctatagggtcataccactaatgactaaatgtagtttccaagcccaggactctctaacacatggtacaaagtcatgacgagaagacatgtgccccctggccaaaactattcaacccatggtagcaccagaactgagatccagggattaagggctgatctggagaccctgtgccttggtgtagaccttagctcagcacatcctagctgtgtgaccatgggcaagttatttaatatctctgggctcctttctagtcctctgttaaatgggaatgaccacaggatccactgcttatgagaactgcacaagtagatgcaaataaaatgctttgcatggg

SEQ ID NO: 374829 - DNA, 335 bp, Homo Sapiens
  misc_feature (11)..(11): n is a, c, g, or t
  misc_feature (33)..(33): n is a, c, g, or t
  misc_feature (47)..(47): n is a, c, g, or t
  misc_feature (54)..(54): n is a, c, g, or t
  misc_feature (71)..(71): n is a, c, g, or t
  misc_feature (74)..(97): n is a, c, g, or t
ccccaggaaangaaatttgcaaatgggccagangccaaattgcccgntgaatcnccttctttgcctttaanccnnnnnnnnnnnnnnnnnnnnnnnnggcaaatgaatgtacccatttcaactttgattttaatagtgctagttgatattggtaataatgctaaccaagagatcaatgccagatttttctcttggggtaagttagctgaagtcatttaaagatggaaaggtgggaaaattctttgatatttgatgtcattgtatccacatttgttgtaagacatattgcataccaattataattatatcaattaaagttgataaaagcttcaaag

SEQ ID NO: 374830 - DNA, 578 bp, Homo Sapiens
  misc_feature (22)..(22): n is a, c, g, or t
  misc_feature (40)..(40): n is a, c, g, or t
  misc_feature (53)..(53): n is a, c, g, or t
tttaggggcccatacttccagngacgggaattaccaattngccattccacacnccattccattaagtggggatcttataaaatctctggacccctgagaagtcccttgcctacttataaggccttttcttgacctgtcaggccctaatgtttgatgatgtataggaaacctatcgtccgaatttatgttatgccataaattttaaaagtatatttaaagtgaaatacacaatttttttcctatgcacatactcttactggaaaaaatttgaatgctgacaataaaatggctaagttatggtacatgcatgtaacagaatactatagagcagactgagcaaacctaagccacaggccaaatccagcccatggtaagtatttgtaaatagttttactggaacacaattatactcatttatttacatattatctattgatgctttcaactaccgtggtagtgctgagtagccatgacagagacctaatggtctgcaaaacctaaaatatttactaagtaaccctttatagaaagaactttgctgaaccctggtatggagaaataaaaacgaatgaaataca

SEQ ID NO: 374831 - DNA, 449 bp, Homo Sapiens
  misc_feature (16)..(16): n is a, c, g, or t
  misc_feature (61)..(61): n is a, c, g, or t
  misc_feature (83)..(83): n is a, c, g, or t
cgtctttctgtgcctntatcaatgtgtgtgtgggcagttttgatttacacgtagaagcccntcaaagtgcaatgcagcttgcnttttcacataatgtaaatacttctggtatctgcatataaacaccagcattgacatttttaatgattttgtagcattttgatgtatgaattgcaataatttcattacagtaatgttttccctaaaaatggacatatcaattgttttcaacttctccttttggcaaatataggatatccacaagtgaaattccaccaagtcaaaggttattcacatgtaaatttagctacatactgtaacttctcctccagaagaccgtaccagttttcattcctattaacaaaatgtgaatgcctgtctttcccacctgagctcagtgttccattttcaacaatctgatagataaaataaaagatattgtcagtttc

SEQ ID NO: 374832 - DNA, 333 bp, Homo Sapiens
acccgcccccaatgctggactttggtttttcatattgcttttgcagaactttaaaacatttgaatctttccctgatgagtttttgtcctgaggggccagtgcagttttcttgccactttgttctcctctcatataacttttccctgtcaataaggcatttaggctgagagaaaaagttattgagcatgtgcatccaaatttgagatgattgttatttcattacctaatgactttaacttctttgatactgtgtttgtcttatgaatataatggctttctcactttaatgaaaagttatacaataaaattgaaaagtaagtactgtaaaaaaaa

SEQ ID NO: 374833 - DNA, 526 bp, Homo Sapiens
  misc_feature (121)..(121): n is a, c, g, or t
gacacatttcgattgaactataacaatggcaggctgaagcctagatatttaaattagaaggttctagtctgataattattcatgtttctagattcatgcccatcatataaggtaaatgccngaaaatatttaaagttgtatatcattatgtaaacaatcttcctgtacattttcctttttacaaaatataaactaggcttaagttacagcctaaaattcaacaggttttgattccacattcccatgggaaaaagtaggcagcagttccttacagtgtggccccagggacccccgggggatacctgagactttcaggagatctatgagatcaaaacttttcataatacaaagacattattatttgtctttttcactgtcccctcctgaatatacaacggagcattccagatgctagagtgacagcctcactcagactcaggggatgcatgcttgcgtgtacagtactcgtatgttttaaatttgttttaactcctaatatgtaagtatcaataaatataatcacctt

SEQ ID NO: 374834 - DNA, 275 bp, Homo Sapiens
  misc_feature (30)..(30): n is a, c, g, or t
ctcatctccatagaataccagcttctgaancctcaatcagcctttactgcaagaagaaaagaaaaacctctctcattccaggtctgtggtgcagatgggaagagtatagtcaaaacccattaaggccttagtcaaatgccagccgaattagaacgcaatgaacgttagacaaaacaacccaactggccaggcgggggaggccagagcgtataaatataaagttagatacttataaagaataaagactctaataaaatattttatataaaactttt

SEQ ID NO: 374835 - DNA, 471 bp, Homo Sapiens
  misc_feature (21)..(21): n is a, c, g, or t
cctgcaagactgatgctttantaccacagtctgttctcctgtgtctaggtccaggaactccagtttgcttttcctgttttgtgtcctggtagccagctgttgagtaactttcattggaggttgggaaggaagtgaggagaaagtgttcttgtttagtgttttatttcctataataggatgctgcctaacccagttcatctctatgtcctgttcactgaatattccgggtaattgaaagaaaatataatggatgggctccattaaaaccagctcaaaaataaattcttgtcagtaaagatttcttgtcaagatgtcttggattgcacttttgttgaggaaagacagtgtaaatagttaaagaatgttgataaaattgaaacatttggttgtggaattgtgtgtggttttagagggtttctgtttgtgaaatgtatgtattaaaaataataaaattccagaaactaacattgt

SEQ ID NO: 374836 - DNA, 490 bp, Homo Sapiens
  misc_feature (69)..(79): n is a, c, g, or t
tttttactacaaaacgtaaaagaataataatggtatcagcttaggggaactgactttcattgtaatccnnnnnnnnnnntttttggaaactcctaagttcaggatttagataaatattaggcattcctttttctttcaaaaatgctttttatcagcatgctacttggtgataaagaatgttcaattcaaatattattctggtatttcagaccttactgatgggattctctaatttagcttttcagaaagagccttaatcagtcccttttaaattctgacttgtttcaatttaataattcataaaattattgtttgaagagttattttgtgcattagaaatctttaagccttatatacatcttctaagaattttaatgagataattgctaagagtaaaattgtatccacttgtttaaaccttccacatgatatctgtttttgagtttttagtagattgcattataaattaattctttcaaaattctgtggc

SEQ ID NO: 374837 - DNA, 146 bp, Homo Sapiens
aaagagacagtcttacctcattctgtcacccagaatggaatgactttctaaaattgcagaaagcaggacatattccttgctgtttataatattatagtcgtatcaaagggaaagagtatttctccttaaataaaattacaaataag

SEQ ID NO: 374838 - DNA, 272 bp, Homo Sapiens
  misc_feature (188)..(188): n is a, c, g, or t
  misc_feature (245)..(245): n is a, c, g, or t
  misc_feature (247)..(247): n is a, c, g, or t
tatcaatatggataaagagtaagtgaaaaaagccaggagagaatgttgtctataatacgctgttgttgtgtacggggaaataaataatataaatacctagaatatttgtgaaggtacagccaagaaactactatcactgattgtcttaaggtactagatggggcacaggacaggacgaaagatttacntcttattgtttcttctgtataacttttgaattttatgctgttaatgtaatttttcananaaatatattaaaatataaaaacatg

SEQ ID NO: 374839 - DNA, 438 bp, Homo Sapiens
  misc_feature (20)..(20): n is a, c, g, or t
taagaagtggccttaaatgnaaacactttatgccctcagtagaaatgtactgaatttataaaaggagatacagtaggaagtgagtgttgtattgtaccatgttccataaacaaaatattagatcagcaatccatgtataaaggactattattgaggattttggatgccgtcatttattatagcccataaactttacaaatgacaaaactttatccatatatttccttcctgtttctcttcctaaatataaggatgataagaatttcttttaaaatcagctgtagagtacaagtttctctcccttattttctacaggcccatttagccacacagtcttgactgcctttttaccaactgcagtgctatagcttcctgattgccactataaaagctcttcttaacttactgttttaagatgaaaataagatatgcttcttt

SEQ ID NO: 374840 - DNA, 495 bp, Homo Sapiens
  misc_feature (399)..(399): n is a, c, g, or t
agggaatgttatgttagcgctcccttctgtttccataatattagtgtgtcagtttttccattgttcactgcttcacatctcgaaatatacaatctctgtgtgccatcaaaatttgaggtaacttgtaagaacgtatataatacaataaaaaataaacatcaaaatcacagaaaatacatactagaataataggtaaagggtgatgaaagtgagaagcatgtataatcataattcttcatgagcgaaaatgctatacagaatctttttctttaaatcctttgaatgtacctctttttaaagaaaaacaccaactcaataataaaaatagctacacacagtatatgctacccatcagaaagaatctataggttgaagccatgggattgaagtttttttgtncaaaacagtcattgattgttacttaggtcccccagtcacattccatgaagtgaattttgctgcaagtcacaatatcacagtttttctgtttgcgag

SEQ ID NO: 374841 - DNA, 718 bp, Homo Sapiens
  misc_feature (34)..(34): n is a, c, g, or t
  misc_feature (39)..(39): n is a, c, g, or t
  misc_feature (393)..(422): n is a, c, g, or t
agttgttgtccctttttagaaacatgattaaaanggganaaatattaaatcaataagtgttaaatcaaaatggaatatcctgattcaaacccattttacaagaatgaaagtaaaatgtgcatgatccaagccttagtatcttggtttttgaactctggtcaactggatatgtttgtcattttgtaacttaccaaaaacaaaccatcatatcataccaactaaaatgatatatggatgaagcaacatcaagtaaaattttagacgatggctataggacccaaatctaaagctgtctaaatgttaattcaatgaaacaagtattatttttgcatgaatacaatgttacaaataaatcacaagaaatagggaagatctgtttgttgcttggaaagnnnnnnnnnnnnnnnnnnnnnnnnnnnnnntgttttagacaaagcctataaatgtaagctgtctaggagattgaattttctttgttctgggtctgtgacttttttgtgtatgtgtatggtgtttatgtatattaagatggtgtaaatatgccttatactgttatttatggcatcaacattcatttactaatgctagtcatgattattactgtgaaatgagtcttacatcgggctgtgaaaattggtataatgatgctttgaaagatcctattatcatgttaatcaaaataatagagggaaatggtaaagagctttatgtatttatt

SEQ ID NO: 374842 - DNA, 305 bp, Homo Sapiens
cagtcaagatcaggagagtcacccaacccacagatgactgccgacacatgagtaagcccagccaaagcagaagaaccctccagctgactctaagacttagaagcaataataaatgtttattatcttaagccactgtgttttgggatggtttattacacggcaatagctaacttctgcatgcccccactgtacttcaaacaaaattttattacagcttgtttactcatctgtgaaatggagacaaaccctaccttgagaactattgtacatctggcatcaggtgctcaataaatggaagcagttgt

SEQ ID NO: 374843 - DNA, 316 bp, Homo Sapiens
  misc_feature (32)..(32): n is a, c, g, or t
  misc_feature (49)..(49): n is a, c, g, or t
  misc_feature (77)..(77): n is a, c, g, or t
ccagttcacacaatacttttgtacaagttatnaaaggcatttttcctcnggacaatttattatttgtctttcaaagnaattataataatataatgattttgttagaataagacaattttctatcaaattccataaaattattgaaataaatatacaaatccatagtatctacaatgttaacacctccctttaaggttggaatgtgcacagtcttgtggtatgtggcagttttgtgtgacaatatatgaccttgcagagtgcactaaaatcattcttctttccaacaagaataaaataaaggaaattattgatctag

SEQ ID NO: 374844 - DNA, 232 bp, Homo Sapiens
tgtttggcaaagctgcaggatacaaggtcaacatataaaaatcaattctatttctatatgatagctatgaactgtctatttcagaaatagaatttttaaaagcaccatttatagaagcataaaaatatgcaatagggtgaaatttagcaaaatatgtgtatgctctgaacactgaaaacgacaaaatactactgagaaaaattttagaagacctaaataaatggagagaaat

SEQ ID NO: 374845 - DNA, 547 bp, Homo Sapiens
  misc_feature (32)..(32): n is a, c, g, or t
  misc_feature (37)..(37): n is a, c, g, or t
  misc_feature (61)..(61): n is a, c, g, or t
  misc_feature (98)..(98): n is a, c, g, or t
  misc_feature (131)..(131): n is a, c, g, or t
  misc_feature (146)..(146): n is a, c, g, or t
tccctcttggttacttgtcccctgaagaacantgaanttggcaaaccttttagaataaganggcatgtaaccttccccccagggcctccacgggcaanccccaaaaactccaaacgggtccccaaaaaacnaaaccccctggtttncaaccccatagtcctcctgcccccccatcacaagttcccccatccttagtaaatggaagcccccaggaatcccagaacttcacccccaaaccctgggggctctctttgactcctgtctttcacccagctcccctcgcccccattcgatccagcaaaagatcctgccagctttactttcaaaatataattaaaaggttgggagcgtggctgcccttgggggaggggcagtgatttggagggggcttctggggacttctagggggatggacaagttctatttcttgagcttgatgctggttatgtgggtggattgggtttgtaaaacttcatgaaactgcaggcatgtttatatgtgtacttttcagtatttatgttgtacttcaataaaaagctgtgaggcc

SEQ ID NO: 374846 - DNA, 642 bp, Homo Sapiens
  misc_feature (138)..(180): n is a, c, g, or t
  misc_feature (308)..(370): n is a, c, g, or t
ggatccactcgacagacttaacgcatgattaatttgattgattactcttgaagttactgaccttaggaaaattcctcaattgtaaaaaggctttctctatatgtaaattatgctgttatctttttctatacacaaagnnnnnnnnnnnnnnnnnnnnnnnnnnnnnnnnnnnnnnnnnnnagactaattcttgtacagaccaacgcggaccgatggtccatattcttttctccatgtttgtttgtgtcgactgttgcagagtgagttgatgtaagaaggtggtttcatgttttcttttggggggccannnnnnnnnnnnnnnnnnnnnnnnnnnnnnnnnnnnnnnnnnnnnnnnnnnnnnnnnnnnnnncttgttgccaatgtcttgttgctgagaaggaacactctattcagatgccatccaggaaagaaaggccagatggatggagggtccactgtgtatatttgtacagaatcatttataaagttttctacacttctaaaaaaagtatttctaacttgggctgttggacagtttgtgtgcctctgagccggcaagcctgttgtttcttgtgtttagtgcaatgtttagtgagaaaccaatgtctgaattatttatgccaataaaaaatttgagtaatt

SEQ ID NO: 374847 - DNA, 540 bp, Homo Sapiens
ttaaattaagaataataagtttatcccatttgctcatttcacatcagtcctttaagtgctttgcattttgttacatcttatgtaagtggtgatattagcattactacattgtaacacagtacacaacatctgaaaatggtcctgaggccttcaaagtttaaatgtcgtttaatacactttattgaagcaggtacagaactgctgtgtaattaatttcaagacacttatttcctctcaaaagtgcctctaaaacaagtttccatgcttgaagcgttgagtgtcaagtatctgggagatttgcttttgtaggacggttcatttcccacttgtgccagaatgagtcattttgtgtgtaagtgtcaagcttggagaggttctaattaagtgcaaattacaatgaaattaataaatgacaccaatttttagattttaaaatgtgctttgagagaatgcaatgtgggcttagattgatggtaattctcatattttaagttgtgattcaatattatgtagcattaaaactcaattaagtaaaaaaaa

SEQ ID NO: 374848 - DNA, 645 bp, Homo Sapiens
  misc_feature (12)..(12): n is a, c, g, or t
  misc_feature (46)..(46): n is a, c, g, or t
  misc_feature (60)..(60): n is a, c, g, or t
  misc_feature (108)..(108): n is a, c, g, or t
aaaatcctaganccacaaacaaagccagttaagacctttaaaagtnaccttttgaccaancctggtgacccataaaagggacccataaggaagacctacctaattacnccttaaagggcccccttgaggaatgccaggagacgtgcctgcctgaaccccttttcaggtcccctgtccttccctcacagagtccctaggtgttgtaaataagttcccttttgtgcccagactctgctgtttttgcattgagaccccctgaatttttttggccttcaaatcccaaggtaaatgcccaagagtgagcatttgactttggagtactgctatgatttgaatatggtgtgtcccctctgaaactcatgttaaaattttattgccattttggccatgttgggaggtggggtctttaagaagtgattaggtctttaagagggattagtgcctttctcatgggagtaagttagcaattaaagaagttcagcccccttttctctggtgtgtgagtgctctctctcccctgctcctttcacttttccaccatgctataaaacagcatgagggcctcactggatgcagccacccaatcttggacttcccagcctccagaaccatgagcctaaataaacctccattctttataaattg

SEQ ID NO: 374849 - DNA, 447 bp, Homo Sapiens
ttttgtggcccaaaactctgcctgtttttgccaattgaaaaccccctgaaaattttttgggcccttccaaaatcccaaggtaaaatgcccaagagtgaagcatttgaactttggaagtactgcctatgatttgaaatatggtgtgtccccctctgaaactcatgttaaaattttaattgccattttggcccatgttgggaggtggggtctttaagaagtgattaggtctttaagagggattagtgcctttctcatgggagtaagttagcaattaaagaagttcagcccccttttctctggtgtgtgagtgctctctctcccctgctcctttcacttttccaccatgctataaaacagcatgagggcctcactggatgcagccacccaatcttggacttcccagcctccagaaccatgagctaaataaacctccattctttataaatt

SEQ ID NO: 374850 - DNA, 434 bp, Homo Sapiens
acgcaatttctaaaccattggcaagaacaatacagagaagagttgttatactgagaccctttaggtttttgtaccagtcaattcttacatgcatgttatggcagtctcactctgatgatttaaatcttaagtattctttccaagccttgtgttacctcctgaagaacttgaaacaattttaagaaagacaagtgaacagttaaatgaattgtaatacaactacctagtgataactgctgttaatagcctgtgcacatatataaatatatggtgaatttgtgtttttagttatatccagaattgtttgttaatatacatggacatacctacatattattctataagcaatttatgcaactgtcttactgttgttggacattcagaagttttttctaatttttcactcttagaaataaagttttagtgagagtcgc

SEQ ID NO: 374851 - DNA, 249 bp, Homo Sapiens
  misc_feature (62)..(62): n is a, c, g, or t
  misc_feature (139)..(139): n is a, c, g, or t
ttcatttagaaatataatgcatgcttattttatacaatacaaaatatatgaaaaagaaaatnaaaatctctaataatctcatcatttttacccaggcatttcaaaagccacctatgtatgtatttatccaactatcagntcatctattcatccatccatccactcctgcatatcctactttacgaatgtatttgacagcttattttatattatgagcatgttcttatctaataaaatatcattgaattg

SEQ ID NO: 374852 - DNA, 425 bp, Homo Sapiens
tataaaaatgtggtttgtccatatgttaaatttgccatgatggggtaaggagatgggagggcaaaggttattcacatgcttgctggcttgctctcattccctgtggttcctcactttccctgaagcagttataacctatcagatttgcaaagtcaactcagtacaaatcaatcgtgctctgtattgaaattctggagggtttagagtcctgcaaaccacgatgcaagtcagtgatccaagtgacagccctggcaatttacttgcactcattccttacttaattctttagaggagtaactgctctatgctcattgaagaatgcatgaattagaattgggagagtataggccacacaaaaggcatctgggtaactgcttcttaaaactgggtaattttctccttcaacaatcaaggctactggaggg

SEQ ID NO: 374853 - DNA, 286 bp, Homo Sapiens
  misc_feature (30)..(30): n is a, c, g, or t
  misc_feature (47)..(47): n is a, c, g, or t
  misc_feature (107)..(107): n is a, c, g, or t
gttgctcaacccatattattggctgtacancctggtcacttctgacntctgtttttactaatggaagctttgcaaattgaattctcagtgagttgtatatttatacncctggcctgaagccttaattgtatataatgatgctttttaaaaaatgctatttggaagactatttatttctcgtgtatataatgtatataaaaaaatatggttagtgtttacctaaggttaaccaatttcaagattaaaatttttaaatagtaaaataataaaaaattgataaaagttg

SEQ ID NO: 374854 - DNA, 350 bp, Homo Sapiens
gattcagcacttgaaccagccactttctaaccatgggcacttggcaagtgaactgattcctctgagattcaacttccctcatctgtaaaatacaggtaatagcctacttatataattatcatgacaataagagagaagccctactgacctggtggataatagttccatttgcaaaaagatttaaatgccaactatgtgttgtgaagtagaatagatgctagatataaaaaattaaaagatatcgaagccattggggggtggtcaatgccctcatgtagttcatgttgtcctgggagtggggatacaacaagaaataaacaactcaataaaaagaaatcattaaaaatgtt

SEQ ID NO: 374855 - DNA, 264 bp, Homo Sapiens
  misc_feature (26)..(26): n is a, c, g, or t
aactggctggcatactagcagtcccnagctgtgtgaacctcaggcagatcacttacccctctctgagtctcagcccatttccttcctctgtgaaatgggagtactgatcactgcctttacaggactgtcatgatgccccaggtgaaactggctctgaagtcttcagatagacctgtggggctggctgcagggtccttgctggatccacctctcctaacccctctggcctcttctgccccaaacactgtgctaagggtggggctg

SEQ ID NO: 374856 - DNA, 356 bp, Homo Sapiens
  misc_feature (13)..(13): n is a, c, g, or t
  misc_feature (22)..(22): n is a, c, g, or t
  misc_feature (83)..(83): n is a, c, g, or t
gcccaggccattnaccaacaanttcagccaaccccatcctcacacagattcaccttttttcaccccacacttgcagagctgcntggaggtgaggtcaggtgcctcccagccctgcccagagtatgggcactcaggtgtgggccgaacctgatacctgcctgggacagccactggaaacttttgggaactctcctctgaaagtgtgggcccaaggcccccacctctgtgacccccatgtccttggacctagaggattgtccaccttctgccaaggccagcccacacagcccgagccccttggggagcagtggccgggctggggaggcctgcctggtcaataaaccactgttcctgca

SEQ ID NO: 374857 - DNA, 385 bp, Homo Sapiens
ttctggctcaaaagttcactgtaccttaccacaccattttccttaattcaaagaaagaaggtacaaggaacagaaatggatataataattttataatttattagagtactagtaaagatgctgcctcttttacaaaatgataatccaatgaactgaactaatcacactgtgctagtaccccattaaccctctctaaaacattcacaaagtggatacagggctgctccagggccaatgagatttctctccaaagtaaaattcccctggagtgctctggtctctaaggcttgattagcaagtaccaattaatgcgccttcagtcctctttgtgtcttgagcactgagggctaacccttccctcgccgacaaagataagattaaatcc

SEQ ID NO: 374858 - DNA, 1229 bp, Homo Sapiens
  misc_feature (684)..(684): n is a, c, g, or t
caaaaacatttccccagctgatgctcatcggaacctctgcctagctcttcgaggtcacaagactgtaacgtatctaacccttcaaggcaatgaccaggatgatatgtttcccgcattgtgtgaggtcttgagacatccagaatgtaacctgcgatatctcgggttggtgtcttgttccgctaccactcagcagtgggctgatctctccttggcccttgaagtcaaccagtccctgacgtgcgtaaacctctccgacaatgagcttctggatgagggtgctaagttgctgtacacaactttgagacaccccaagtgctttctgcagaggttgtcgttggaaaactgtcaccttacagaagccaattgcaaggaccttgctgctgtgttggttgtcagccgggagctgacacacctgtgcttggccaagaaccccattgggaatacaggggttgaagtttctgtgtgagggcttgaggtaccccgagtgtaaactgcagaccttggtgctttggaactgcgacataactagcgatggctgctgcgatctcacaaagcttctccaagaaaaatcaagcctgttgtgtttggatctggggctgaatcacataggagttaagggaatgaagttcctgtgtgaggctttgaggaaaccactgtgcaacttgagatgtctgtggttgtggngatgttccatccctccgttcagttgtgaagacctctgctctgccctcagctgcaacccagagcctcgtcactctggacctgggtcagaatcccttggggtctagtggagtgaagatgctgtttgaaaccttgacatgttccagtggcacctccggacactcaggttgaaaatagatgactttaatgatgaactcaataagctgctggaagaaatagaagaaaaaaacccacaactgattattgatactgagaaacatcatccctgggaagaaaggccttcttctcatgacttcatgatctgaatccccccgagtcattcattctccatgaagtcatcgattttccaggtgtgggtgaactgcctgtgactcctctcctcccccgcccctacccctcagggataatgagttcattgctgggctagatgttttagccatgattctgcctctgttttatacctgcacacgtccttatctttgttacatatgaaatatctgtatcacgggtatattgagagaaataaaggtgagagcattcaaaaaaaa

SEQ ID NO: 374859 - DNA, 427 bp, Homo Sapiens
aattctgccacccacagccttgcgtagactgcatagaaggaatgaacaagaaacaaaatgggtgggtgaaagcaaatgtgaaatgtggagagctctatggctgtgagagattctttcaagaagaccaaaatgatttccaaagcagaacatggaacttcccttgaaatggttgaagggagagagaattctttaaaataatgtatattatacattctaataatagtctctattatatattctaataataattagaaaatccatgggctttggatttaaattctggttttagagcccactgtgtttaacctctccatccattaaaagagatgattgtacctatgagataatgggtaaagtgtccagtggtttttcataatggatgcataatgactgctcaataaatgttggttcctgctgataaaaaaaa

SEQ ID NO: 374860 - DNA, 482 bp, Homo Sapiens
caagaacacatggagctgcttcctgatcccaagcaggcattgccactggaaggacatggccccggtgatccatgcttcaatgcccaccccagaaacacacccctcagtgtgtgcctcagtttactttggagatcagttgcccgtttttagtgctcctttaggccttactaaaacagttttggaaacaaagctattttgaagtattcaagcagaggaattccctaacactgacccccttgtctttttttaatattcaggctgttttatatgcctaaatttttttcttaagatctaaacgaaaaatagtttcttgtttaaattcacataaggcaatgagatatggaaagatgacaagatacgtataaacattggtttgcattttattaaattattctaatgcaaatcttgtataaagaacccatgatgttttgtaactttctaattaaaatgttcaaaatgaggccgagcatggtggttcattc

SEQ ID NO: 374861 - DNA, 515 bp, Homo Sapiens
  misc_feature (17)..(17): n is a, c, g, or t
  misc_feature (52)..(52): n is a, c, g, or t
  misc_feature (495)..(495): n is a, c, g, or t
caaaaacgcctaaaggngctctccacccatataaaggaggtgtccttcccanggccctttcctgcccctttgtaaacaaaccacaggtgtggattttgttttgtctgtgtgcaaggcttggctggctgaagacatttccccattagactgctgccccacagcaccagctgttgttacaaactgctgattcccagccacacagcttttcgtttccagttgcttcagatggtataattcgctgtgtccttgaagcctgcatccatatgtttgggtcaaaataccttctcatcctcactggaccaacataatatcaagaatgttatttctctaagtgtttctcagacaggcttaagagtaaagacgtgactatatgtgccactggagtacaatttttaaaatacctgcttctttccagcattgtcctgtgtgacgtagaatttagccaataaaaatctcctatatttcttatctagttattaaaattaaatctcaaangttacaaatcctcggtccaa

SEQ ID NO: 374862 - DNA, 590 bp, Homo Sapiens
  misc_feature (57)..(57): n is a, c, g, or t
  misc_feature (82)..(82): n is a, c, g, or t
  misc_feature (86)..(86): n is a, c, g, or t
  misc_feature (464)..(464): n is a, c, g, or t
  misc_feature (469)..(469): n is a, c, g, or t
  misc_feature (554)..(554): n is a, c, g, or t
  misc_feature (564)..(564): n is a, c, g, or t
tccagaccaacttccggaacagtccggactacaaccagacccagctcttctacaatnaggtcagccactggctgcagcggantggncatggcacctccaggcctccgccgtggttggttcactagccgtctagagctgtatagcctgcagcacagcctgagcactgagcctgctgtggtgctgggcctggctttggcgctggccttctctctgcgccagaccagctgcgccacagccgtgggggctgcagcctgttttgcggcaggcgtgctcatgctgcctgccacagtgctgctctatcgcaagctgggcatcatcctcatgatggtcaaatgcgtcagttgtggctttgcagcttcttcttccaatctctctgctgtttcttcgggccagagaagaactgtgggcagatcctctgggccctgtgcccacctggccatggggatgctggtactgggggaccngggtnggggagaaggcaggccgcccacggaccaggggtcagtgggaagggattgcccgggttcctgcttcagagcaatatgagctaacanccctgggaangggcttcggagccccagtttttaaaa

SEQ ID NO: 374863 - DNA, 469 bp, Homo Sapiens
  misc_feature (439)..(439): n is a, c, g, or t
  misc_feature (450)..(450): n is a, c, g, or t
cgccaagcttggcacgaggctggcatggtgcgtggctaccttgctcactgcacatagtccacgtaggcaaaactcaaccacagtctgacacaggtcttggtagaaaacatcgtgatcctctctggatcctccatggcaagataggccatcgtaaaggagctgtcaaagggccatttatcttgcaaaatacctccctgtcttgcaaaaggctgccgtgagaaattttctcatccagctggtttccagtgacctcactctcattcaggtgcagataccgactataaaaatgtttagctatagtttaggagttggctcctcaacagagctatttctacttgttcatctgtcatcttgttccccttggttcagtgttcatccaggggatgttccctaagggaccagggtattacaggggagcttgattcccttcctggataantgcttttttgntgttctgtgttaaataata

SEQ ID NO: 374864 - DNA, 492 bp, Homo Sapiens
  misc_feature (92)..(92): n is a, c, g, or t
actttccaaggtttcctgtgggttggggaaattggggaagggaactcaacctaaatgaatctggcctctgggtcccctccatgtggttagantcaagacaaacagccagagctgggagagcggggggctagccagctgggggcttgttgagcgtctctctttctcttcgtgtggcctcagagcatctccacgtggtctcctacatgttggctcacttgggctccttcacaagatggtaacctcagggcactgtttatatggtggttcggggatccaccgtgagcaatctagccggcaaggtgatgatttgtcatttgtatgacaaagctttagaagtcatatagaatcacatctgccacagttacaacctgcccagattcaagaggggaaatagatcccatctctacatggaagaaaggtcaaattcatgttataaggatatgcgtgatgagagatattgctgctgccatctttggaaaatcaatctgcacc

SEQ ID NO: 374865 - DNA, 528 bp, Homo Sapiens
  misc_feature (26)..(26): n is a, c, g, or t
  misc_feature (37)..(37): n is a, c, g, or t
  misc_feature (63)..(63): n is a, c, g, or t
aaagccccctggctggaaatcctganctcctcaaacnggtgaacgggaaacaactttgccaantcccctggtccaagtgggcccattcaaacagattttcccccaggtggccaaacagcagaagcaaggcccagtctgtaacccagcagtagtaatagaccccaggaagaccagctctttatcgcttttctttagaaaggtataccatttagcagctgtcccgccttcgggatctctgtgccaaactagatatttcagatgaattgaggaaaaaaatctggacctgctttgaattctccataattcagtgtcctgaacttatgatggacagacatctggaccagttattaatgtgtgccatttatgtgatggcaaaggtcacaaaagaagataagtccttccagaacattatgcgttgttataggactcaaccgcaggcccggagccaggtgtatagaagtgttttgataaaaggaaaaagcaaaagaagaacttctggcagcagtgatagcagaagccatcagaaat

SEQ ID NO: 374866 - DNA, 583 bp, Homo Sapiens
  misc_feature (549)..(549): n is a, c, g, or t
acgcggtcactgaactggtgttaggtacattaaggagaatagcccttgtgtgactccagtttctacagctacgcatagcttgagtcgtcttcacaccatgctgacaggcctcaggaatgcaccaagtgagaaactggaacagattctcaggacatgttccagagatccaacccaggctattgctaacagactgaaagaaatgtttgaaatatattctcagcatttccagccagacgaggatttcagtaattgtgctaaagaaattgccagcaaacattttcgttttgcggagatgctttactataaagtattaggaatctgtttattgaggcagggaacaaaaaagactaggagacatggatttatctggtattctggaacaagatgcgttccacagatctctcttggcctgctgccttgaggtcgtcactttttcttataagcctcctggggaattttccatttattactggaaatatttgatgtgcctctttatcatttttataaggtgatagaagtatttcattaggagcagaagatgggcctttnttaggaggaggtggggtaaaacaccttaattcag

SEQ ID NO: 374867 - DNA, 532 bp, Homo Sapiens
  misc_feature (45)..(45): n is a, c, g, or t
gcttaacctagaagcctacagtgtaattgacctaaattggaaagngcacttccccataccctagaaaagcttgccctgaagaaacaatccaagagtggaagtgtaatatccctgcgttatgattatcctgcttgctttgtaaatgaaataccctgtgtctggcccattcattacccatttgagaaaaaaggatcatgtaagatataagacaataaataacatgtcttcgaaatttgaaattgtagtaggagcaatttatatcctcaattctggcatttaagattcagtaaaaatttataattgatcatagaacatagttctacaaacatgtaatttatctcaggtattgttaaaaacaatatttttctttcactatttaatatatctttaatgctctggcatttatcaatttctgtatttttatatttgaataaaaatctcctgaaatttttcaaaagcatttgaagtagtttaaataagttatatgttctcacataaaaaaggttttttgccctgcgttaccaagcttgcg

SEQ ID NO: 374868 - DNA, 198 bp, Homo Sapiens
aagaaatacaggttaaaaactcatcagaaacaaaatgcctttagctcaatcaaaagtccccaaatcaatgtggatttttaaagccacattttgcctctgggaatttttgatgatatcatctgttttctagagttactgggtaccatggtaaactaaaaggttttttatatatcctttggagacaatgaaaaatttttg

SEQ ID NO: 374869 - DNA, 515 bp, Homo Sapiens
  misc_feature (387)..(387): n is a, c, g, or t
  misc_feature (393)..(393): n is a, c, g, or t
  misc_feature (480)..(480): n is a, c, g, or t
gcttggcacgcaggccatcaatagagcagcacattaacagaaataggaaatagtacataaacaatttgtgaagaattttagcacatgctatcccatttaggcctagcaaaaactctgtgatgggggaaactgaagcttagagagtttgaatgaaatttccagctaaaatggtcttattttagctgatttttttaaaggtagtaacattttattttatttagttgacattttgacattccccctctaactttaatacccttaccaaatgtaaaggtaaatacaatctttaaaaagaaattagaaagaaatacaatgcctataatcaggacacacatctcatgtactaggaaatgaaacggcaacacaaagccattaagggagcactgnaagganaggaaattaggcgcgtctaggaaggcaggactgggggtattggatttgccaatgggaggctccactggctcttggaaaagggcctgnaaaaaatttctggcccctttccccaggagcctcgt

SEQ ID NO: 374870 - DNA, 487 bp, Homo Sapiens
  misc_feature (435)..(435): n is a, c, g, or t
caaaaaaggtaaatttaatgaatataggagtgtgtacatcatctcctgtttacctgacaaagccaatgcttggctcttttaaacagtttccgaattctcacattctccatgtttctgggttctacagtgtttgtacagttttgctactcattgatttcctaaaatccttaaggtcttgagttcatctggtctgctgatttcacgggtcttagggaaacagtgttctctttagactttccatgccatgagggccctgggaaggatagcctcaacaactttcccttctgtggttttgttccctagcgggcaaggacacagtctattttgtcatttctccagggcctgcctgggttgagggtaagagctggggagagagatgggaccagcaacggaaagttcccctttgtgttctactttaaaagctgtttgccaggnacaccgcgtgaacttttagtttgtattgggttaagctccaaggaccagtcca

SEQ ID NO: 374871 - DNA, 476 bp, Homo Sapiens
  misc_feature (406)..(406): n is a, c, g, or t
  misc_feature (414)..(414): n is a, c, g, or t
  misc_feature (425)..(425): n is a, c, g, or t
cacttggcacgcccggcgctgtccagcccggcggctgtggcaagaagttcactacggtctataacctcaaggcgcacatgaagggccacgagcaggagagcctgttcaagtgcgaggtgtgcgccgagcgttccccacgcacgccaagctcagctcccaccagcgcagcacttcgagcccgagcgcccttacaagtgtgactttcccggctgtgagaagacatttatcacagtgagtgccctgttttcccataaccgagcccacttcagggaacaagagctcttttcctgctcctttcctggggtgcagcaagcagtatgataaagcctgtcggcttgaaaattcacctggcggagcattacagggtgaaagaccatttattttgttgattcttgacagctttggntggggacntttaaccagcntgttccaaactttttaagggcacaggaggggaaacattgacgtttgaccgg

SEQ ID NO: 374872 - DNA, 392 bp, Homo Sapiens
  misc_feature (140)..(140): n is a, c, g, or t
  misc_feature (184)..(259): n is a, c, g, or t
  misc_feature (261)..(261): n is a, c, g, or t
  misc_feature (297)..(297): n is a, c, g, or t
  misc_feature (324)..(324): n is a, c, g, or t
  misc_feature (334)..(334): n is a, c, g, or t
  misc_feature (365)..(365): n is a, c, g, or t
gcaagcttggcacgaggagggattgcagtctttgctgatgagactaagcatatgacgacaggaatgagtgtgagagagaacctcaagaaactgaaaggccagactctcagagggtgaatattgaagtcaccaagaattantgacacgaagtgtgagtgctgggtttgaagcctgatactatgtnnnnnnnnnnnnnnnnnnnnnnnnnnnnnnnnnnnnnnnnnnnnnnnnnnnnnnnnnnnnnnnnnnnnnnnnnnnntngttctctgaattatcaggagtaaacaatttaatacnttatgaaacctcttagtatgtggtatntggcaaatgncatataaatgtttataaatattatcaggaancataatacccattattaatttgtatga

SEQ ID NO: 374873 - DNA, 424 bp, Homo Sapiens
  misc_feature (346)..(346): n is a, c, g, or t
cgccaagcttggcacgtggccgggggctattagtttcaatgcagtgatgaacacaaactatattttgagttctctgcagcaagtggaatgtggtatgaaaatatctgatatttacaaagatgatactgctaagtcagagtcacgtttattgctaatatgatggtggagtgttgtcttcattcataatgaaaggaaatgttatttttaatagaggttagtgaaaataaaaataaaactattttctaatcaaagtttatgggtcctcctctccccaggcactctacaattacctccaaagttgaggaactctcaccttaggacacacaacttttattaacggataccnttattttcccaaccccaaatctatggttcttaatcttcattttggctcccaaattttaggttggcttccggaatttta

SEQ ID NO: 374874 - DNA, 509 bp, Homo Sapiens
  misc_feature (15)..(15): n is a, c, g, or t
  misc_feature (475)..(475): n is a, c, g, or t
tcaaggttgggaacncgggcaaataaagtgaaagaaagtaacagcatttaactgatttgggaacttggtttgaccttgtcctaatgacccacttcgaatggtggttgaaagtaaaatctgtatcgccgtcttatgtttccatttacctagaaatactttacctttgagcacaggaaattaatccccttctggttgttctccccctggcattggttttaaatatataatgattatgtttgttgtaggaaaaatagaaaaacaactacaatagaaaattcttcccatatattattttgaaatacatatttccgatccgataatccattgctctagcatgggaaaatgttgggatttacttgtgtttgctttttccaaataaaatgggaacttttgtgggctacattataggaattgttttagactgcttaattctgtgtgttgttgagaaggggagggagtgggggaagggtaaaantcttggacatactttcttcgtggggtattttttc

SEQ ID NO: 374875 - DNA, 595 bp, Homo Sapiens
  misc_feature (16)..(16): n is a, c, g, or t
  misc_feature (475)..(475): n is a, c, g, or t
  misc_feature (481)..(481): n is a, c, g, or t
  misc_feature (509)..(509): n is a, c, g, or t
  misc_feature (522)..(522): n is a, c, g, or t
  misc_feature (530)..(530): n is a, c, g, or t
  misc_feature (549)..(549): n is a, c, g, or t
  misc_feature (568)..(568): n is a, c, g, or t
  misc_feature (576)..(576): n is a, c, g, or t
gaccaagcttggaacncagggtgtgtgtttctttatagatacatgggctaaacaatactatttcacagtttatgcttttttaaagtgcttttacatccatggtcccacttctaatagcctttttaaggacaggtagagtacatggagggttagtgaaaaggtcatttatccagaagttacctctctggcaaagcaaaaaaatcaggaattacgtcttaaaggcctttcagctgccagaggagatgtcacaaagtttcttgcaacttacttatgggagagatcttcaagaatatcactcttagactctgaactgaaatttgcatacgcttccaacatgttttattagctgggctttgaagctcacaaaagaatgggcaaaagaaagagggctgctaggatttgaagggcagggcataactggaaaggaaggaaaaagggcccaactggaaaactaggattagtggaggtggagganggattnaaaactttccaaggacattggccaattntgggggactgtcntactttancccaaagggttacttcttnggtttgaccccggaaaatnttgttgtnccaccagtttgggcccctt

SEQ ID NO: 374876 - DNA, 619 bp, Homo Sapiens
  misc_feature (218)..(218): n is a, c, g, or t
aagagcacagaacattccagactgaagatgtgggacggagttaggaaaagcacatctttttctgagaaaagccagagtttagggtcgtgggtgtagtgggggtgacaggagatgaggtcaataagcaataagcagaggagtagcctatatatgacatccttcagaaaactgagcaggaggaaattagggaaggtaaacttgtaggcacaaagggtatnttgggaaataaatccaataatctaataatgtaggtctgaatttagccagcagtaatcacaaagagggacgaattagaaatacaggcggcctttgaataacaccgttttcaaccactcaggcccactgacacataaattttcagtaaacacactgagaagtttttggagactcgcaacactttgaaaaactcagatgagccaagtagcctaaaaataccttaaaaattaagagaaaggtatgccacaaatgtataaactgtatgtagatactagctattttatcatttactaccataaaatacacataaactgattataaaaagttaaagtgatctctcaatgttctcctttgtttttcattgtgtttagtgcgattattataaaccttaaataacaagcct

SEQ ID NO: 374877 - DNA, 671 bp, Homo Sapiens
  misc_feature (44)..(44): n is a, c, g, or t
  misc_feature (105)..(105): n is a, c, g, or t
  misc_feature (115)..(115): n is a, c, g, or t
  misc_feature (634)..(634): n is a, c, g, or t
  misc_feature (646)..(646): n is a, c, g, or t
ggacacctcctaagtatgattataattattataattaatgattnctttagcagacatatcagaattttgacatctaattaagtgttgttcccctcaatgtcatcntagttttacnttaagaagttaatacttattctaatgatgctgccatccttaaagttatttttgaaactcctctccttagaaataatatccaaggaaggtaataaggtataagaaaatcagctatattatttaattagtatcactttgagaaagcacctggaagtatattctttctttgtctactttttctactactcttggttctgagtaacatttagccatttccagaaagcaaattcaaccctgtaagatgaagagtggttactgttgaagacagtaaaaaggataatccacaaaaaattctcagagaggaccttataatagaaagtgaacatgattaagacttaatttctgtaattttctgaataaggaaacttctgtgattccttagtctttagaatggtttaaaacattgaaagatatgggtattaaaacacctctgaaagaagttgtcactttgttcagtgttatttgatattggacttcgctcttcctgaattagaattacacaacttgggattggctaatnactgtgggaaanacaaacccaaggaaacgaactactt

SEQ ID NO: 374878 - DNA, 423 bp, Homo Sapiens
  misc_feature (389)..(389): n is a, c, g, or t
tttgaaaccatgtcctggtttgcatggccagcttccctgcagaggtgatagaaactgacttgaggcagtttctttctctatgccttagttagatgaccctcaaaggggcacagcagatttccctggctactgatacaccttaacaagaagcttgtgttttttatgccctcaaaagtgttttacttatactttcctagacataaaggtggaaaatgggcctaaggtctgtcaaaggtcttggaaaagaagattgtattaaaattgctgtccgtcttcattaaataatactagatcgatacaatgctttctttacagtattagtggttggtgaaagacttcctattgttacagtatatgtatatatctggtaaaaattaatgaggtatccntttaacttgtaggttaggaagcgactaaaaactc

SEQ ID NO: 374879 - DNA, 249 bp, Homo Sapiens
  misc_feature (37)..(37): n is a, c, g, or t
  misc_feature (64)..(64): n is a, c, g, or t
  misc_feature (73)..(73): n is a, c, g, or t
cttctgtaaaggggcccaaataagtgaacatttccanctttccgtggcagcctcccatcctganattcaactnctacggttctggtcggaggtctccacaggccacatgtcagcggactgatgtggttatgttccgataaagctttatttacaaaagcaggcagcaggtcgtatttgaccctcaggctgactgtggggccttgcctgtgggattgtggggagagaaataccaccactggccccgagcag

SEQ ID NO: 374880 - DNA, 424 bp, Homo Sapiens
  misc_feature (27)..(27): n is a, c, g, or t
  misc_feature (32)..(32): n is a, c, g, or t
  misc_feature (41)..(41): n is a, c, g, or t
  misc_feature (73)..(73): n is a, c, g, or t
  misc_feature (79)..(79): n is a, c, g, or t
  misc_feature (90)..(90): n is a, c, g, or t
  misc_feature (113)..(113): n is a, c, g, or t
ccctcctcctggggcattggtcccagnaccangaggccccngggcatcatggaaatcgggctcctgccaaagncccaanactgagacagnccaaacagaggactagatgattnctacttgaaagcaaagaccctttcctctttcactctcctagttatttcccttccccctcaccttttggccatggggagaatttgacatttattcactataggacacactcccaagggaactggtgcttgctgggaaacttggaaccttcccaggcagggatgactcctggacagtgaagagttgaatgactgagcatattcagcagctcactgaagcgccaagctatccctttagcaaaaaagtgtctcagatgtgtaaaagctgaggaatgtggtgttctggcttcacaaatgaaaaggaggcagatgtt

SEQ ID NO: 374881 - DNA, 315 bp, Homo Sapiens
aaggtttgcgtcacttgtttaatatacaaagtctttcacagataattattttctttttcttaatttgctttagtacacatgattcacaaaacagtaaattgttaatgcaagagaattatgtaaaaccaaaatagtacaaatgcctaatttcaaaaactgcacacagttaaaataattttcccttctttgttttaatgcagtatccagtttcaaaatgggctttctttagatgtggaggaaacactgcagcccaaaataacagtacttcctttcaactgtgttgatatgtaaaatagcaccattgggctgacttag

SEQ ID NO: 374882 - DNA, 193 bp, Homo Sapiens
aaatatgccaaagaattatttattaacacaagacttacagatcacaaaagagagtgatacagaagagctggaaaagaagtcatcagaataagcatgcagatcagtatttgcagaggaatatactaaagcaaatttgaaggcacattcacacagaaaatgtctaaattgaaaaaaagacatcagaaaagcagcc

SEQ ID NO: 374883 - DNA, 373 bp, Homo Sapiens
ttttttggttactggttcctagagatgaaatgattatcctattttcagtaggcaaggtagtttaaatgcagaaattctgcgatatatgaatattgtgacatcaagaacagcttcattggcatattctttgggaaagaggcaagaagaataaaagggctaaaagtattttattttcagcttatgagtgttgttactgcttcaaattgtgtttagtcacctgagccataaatcagttgtagtagggctattgtattttaaatatattttttgttctccaaggagacttatctagtttgccacctccttgcctattgctctgatatggttttccctccttttttatttattgcacaaatatctaacagttaaaaaa

SEQ ID NO: 374884 - DNA, 437 bp, Homo Sapiens
  misc_feature (21)..(21): n is a, c, g, or t
aaatggcctcaaaaaaccccngaacaacctcctgaaatcaagccccaagctgcaagatgaggctccctcgggtgcagtttgttgggaaacagattatccaagtacatttcctctacagtttaagacctgtgaactaaaaactcaagttatctatcagccacctcatcctctcatctccctcacattgtaaaatggtgcttgaggaataatgcaatagatagtcttactcaaaaaggagtggggtagagtaggaggcacatggtagtcaccatctgtagaaattctggtatctaccggtcatcactgccccagggtcaaaagatacactttgattaagatccagttttgctctgcctggctgtgattctgccctctgagtcatcctttctcttccataagaaatggcccatatgtgccttagggtagctttctttttt

SEQ ID NO: 374885 - DNA, 349 bp, Homo Sapiens
  misc_feature (281)..(281): n is a, c, g, or t
  misc_feature (302)..(302): n is a, c, g, or t
  misc_feature (311)..(311): n is a, c, g, or t
  misc_feature (318)..(318): n is a, c, g, or t
  misc_feature (325)..(325): n is a, c, g, or t
ggtattctgggatactgacctaacctcacaggcattaaatatttcaatttaaattggcagttgtaaaggattatttctaattccaacttcaccttctatattcttatgaaataactagcttctccaatccttttgaaatacaagaccattttctcccacttgatcatgctggtatgagtgggatgatttagcagcactcactaaagaggtgcatcttcctctgactctggccttttaaattgggacatggcactaggtgcaagagccaaaagtggaaaagncaagaggcttgctcacagagnctaaaaggncaattgnttaaggntgtaactgtattaactacatatca

SEQ ID NO: 374886 - DNA, 345 bp, Homo Sapiens; identical to SEQ ID NO: 238620

SEQ ID NO: 374887 - DNA, 678 bp, Homo Sapiens
aggctggcccagctccgcaaggaaagaatagaccttcgagcggctattgaagtgaacgccggcaggaagccgcaggcgatcctggaggagaagctgaagcagctggaggaggagtgccggcagaaggaggcggagcgtgtcagcctggagctggagctgacggaggtcaaggagagcctgaagaaagcgctggcgggcggagtcaccctggggctggccatcgagcccaagtcagggacatcgagtccacagtctccagtgttccggcaccggaccctggaaaactcgcccatctccagctgtgacaccagtgacaccgagggccccgtgccggtgaacagcgcggccgtcttgaagaagagccaggctgccccgggcagctccccctgccgagggcatgtgctgcggaaggccaaggaatgggaattgaaagaacgggacctaggggacagcagcaccactccagcctcagagactgcacacccccttgcctgtatcctcatctgtgtgacggcaggaagctctgcccagagtggcctcagctgcacgactccagaggctccacgactgagctctgaggccagtgcctgtcccccaggcccacttgtattctttctactgtaaaatggcgcctttaaaaaagatgtaagactttggttcccaaaattgttaaaaaaa

SEQ ID NO: 374888 - DNA, 454 bp, Homo Sapiens
  misc_feature (61)..(61): n is a, c, g, or t
  misc_feature (181)..(181): n is a, c, g, or t
agaaccccttaaactccccaacctctgaacctggccttatctcccacggcaatcggcacanctcccttgtcagtgaaacttcatgtcaagtttcaaatagggcaatgaagggactaacaaccccatcaatatgacacaagtcctactttgagaatatctgaacaaacagcagctgcagacnaaaaagccttagctaaactttgatgagtaaagcaggtcttaccgagaattcagctgccaaaaccctcctctgagtgttcctcttataagggcacttagcactaggacctcccaaggtattgtaaataagccttatcagaactttttgtagtttcattctgaagccttaagacacacaccataaagctgatctgtaaacccttaccccttgctgttcagagagctactctttgtagtgttcttgcatgcatatataataaatgttttttctatt

SEQ ID NO: 374889 - DNA, 347 bp, Homo Sapiens
atggaccaagaggctctactgtggattcagtgccaaagaatgggaggggcagagtaagcaggtttaggattatcgggtttgaatgacttgattgagctgtagggtgtagagactgcctctactgtctggcaccaggggtaattagggcagctggatagtggtctggagtgtgagagctccctaaaggaggtggttggaggtgtaggttttggattggttgatctgtatatgaaaggtgcacgtgcagggtgagtcctctactatcactagaaattggctggtcccaggagaagtagtctctctagagacagcaatgccccagatgtcaaagcatcagaaaatagcag

SEQ ID NO: 374890 - DNA, 532 bp, Homo Sapiens
  misc_feature (47)..(81): n is a, c, g, or t
  misc_feature (128)..(284): n is a, c, g, or t
aattaagggtgtagaagaatctgggcgtgttgctggtggcttatgcnnnnnnnnnnnnnnnnnnnnnnnnnnnnnnnnnnnggatcccttgagcccagtagttcgagaacagcgtgggcaccctggcnnnnnnnnnnnnnnnnnnnnnnnnnnnnnnnnnnnnnnnnnnnnnnnnnnnnnnnnnnnnnnnnnnnnnnnnnnnnnnnnnnnnnnnnnnnnnnnnnnnnnnnnnnnnnnnnnnnnnnnnnnnnnnnnnnnnnnnnnnnnnnnnnnnnnnnnnnnnngagaggagaccctgtctcaaagacaaaaaaacaactggtaggaaaacgcaccctcaaaacacatgatgagatggtcgagaccagaccctaggagggtggggactggctgggtgggtatccagagaccatgggcgtttcataatgcattgtttcccatctcctccactcagcgactcttcttcccctgaagtcttgcattaagtaagtgaatgaatcaatcatcaagttaatgaagctcctgactttgt

SEQ ID NO: 374891 - DNA, 319 bp, Homo Sapiens
  misc_feature (58)..(58): n is a, c, g, or t
caccagaccacgtggaggagcagctgaaacagggccggtggcagcagccgcctgtganacgtgccagccggtgagccttgttagtttaccattgccacggcaagacccagaagttactgccacttcccacggtaaaatcccaatgaccctgaggtttctgctccttttctagaaatttctgcataaaccaacccctaattagcatgtagttaaaagtgggtgtaattatgatgcggagctgcctctgagctgctcttctgtgcactctgctctcctggggcagcccctctctgccgctgcaataaaagctgctaacagc

SEQ ID NO: 374892 - DNA, 482 bp, Homo Sapiens
  misc_feature (18)..(18): n is a, c, g, or t
  misc_feature (51)..(51): n is a, c, g, or t
  misc_feature (59)..(59): n is a, c, g, or t
  misc_feature (235)..(235): n is a, c, g, or t
aaaacttaagttgtcaanaagaaagtggctgaatgcttgcccaatggcccnaaaacccnagggcctgtttggttacaagacgaagacaagtgcccgaaacacaattcaaacaagctgcaagcaccccagggccatcgaagtacgacgtcatcacccctggccgatgaactgaaccccgagggccccaacacaagatcatggatttgcgggccagctctccctgggggtagggggnccacccaggactcacctccctcttcatttaggatctccagatactggatagccagcatcctctcattcccagggagccagacctgtgctgttggggttaggggcagccatgggccccagccaggacattgtgggtgccaccgactgcaggcaggctttgggagagaaatttatttttgtttgggtggacccactggcctgtcagtctcaataaagggaccggagtccagtcctgaacagcttaaaac

SEQ ID NO: 374893 - DNA, 412 bp, Homo Sapiens
  misc_feature (32)..(32): n is a, c, g, or t
tttaaatgaaaattggttttggattttcccancttccccaagaggccggaaatcagactccccaatataagcctcttggtcgctgtggtgaaagttcgtgtgtattcatcccctgagaaggttccctaacccttactgtgtcttctgtgtgaggagtgcagctctaagcactcagggtactgtttcccagtgaatcttaatgaaatgtttggagaatttttatttcctccatttagcctaaccagaacagaaacgtcagctctagaggtagaacaggtcactcagagtcacccgagcaatcactgctgcatgagctgctgacttgaggtctaagtgatgggaaagttcacctttctacctagttgcctctgaaaatgtatcctaaaatgaaataaacacgttgtttatagct

SEQ ID NO: 374894 - DNA, 326 bp, Homo Sapiens
atccttcctttttaacacttttattttaaatataaattaagagaaatgggccaaaaccatttgtattgtttaaagaataattataaacacacttgtatccaccaaatcaagaaagggaacactgacagtaagaaccttctctatcttgtccttcctttctcattatagcccccacctaagaggtaaccaccatcttgacttttatttaaataactttcttgcttttctgtatactttcatcacattcaggtgtgttccaatacaagtagattttagttcggccagtttttgaactttaaataaacatatcataatagataaaaaaa

SEQ ID NO: 374895 - DNA, 594 bp, Homo Sapiens
  misc_feature (21)..(21): n is a, c, g, or t
  misc_feature (466)..(466): n is a, c, g, or t
tccatgtaacaggttgaaaanagaaataaggccagaaccaaacagaacagccccaaagtgttgcccattaagaaaggctttgcttttactttccttagaggggagtgtgctggagagagggagaaagggcaagtgtgggtaccagttttgatcagttggattgaaaggaatgtaaagtgaaagatagggtttccattttccagcaaggaaacagatccttgggtatgaaagccccgttggctcgggacctgtgtaggccccaggtaacaggcaagaacaggtcaggaaacagcaacaaaaatcaagactgtgggttgcctcttctaggctgactcacttcactgaaagagttcttcagttctcctgcctagcacttggaaaggtttctctggtgctgcaggttagccttctcattagtgatttcccacaaagcacctcttttcctttgcacaggattaaaaaaaanaatcctaccactttccatagacctaactaccaatttcgcaggttggtccaaaaagaatctcttctaggtcaaaaataagaaaactcagattttcctaccagaatggcaacccaccatcttctccggcc

SEQ ID NO: 374896 - DNA, 494 bp, Homo Sapiens
cttgttactttatagccttcgaagcccaaccccaggtgctagctttgaaacccaactttgccacagaccagcatgttgatggagaggctctcacccacaagcatggagtgggagggtgatttcctgggagaaagaaagcccactttctttttggaagccaacgaatgcccaagtagatgccaccaaagccagtgatggcttgtgaaagcccagtgccccgggacaggaaagacaaggggatcccagccaagtctgactgcaatgaggccaaacgttgccccagagcaagacttcatctcccttttcctgacaaaccattgatggctgcgtttcacattaacctagattaaaagtctccttgaaatgtataattgtaattaattattggttcatttgtttgtctcacccccacccccagaatgttacttaatggtatggagggattacctttatctttgtatcatcagagatcaataaatgcatgctgaataaat

SEQ ID NO: 374897 - DNA, 365 bp, Homo Sapiens
  misc_feature (38)..(38): n is a, c, g, or t
ttaaactggagtcggccaataatatttaatttccaaanacacctatgtaataggcaggatgaaaaatggggagtgagcatggagataaagaaaaaataataaaataacccaacaagatgtctttcatgggcttatggtaagggtgtgccctgaattgacaggaataatgaactcaagttttggaacctgacattccccaaatctgcaagagttaagcctaaaacaaacagaccaaagccccaggttatgaatctagtcactgttgagcagtgagctttcgccatcttccttctgagaaggagctcagtggttatatggtttttgtagtgttaaacaatgctgctaggccgggtgcagtggctcaa

SEQ ID NO: 374898 - DNA, 542 bp, Homo Sapiens
  misc_feature (315)..(368): n is a, c, g, or t
atgataacatgagcttattacaaagatttgatgagataatatacactaagggcttagttcagtgcgtggcacatgacatgtaatggtacctgttgttgctgggagtcttgatcttagtatgggtggtttaaaagaagaaagtaagtgggtcagtcttagtttctaaatccattgtacagtgccatccaatagaacattctcgaataatagaaatttctatatctgtgctacccaatacagtttagtgtcttgctgcatatagctattgagctcttcagatttggctagaggaagtgacttttcacatttaactgnnnnnnnnnnnnnnnnnnnnnnnnnnnnnnnnnnnnnnnnnnnnnnnnnnnnnnctttatgagattaatattgtagaatcatgtgacaaaaagcagcattgtgagagaacagttacgtgaaaatataaggaagcatagagctcatggggttgagccagtcagaatcgcatttttaattagtcatggacactactcttattatgtcctttattgtacaaacaaaaaaaa

SEQ ID NO: 374899 - DNA, 114 bp, Homo Sapiens
caagaaccctacttgtaactctgactaaaattattattagcaagcgaaaatgaaaagatttctcaaatccccgtccattatcatcattaattaaacatcacctcaggcgtgttg

SEQ ID NO: 374900 - DNA, 366 bp, Homo Sapiens
  misc_feature (40)..(40): n is a, c, g, or t
  misc_feature (51)..(175): n is a, c, g, or t
aaaagctacttaatggtttgaattattactattttttaanagatgtttgtnnnnnnnnnnnnnnnnnnnnnnnnnnnnnnnnnnnnnnnnnnnnnnnnnnnnnnnnnnnnnnnnnnnnnnnnnnnnnnnnnnnnnnnnnnnnnnnnnnnnnnnnnnnnnnnnnnnnnnnnnnnnntttaaatggttttttggggccccttttggatgctctgggtgtttttgccaagagttacaggatgtcaagtgtggggagctcagcacccttgctgtggaccagtgaaggctgttccagaccaggtgcttccagacatttccaggctccaggagagaggctgggagcccccacagaaagcacaggaaaatgcc

SEQ ID NO: 374901 - DNA, 421 bp, Homo Sapiens
  misc_feature (359)..(359): n is a, c, g, or t
  misc_feature (367)..(367): n is a, c, g, or t
  misc_feature (401)..(401): n is a, c, g, or t
  misc_feature (406)..(406): n is a, c, g, or t
ccatggagaacccagcactgtttaatgacatcaagattgagcccccagaagaacttttggctagtgatttcagcctgccccaagtggaaccagttgacctctcctttcacaagcccaaggctcctctccagcctgctagcatgctacaagctccaatacgtccccccaagccacagtcttctccccagacccttgtggtgtccacgtcaacatctgacatgagcacttcagcaaacattcctactgttctgaccccaggctctgtcctgacctcctctcagagcactggtagccagcagatcttacatgtcattcacactatcccctcagtcagtctgccaaataaggatggggtgggntgaaggancatcccagttgggtaggtgcagttttttggcccntgggngttataaataatttt

SEQ ID NO: 374902 - DNA, 507 bp, Homo Sapiens
  misc_feature (33)..(33): n is a, c, g, or t
cagagtacattttatgttttatgtatcttaccncaataaaaaaataaaataccttaggaacattttcctgaaagagtccacataaaattcattttaatgcatgtgtttatgcatagctttctatttttctcttttctctttacattccaaattagaatataatgctaagcaagtatagtggctgcgtttctttcttcctctagtctgcaggtagcatacaaatgtaataaagtactcatacatgtcacatctatttattttctgccttataccaagcttgtgggattctcttaaatacaacatttttatacttacacctatgcaatacccattagcatcgccttcctaaatcaggggaaattgagtctctgtaaggtgcagtaacttactaagatacaaaactcagcattaaagtctgtatacttcaatatcctgccctcttctcatttgtctttactgccttttatgtatgtgttagatgttcaataaattctcttttttaaactg

SEQ ID NO: 374903 - DNA, 488 bp, Homo Sapiens
  misc_feature (32)..(32): n is a, c, g, or t
  misc_feature (37)..(37): n is a, c, g, or t
  misc_feature (71)..(71): n is a, c, g, or t
  misc_feature (103)..(103): n is a, c, g, or t
tgaaaaccctggggaacattccccggaaaggngcccnacaaaaaatccaatttaaaagccaggggtttaangccataggctttcccatttttccccctttccnccttaacattccccaaattaggaataataatgcctaatccaaagtaatagtgggctgccgtttcctttccttccctcctagtctgcaggtagcatacaaatgtaataaagtactcattcatgtcacatctatttattttctgccttataccaagcttgtgggattctcttaaatacaacatttttatacttacacctatgcaatacccattagcatcgccttcctaaatcaggggaaattgagtctctgtaaggtgcagtaacttactaagatacaaaactcagcattaaagtctgtatacttcaatatcctgccctcttctcatttgtctttactgccttttatgtatgtgttagatgttcaataaaatcgcttttttaaactg

SEQ ID NO: 374904 - DNA, 915 bp, Homo Sapiens
  misc_feature (26)..(26): n is a, c, g, or t
ttctggaaacaggaaatcccccaaanagcaggagcttgcaagatcccagggcttcgaaaattgaccctcgcccgaagatccgcgcccgacaaacagaaccctggaggcccatttctgcacagcctgcccgagaactgtgccagctggcagtgagggctgcccagatccccggcacacactcccccacctgctgtttacatgacccagggggtgcacactaccccacaggtgtgcccatacagacattccccggagccggctgctgtgaactcgaccccgtgtggatagtcacactccctgccgattctgtctgtggcttcttccctgccagcaggactgagtgtgcgtacccagttcacctggacatgagtgcacactctcacccctgcacatgcataaacgggcacaccccagtgtcaataacatacacacgtgagggtgcatgtctgtgtgtatgacccacacgtgttcaagtctaatccatccagtcagcagcttacggtccacacacattacagtccacagctgttgtgagagccacctgtgtgctggacaccctctggatgttgggcaagttgttacatgagatgccctggggtgctacatccactcactccagatagcagggaggtctcagcagatctgcagagatcaagggggtcagcaacagccaaagcccctagtcccagagctggctgccctctgtttcacagcagctccctgacctgtgttgctgcgtgcactccctacagctcgacacagccaggggaccaacaggccaagaaatgcaagatcccgggagggttcttagcagcagaatctgaggcccagagaccctgaggccgtggccaggcctgctagtctggctagagcaaggcccattcctggcgggggtgtcattgccttcaccggacc

SEQ ID NO: 374905 - DNA, 409 bp, Homo Sapiens
  misc_feature (39)..(39): n is a, c, g, or t
tcagtagaatttggaaaactaaccgtggttggaattccnttgaattcctgttagtaatgcccaaaagaaaagtctcaagcagtccccctatccagtcatttttatggagtttcatgttgtccactatagctggacactgaaccttttgcctaatttattataaaggcctgaccctctattgtcccatcttcacccccattccagagcagaggagtctctgtggaccatgaattgcactgtctccctcctcatctctaaatgaaaggtattagatataaatttttttgaaaggttagttgtttgagatgctaagcaggataataaatttagattttaaaatgttccctgtaaaagtcagcccatgacaaggaaatttacaaaatactagagtatctagaagggtgaaaac

SEQ ID NO: 374906 - DNA, 320 bp, Homo Sapiens
  misc_feature (52)..(52): n is a, c, g, or t
  misc_feature (96)..(96): n is a, c, g, or t
caactctcttcccctaacttacttctttatcctcatctgcagttgtcatatntgtgaactcgcggcaagtgagatattgctagaaataatttctcntgatcaataaaccattgtctcccccagctgtgttagtgtttttgtgtattcagttctataatgtgaaacttaagaggattaaaactcaaaaaatgatcaggccaaatttttatgtgggatgaagtgtttctgattcagtgttattgtgatatagagctataaattagttgtttacctatgaaattccttcctgcagtcattctgaaataaagttgttacagctg

SEQ ID NO: 374907 - DNA, 270 bp, Homo Sapiens
atcaaaatgtcattctggtctttatttttggacacgtagcatgttttaacaaatcagtttttcataggcaaccttttgaaacatcaaaagaaatacaatatatttttcacaaatttctcatcactgtaaattcactttaaaatcaactaagtagcagggtagagcaatgtgtttccatataccgaccagtgcaaactgacagttacaattaaggtatccagaaaggttgaaaattaagatttacgtgaaacaaatttacttccatttgtt

SEQ ID NO: 374908 - DNA, 352 bp, Homo Sapiens
  misc_feature (122)..(122): n is a, c, g, or t
tgtacccaaaaacctgaaagttcgacggtgaaccccaaaaaacctcaggcgcatgtcacccacagtaagcaattaaacatgtggtaggaacctgtgtggaccattgccttgaaatgggcggnccactgatcccatcatgcgaagcctcatcttctctaccattcctttcatttctgtaccctttttttgtatccaaagtactgcctagaagaggatgagagatgaaagcctgactgtggaggtggatcattttccaaagtgtggggtagggaaggctgaatattcagatccctgttccctctggtgtgactaaggaaagactagacagcttgactttaggaatctcctagta

SEQ ID NO: 374909 - DNA, 274 bp, Homo Sapiens
ggctgaaccatttgaaagcaggttgcaggcatattgcctaagaataaggagaacaactggtttcctttgttccccagcttctctgatcacaggaatctcttatccaatcttaaactgctcgtttatggggactctgctgggatacttccccaaggtttcctttgcgattgattgctcgtctgacaccaggttggtagttactggccctggcccgcaggagtcaatctcagaatttccaagccggctctggctgctgtgtcatgacttgtacctc

SEQ ID NO: 374910 - DNA, 251 bp, Homo Sapiens
tatgtgagccactacccccagccaggttaatttatttttgaagaaagaataatatttttataaactgagtatatccttagttcagtatttgtgaaggctatggcagtctacagtggtgtacagtaatgtcttagaccttcacattcactccccactcactcactgactcatccagagcaacttctactcctgcaagctccattcatggtaagtgctctctacaggtatactgtttcgccttttatacggta

SEQ ID NO: 374911 - DNA, 488 bp, Homo Sapiens
tacttacagaggggtgggcaggactaataccaaggaatggtgaagcacttctgagctagcaatagcaggaagttgttaccaccatagccctgggggacaggagaaggaatgattatcagaacccagcaatagttacgactgtgggcaaggaactatcagtagagaaatacagccactaccaaagctaacagggagtgaaagagggaaataaatgctgtagcccctcactcctcttgccctgcagtttcattggccattagccaaagcctactgaaagccagagggtaagaggagctgggtgatatagtcatgaggtcagctcctgagagcacagagcaaagaaggtccaagaacggatttggagtgaaaatagagaataatgagcttcttattaatgatttattttgaaacctagaatcaaaagccaatttaaatatctatttttaaaagttcaaattatgactcaggggcatttcctttaaaaaaaa

SEQ ID NO: 374912 - DNA, 429 bp, Homo Sapiens
  misc_feature (43)..(43): n is a, c, g, or t
cagaacaaagaatccaacgtttataacaaacttgcttaactcnttactgacgctgaatgttacattattaaggataatttcagactcataactaggcaatcatcactctttttgtaaatcccatatttagatggcaaataaacagccaaaagttaaggcattcaaagggcacttgaaaaccattcctttatgtgaaaactggggtgctgtgataaaaggtaactaggatcttagcagtgcaatctgcagaatcatttataccaccaaggctacgtaaggcacaccgctaagatatatcttcggtttattctttttcttatgagtactagagttaaataaaacactatctaaatactcggggcaatggtgttaacattattcttgttgaaactagttaccagaataaaggaaaaatatcaaaaaaactgg

SEQ ID NO: 374913 - DNA, 459 bp, Homo Sapiens
ctactcagaatagaagctttgcgaattatcattcccacctctagattttaaatgaatgtagagttgcctaacattatatgggtgggaggctctttgcctctgtgatcagtagggtacctgcctctgaggtgctactgccctggagggatcactcccatcaaaagactggtgagttggaagctaagagcacatgcgcatagccagctcctctcccaggctggcagtcatgattacgagcatcattccagaatctttggcttctagaaccaactccattctgaagaacattttaacatctatgaataccttggtaataatcttttatacacaggagttttgtagcatgactttatgactaaacttattgtgaattaagttatttagaaatgttgagtttctgaatgttattttgtgatttgtttcaaaatagtaataaattgtgttattttgtaaaaaaaa

SEQ ID NO: 374914 - DNA, 471 bp, Homo Sapiens
  misc_feature (27)..(27): n is a, c, g, or t
  misc_feature (32)..(32): n is a, c, g, or t
  misc_feature (39)..(39): n is a, c, g, or t
  misc_feature (51)..(51): n is a, c, g, or t
cggaaaagaaccttgcgaaataaccanccccnaccccanaatttaaaaagnaatgtaaaagttgtcctaaacattaatatgggtggggaggcccctttgccctctgtgaatcagtagggtaccctgccccctgaggtgcctacctgccccggagggatcactccccatcaaaagactggtgagttggaagcctaagagcacatgccgcatagcccagctccctctccccaggctggcagtccatgattacaagcatcattcccagaatcctttggcttcctagaaccaactcccattctgaagaacattttaacatctatgaataccttggtaataatcttttatacacaggagttttgtagcatgactttatgactaaacttattgtgaattaagttatttagaaatgttgagtttctgaatgttattttgtgatttgtttcaaaatagtaataaattgtgttattttgt

SEQ ID NO: 374915 - DNA, 431 bp, Homo Sapiens
gggaaccagcccccggagcaaccatataaaatatataccataccataccctatggtatggcaatatccctacacctgcgaattacctacccatcctaatcctcacctgcccaatggaaacaaactactcttttcctttggattcattgatggatataaaaaattaatttgctattaactgctttcatattctgtttagttcttatagtatggtaaatgatacaggtgcagtatcagtattgtaaaattgtatggtgaaaactacaaaagtcattctgtggatatattttaaaaggaagaacagaaactatatttcagattcttgtgtgaatataattacagaataggtaactatttttatgtgtttccataaatgactccatttcatatgcattgtaatttagcacaaatcataataaatcatttggtaac

SEQ ID NO: 374916 - DNA, 334 bp, Homo Sapiens
  misc_feature (23)..(23): n is a, c, g, or t
  misc_feature (121)..(176): n is a, c, g, or t
aaccaaactgggatgggcaaccntcaacaagagatccctgaagctaggacccaccctagccccagctgcttctgaatctctgacacacagaaactgtgagataataaatgtgttttgcagnnnnnnnnnnnnnnnnnnnnnnnnnnnnnnnnnnnnnnnnnnnnnnnnnnnnnnnnctaaactatgcattcgaaagatagacattcaacttttattttcttagtttactctcaagctttgaatgtgaatacttaagagtttaaagttagtcaatttccattctcttctgaaacaattaaaggccctaaaaaatgctttaattcagtcagttcct

SEQ ID NO: 374917 - DNA, 337 bp, Homo Sapiens
  misc_feature (53)..(53): n is a, c, g, or t
attgagactttaacctgtgttgtctgcaataagtccaggtgtttagtaagtancagaattgaatagaattgttgaacacacagttggtatctggagaatcagttgactgccagtattaggaacccttccccagcccataccaaggcacccaaatgtgtgatcacagttgggtacctgagctttggcaggcaggcagtcatgtcaccaggtgcacatgacaaatgtcatgcatgttttaactaaatacaaggtgagagtcagaaattctcttctggtgtttagtagcaatgaagactgcacctgaccaaaaaataaaaattcacgaaacttaaatgct

SEQ ID NO: 374918 - DNA, 300 bp, Homo Sapiens
  misc_feature (145)..(145): n is a, c, g, or t
ctatttataaaatacatataactacaggtttataattttttcatctctatgggaaatctgtcaatatcattagcccctattttatcaaaattatggaaaatgttattaccatatattactctgctatcattattgggtttatttnctggggtttttttgggtattcttttttccaaagtacaaaatttgttcaagagatgaaaatgggacctgctccatggaagtccccaagcagaagcctgtgttaactaagtcatcaaattctctgctttggataaattgttactgccatcattcaga

SEQ ID NO: 374919 - DNA, 502 bp, Homo Sapiens
ttaggatggagtatggaaacagggcctctgcagtgaaaaggatatttttcattactagagtagagagaaaaagtaaaatgttgacatgtctggtgatgggataagaggataaccaaatgttatgccagatttttttaaataattataatagggaaataatatatccacccaaaatagaaagtccttagagccttccttttaactaaccagtaaaatacatgtaatatgttttataattttccccaaattatttgtaattattgatatagcataattagtgtgttgtatactatcagaatttaatatttaaataatgattgcagagtttgaattctgggggtgatatattcaaagacataaattaattatattaaccctcatgttatgagctaagaaaaaatttcttgagaaagcagtggggcaatgtgtccttttttatgattaattcctaagctgtcactaaaggaagaataacgagtttgctataaatatgcattttgac

SEQ ID NO: 374920 - DNA, 319 bp, Homo Sapiens
  misc_feature (151)..(151): n is a, c, g, or t
  misc_feature (157)..(157): n is a, c, g, or t
  misc_feature (162)..(162): n is a, c, g, or t
  misc_feature (195)..(195): n is a, c, g, or t
  misc_feature (260)..(260): n is a, c, g, or t
  misc_feature (279)..(279): n is a, c, g, or t
  misc_feature (304)..(304): n is a, c, g, or t
gatcttgagtttcctcacacacaccaggctgccgccagcttcagggccttagctgtcgccattctctttgcctggaatgttcttagaaatcctcttcactgtcccctcatctcctgcatgcctctcctcaaaggtcacctcactgggaggncctccnggcanctggtatctaaaacagtaggcccctggccattnttctgcacccttttcctcacacctgcacaatgtattgttatcctggaatatttaattaatttttntacctgctcctactccaantcccaatgaggaagttttggcaacnggggagggaagggga

SEQ ID NO: 374921 - DNA, 425 bp, Homo Sapiens
  misc_feature (60)..(60): n is a, c, g, or t
  misc_feature (182)..(182): n is a, c, g, or t
ggccgttccaacaaccacagggtgggaatgtaattttgccaaaatgactgacccggtaantccacccccgggtgtccatggtccatgaaagacaaggagggacctgggagggtgtccacaggttggaggagacctaaggagatatgaggaatgaatgcccatgtgggatccccggattggancccggaacagaaaaataacattgggaagagaattggtgacattcaaatggggtcttgagtttacttgagagtcttgtaccagtgatgattccctggttttgataactgtgcaatgcatggcatgtgggttgttgacattgggggaatctggataaagagtatacaggagtttcctgtatcacttttgtaacttttctgtaagcctaaaattattaatatttcaaaataaaatgtttaaaaggc

SEQ ID NO: 374922 - DNA, 472 bp, Homo Sapiens
  misc_feature (371)..(371): n is a, c, g, or t
  misc_feature (433)..(433): n is a, c, g, or t
gcaatgctgaacggcttagcgtacgagatgatgactcatgttctgaagatggagaaaatcctccaagaacccacatgaacgaagggggctataataccccagttcaccatcctgtgattaaaagtgagaattcggtcatcaaagcgggagtgaggccagagtcacgggccagtgaggactacgtggcaccccccaaatacaagagcagcttgttgaaccgttaccttaatgactctttgagacatgtcatggccacgaacactaccatgatgggaaaaacaaggcaaagaaaccactcgggatcttttagctccaatgaatttgaggaagaattagtgtctccatcgttcattcagaaactgaagggcaantttgtcttttcgcacagacattctgggaaaacggttcccattaagggtggaaagcgcattanaccggaaaaggacccaggcagggttcacacttttttggg

SEQ ID NO: 374923 - DNA, 441 bp, Homo Sapiens
actccctcccacaaagctgaaagaaaagtcggtccaatgtggaacggggccccaacagatagcaaacactaagaccaagacaaacagcatcttgttgactgattttctgcagggtctttgaatatttgcattcccttcatctgcctcaagagatttgtctttctttagctcttttcagtagattcaccttctgtgtcatcatctgtgaagttgatgtttggtctgtcatctttaaggtccctttctgctccaagagaaataaggtggctgtccatacgatgctttacatacaaatctttgtgtctttgtttatatagctcaaaactggaaacaacccaaatgtccagcaacagttgaaaggataaacaaaatgtggtacatccatatagtaaatactactcagcaataaaaggaaattaattattgatatatgcaccaatg

SEQ ID NO: 374924 - DNA, 367 bp, Homo Sapiens
  misc_feature (307)..(307): n is a, c, g, or t
  misc_feature (320)..(320): n is a, c, g, or t
  misc_feature (337)..(337): n is a, c, g, or t
caccataagcacatataataataatcaagtttattgcgaaaattatgacaattgatacagagacatgaagtgagcacatgcctttgggaagaaagatgccagcagatttgctcaacagcattgccacaaactttcaatttttttaaaagtgcaatatttgagaagcacaataaaattcagcacaataaaacaagttatgcctgtagactgctgccaagggacactgatgttgggcttctcacatcatataaagtaggaacagcacgtacatgtcttccttctgtgggctcacagtgggccattgggnaggtagggggttnacagccctgactcgggnccgtagggatggcttcaggggcgggccctt

SEQ ID NO: 374925 - DNA, 544 bp, Homo Sapiens
  misc_feature (147)..(147): n is a, c, g, or t
aaatcatagtgaatacattgcgggctttaatgtaaatatgaaaggcaggcccacttagagacgtggatgccaactcgacgtgtgggagtcgaaattgcggtgtggcttgcaatgcagccccacagccatgcagagaaagcgtgcgtngtggcggggttgaagctggctacactggctgacagcaccccacagcggcctgcaagcgcatgtgggagcttgggatcactaggcagcctggttcccactcctttatggcatcaaaagttaggtttctctacctcctactctcttcatttgggtctttgtaagaaagcaaaaacagcccctaccaccagtggtgcccagggtgggtccattgaagcaacgccagatgcagttggttttccagcctctgtttcctgcaccagtgctgcttgggagcacccctgccccaccttctccctgaggcaccccctcctagactgtcaaggctgtgcccacagctccccttccatcaagcacagggcgcccacacatggagagacatcaggagcatggcattcca

SEQ ID NO: 374926 - DNA, 378 bp, Homo Sapiens
tccgaaaagcagcccggtgccctaacttcagcccctaggtcctaaacatggcctgccatccaggcaagtttcctaccctaagaccccacagccttccaaatattttaaggagcaatttggtggcccaaagagagaaagtctcattataaagtggcctttatgtgaggggaccttgcccaagtcatgcccaagacagaggacactgggccatctgtcctcaagtagtttttgctcatgaatccctaagataatttttgaaaaatcatgtttcccctacacatttttaagttgtcacctaaagtttttctcattaattcaaagctgtacaaaataagtttttagcatatttattttaaaataaaagtattacataatcct

SEQ ID NO: 374927 - DNA, 127 bp, Homo Sapiens
aattttagttctttattagaacgtgtacttgaatggactgtagttgctcataacccatgttaatctctgatagtatttgggttttatttcaggagcttttgcaataaagcagtaactgcaatctgct

SEQ ID NO: 374928 - DNA, 496 bp, Homo Sapiens
  misc_feature (372)..(372): n is a, c, g, or t
  misc_feature (382)..(382): n is a, c, g, or t
  misc_feature (442)..(442): n is a, c, g, or t
  misc_feature (456)..(456): n is a, c, g, or t
  misc_feature (471)..(471): n is a, c, g, or t
  misc_feature (479)..(479): n is a, c, g, or t
gagctggttgccgtggtcaatgaacaccctcatggacctgttgacacccttcaggtactgtgtgcggtagaggtgctggcggtctttgtcccaggccactgaatgctctggccgggccccaggacaggagatgatgagtccatggcccagtctctgctggtggaactgaatgggcacctggggcacccgggcccgcctgcccactttggacacatagttaatgatggccagcacgccctcccggatggtctttgtcttctcacagggtactaagcagctccgaaccagcacctcaggcgtgtggtccctggccttggtccgcagcttccttggcacagcccttgagccacaagacaccacatcgggcacggnctttgaggtnagcgtgggggagaggtcttggggctctgcaggtagcagaggcctattgcgccaattgttncccacgggaatttncgcagcggttcaaangggggttncattttcccagaaaggt

SEQ ID NO: 374929 - DNA, 499 bp, Homo Sapiens
  misc_feature (440)..(440): n is a, c, g, or t
  misc_feature (445)..(445): n is a, c, g, or t
  misc_feature (479)..(479): n is a, c, g, or t
caggctgcttccccgtccccatggtccactccaccttcctaattgacctcaggaaggaggcctcggacaagctgactttctaccccccacaccaggactacacctggacctttgatgacatcattgtctttgccttctccagcaggcaagcaggcatccagatgtacctctgcaacagagagcactatggctacctgcccatccccctgaagccccatcagacactgcaggaagacatcgagaacctcatccatgtgcagattgaagcaatgattgaccgtcctccaatggaaccctcccagtatgtctcagttgtccctaaatatccagacaagatgggatttgatgagattttcatgattaaaccttcaaacgcagaaagggacagggcggggaccggtggttgcgcacattgttttgaacagggaggtttgagggtncaggnttttcgaggttgttggattgggaaagggcatttnaaacacaagccagttgaagg

SEQ ID NO: 374930 - DNA, 594 bp, Homo Sapiens
  misc_feature (20)..(20): n is a, c, g, or t
  misc_feature (45)..(45): n is a, c, g, or t
  misc_feature (85)..(85): n is a, c, g, or t
  misc_feature (92)..(92): n is a, c, g, or t
  misc_feature (103)..(103): n is a, c, g, or t
  misc_feature (128)..(128): n is a, c, g, or t
  misc_feature (152)..(152): n is a, c, g, or t
  misc_feature (186)..(186): n is a, c, g, or t
cccctaatggaccccgggcnaagtcaacctctctggaaaggaacnacaaaaactggttggaaacccaaacccttttgggaaaaangctgccnaatggaatgantttctgcccaatccatgtaacaaanaaacaaccccgtccctccctcctnaaaatccctcaactgcccatctccttcccaaaanactttcctgaatgaactgcccaacggtgaaacaaacccgtgcacccctaggaagaaggcattaacccctctgtggccagaggtggtcgtgttcatcaactccctcccggtttctcctgcatttccccacctcccctgtactcacatcgggcccggggactggttgatgggctgtgaacagaagtgacaggtgtcgctttggtctaaggcagttgggaacagtttgtgagttctctttactctctttatcatcactgtgactggaagggaaacaccgagatggcgaagttgcaagatggaagctgcctggatctgtgagctgctgttagagaaaagctactaaggagtttcctggcttgcattacactgtcccgtgaaagaaaaaataaacctcggtcttaagtctgtt

SEQ ID NO: 374931 - DNA, 279 bp, Homo Sapiens
  misc_feature (17)..(17): n is a, c, g, or t
tgcccatagtccatagntcaaaattaaatataaaaacaccttatacttactggtttaggctggggagcagtactgactgaaaagaaaagaaaaccaagtaagaattctggcattcatcaggcaatataaactaaggctcagataaaacactctaccagaatgaaaagtctttcttatgtagtctacattgcagagaaaactattgtttttaaatgacttaagtagaagctatattattaccatttttaaagaaaataatgaatagaaattgccaaactt

SEQ ID NO: 374932 - DNA, 467 bp, Homo Sapiens
  misc_feature (449)..(449): n is a, c, g, or t
caaggtttgatgggcttgccatctgagtttaagtggaaatgcagaatgtgcccataccagcctgggttacattgtcctcttataggggcctcaagccaagcagcgagctttggctcccgagttaggcagactgtctcggctggcatgtggcacacggcaaggcacttcattgcttcagagctccttctatgccataaaaagccctacaagacctggtgctaatccctctctctggcctgttctccctcacccctgggcccaccctgctcactccactccagccacactggctgccttgctgttgttcctcaaccacagctgggttgtttccaccacaggggcctttgcattatcctgtttccccaaaaccctttcccatgggctgggctggtttcaaccacttaggggcccagtttaaaattgccaccttttttggggggaagggtttncatggatttccttgaatt

SEQ ID NO: 374933 - DNA, 281 bp, Homo Sapiens
aggtcacacagggcaaggggttggccccaggatccgaagcaggcaggctgtcccctgggtctgaactctcaactacttcaccctaatcaaacaatccctctggtcaaatgtgagtgataataatagtacccacctcgtgggtgttgagggtgagcccaagttagcattcagcgtgggcatgtgaacaattatagtcaatattgaatggagacctatgatgcttttatgaaggtttctattttggattaaaaatgcacaaatttctcctgaccaaaaaaaaa

SEQ ID NO: 374934 - DNA, 364 bp, Homo Sapiens
gacagcatagaagcaagtgctatagtgatacaaccacctgaaaatgctacagcacctgtttctgatgaggaatcaggagatgaagaaggtggaacaataaataatctgccaggttctttgttgcacacagctgcgtatcttattcaagatggctctgatgctgagtctgactcagatgatccctcatacgcacctaaagatgactctcctgatgaagttccatctacgtttactgtgcagcaacctccaccatcaagggagggagggaaaatgacaaaaattcttttgcaaatgggaaaaaagccgaccttaactgttacaacccgtaggcagggtaggagtttacaggcacccacccaaacgg

SEQ ID NO: 374935 - DNA, 102 bp, Homo Sapiens
acatctttaacccatttatgtctgaggttacaattttttgaatttttgcatgaaattcatatatgttacctagaaaaattcaaggaacaaaaatttgaagag

SEQ ID NO: 374936 - DNA, 350 bp, Homo Sapiens
atgtgcacctccaaagagccgtacgtccactgccagaagctacatcggcagtaatcattcatccctggggtccatgtctccttccaacatggaaggatattccaagactcagtataaccaagtaccaagtgaagactttgaacgcactcctcagagtccgactctcccacctgctaaggtagctgcccctaatctaagtcgaatgggtgcgattcctgtgatgattccagcacagagcaaggatgggtctatagtatagagcctccatatgtctcatctgtgctctccgtgttcctttcctttttttgatatatgaaaacctattctggtctaaattgtgttactagcct

SEQ ID NO: 374937 - DNA, 297 bp, Homo Sapiens
  misc_feature (133)..(133): n is a, c, g, or t
gataggaacaacattaagaaaaacaaattgatctgacagagaaaacataaaactctcttaaggaagagtttactatagtagggacacattccctaggggaagggaagggaagcgtctgctgaaaaggattttnttccctgggctagaattacatccttgaagggccttcctacatgttccaaggaggccaaatctcttgtggtccttaaactattcctcattccactcctaatcccaacagccatcctgggataggaacactagcctctggagagcagtgaggcctaccaaacctac

SEQ ID NO: 374938 - DNA, 350 bp, Homo Sapiens
  misc_feature (288)..(304): n is a, c, g, or t
tgcaaggagacattccttttctcgagttttctaaattatgtttgatggttgaggcaaaaaggtaacattgtctgatgtggttctcaatgtaaaagaaatatttaaaacaattataaacaggctaggcaacaaagcgagaccccatttctatagacaaattaaagaattagctgggtgtggttgcaccatccgcggtcccacatacttgcgggggctcaggtgggaaaattgcctgagccctagaggttaaggctgtagtgagccgtgacagagtgagagcttctctcnnnnnnnnnnnnnnnnngatcaactggggagggcaaaggactttaaaggaaatagtttcatac

SEQ ID NO: 374939 - DNA, 632 bp, Homo Sapiens
  misc_feature (11)..(11): n is a, c, g, or t
  misc_feature (28)..(28): n is a, c, g, or t
  misc_feature (46)..(46): n is a, c, g, or t
aggccccaaangatttggaagggccacngcatatcccttccagggnggcctaaattccaatcttaagggagggaatgcaggcctgctcctggtcctgaaaaatgtaggcatctactaccattttaaaacacagtgaaacatataccataagccctataaaaaaagatttgtgcaatttgaaagcctgttaattttttatgtagacatacctacacacgaaagggttaaattcacagccttactagttccttgcttccagtatttcaattggtctcctcccctcattattattattactactagtactattatttttgcacatagttaactgcccttcaatatgattcttaaaaagtgctgtttctgtggtatcgtattctctaaataatcatatttaattttttaaaacaaggttgcagtttctaattgtttcgttcctgtgtttttgctggtgtgtaataaaagcaagttttttcttttcatggttatttaatacattagctgcctgtaaataattcttgttataatgctctggaatgtgttgtagaagttgtattagattagttttaaacccttgtttgaaagccacattgttttggttatttctattaaattagaaaattgaaaaagtt

SEQ ID NO: 374940 - DNA, 546 bp, Homo Sapiens
  misc_feature (407)..(407): n is a, c, g, or t
  misc_feature (431)..(431): n is a, c, g, or t
  misc_feature (436)..(436): n is a, c, g, or t
  misc_feature (475)..(475): n is a, c, g, or t
  misc_feature (518)..(518): n is a, c, g, or t
tagttttaaagagctagctcttgagcattagtcactaccttcagcttgatgcatggtcacttctttactatttaaaatactacacattgtacaaaatatcgaagacactaccatatgctaaaggaagaaatctagctgggatataggatttttgttgtttttgttttcgtttgttttgctatttagcaataacatggtcaaaaaggcaatcagaaattttaaatacagttaatggatacatttgggcaacaattttcccccgagggttttccatggtgtactttgcaagaaataaggcactctaattttctaaagtaaatctcttattttaggcaaatattatatttcatgacaatggagttctagaaagcaggcatctgttttttgttgcgtgtttccattttaangtgagttgagttctcaaattgggnaaggnaagattccttgagacgtacttttaaattgctaaagtgtngataggatacagcagagttaaatgccagactcattggcacctncaatgttctgcataggtcccgaagttgt

SEQ ID NO: 374941 - DNA, 464 bp, Homo Sapiens
  misc_feature (134)..(160): n is a, c, g, or t
  misc_feature (422)..(422): n is a, c, g, or t
agctcttgagcattagtcactaccttcagcttgatgcatggtcacttctttactatttaaaatactacacattgtacaaaatatcgaagacactaccatatgctaaaggaagaaatctagctgggatataggannnnnnnnnnnnnnnnnnnnnnnnnnnttgctatttagcaataacatggtcaaaaaggcaatcagaaattttaaatacagttaatggatacatttggcaacaattttcccccgagggttttccatggtgtactttgcaagaaataagcactctaatttttaaagtaaatctcttattttaggcaaatattatatttcatggacaatgggagttctaggaaaggcaggcatctgttttttgttgcgtgtttccattttaaagtgagttgagttctcaaattgggaaaganaggattccttggaggacgtacttttaaaatctaaagtgtgga

SEQ ID NO: 374942 - DNA, 252 bp, Homo Sapiens
gttaaagagtcattactgatttcatgacactgataaatgtttgaattgaaatgattttttaaaatgcagagaaaatgctaacaaaagattatatagttcccctaaagatgcttcttctagcctccaagtattaaagaagacagatctaaatattaactacatataaagtatatatttgttagtcatctgtaagttttaagtacaattccaggatatacctttatcttttggaagagaagaactaaatctgcc

SEQ ID NO: 374943 - DNA, 332 bp, Homo Sapiens
  misc_feature (12)..(12): n is a, c, g, or t
  misc_feature (96)..(96): n is a, c, g, or t
attacctctgcnattaccaggggcctcgggctgtgggcatgcacagcttcctggtggttggcccacaggcactggaccccgtggtcagggattctntacctaaagaacacatcctcccctctctggcccatctcctgcctgcccttgactgcctagagggctcaactccagggctttgaggccagtgaggcaagtggctgggccctaggccatggagaaaaccttaaacaaaccctggagacagggagccccttctttctccacagctctggacctttccccctctcctgcggcctttgtcacctactgtgataataaagcagtgagtgctg

SEQ ID NO: 374944 - DNA, 419 bp, Homo Sapiens
aatgtgcgtctgctcccaaagcttgctccccaggctgactagcaagagagagtataaatgcccagtcttcttgccattgttcttctctcaaggaaaaatgtaaaccaaagctctgagaataccatgattcccaatctttccagcgtgtgtaaaaccaatgtgaacagtcatgcaggctgtcatgcagggctttccgaagcactgagtccttgtcatagatgccccaggtagcttgtagaactgaatcaagtaggcagtctcctgcagtccggttccaaagtgcatacagtcgactgtccaaacgtgtagccaattccaaggaccaggttaataattggagattcttcttctaattctttttgaacgtctctatcaagcacctcatcaaataatttttcttggactgttgggggcaaatc

SEQ ID NO: 374945 - DNA, 351 bp, Homo Sapiens
  misc_feature (225)..(225): n is a, c, g, or t
  misc_feature (263)..(263): n is a, c, g, or t
  misc_feature (291)..(291): n is a, c, g, or t
ctaacaaagtatttctatatctcatgtctattaattacccttcctccatcttatataatattccatcttcagtaatgaacttttatctaattaagaaatcccccagtttataaaatctgagggcaatttccagtgaactttgtcaggatagaggaaccaaatgaccacaggtattactgagttataataagaaggagtaaccaattaatcagtattataacaacnaaattgctgcaaggcaataggcttctgtaattaaacanaaatcacaaaggtatggattcaggcatnaaaatagtgacgtgatttcactgagtatcaactagtatttgcaaagctacttgaattttt

SEQ ID NO: 374946 - DNA, 599 bp, Homo Sapiens
  misc_feature (13)..(13): n is a, c, g, or t
  misc_feature (34)..(34): n is a, c, g, or t
  misc_feature (56)..(56): n is a, c, g, or t
  misc_feature (85)..(85): n is a, c, g, or t
  misc_feature (193)..(193): n is a, c, g, or t
  misc_feature (214)..(214): n is a, c, g, or t
  misc_feature (240)..(240): n is a, c, g, or t
caacataaaattnccccaggacccatcaatcccnagcctgaaagcaataaaaacgnacaccctctcctgtccctgaccttagggnaggtgccccatgttcccacattgaaagtgacttcagctgtgggtttcccaaaacgcccctcatctggttgaaagcccctaagtgtttcctttcctcacatccagaggncaaatgccattggggtgggtnctggtttgggaccaataaatttcccnctggtttggacccaagaaaaaacagagttcctttgaccgcctaacatatatgtaaaaaagaaagtttgtaaaaacaagagttaaaatgcttctaacagtgtggtcatcactgcacaggacactggaattggcattcggggttgtgtctgtccatgtggtttcgttgtatgtcatgtgctctcagctcagacagagacatccaattgacttctgacttggggcatttaaacttcataccacagctttatttagaggacttatttattgtattttccactgtttttatttaaaagttgtataaaaattgttagggctggttttgatatagaaaaatcattatgactggttttgctaagtcc

SEQ ID NO: 374947 - DNA, 414 bp, Homo Sapiens
  misc_feature (27)..(27): n is a, c, g, or t
  misc_feature (35)..(35): n is a, c, g, or t
aggcccttgaaaacccgcagcgggaancaaggccncggaaacaggcccatgaacacggacgaagcccacacccatggatgacccccacggacacgcccacccaaagcacccatcatgcctgagtgaccagaagcccaggcacccagaccatgcaccgtatgattcctttcacgtgaaatttcccagaacagggaaatgcagagcgacagaaagcaggttagaggttcccaggggctgggggttgggggaatggggagagactacttaacaggcagagacttgtttttggggtggtgaaaatgttctaaactgactatggctgcacaactctgtgaacacactaaaaacactggcttggacaacctaaatggtcggatgctgacttaggtctcaataaagctaaaaaataaggtg

SEQ ID NO: 374948 - DNA, 361 bp, Homo Sapiens
ttaacattaagggaataataacacttggaaagcatgctattggagtcctaggaaaatctagcaatgcataaatatgtatgaaatagtgggattatgaccaagggtacatgtatacaggggaaaatccaatcacatgattcctttaatagttggtgactatgtgttggtgagcatttcctttactgaaaatgaccctgtcattaaaactcaaagaatcgcagggattaacattttctaccttcctactaagcaatatgctttcacttgaggtctctttagtgtttaaggggaaaacgggttccagaaaaatgtctttcacattagaaactgtattaaattaattgaaaaatagataaacatt

SEQ ID NO: 374949 - DNA, 291 bp, Homo Sapiens
tcagatattctacatggtccatggaagactctgtgggccgcagaagcccatagctgcatacccttctattttcctcttccccatttcactcttttaagctccctactcctattccctatgatcactttccaaaataaacggcaggtgtgctagctgttgtcttagactctgctttctggaaactatttttcccctccacaagaaattatcactgtgaatattacaggaggagaaataaaataagaataaatcagtggtttattttcaggttcgaataaactctttctaatg

SEQ ID NO: 374950 - DNA, 479 bp, Homo Sapiens
  misc_feature (446)..(446): n is a, c, g, or t
  misc_feature (457)..(457): n is a, c, g, or t
tagactacgaaaatccaagtaacctagcagccggcaataaatatacggtgataatccaggttactgtgaacatccttgaagaaaatgatgaaaagccaatttgtactccaaactcttatttcctggccctcccagtggatctgaaagttggcacaaatattcagaatttcaagctgacatgtaccgaccttgattccagccccagatctttccgttattccattggcccaggtaacgtcaacaatcatttcaccttctctcccaatgctggttccaatgtcacacgcctgctgcttacatctcgctttgactatgctggtggggttttgataagatctggggactacaagcttacttgtcttacggtaactggatggacaacttggatgttctggacagggaggaaagcggaggcttcttggttggagacagggaacagtggacantgaggtatttnaagtccattccccacccaacca

SEQ ID NO: 374951 - DNA, 414 bp, Homo Sapiens
  misc_feature (30)..(30): n is a, c, g, or t
  misc_feature (35)..(35): n is a, c, g, or t
  misc_feature (42)..(42): n is a, c, g, or t
ccgcccctctgaacctgcggaactcttctnccccngccgctnagctcaacgtccctttccgctgggtgccaagccaattcccaaagcccagacccgggaagccctcctcgctgggcttgccggcggtttgctgcttctgccgaaaggcgccctcgcccttagctgtgcgagctgcaaagaggtcggggtcccaggaatccctggcgccgccgctcacttcagtaggtttcacaaccggcgtgtctcaatttcctgtttcaaaggagactttgggtcaacgtgtgggacgctttacaaccattatttatgttttggaagcaggacataaggttgtgtctgtgttacaattccaaccatggtaaaaatgcaaagggaaaaaaggatcaaagtccttgctttagcagtacatgtctc

SEQ ID NO: 374952 - DNA, 417 bp, Homo Sapiens
  misc_feature (82)..(82): n is a, c, g, or t
ctggaaacacacatgcccctatcccaaaggaatccagctgcagcctgcctgttgtccaagtataaagtccaggaccctggcntggctttaacccgtttttccaagaaaactggaaatcctggattttccagcgaacatgccctgattttaaaaggttgactcaagtttttacaaaatactatgtgggacacctcaaatacatacctactgactgatgacaaacccaggagtttgtgtgtcttttataaaaagtttgccctggatgtcatattggcagttggaggacacagtttctattgtaaatttggatttacgactgaagaaggacattttctctttaaaagaaagttaggttataagaaacagaggcgtctcacatttttacttggtgtaattaataaacgaagataaattcat

SEQ ID NO: 374953 - DNA, 172 bp, Homo Sapiens
aaggagtaaagatttttaattctgtgattgtgtgtatgtgtgttgaaactgtaaagcttttatgactctaatattaatctcttaaatgaaattaaaaggcaaaagaacatgattgagcttaaatgatcatttcttcctgcagtgattcttggattgttttctcatgtatttg

SEQ ID NO: 374954 - DNA, 509 bp, Homo Sapiens
  misc_feature (24)..(24): n is a, c, g, or t
  misc_feature (471)..(471): n is a, c, g, or t
tatgtgtgaccacagatagaaagnagcaagagataccaaatattcatgaagcactaaaaatatgaaaagccacaaagataccaaatattcatgatacactaagtatgcatgaagacataataaagccttcagtatgtgtgagaagttgattcaattacccactggtgacactcattctggcctgtccttacccaagaaatacaataaaattcatgactgctcagcagactaataggcaagctattgctgtggtgaagtgtacttgcccctgacacccttctatagagcaagtgtacatcgttggcctcaggcacatttcatctgattgagtcatctggctcaagcggccactctggtcctttttgtaacccgactattaggggaaagcgtatgtgacagaatgtgagtcaggacataaaaacattacaaaacccaggattcaggtgttgcggtctttccactccactggcnacgttacactaacagtgttaatctatcattgctttctc

SEQ ID NO: 374955 - DNA, 670 bp, Homo Sapiens
  misc_feature (22)..(22): n is a, c, g, or t
  misc_feature (52)..(52): n is a, c, g, or t
  misc_feature (84)..(84): n is a, c, g, or t
  misc_feature (115)..(115): n is a, c, g, or t
  misc_feature (363)..(373): n is a, c, g, or t
ggactgggcctccttccggggnattccctaacaaccttaacacctggtcccnggttcctccccagaaacaatgtttaactaaangcttaactatctcctaatctgggtttccccnggatctatcccatactgagaaaggagggtttgggataagtaaaataaaatactatcataatcagagagatataacttctcctgtgttttaataaaatggcattctgcttcctaccatctatattgacaaatttactaaagtcatatcaaacctagagagctgacaaagccaggccctggctggaccagatcacatcatacataccaattcttgaggcccctgtgaatagcataattacattgcttatnnnnnnnnnnncttgaaataccatttctttgttattctgcaattttgcctctaaatcagcacctcaaaaattagggccatcagtcctaaatggcagttacctataaaggaattcccataactttgcatacccacagagaatgatctccattatacgtgtgtattttcatggtcatttggagacaccaggccagctccagcaacactgcacaagttttaatgagttcactgatggacgggcagacatagagtctctggggccttgtttaaagatgtactggaaaaccagtcctggaacttctgtcattg

SEQ ID NO: 374956 - DNA, 410 bp, Homo Sapiens
  misc_feature (48)..(48): n is a, c, g, or t
  misc_feature (357)..(357): n is a, c, g, or t
  misc_feature (365)..(365): n is a, c, g, or t
gttaatggttaaatccccgtaacaatggttccatggttaaccagggcnccctgttaaatattaacagataatggttacctgttaacagggtaagagaaattgctcctaagtgccccaaactttatatacttcagttttaatgacaagcatctcagaaatataagagcggcagccagaccaaccagtttttccagatatcttgatgtgaacctgaccctactcctttagaagacagcctgttcatttttaaatagctttaacccaaactgttctatgaccattgtttcaagagacattaacacagttctgtaaatagaagtgtctatggacaaataaatttgggaaatgtggcatacntgtatccnttttcttaacatttgcatattaaagactctgagatatcctgcagt

SEQ ID NO: 374957 - DNA, 374 bp, Homo Sapiens
  misc_feature (349)..(349): n is a, c, g, or t
  misc_feature (362)..(362): n is a, c, g, or t
atgagccactgagcccagccaggctttttctaattctatgctttattctataaattcctctgcttctaagcctcacagcttccaactgcctttgatttcagatccaaattcctctgattctataattcagcctccaaatgcttctgattctggaatctagacttttccctaaagattcctctggttctgaatcttataacctcaactccctaattccagaccccagcctcctaaatctattctggggcttcccaccccactggaacttacccaatttccttcttttcagtcttaagttttcccattctaggacccctaccctctagggtgtgctggtttgggatttcanggcctctccattntcattggctaca

SEQ ID NO: 374958 - DNA, 528 bp, Homo Sapiens
  misc_feature (25)..(25): n is a, c, g, or t
  misc_feature (44)..(44): n is a, c, g, or t
  misc_feature (51)..(51): n is a, c, g, or t
  misc_feature (55)..(55): n is a, c, g, or t
  misc_feature (110)..(110): n is a, c, g, or t
ctttaccttgaatttaccccaaaangtttggggtaccctggggntcccctnaacnccttgggtggttttgcaaactgaaaaacttctcccagccaacacaggcaacatgnaacaggcaacggtgctgtcctgacatattgcccaaggtggggaaaaaaaagcccaggacccctaaagctgtctgccaaccatcctatgtgcctccccttaccccccagctttctttcctacagatggtgcctactcttggtctcccacaggaaaaggcctccccccttcttagccccatttaccccgtttgtggaaggcactgctcgctctgttttgtcagagagtggcctatccagattggtgctatgggggggtctgacccctccctcctccctctggaggtgatgtgggccctcaatggagggaattgtgctgggctagggaaaggggagggactagactggccacactggctctgaaactcaccaatctctatacaccataaagacctcaccttggtaggcaccagaaaaaaaa

SEQ ID NO: 374959 - DNA, 321 bp, Homo Sapiens
  misc_feature (40)..(40): n is a, c, g, or t
  misc_feature (275)..(275): n is a, c, g, or t
cgtcaagtgcccatagtgatgagaagtggtacgatggggnccgcacagaatccgaactcaacagctataactatctgcaaggcacctctgctgacagtggcattgacaccacctcttatggccccagccacggcagcacagcctcgctggggggctgccacatcgtcacctcgctcagggccaggcaaggagaaagtggcacccctatggcacagctccagtgaagtaatctccatggcagatcggactttggagacagagagccacggcctggntcggaaaacagagtcttccctgagcttagacatacacagcaagagc

SEQ ID NO: 374960 - DNA, 433 bp, Homo Sapiens
  misc_feature (59)..(75): n is a, c, g, or t
  misc_feature (368)..(368): n is a, c, g, or t
aaatccgaaaatcacaatcccaaaagatctaaatcctggaaatataattctgggaaaannnnnnnnnnnnnnnnnaaaagatacttacattttaaaaggatttatttgagaaacataaaaacacaacagaacacatcagccacttcacacaataaaataggcaataatacatatttttggaagcataaacaggtatacagacagttacaccggtgtgagttattagcagacaaactatattcatgaagaaataggtcaaaatgggaaatgtatacatgcatgtcactatgcttggtaattgtgtgcacctcgctttatacttgcagtcatatcatgaccaacaacctaagtcttttgacgaagcaatnctatgatgcgtcaccaccacacacacagttgcccaaagaggcgggggatgggcaaggaactttcc

SEQ ID NO: 374961 - DNA, 380 bp, Homo Sapiens
  misc_feature (24)..(24): n is a, c, g, or t
  misc_feature (35)..(35): n is a, c, g, or t
  misc_feature (80)..(80): n is a, c, g, or t
  misc_feature (98)..(98): n is a, c, g, or t
  misc_feature (102)..(102): n is a, c, g, or t
  misc_feature (128)..(128): n is a, c, g, or t
ccagtagctcccaccctaacatgnatgccaactancccgggattgtgaatttttaagactttaagatgttagggattttnaaactttaagagatttgncgtnctttcagtatttcacatgttgggganccagtgtttgggattatggcttttagaataatgattccaaacttgtgtgaggactgtgaggctcagggtgggagacgggtgggggagccgaccttaggagggcccactgaaccggcctcaatctggccccagtctggcctactcgctgccccaggacaggtggctacaacatgctgagggcctgaagggcgtcccctcaggaacattgtattactgttttgtgttgctaaaaaggataactgtgaccagatc

SEQ ID NO: 374962 - DNA, 540 bp, Homo Sapiens
gacctgggtgcctccactgtcttgaagccaaagacatttgatctaagatatgtcctcccccttgtccagcttcaatgaattgggcaaacaccattttttaaaataaagcattaaatatcaaataagagaagataaagtcaaaggctggctatccccagaaaccccccatcccatagattaaaaagacccaggaataatgttagcaaaaaggggaaacaatatgtaattaaaactaattgccaaaggcagttgacttcaaacaccttgtagttcacttcaattccgttgtgagttgctctttaaaaccttttgggtgacaaaccttaaaagtgtcatctctgcccttttgcttgttgctatgatacacatagtacacacccagcatccaagacatggctgtgttgctgactttctccatgatgttttccagcctttccattagttcatcatgcaacctatgaaatgggactacaagtcatagtatagtgtgactataatttggggtttcagttccagaataacaatggacaaatagcattc

SEQ ID NO: 374963 - DNA, 363 bp, Homo Sapiens
  misc_feature (50)..(50): n is a, c, g, or t
  misc_feature (93)..(93): n is a, c, g, or t
  misc_feature (132)..(132): n is a, c, g, or t
  misc_feature (145)..(145): n is a, c, g, or t
  misc_feature (210)..(210): n is a, c, g, or t
gaaagttccctgttagggaaataccctcaaaagatcccccttgtccaaanagcccagcctaccccagcaaggcctaacttgatgaatcaaatncagcctttcctaggcccttttccctaaaggattttaatnctctgtcccttgntccttcccctggatttttttcccacccactctttggcttaataaatgcctttcccagaaggcttncagcgcggctggaagtatacttgaacggcaattctaagtccttattagctctatagtgatcaggtgaaggaataattgatctcaatcaggaacacctggttttataattgcacaaatgattataattcaataataaaagtcaatttaactaac

SEQ ID NO: 374964 - DNA, 518 bp, Homo Sapiens
  misc_feature (85)..(85): n is a, c, g, or t
  misc_feature (157)..(157): n is a, c, g, or t
caaacccttgggagtcagaactggaaatgttcacaaggagaaaagggcaactcccaccctcagcagaggaaacacagcagaaaangggtttctgactgggctggttcccctaaacatgcttgttttggtcatcctcaatcccctgccccccacttcngtgcccgccccaccccaatcaaagttcctgtaggaatacctcaaagatcccttgtcaacagccagctacccatcaaggctacttgatgatcaaatcagcctttcctaggccttttcctaaaggattttaatctctgtccttgttcttccctggatttttttccaccactctttggcttaataaatgcctttccagaaggcttcagcgcggctggaagtatacttgaacggcaattctaagtccttattagctctatagtgatcaggtgaaggaataattgatctcaatcaggaacacctggttttataattgcacaaatgattataattcaataataaaagtcaatttaactaacaaaaaa

SEQ ID NO: 374965 - DNA, 280 bp, Homo Sapiens
  misc_feature (131)..(131): n is a, c, g, or t
  misc_feature (191)..(191): n is a, c, g, or t
tgcatccctctccgttctcagttgcctgtggaattccgggagctctgctccagctacactgcacataaaagtgcgcaggaagtggatcctggagaggaactgttcttctggactgagcttgctgctcatgncagccccacctgcaggacccaaagccttatgtgatgtttgctggacaactcagccacgtngctgcctgttgagctctgcaagtccacgcgggagccaggaattcctccccagaagtctctccattatattcaccaccccctagtaaatc

SEQ ID NO: 374966 - DNA, 343 bp, Homo Sapiens
gacgggacaaggacactggacggtctattgtgccatgcttatatattttctgtatacaatgctttctgtataaaaccagtaatacctgagaaacaacagtaacttgacaaaattactattgatcacttaactttatgtatcacgtaagttaaactttatttatttacatgtgtctccctcattagatgctaagttccttgatattttatacatttgtgaattcctggtaattcacatgaagcttgatgcattgtaagtattctgacctggtgaaataaatatacgaatgggcaaaaaaatatatactaaaatgatcaaataaaggttgtgttcagaaacctca

SEQ ID NO: 374967 - DNA, 1514 bp, Homo Sapiens
  misc_feature (384)..(384): n is a, c, g, or t
  misc_feature (1414)..(1414): n is a, c, g, or t
  misc_feature (1440)..(1440): n is a, c, g, or t
  misc_feature (1479)..(1479): n is a, c, g, or t
  misc_feature (1493)..(1493): n is a, c, g, or t
gaaagaaccacattttaggaatttgcttcccacccagtgccctgcatttaatcagcacctgatgacttggcaggacttggccccaccagggtctggctttgaagggtagtggacaccaggatcctttggattaatcctctgccacctctctcttttcctcaaccgagagtgaatttatgtaattgagtgaaagtctacgaatcataattgtaataaattaaggctgggcatttgtttgaaattagataggataaagccaaaggtttgaacaagttgtggatggtttgtaaaaattaatcttacaaaataaatgctgtgtgtgaacacgttgattaaattcaaaagggtattatttggttcctctgtaaattgaaccttgaaatnaaagcacaacaaggttttcttaaggtactgatctgctctttaacaagaatttgtaaagggttataaaaggtttacaagaatctcacctcatggtcaaactagttaagattggatagatttatctataaggtattattaaaaattggggatgacattaatagtagactgatgcaaggatgacatttgactctgtcttgaacaagatttttatgtaatagtaaaggataatgaaagatttttgtttgccttgcaaataaactaccaaaaaaagaagggaaaggcaagagacaaattgtttggaaagttgtcttcccttttaatgggtaaaggttttgtgctttttaaaaaagtttttgagtcatcattttggccaatgataacctggaattctattttataatatcaagtgttttaaacctttaatatgttcagtaggcttccccaaatcgaactttagcttcaagattgtcttttttgacccctaacttttggatgccatagagggcccctggattatttgacatgtttaattacatgggattgccaaaataagaataatgtttaatcttattcaggttacattttagtgaataacattaatatatatattaatatatgttccaaaattgtataagatttctaaaattctaatatctgagtatatgatatcaattataattagggttattatgttaagttattgtaaaccacagaaataacgaaatttctttgtcaattgtgtttttgactgtgactgtctaaagacatcttgtgattcacagacaatcgtagtcttgttttgatcctcttcaaaaggtggtttataatcagctgtagaacttaggtgctcttaaatgcatatttccaatatctttagattgtgatattagaaataaaggaaaaacattcagggactcatgaagagctgaaatattcatggaatatcaagcagagcaaggagttaactgaatggggctggaactaatagaaggacatgtaatctgtttaactttttgcttaaaactttgcnggagttttgtttttcggggtcagggnaaacttttattttggggcctatttacggcttttaaccantggggtaggggggnttcccccgtggggaccaaatt

SEQ ID NO: 374968 - DNA, 479 bp, Homo Sapiens
  misc_feature (236)..(236): n is a, c, g, or t
  misc_feature (407)..(407): n is a, c, g, or t
  misc_feature (464)..(464): n is a, c, g, or t
aaatgttggtagtgaatcaaagagttgatttttccaggtttccagtttttactttagtttatgttgtgcctgtcttggactttctgtttagtttggatggaaaatacctgcttgaaattttaaaaatgatttctttagtgcatctatttagctagtttctgataggtggtatgtaatattttccctttttctttccttctgtagacacaataagtcattctccctcttcttttttnctttttctattttcttattctttactctaacctgcttcagagaaagagccctcttccttcttgtcttcatcttagtcttttcaaaataaaagatgactgtgaggaaccccaaggaacttccacttctggggagggcagccacagggacaggggaacatatttatttggggnctctttcagtttccccctttggaggaacaacattcaaattacaagttaggcgggggntccgggggcatttct

SEQ ID NO: 374969 - DNA, 271 bp, Homo Sapiens
gaagtgatactctcctgtttctgatgattcaacatgcaactgtggacaattaatttcctttagctttgctttcatttcttcatgtgtaaaatcaggctaacataagctgttttgtggattttgtgaataattgtattataaaacatttgtaggttgtgatgcttattgaattagatattagtaataagcctttaataagtaatttcaagaaacatcccttgctaccgtctacttccccagaccaagaaaaatcttaatttattttagttgt

SEQ ID NO: 374970 - DNA, 257 bp, Homo Sapiens
aaaaacagcattagatctatgtaaagatagtatttaaaaaccaaacaaaactaagaaatgggaaaaagaaatggcaggtgaagaactcttttcagagaataaaagttgtcatatagcaatggatgctgtgtcagaacatactgccaataaactttaagaaaaaaggaactcaatgaagttactgttatataaaacaggagctccacagcagggatgtaagagttaatggaagatatcgtgagccaaaacagggaata

SEQ ID NO: 374971 - DNA, 320 bp, Homo Sapiens
  misc_feature (196)..(196): n is a, c, g, or t
  misc_feature (267)..(267): n is a, c, g, or t
ggtcttgttccctgaaaaaaactaggctcagaatccactctcatttcatctcccctgatttgatctgaaaagattttgtttagagtactacatgaatatattataaaacatgggacaatcagaattgatagtaagaaggcaagtggctctatttgtacttcctctcaatagctcctaaaggtaatgctaccatttnctgtttgtacatagtcttccagactttaaatttttgaacatataaatattatcatcttaaagacgtatggnaaaaaccattttgaataggttattccaaaatgtaatttaacagattgctctgg

SEQ ID NO: 374972 - DNA, 366 bp, Homo Sapiens
atatgtgaaaacatggtaatctatacattacttgggtgctattattatatataactagctttggagtcagaattagcgtctcatcctggctctaccactttccaactgtgcgactgtggccaagtgactccccttctctgagcctcagttttcctcttctgtaaaatgggggtaaagggataagaactatagggggatctcaggggatggttaagagaaatccatgagataagcaaacacattatctagtttagtaaagctaagcaatgaagacttaacagccccatggtgaaggcttaatacatggtagctataatgattactattaatattgtgaaataaaaggttgtgatgaaccaacccata

SEQ ID NO: 374973 - DNA, 359 bp, Homo Sapiens
cacccccccaagattaacgtggtcttataaaaaggatactttcacaggttcaaccttcctctgaacaggataatcctacagactatataggtagggagtggagtgaagggaggggaatcacactctctacagcactactgtaggaaattaatttaaaggcttccctggcctagaaagaaaatacatgtgaaaaagacatcttcttctttcttctgagtaactccttccacattaaagatttgagtgacttaacttgctatatacactcatgagtaacatatgatgatacaggtttctggctatgacaaattacccaccaaataatgaaataaagtattctttagatcagaataaaatgg

SEQ ID NO: 374974 - DNA, 490 bp, Homo Sapiens
  misc_feature (82)..(82): n is a, c, g, or t
aaaggtgaaagtttcactttgtcacccaaggctggaagtgcaattggtgcgaaaatggctcacttgcaaccttggcctcccnggactcaagcgatcctcccacctcagcccccaagtagctgagactacataagcatgccaccatgtccagctaatttttgtattttttggtaaagatggggttccgccatgttgcacaggcctgtacttctaattctaaataaggattttttgctttactataaaacactaaagacattaagcatttgcacttaattgggtacttcgggaaagaagtgtgtaggttggcattaaaggtacttcttacactgcatgttctgtaaggacagcaaaatacatctatataggttcactgttaaattctcgaggactaatggatccgcatgtgaaaagtaaaaagttcctcttcaaagtttccctttttgttaaagaataaataacaagtgttagaaataacagtttcttttta

SEQ ID NO: 374975 - DNA, 440 bp, Homo Sapiens
tccatatagggaggcccagccagtgaaaacatccccaaggatgctttgaagctgactagaaaagctcacacataagcagcagggtataatggaaacacgctcactttattatcaaatagatctgaattcagactccagccttgctgctgcttagcttcataacctctctgctgttcagttttcttacctgtaaaatgttctgaatgatcctcacttaattgagttgggctcacagataaaactaggttgtttgtgaaaaatgtctagcacagacctggcccagattagacactcagtgtatgctagtagattatgatgcagcgttccaagaaccttcataccaagaaaaccttagcctgaatgggaaacacaaacattccagttgctgagtatgtatattgctccattgtaaattaataaatcagtttttttctagatgc

SEQ ID NO: 374976 - DNA, 474 bp, Homo Sapiens
  misc_feature (272)..(272): n is a, c, g, or t
  misc_feature (277)..(277): n is a, c, g, or t
  misc_feature (314)..(314): n is a, c, g, or t
  misc_feature (389)..(389): n is a, c, g, or t
  misc_feature (396)..(396): n is a, c, g, or t
  misc_feature (437)..(437): n is a, c, g, or t
  misc_feature (446)..(446): n is a, c, g, or t
  misc_feature (452)..(452): n is a, c, g, or t
ccaagtggacgagcagggaactggccagggatctcctcaagtgtctggcccctcaccagcagcacgcatgcctggaatgtcaccagccaacccctcactacattctccggttccagatgcttctcattcccctcgagctggaacaagttctcaaacaatgccaacaaacatgcctccacctcgtaaactacctcagcgctcttgggcggcatccatacctaccatcctcactcacagtgccttgaacagtttactgctgccctctccaactncaggncttgtgccggcctgggcaggtagttacctttgttctncacttgagagattccttggatgcagtcatcatgaggacggacatcttcaaaggaattatttcaacaaggaaacgntggcagnttgatgaaatttctaattgaaccccgagtgattcatgtttnaaggattgntggcantggaattgcagagttggctctt

SEQ ID NO: 374977 - DNA, 521 bp, Homo Sapiens
  misc_feature (406)..(406): n is a, c, g, or t
  misc_feature (442)..(442): n is a, c, g, or t
  misc_feature (461)..(461): n is a, c, g, or t
  misc_feature (510)..(510): n is a, c, g, or t
cagcaacagccatttccaaagcagccaggaacatcaggtgcttatcctcttacttcaccccctacatcttatcatagcacagtcaatcagtctccctcaatgatgcacacacagtctccaggaaatctgcatgctgccagctcccccagtgggccttttgagagcccatcaccagcgtcatttgttccaactcctcccccatcctcgcatggaatctcaataggaccaggggccagttttgctagtccacatggaactcttgaccctagttccccatacactatggtgttcaccaagtgggacgagcagggaactgggccagggatctcctcaagtgtctgggccccttcaccagcagcacgcatgcctgggaatgttcaccagccaaccccttcacttacattcnttccggtttccagatgcttcttcatttccccttcgnagctgggaacaagtttttnaaaacaatggccaacaaacatggcttccacttgttaaattacctcaggngtttttgggtt

SEQ ID NO: 374978 - DNA, 326 bp, Homo Sapiens
ggttccttccaattttggtcccatttcctctgcctgccccggactttttgttagtgatttacctattgggactgaccccagttgctaatgcccagaagcttgtatttatagcacacattgcccacaaagacctaggttaggatgatagaattttcccacggctgtgaaatcctgccctaccatcaatacctgccactctgtacatcacaaagttgaaatgcatgttggtttctcatatttcatggttcaatcacgaatagaagaatattattaaaagttctgtatcttctaaatgttttgtgaagaataaaagctgatacaaatgg

SEQ ID NO: 374979 - DNA, 502 bp, Homo Sapiens
  misc_feature (21)..(21): n is a, c, g, or t
  misc_feature (39)..(39): n is a, c, g, or t
  misc_feature (49)..(49): n is a, c, g, or t
  misc_feature (58)..(58): n is a, c, g, or t
  misc_feature (66)..(66): n is a, c, g, or t
  misc_feature (82)..(82): n is a, c, g, or t
  misc_feature (87)..(87): n is a, c, g, or t
  misc_feature (92)..(92): n is a, c, g, or t
  misc_feature (101)..(101): n is a, c, g, or t
  misc_feature (160)..(160): n is a, c, g, or t
aaaccacaaccccttagaccnaaacggaataaaccctanggtaaccctngtgcctaanataaaaanattttaaacacctganaaacnggganccgggggancccccacgtttgaaccccatttccagcagtgccccgaaggagtatcctacctgggtgancccctgtttttaagacctataaaaagaaactgggataggagttagacaatttaaaaggggtgtatgagggcctgaaatatgtgacaaatgaatgtgagtaccccttctgtgaacactgaaagctattctcttgaattgatcttaagtgtctccttgctctggtaaaagatagatttgtagctcacttgatgatggtgctggtgaattgctctgctctgtctgagatttttaaaaatcagcttaatgagagtaatctgcagacaattgataataacattttgaaaattggaaagatggtatactgtttttagaggaataaacgtatttgtggtttaaaaaaaa

SEQ ID NO: 374980 - DNA, 464 bp, Homo Sapiens
  misc_feature (393)..(393): n is a, c, g, or t
  misc_feature (419)..(419): n is a, c, g, or t
  misc_feature (426)..(426): n is a, c, g, or t
  misc_feature (431)..(431): n is a, c, g, or t
  misc_feature (448)..(448): n is a, c, g, or t
ggtggcatcgaagccctaaaagtgaggtaaactagacaatttccctaggacagtattcagggtgccaagaggcctccaagcagatgctacagaagacagggctgtgaagacaatcccctctattcagaaagaaaactgttgtgaaataattatgttttcataatattcgaagaactgaaaactggaagagaattgcacttgtgtgatttcagagacatatgggatagaaggatgatttaggggcaaagtaagaaaatattccaacaaagctcttcaaatatgacatagggctggtttgtgcggtaatgaacttgctatcactaaaagtactaaaactgagactgaatgggtcatgtatttattgggcattacaaaaagggactcgtcattccnggaaaacaggaaaagttttgggtccnttgaggnaaccnttcagggggttttcttngatcccgtggacccct

SEQ ID NO: 374981 - DNA, 481 bp, Homo Sapiens
  misc_feature (21)..(21): n is a, c, g, or t
ttagctggttaagaaaatggncaatagacctactgtaactggttaagaaactcctagaaccacaggggaaccatacctaggaatagggaaatactgccacctgtcctcctaatgtgaaatatgaaaaggtccagaagttgaggctatcactcactgccatagaaacacccagattcctacaaactgaggtaggagcactacactaaaaggtaatcttctatgttgcataagacagtagataccaggtggacaccagccccctgtctcctgacagccttttcatctctgggtctacttttcacgttagtcctgtgctaaataaagcctttgctatgtagatgacaagtggcagtggctagttgattttaactgacccctaatctctactaggatctcttcggtttgtattgtcactcgataaatagatgtttataattctgcctaaattgttgctggtatgaaaatggtcagagaagccctc

SEQ ID NO: 374982 - DNA, 427 bp, Homo Sapiens
  misc_feature (16)..(16): n is a, c, g, or t
  misc_feature (31)..(31): n is a, c, g, or t
  misc_feature (46)..(46): n is a, c, g, or t
  misc_feature (100)..(100): n is a, c, g, or t
tcaaccaggggtgttnaaacctacagtaggnagtttacaaatgccnaagcccatccctaaggaccttagccttcatccccagagcccagaagcatttccnggatttcccacccacccggaaaagatattgttattcccacttgaaatgggctccttagctgttgccccctttaataatgcccagcctatgaacatggacatgggctgattccgttagtaagataacatactgtcattgctggtgaaaagaccgaaaaagattatgcagattctcctggagtgttacaaagtatgggcctgtctcaataacctgtgctttctgatcctacattgtgaccaagtcccacgaaggctgactgtcaataacaagggaggaaaataggcaggcccaggggtggaagaaaaagagcatcctgccgaaaaaaaa

SEQ ID NO: 374983 - DNA, 433 bp, Homo Sapiens
  misc_feature (42)..(42): n is a, c, g, or t
cccctggccctacttccacccctaaacttccataaaccctcntttatcctgccacatgaataagattaaactactccaattattgtcttataaaaggaaggactgagaggataaaaatggtacaaattcaccaacatatgccaaaacacagagtatctttccttaacataagaaacaggaagagaagaaaatttaacagtgtgtcaggtatgtgtgtgcattgttataatcagttaaaagctagaaaactgaagcttaataactaatttattcaaggccacttatccaacaccacagagccaaaatttagccctgggtctgtttcatgtcaaagtcctggctggcaatttccacaaaactgccttccatcatcaaaagaagttaggaagataaacagtgagaacagccaacacatttttttgctatctatttt

SEQ ID NO: 374984 - DNA, 495 bp, Homo Sapiens
  misc_feature (334)..(354): n is a, c, g, or t
cataaatgacttttacttatcatttctcttgacagtaattcttggcaatgtgcatataacatgaagggaagcataactttcagaagtcatcaaagatattatcctgttgtcctcattttcttaaaccattaaaatattttcatttataaaaattaatctaaatataaatattgacactaaagatcaaaatcacttgatgacaaaataattcttctggaactataacatatgcttatggtttttaatagtaaattaaatctttgcacttatttggcacaaggaaacctttataaaagttcaggatgccacacagcaggctgctgctgctgcttcnnnnnnnnnnnnnnnnnnnnncaaggcttacacagtacacatttttgtcaaagaaaactgaatatttttaacactgtaacacaacaatagttgcttttcatgcctcttaaagaaaacattctattcggaagtcaaatcttttttgttgggttcttaaaattt

SEQ ID NO: 374985 - DNA, 250 bp, Homo Sapiens
aaagaaaaaaacaaaacgaatattggtgatgtgatatttatgtaatgtgatgatattataatggccacgttttaaaacttgagaatgtcctaagttcacacactgttggtttctagatccacaaggcttctgtatacagttcacggtcctcggcattgcttcttgtaatttttccatcccaaaggagagctactgtactgactgtacttgtggaatgcagcgcttcattaaattaagtttattaaaatgc

SEQ ID NO: 374986 - DNA, 475 bp, Homo Sapiens
  misc_feature (441)..(441): n is a, c, g, or t
  misc_feature (453)..(453): n is a, c, g, or t
  misc_feature (461)..(461): n is a, c, g, or t
gttgtggagatcgggtttttcactgtggttctcaaaccctgtgtgccagggtccctgtaggcttggagccaactctcacagtgtctcattcagtaggtctaggctggggcagaggatttgcatttcttacaggttcccaggtgatgctcatgctgcacatctcaccacactctgaaaaccactggcctcaagtatttatttaaattgtgcaccaaaaatatcactgattgatatgaaaataacagtaataattgcttgacatttataaagtctccatctttcaagaagccagagacctctaataaatgtaaccttaaaatacatgatttgtcttcaattggggatgggggaaatggggggagggcatagggtctctggcccagcacccattttaagggactgatctggaagtccaaggcttcaagttccatggaaactctnggggtttagggntccgggtnttccgggagccaca

SEQ ID NO: 374987 - DNA, 521 bp, Homo Sapiens
caggttttatatgtgtgttattaagacattttgtactgtagatttactgactctcaattctggtattgactagagccaaactccctatagtacttgggagcatggttctattcagttctcaccccagttttcatggttttctgtttgttctgttctgccatctgatctagagtcgcctggcactgccagtgttccgccttagagttcagaactcttggcgacgatcccagtttttctcccagtcaggtaaactgcatactgggtagctgtatttcttttgtgcgaaaatcccatgttggggcgatcaatgatgtgtggcacttgtcttcatttctgatttctggggaaaaaattatttcttatgcacagttagcaaagagctagttcttttatattactaccagttatgctaaaattgggggtaggaggagaggaatcacacaactttatgttgatttcaagaattcaaagaaataataatattcatcattttcttgagagtcccctgcctttaaaaaaaa

SEQ ID NO: 374988 - DNA, 747 bp, Homo Sapiens
  misc_feature (704)..(704): n is a, c, g, or t
  misc_feature (736)..(736): n is a, c, g, or t
ggatctgtaacaagaggacggattccactccatgctgccaggacatcccctcttctcacttcaacatcacaactcaggtaattacggcacttcattcaaaatgaagttgatatcttcttctgaaggaattggatggtgtgtaacatcagttggagtatcagtagtgccagcgatcgtcatcttttgccagggtaagaagaaaataactcgcccatcactggtcgctgggtcaagaagtcccatgctctctgggctgtaataaccaggcatcacaatatggacaccagcacttggctggcagatagctgctgcgtctttatcatccattttgcgcacagagtccgtgaaaggtcccgtggcattgataacacatttggctctcacgtcaaattcctgccctgtgaggacatccttgcaccgtgcgccgctcacatgcactttccctgtctgggggtctgtcttcttgagcaagctcactacctccatgtaattggctgtggcagccccatacctggcagcagtcagagcaatggcaaggttcatccgtgcatcgttatgttgtccgtcatagtagacaattgctcctaccagtttgtccttctggagcattgggaaatgttcaagggctcttgatttgctgaggacataactgctttttaggcaatttgctttcctggcaaccaaatcataacagcttgattccnacccagtagtaaggtaactgccacccattgtnaaactgggagg

SEQ ID NO: 374989 - DNA, 375 bp, Homo Sapiens
  misc_feature (143)..(143): n is a, c, g, or t
  misc_feature (172)..(172): n is a, c, g, or t
  misc_feature (213)..(213): n is a, c, g, or t
  misc_feature (224)..(224): n is a, c, g, or t
  misc_feature (267)..(267): n is a, c, g, or t
  misc_feature (298)..(298): n is a, c, g, or t
  misc_feature (351)..(351): n is a, c, g, or t
gggtggcggggggttgcaagtgggaagcctgctgttcagctgccggggctctccgcctccccccacctgtatgaggctgggtctggggaacctgtgctcagcattccaccccctggagcttgggcttggtcttccctgcgggnccctgcgctgacattcaggcggggagcanggaggctgggcgcctccagagcccgccgggggagccggcangggttctgggntctgacggcggggtcgcagggtcgcccgcctcctggacacgtntttaggcctagggaagcctgccggccgggangtacagagtaggagaagccagatcccagggcggacaacgagaagtcttcaggntaagaaatggcatttcaaaaggca

SEQ ID NO: 374990 - DNA, 551 bp, Homo Sapiens
  misc_feature (422)..(422): n is a, c, g, or t
  misc_feature (541)..(541): n is a, c, g, or t
gcaacatggaagtcacccggatcaccacgtaaaggaaatctctccaaccaggaacaaacacctgccttgcaatattaggtgtctgcctcctgccccggtccacagccaggagccccggagccaacggacagcctggaagacttacagttctccctctgagggttgctgtggctttccatgttgtggtgactaagtccctgtgtttctgtgcagtccctgcttcctgggaccagggaagaatggtcccgtggccaccagactttctctgcttgtatcctcccaggaccacagaactcatcgcatcccaaggcagcctattccatcatggatgagctcaaagtgtttgaaagttctgctttatcaagtgagccaaacttcctccctcaggaccatccactccaggggcccagttattcttactngagggagtgagggtaaagccatcaccagggacaaaccttgggtgaacaggctgggattggcagccagctttttggggattgatttcaagggaaccctgaattagccatggggagccaangtatttattt

SEQ ID NO: 374991 - DNA, 499 bp, Homo Sapiens
tccctcaggaccatccactccagggcccagttattctactggaggagtgagggtaaagccatcaccaggacaaccttggtgacaggctggactggcagcccagcttttggggatgaccttcagggaaccccctgaatagcccatgggagcccaaatgtattactccctctgatgccctacaattccactataatagtctggtgggcttctgttagggaggcttatacatggtggaaagaataaaggcttggactcagcctaggttcaagtactgcatcttgacctggcctgtaggcaagtcttttcacttctctgagttttggctttctcatttgtccaataggaataacaataatgataataataatacctcccatgcaggattgctagtatgttcaatgggataatatatctaaacacctcacacaatgcctggcacatagcaggtgttcaattaggtctgtattaaaatccaggctctgtctcttattaaaaaaaa

SEQ ID NO: 374992 - DNA, 449 bp, Homo Sapiens
  misc_feature (29)..(29): n is a, c, g, or t
ggaaataataggggaaataaaagttcctnccgtgggtgaacatttaagccctcattgtggagaggaatgtaacttttgttaaaataatattttaaaataaaatgtgttgaaaattactgttacctttaaaagatattaaggtatgacaattatgtagctaattgttcccctggtgtgagatatgtgatacatgataatcttttattatcaagtctaattccaaaatacatgatcagttacagtagttttcatgtggatttaaggagtgatggttacctttgtacatacttattagatatgaggttaaaatatcatattttataaactttaatgtaattataatggttttgctttcagtgaagcatgtatgcacttgcataaacaaaagaaaaagaaattattttaaattgagaaaaacattttctttaatttggactactgaataaaat

SEQ ID NO: 374993 - DNA, 309 bp, Homo Sapiens
  misc_feature (135)..(135): n is a, c, g, or t
  misc_feature (193)..(193): n is a, c, g, or t
  misc_feature (196)..(196): n is a, c, g, or t
  misc_feature (198)..(198): n is a, c, g, or t
  misc_feature (219)..(219): n is a, c, g, or t
cacggcctgcaggctctgagggctttgtgggctcaggcagcctggggctgagggcagaggtccagggagagcggtggagggtgccaggagaggctgtgtcttcccaagtcaagcatgttggcggtggcacctgtntccgctgacctgagcctgggcggccacccacctcatctttaagaaacaaggcccgtanttntnttttcaaaccacatccacctngccagccctctgaggctggcagcacacctcactacccagctggccagtggaagattccacggaaccctctcctcctcagcacagagctga

SEQ ID NO: 374994 - DNA, 597 bp, Homo Sapiens
  misc_feature (422)..(422): n is a, c, g, or t
  misc_feature (497)..(497): n is a, c, g, or t
  misc_feature (519)..(519): n is a, c, g, or t
  misc_feature (569)..(569): n is a, c, g, or t
gttactgacatatgtggcgagggcttagccagaaatatttaaagatgtagtattccggcctgtgagttgtctgggcagggagggggagtcagaaagggtagagagctctcaaataactcatgactctagtgttcctttcacatgtgaacagtgtcactgatgacacattttctaggaccttcgtttgttttgtggacctgcctcagtctcctcagtatcaggcgatcttaagggaagatggagtgtttcaaattggagagaagttcatgggtaggtatcgtcctgtggaattctgaatgcaaggaagtcaaccccagaggccttggtacccccagctttctaaaactactttattacaatttatatgtatatacacatggcacatataaacgtgtgcatttatgtatgtgtgtatagtaccntttttaaaaaaacattttcctccaagctgctaagcaaagggtctcacaggtcgagcacagtgctgagaggatggngtctggctaatggaggcctggntgaagctgaggccctgttcaaactcacttgaaaaccatggaggtctattncctttttcttcccttccatggtctgccg

SEQ ID NO: 374995 - DNA, 411 bp, Homo Sapiens
  misc_feature (27)..(27): n is a, c, g, or t
  misc_feature (42)..(42): n is a, c, g, or t
  misc_feature (55)..(55): n is a, c, g, or t
  misc_feature (324)..(324): n is a, c, g, or t
aaaagtaatggtggtgggttaacccgnccccattaaaagtanccccgtatttggntccccattattataaataatgaaaaaatgatttaatcctgtaataaactggtttattgtgccagtgactgtaatatacctagagttataataaattgtttacctcctgccctcacccaaacacatgcctaggatataacccccaaaataagtatttaactttgcattaggtataaaggagactgggtgctataattagattattttgaggcagacagagagctgttatcctaactgatttagtatgttctgtaattgagaaaatgttcnccaaattatactttttagtgatttacatgtacattttataggggacatgttctgtgtatagcgaataaataacttttatagtatcac

SEQ ID NO: 374996 - DNA, 693 bp, Homo Sapiens
  misc_feature (13)..(13): n is a, c, g, or t
  misc_feature (51)..(51): n is a, c, g, or t
  misc_feature (552)..(552): n is a, c, g, or t
cgaaggggtgtgncctggcaactctctgtcgggctcaacctgccctggaanctctgccctggcaacccccaggaggagggaactctgcaacacccatccctgtggcctaaagacggaacctccctggccatccgtgaaccacatccttgcaagggtggggccgaaagcaatctgaaaatgaagcccacgttgggggtgggtggggagactcagccactgctgtcatgaggcatccgcaaggcatgactttcagcacggcaggagagagcgggagcacattccatctagcctggcttagagacattttgtttgtcctctttttaaaaccgagattaaaatccaatctccatcttcctaggctgtgattttcttttccttccctgaagataaggagttaggaactgttgcttctcaaatgccgcattgctctgggaggccaaaatctacctggaaacatccagctctgttcctttgcacaggtggttctcatggacagagtccctccgaggcatgggcgctgtcctaagcacagtccagcagcagccaggaggncggcgtagcctcggacaggccgctccgtacagatcaaggtttactaagagtggaggggagacggaaaacatgagcttgaaacaaaagtgtcatgatgttgtatcgaaaacccgagagcaacaaacatatctcgaatctgct

SEQ ID NO: 374997 - DNA, 412 bp, Homo Sapiens
aacctaactgtgactgggctgaaagcatgatgtttgccccaaatggttcgtagcatggtttttaattcttacgcattcttggcacacagtgtagctatcctcctgacgagcaacccgtctgcgtaccctaagtgtggcctccctgtgggtcagcgccctggtagcatggatccagtctgaaaggtgaggacaacgtggaaactcatgagctgagcctgcccgctgggacacgtctccttcccgcgtcaccttctggtttagggagccgtcaggtccctaaacgttccctacaactttttctgaaattgtgcagaaaaacagatctcattaaaagaaaaaaagaaacaacttgtaggaagacagagaggtgctatgggtacaatttttaataaaaacattattttgttccgtt

SEQ ID NO: 374998 - DNA, 465 bp, Homo Sapiens
  misc_feature (36)..(36): n is a, c, g, or t
  misc_feature (51)..(51): n is a, c, g, or t
  misc_feature (57)..(57): n is a, c, g, or t
  misc_feature (104)..(104): n is a, c, g, or t
  misc_feature (195)..(195): n is a, c, g, or t
aaccccctgttttgtaaccctaactgtgaactgggncttaaaaaccatganggtttngcccctaatgggttccgtaagccatgggttttttatttccttaacgnattccttgggcacaacagtgtagcctatccctccctgacgaagcaaaccccgtcctgccgtaccctaagtgtggcctcccctgtgggtcancgtccctggtagcatggatcccagtctgaaaggtgaggacaacgtggaaactcatgagctgagccctgcccgtctgggacacgtctccttcccgcgtcaccttctggtttagggagccgtcaggtccctaaacgttccctacaactttttctgaaattgtgcagaaaaacagatctcattaaaagaaaaaaagaaacaacttgtaggaagacagagaggtgctatgggtacaatttttaataaaaacattattttgttccttaaaaaaaa

SEQ ID NO: 374999 - DNA, 334 bp, Homo Sapiens
  misc_feature (37)..(37): n is a, c, g, or t
gccccggctctggcgtccctggctgccaagctgtagngcccgcagtcctactcccgccgagacccgccgctccggtcctgccccgaactgcccacggccggcagcgcttccaggccctgaaaaaaactctcttcctgtgtctggccagaggtatagagagagacaggttcaactctaaggcctgaaaaggaacaaggcccaccggaagcaatggccactgtccctggcctccagcccctgccaaccttggagcaggacctggaacaggaagagatcctgattgtgaaggtggaggaggacttctgcttggaagaggagccctccgtggagacga

SEQ ID NO: 375000 - DNA, 511 bp, Homo Sapiens
  misc_feature (358)..(358): n is a, c, g, or t
  misc_feature (384)..(384): n is a, c, g, or t
caacaattaacagctcaagtgtaagatttataaatgcccgtgtactcacccttcaattgttaccacccagaggttacaggactctttcccagcatttaggggaacaggcttttagagtatttagaagaccaggctataatcagtaatgtgcctgggagcaggaaatagctcccaatttatttatggccttgggaaaactcaatccggtgtctccttgtagctcagaacactaatagcccccctggaagagagtggcacattgagctccaaacccaatcaacatacatccacttggctgcagatctgactgctgggtcatgaaggccgtgaaatgatgtttgccctcaagtcactagantattttaaggaagccctatttttctnccctttttgcaggagtagagagatgaaagaggacagaccattgaaaacttttagatgcaggagaattgagacttccacaagggagagaaaaacagcctccccagaatccattatgccatcgggttgt

SEQ ID NO: 375001 - DNA, 462 bp, Homo Sapiens
  misc_feature (16)..(16): n is a, c, g, or t
  misc_feature (30)..(30): n is a, c, g, or t
  misc_feature (41)..(41): n is a, c, g, or t
  misc_feature (73)..(73): n is a, c, g, or t
accctatccccccccnagcccctaaaaaangtccacagaancacacacagcctgacttttaaaagacaacctnggccaacaggaatggaacccaacccccaaagacctcctcctaaccctgtctccctgaactgggcccccttccagaaaagtgttcctccctgttcccatctgtagggctgcttactactggaacctaaaacaaaacctgttgtttgtaccatcactttttctggtgtttcctgtgcttttgtgattccaagtctgttcataagttctgaagataaattatgtgaaatcatattttggcatatgggggtggaggatgaattctttacagactttttaagatgatccatttgtaccacagaaaacattttggaagttgttatatatgagtatataaatttttcttttcatattttacattaaaataaagctttattcagtcattaaaaaaaa

SEQ ID NO: 375002 - DNA, 496 bp, Homo Sapiens
  misc_feature (39)..(39): n is a, c, g, or t
  misc_feature (42)..(42): n is a, c, g, or t
  misc_feature (48)..(48): n is a, c, g, or t
  misc_feature (51)..(51): n is a, c, g, or t
cagatatttggggttcacaatggtttaactttgaaacanagncaatancanctcttttccaaaacaaagtccctgcctgcctgaggatcagactgcctttgtaggactaacaaattttgccatgagattagaaattatggtgtaggagtaatgcagctggaggtggcgggattctgaacctccttaaattgctcctgtgataacctaagatgagtgcttaacatcttttacagaccctgtattcagtggatcagctggcaccacccaaatagataaattggcccatctggtcttgtggcccccacccaggaatggactcagctcaagaggacagcttcagctccctaagattttatcttggacccgaacaatcagcactcccgacttactggccctctactcaccaagttatccttaaaaacctcaatccctgagttttcagagagactgatttgaataataataaaactccggtcttccacacggccgactctgc

SEQ ID NO: 375003 - DNA, 498 bp, Homo Sapiens
cttcccaacctaacgaaaactcacaaggattacttgggaccattcatcctcaaaaaagataggaggcagtggtttgttttagtcttcagatatttttgttttggtcagtccctaatctgtagttttgaaactcgtgccacacttgaaagggaaacatcctactacctttccttcctctccatttcccacaaaccccttccttccatcatcactccctgaattcttacttctcagcatataaatacaagacccttctttctattatttgttgaaagctaggcctgtaaaatagagatggacagaccatgcatgtttccatgaagctatttaatgctgctcccagtcttctgtccataccattccttccctgcccctaggagtggggttgaggtctgtgacatgcagactgtaagcacagtcagaacctctggcagctctcaacccaacagaggagactgtgggcttcaacatggccaacctgagcaggtctcctctgga

SEQ ID NO: 375004 - DNA, 418 bp, Homo Sapiens
  misc_feature (18)..(18): n is a, c, g, or t
  misc_feature (387)..(388): n is a, c, g, or t
tatatcttttggatttgnggatttgacatgtaaattatgtgttgtgtataagtaagttagttacctaaacatatggccatggttattgataaacttgttgctatttttttcccaaatgctatcagtgtttgtggacttttaaaaattagtttgaattttggaatgttctgtgataaaatataatttcaactattttgtacatttaaatatgccatgttgtatatgtctgtatttaaaaatgttgtaaatatctgcattttaagaattatgaaagattttcctcaaaaatgacagaactctccatacttaattgtgacacattataagatatctgattttaagcttttggattttgttctaaaaattaagtttaaacatgctgaaaannccataaaaataaaattttgaaaataaagtg

SEQ ID NO: 375005 - DNA, 508 bp, Homo Sapiens
  misc_feature (460)..(460): n is a, c, g, or t
  misc_feature (492)..(492): n is a, c, g, or t
gaagaaatgaaaggcatagtccctgactatattctaatttaggactgaatgtacccagatgcttgtggaataatatctaagcaagtgcaaattcatgtaataccgttttgtctgattacatattgtgttgaaatagtataaaggagaacagaactgggtggaattaattgggaaaaacttcttacaaaagcatcattaatcaaaatttgaaggagaccagactttggccaagtggaaggatgaccattgtcttggcctgtatctcttgtcctttgtcttgtttgaaaagtattttaaaacttaatggtgtattattttgtgctctgaaagctgaggtctgattacaattagtaaaattctatagaagaatctgctgacgtgaaagggaaaaatctttgtcaaatgataccaaataaatggaaccaaacgggagtaggggcctatggatatcgtgaggacntgttttgccccacagggttgcctctttttttngggtgtctctgccccc

SEQ ID NO: 375006 - DNA, 400 bp, Homo Sapiens
tttaagaaacttttagattgtattacaaatttgccctaacagtaattagatgttgaatataattttaacattttattaatgacttgggtcatcagttaatacccagtacctaaaacccataccgaattattggtttattcccagaaaatacagtatttgttcctatttttaggtagacaatcatttgggatcagagtacattagcatagtaatgcctcagtcagacctgttcaagtagtagagcttggagaatgccatgaaatacttatataattaatttgattgcatgaactaagcaattttactaatgaaaaggttgtatatgtgcaagtcacttttttaaaaaccaagaaaaaactttaatagaggaaatcttattcattaatttatttttctgagt

SEQ ID NO: 375007 - DNA, 412 bp, Homo Sapiens
  misc_feature (109)..(109): n is a, c, g, or t
  misc_feature (355)..(355): n is a, c, g, or t
  misc_feature (398)..(398): n is a, c, g, or t
aaccctgttggctgtaagcaaaaggatcaagttaaactccccatgtacaattttaaattttagggacatgaataacccaaaggagttatttgtgattgaaacttcccantttggcctttaacttgaatcaaggaggctcttgcctttaagttctgtgcaagaccactgaggattaggatcagcctcgtggttccttcagtctgagtctcagctttcaggagtgttactcttctaaggagtccattccctcttaaattgctttttgacacttgaaaattttaccctgaggtgccttttgtcaaaaatttaggcgctcatcttctcagctcaacttatattacagtttccctagccntgcatcccagccttctctcttgaagaaactagtatcaccaccnatttggaaaaaaaa

SEQ ID NO: 375008 - DNA, 483 bp, Homo Sapiens
  misc_feature (28)..(28): n is a, c, g, or t
  misc_feature (38)..(38): n is a, c, g, or t
  misc_feature (46)..(46): n is a, c, g, or t
  misc_feature (92)..(92): n is a, c, g, or t
  misc_feature (127)..(127): n is a, c, g, or t
tttggtgaccgggccccccaccccgaantcccaagagngggaaaangtggaagggtaccgaagtgcctttggaccatatagaggaaccaaanccgatgaccccacctaaaccccgatagtaggggcncccaaataaatattatacctaaagggagtccaggtcaaagaagaaaccttgcaagaatctggagggagatctgttgtcctaaaagcttattaggtgactagggtatcggttttgctagtgtttgtttttatcttgttttttcccttcctcagttccagcaggcattttagtgatctcttgaaacacgttttgactctacttggtgattgaaattacacagccaggctgtgttgcttttataagctctgaaagtttaagaatttaggaagctaatgactgtcttaaattacagttaaatctaattgataaaatcctgggacattgaacgattgattttagtattcagctaataaccc

SEQ ID NO: 375009 - DNA, 402 bp, Homo Sapiens
  misc_feature (12)..(12): n is a, c, g, or t
  misc_feature (29)..(29): n is a, c, g, or t
  misc_feature (36)..(36): n is a, c, g, or t
ggggcacccccncagcccttcacctttgnccccccnggaagaacccagcagtctgaatcccgtcctatttcagcccccgtctctctcttctcccacccccccacgctgctgaacccattttccatgtcaatcacaaaggaaaaataagtggggatggggggaaatacctaggagtctattatcacatacatattaatatgttaatactttctttaaaaaaaacctcttgatgttattattttgcagactacgctttatagtacctgtgtgacgggacctagaacactggatacaaatagagctatgttggtttatcataatatgtacgcagaaactttctttttgtcatattatccttgtaatgtaagaagattgttaataaaagcatttaaatttactcac

SEQ ID NO: 375010 - DNA, 212 bp, Homo Sapiens
  misc_feature (39)..(39): n is a, c, g, or t
atgcttggtgtgccaaacattgttctaagcacttaatangctgttaatacatttacttctcacaactcattgaagtaggtgggatgtaatattaatccattttacagatgaaattaagatagcatttaaataacttgtccaaaggcacacagttaataactggcatggaaacagatataaaagccagtgaattattcattttcctgtaggtt

SEQ ID NO: 375011 - DNA, 294 bp, Homo Sapiens
  misc_feature (46)..(46): n is a, c, g, or t
  misc_feature (61)..(61): n is a, c, g, or t
tggaaaacagatagtctagtgacaactgatttagcaaacaggaganaccgtactgtaaaantgcagagaggagcactagcaagaggctctctggcccttccctgtttggtctcgaaacactaacagcctggctcctactccctaaattgggggtggcagtatacctctgggtaaactgagcagtcggaagatgaagtcatgtgggggtgatcctcaaatgctaaaattcattccttatcttgcccccactcctcacctaactgccagtcaactatttaatgtgaacaaaaagcc

SEQ ID NO: 375012 - DNA, 265 bp, Homo Sapiens
  misc_feature (154)..(154): n is a, c, g, or t
  misc_feature (219)..(219): n is a, c, g, or t
ggatcttaatccagggaaaccatggaatcttaacacaaagaaaggtaaaaggagacccaggattacagttgtgcagcaacctagaaaatagccagtcctagttggagcaggtggatagaggactctagggaacatttccatagggaaaaaaaanaggaacgcataagagtatctgctaactgactgaatcgagatgaatttttcagctctggaggggantttagggttgaattaaactatacgtaagatctgaaacactaaatat

SEQ ID NO: 375013 - DNA, 641 bp, Homo Sapiens
tataagttttagatacttttgttctttcttgctcttaaggattttaaaaacctgttaatctttttatttgtatactttcctaaaaatattcatatggggaatcctgtcaggtgtttggttatattgactatttattaatagtattagaactcattccctgaactgatgtaaatcttcatagtgtcagacatactgaccaaaaccacaatctagactacaaagtatattgttttagagtactcaaattgtattatttattaatttttttgtttgcaaaatcttaacaggaactgtattttctatattttaaagaattttatttgtcccacttttactaaacagtggcagcagattttaagttaaagaatatggaatatagtaaaataagtaaatttcttttggaatatttttagtaacaaatagccactataattctgtaggccaaattttatattgagtttagctgttttctcaaaatttagcagagtggttaaaattctgtgctgataagtaactgatacatataacataaacataacaaagttgcctagttgatgtaacagtggaaagttatctggaaatagtattttgaactttaagccaagtttaaaacattataataaaaggaataccatttgtgc

SEQ ID NO: 375014 - DNA, 492 bp, Homo Sapiens
  misc_feature (324)..(324): n is a, c, g, or t
  misc_feature (397)..(449): n is a, c, g, or t
caacaatgataataaatgattcctggtacaatcatgcatgttgttctcatgtttctctcagtatttgtgatccacaggtagagggtgaccaggtgagtacctggaccggctgtcccatgggtcagagtaaagatcccatttactcatggggttggcattaaatcacctttcactggccatcccccaaatatggttaccgctttaccctttgacttctctgtccctctgtcttcactcctcccatcttcctttcccttatgttcattggactgacacttcctgaggggttactatgtccaaggcaccctgctggggcaggggggnagcacaggaataactcccagcccttgtctggcaagggcactttcagccctgttaggggaaaggcgcagtgccnnnnnnnnnnnnnnnnnnnnnnnnnnnnnnnnnnnnnnnnnnnnnnnnnnnnntttttcaccaagaagacatgggttttcatgggggctggttttt

SEQ ID NO: 375015 - DNA, 524 bp, Homo Sapiens
  misc_feature (149)..(252): n is a, c, g, or t
  misc_feature (466)..(466): n is a, c, g, or t
  misc_feature (488)..(488): n is a, c, g, or t
  misc_feature (494)..(494): n is a, c, g, or t
  misc_feature (505)..(505): n is a, c, g, or t
gggcctcgctcttttgtccaggccgggtcacaactcactgcagcctggacctcctagcctcaagcaatccacccacctcagccttccaagtagctgggactacaggtgtgcaccaccacagctggctaattctatttttttatagaggnnnnnnnnnnnnnnnnnnnnnnnnnnnnnnnnnnnnnnnnnnnnnnnnnnnnnnnnnnnnnnnnnnnnnnnnnnnnnnnnnnnnnnnnnnnnnnnnnnnnnnnncaggcccattttctcctaaaacttcaaggacaaatcattaataatgtaacaggaatctttaggagaaaaaacaatttggtttactgataacaaaagataattgggaaacatgagagtatttgagattggccaagcaggaactatggaagtccatccaagtaaggtcaaaggtcatcgtttcttgtttttgaattttgggggtgataatggggtngggagagtgcttacagtctgtnatgtcntgtgtctcccntggatttcatacggtggaa

SEQ ID NO: 375016 - DNA, 260 bp, Homo Sapiens
  misc_feature (221)..(221): n is a, c, g, or t
gaatatcttaagccactttctgcaaaagctgtttcttacagatgaagtgctttctttgaaaggtggttatttaggttttagatgtttaatagacacagcacatttgctctattaactcagaggctcactacggaaatatgtaatcagtgctgtgcatctgtctgcagctaatgtacctcctggacaccaggagggaaaaagcactttttcaattgtgctgngttagacatctgtgagttagactatggtgtcagtgattt

SEQ ID NO: 375017 - DNA, 359 bp, Homo Sapiens
  misc_feature (311)..(311): n is a, c, g, or t
  misc_feature (334)..(334): n is a, c, g, or t
gtgaatgacccgctcaaggtctcaaggcaactgcatggcccacccgctccactcatggccctctcacccccattcggcaccccagccttctccttgtggggtcaccccgccccacagtccgacccgggctggagtgaaatctcggctgactgatgcgccttcacggaagatggcatggaggggatccactgtccccctcaggcctcttctccaagacaaaggacagtcatgtacactggctcacagaccacagagatgctggtagttggtgtgcaagagcatttatcatgttggagaatgacaaagagggngcaggtgtctgacctggggatgngagaacacggagcggtgaaggcaca

SEQ ID NO: 375018 - DNA, 340 bp, Homo Sapiens
  misc_feature (28)..(28): n is a, c, g, or t
  misc_feature (37)..(37): n is a, c, g, or t
  misc_feature (68)..(68): n is a, c, g, or t
  misc_feature (246)..(246): n is a, c, g, or t
  misc_feature (271)..(271): n is a, c, g, or t
  misc_feature (278)..(278): n is a, c, g, or t
tacaaaataaagtagttgtgaccatagncatgtgggncagatgtggctggcatgggcagttaggtagnacacgggggaggtctatgtctggggttacaacggaaacgggcagcttggactcggcaacagtggcaaccagccaaccccttgcagagtggcagctttgcaaggcatccgtgtccagagggtcgcctgtggctacgcacacacattagtattaacagatgaaggccaagtgtatgcttngggcgccaattcttatgggcagttnggcactngcaataaaagcaaccagtcctatcctactcctgtcactgtggaaaaggacaggattatcgag

SEQ ID NO: 375019 - DNA, 671 bp, Homo Sapiens
  misc_feature (83)..(335): n is a, c, g, or t
aaatcaatgttgcactactgccaatggaaacatagaattttaagttgtatttactttttaattgaacagctgagccccaggtnnnnnnnnnnnnnnnnnnnnnnnnnnnnnnnnnnnnnnnnnnnnnnnnnnnnnnnnnnnnnnnnnnnnnnnnnnnnnnnnnnnnnnnnnnnnnnnnnnnnnnnnnnnnnnnnnnnnnnnnnnnnnnnnnnnnnnnnnnnnnnnnnnnnnnnnnnnnnnnnnnnnnnnnnnnnnnnnnnnnnnnnnnnnnnnnnnnnnnnnnnnnnnnnnnnnnnnnnnnnnnnnnnnnnnnnnnnnnnnnnnnnnnnnnnnnntgacaaaggtgagactctgtctcaaaacaaaacaaaacaacccagcaacttggtcaacataaccagacctgcatctttacttaaataaaaaatggacacccatctcagtttttggaaaactattatataattggaacaacttggatatgtgaatctacttctccaactatgaattttatgaaatcaaaataaaggtcaagcatttcagataaaaatgtaccatggtaattgagatttggtgtaagtgtaaaatatataacagattttgaagacagcacaaaagaacgtaacataattcatttaaataataccgatgacgccaggcacggtgcctca

SEQ ID NO: 375020 - DNA, 255 bp, Homo Sapiens
gagacagcatgcctccatttttctcagtcatctcattcttgttctagggtggcccatttaactccaagccctggcatactctgtagccacaagtgtttgagggcttaggaatcaacaggatcaaaggctatcagccttaggaaaacagatctcagcttccctcagccatctcagctgatttgtttacatgaaaactcagtttaaaaggcattagttttctcctttcttatctctgctctgatgctgtactttctc

SEQ ID NO: 375021 - DNA, 255 bp, Homo Sapiens
  misc_feature (48)..(48): n is a, c, g, or t
ataatatatatgttactaatgctgtacgtgaaaaatcagatgcatttnctggcatgcggaccagagctgacagcctcatttaccaactgaacaaacaccccacagaagattaaacatggttcatgttctccccaaacaaccacatcgccagagccagagccctgacctaaaaaccactgttagtaaaaagccagtccagtcactacacatgtcaaaattagggcctcatcagttaagggctctttttcctcccta

SEQ ID NO: 375022 - DNA, 240 bp, Homo Sapiens
  misc_feature (211)..(211): n is a, c, g, or t
gtgtgagccaccgcgcccagcctacacctgctcttaattgtgttttgacatgctgggtactacaacattacataaaacataaccatggaaaaagaagtgagtactttacaatcttcaatgatatgtgatacaagaaaacttcattcttctgcagcaattgtccaccaaatacgtaaaaccatgaaatattaagtgagctcttacaaaatanctgaaagtatttgcattcaaaaatgaaaa

SEQ ID NO: 375023 - DNA, 317 bp, Homo Sapiens
  misc_feature (112)..(120): n is a, c, g, or t
ctccaagtgtgcaaaccccttattcagaatccataggcaatttattttccagtcaggacaagtttgaatggaaatttaattgggcccaggacagccataaattctatttacnnnnnnnnnaaaccattaaatggaaaggcttctgttacaagtacttttcagaaaggcttaaagaatgtccagatagcattttcctatagtgtattttaagagcagaaacaggggtagacataaattatgtattaagctaaaacaaagcacaaaataataacacaaacatacttttgcacatcctcctttttcctggttagacttca

SEQ ID NO: 375024 - DNA, 477 bp, Homo Sapiens
  misc_feature (416)..(416): n is a, c, g, or t
  misc_feature (446)..(446): n is a, c, g, or t
ctacacagtaaatattttggtttagcacgccatactgtgtcacaactgctcaattctgccatcacagcacaaaaacagccacagataatttgtaaatgaaggaacatggctgtgttccaataaaactttatgaaaacagtgagctgaatttagcctacaggccataatacgccaatcctgctctagacaataaaactgatccttaccagtatgttagcagaagagggtcagtcagctctgtttccatgcctgacatgtatcaaagatctgggacctcttcccagtggaggcactagggttgcttgtttaaagggtgcttgaacaattaaccagcaaagagatgtctgatgccaaatggggcaaggaccaaatactgggaatggctaaaacacagctgggattctaaggaaggggangagggcttctttggaccattttcattaccngccaacatttttgggcaggattttttaaaac

SEQ ID NO: 375025 - DNA, 165 bp, Homo Sapiens
aaaatttattttttgttatcaaagagaatgtccagaaacattgagtactaaagaatttgttcatggcattgttttacaaaattttctaatggagagtgaatattttattttctgatgtattcttcacttattaatgatgaggtcaatgaactgatgcaattattt

SEQ ID NO: 375026 - DNA, 520 bp, Homo Sapiens
  misc_feature (57)..(57): n is a, c, g, or t
aaaacccggcgacacccccaaatttaattttaagccccatggtggatacaccccaanggcaattccaaggtggagtggcccaagtattaatggcctccaaagggtaaataaacagatggcaaatattttcctctctaaagataaataaataatgctaacaaacttattgttaaaaatatatcccagatacaaagtttgttgaataagcacattatgtgataatgattatgagtatgagcatgaaaaaacttcatgggggatttaagttgaatgtttaccttattttctgtgaaaaacaacattgggaacctcataaataattataatatgctattccaatatttcctaaattaactaatggaaaatattatttctacttcttgaactgtacatattttcgtcagtgataatcttattgccaaaaataaaggttgatttattattcgaaataaaaaatatatataaatggaataatgaagacccaagaaaccccatagtaatttgcttgattttcaaaagt

SEQ ID NO: 375027 - DNA, 283 bp, Homo Sapiens
  misc_feature (136)..(136): n is a, c, g, or t
  misc_feature (186)..(186): n is a, c, g, or t
ggagatggagtcttgttgctcagtctggtcttgaattccttgcctcaagtgatcctcctgcttgagcctctcaagtagttgagattataggtgtaagccactgcacccagctccagacagttttactggtgaattnctactgatgcttgaaaggaaaatgcactccaatcttattaaaattacttnccagaggatacaaaaaaagggaatactccttatgtcactttatgagccttaatttcctagagcgcaaacaaaagaggttgaatcacgtggttcttcc

SEQ ID NO: 375028 - DNA, 318 bp, Homo Sapiens
  misc_feature (15)..(15): n is a, c, g, or t
  misc_feature (26)..(26): n is a, c, g, or t
  misc_feature (35)..(35): n is a, c, g, or t
  misc_feature (43)..(43): n is a, c, g, or t
  misc_feature (70)..(70): n is a, c, g, or t
  misc_feature (112)..(112): n is a, c, g, or t
tctatctctagttcngctcttataantatcccctnccttccantttcttcgagtttagtctgttataccntaaagttgtgtgtttagtttattaattttcagccatgttttncttgtctttaaaaacatttaaggcagtaaatttccttcaaagcactgctttctgtatcccacaagttttgatatataacatttttattattattcagttcaaaaatatttaaatttttattgtagtttcttctttgaactcattatttaaaagatatgttacttgcccaggcatggtggtttgcacctgtaatcccaacacttttg

SEQ ID NO: 375029 - DNA, 468 bp, Homo Sapiens
tgtgggttggggggaccggtcccaggaaccaatacccccatggatacccaagggacaactgtacttatttacctttattgtccattgcaagcttcttatggaaactttataggaatgaaaatatacatgttaagaagattaaacattaggatagtagatggtttgttgccatgcctagaactgttagtattgttgaatcaattactttggtttcatgaaaaaataaacgataaatatctttaaagagaactagaagaattttttgtttgagtgatcccaggctgtagtatgatcatttactgaagtagtttgattggctggctaacttagaattattgtttcttgttttgtactgcaataggggttataattgtaagataaaaatgtgtgtgtgtttaagggaagtaggtggtggttaaaattcttggaaaattttcagaatactttaaaaataaagttccaagttac

SEQ ID NO: 375030 - DNA, 721 bp, Homo Sapiens
  misc_feature (675)..(675): n is a, c, g, or t
ttactttgtagctacactttgaagtaagattcaaactgttatccactcaattgccttattcctgaggatgtagtgaaggaagaaaaagttttctggaattccgtaaattatattttaagcttatttcttcaaaattattttcatatatcacagatatatcattggaagatataatttgcatatatgttcattatcagtgttcctaatttggtattacatgtattctatttttctgaatgatagcatgaaaagtgtcaaagtggtttgtccgctagcgtctgtctgcagaactttcaggatgactattaattcctctcagatgtcatttttgagtggtccaagcctgctgttttgaacccacagcagtggagatttgtatccctatttacagttgtgtactataaagtgtgtgttacataggttttgtgtaataattatttgtaaatattatttagatttgtatttagacatgatttatatctaatatagatacaaagtctgtgtctaaatattatttaaagaagtgatttttcattctcttggattctttccagtgtggtgccttttatatgcctcacatagtctccttgttctcctactaatattcccaagctccatatgccaattaaagaagaaacaaaaataaaagtttgtcttgcttgtgaaacattaagnagaggctgtcaggtttaataaactttttaatgaatatttcagacat

SEQ ID NO: 375031 - DNA, 358 bp, Homo Sapiens
  misc_feature (23)..(23): n is a, c, g, or t
  misc_feature (38)..(38): n is a, c, g, or t
tggcacgagggtcagggcgtgantgagcctgagaggcngctctgccccatgggaggccattgaggacaggagctgggagaggagtgagtaggcccagccttgtgtcttggccctgccccataagccagagactggtggaagtaggctaaggaggatgaggggaagtccccagggaaagggacctttatacgatcccctccaatgagcccctgctgggccccatagatgaacccctgggctgaggcctggcgtgcgtctggctcaaagcagagtgtccccaaagccagctgactctcagaacttctgcagctgtaaccaggccccacttgacacagtatgacctgtgctcacacacctg

SEQ ID NO: 375032 - DNA, 428 bp, Homo Sapiens
  misc_feature (74)..(102): n is a, c, g, or t
ctgatgcccttcttatttttttagagacagggtcttgctctccagcctgggcaacagagtgagactctatctcnnnnnnnnnnnnnnnnnnnnnnnnnnnnntgggctggaggagcgggttgtaggcccttccgcctctggtgggtggggagaagcaggggagctggtgttcagctatattctacaaagaaggggtggatcctgagaggcaagggtgggactgaggcctagttacaggtggtcgggaaggaggttgaaggggaactgtgtgaccttggatgttctttgtaattatcttatgcttagctgacacatctgtaaaatggagatagcagcacccacttctttgagttgtgagaagtaaatgcatgtgaaatgtttagcgtgtgccgggcaccaagttaagagcccagtaaatgttggctgtt

SEQ ID NO: 375033 - DNA, 361 bp, Homo Sapiens
  misc_feature (106)..(106): n is a, c, g, or t
agcgcaggagaggtgtcaaagagctggcgcgtctccagagccccgggaggaaggctgtaacggcagccccatcgtagacagggacattcgcatcccgagccctggntctctgaaaaccagcccagaatttggaagctggaaggaactttagatcgtccattctgagtgtctctcttcgctggcgttttcccactgaggttatgtaaacatgaagaggagcctacaagtgtcaaggaaaaaacgacagctaaccacagggcaggccatgggcaagatatctcagtgttctccgctctcataggtcagagtgagactcacctaggctggactgcaatggtgcaatatcggcttcactgcaacc

SEQ ID NO: 375034 - DNA, 446 bp, Homo Sapiens
  misc_feature (28)..(28): n is a, c, g, or t
aaagcccagaagggccctccaaccctgnacagaagtccatactcccagtttaatattttaggaaagtatatttttccccccaaatacagaattttaagaaaatatttccagaatacctactgaaggtgaaactacttcatcgggaggtatttacgttctgcccagacttaaagtctataactaaatgactgcaagttcctcattaaagagcacagagacaacatctataaatgtcaccaaggacacttagtaagattaagccctccttttttcaaagaaactgaggagagtctaaaaccaccttggtacatgttcccttaattttctatttaatttctttaaggtaatttatcttatttctctgtcttttgaagacaagctaatgaaaaacaatgtccttttatccaacaagaggtattaaaaaccaaaattctggacaaaaaaaa

SEQ ID NO: 375035 - DNA, 533 bp, Homo Sapiens
aggaaccctgttgttttccaagggaaatcattcctctctgtccccactgttgattaactaaagtcctggacaccttccttcctccacgggccaagacccacctatgacccaccatgaacctcttttcagagccgaggggcatgaatatgtgtactgtttctgcttctgttgatggagtggctgtgggagaattaaaggaaatgctaaatttgagcttcattcataggggaacctactatatattgcatccctgctggttggaaattatcttcatctctggactgcattgtttagaaaaatgttaatggcttacaattctgagaactttattgtgtggctctggggttaagaattctgtggtttgaaaaaaaataaatattttgtattgattctcacgtcatttcaatgttgtgactatgtactaaatgcactaagactgggtattctcttagaagggtgcgttttgtgaaacagatggcagttcactctcataagttctatttgtcaatattacagccacacacttccggata

SEQ ID NO: 375036 - DNA, 144 bp, Homo Sapiens
atgagatagaacctgataaggagctagggcaattctgacaacattaccaaaggcccacataacttctaaattttggtctggtctgaaggaaaacctgttcttgccctagtgatggatgaactctcttatctctggcttctagag

SEQ ID NO: 375037 - DNA, 463 bp, Homo Sapiens
  misc_feature (28)..(28): n is a, c, g, or t
  misc_feature (57)..(57): n is a, c, g, or t
  misc_feature (69)..(69): n is a, c, g, or t
  misc_feature (75)..(75): n is a, c, g, or t
gccaaccccggggccaatccggaagggncaattcccttccacaattgcccagaaaangggataaaaatnccctangatacagcctaatcagggaggtgaaagatcctctacaatgagaattacaaaacactgcctcaaagaaatccagagaagacacaaacaaatggaaaaacttcccatgctcatggacgggaaggaccgatattattaaaaatggcatactgcccaacgcaatttacagattcagtgctattcccatcaaactaccaatgacactcttcacagaactagaaaaaaaactattttaaaattcatatggaaccaaaaaagagcctgaatagccaaagcagtcctaagcaccaagaacagtgctggaggcactgtgttacctgatgcctcaaactatactacagtgctacagtaaccaaaacagcatggtgctggtacaaaaacaggaacacag

SEQ ID NO: 375038 - DNA, 513 bp, Homo Sapiens
  misc_feature (16)..(16): n is a, c, g, or t
  misc_feature (47)..(47): n is a, c, g, or t
aacccctggctggaancctcacctgaagcaacctgttggaagggtcnaggggaatggcttcctgaagctaaaccctggcaggaaactgggctaacagcatggaaagctgcaggcagtggggcagaggctcccctaagaggctccctgtctccccacggagacaaagttgtcccagccccggctcctaaatagccgatacagaaggcaaaggcagggattcatcactgtgtgccttaacctgcggtggggtctgcagcactcaaatgagtgcattaaagtgtgtgggttacgtggctgccagcagtacacccccgaactgttgccaccaaaggctgggcatttacagctgatcctctgtacttcagcacacacaggctccctctctccagccctcctgcctctcagcacaatctgggagtggagtgaaatgcgctgctgctctgccttcctgtcacatatgggagaaccactccctggcatttggatctttagactccaaggaggggaaccaca

SEQ ID NO: 375039 - DNA, 505 bp, Homo Sapiens
  misc_feature (411)..(411): n is a, c, g, or t
  misc_feature (419)..(419): n is a, c, g, or t
  misc_feature (453)..(453): n is a, c, g, or t
  misc_feature (460)..(460): n is a, c, g, or t
agtgcatgccagaaataggatccagaaatttaagtggaataaatggaaagttctggactttggtttaacaaacccgtgacacagctgaaagattttagctgactaaatgctcaatatgagttcataggaaccaagccacgttaagcagctcatgtttcccctttgccttcaggatgccagatccctccttagtgtccagcagggggtcctccagatgtgagctggctaccaatcctgtgtcaggctgcagacttgccatgtccttgaacacctttgcacctctgcacatggtctcatctctttctcctgtaggctcgccagctgaggtcctattcacactttctttctttctgagtcagaatccctgtcccccaggctggcagtgcaattgccgtgattcatgggtttcantgtgggcntcaaatttccagggttcaagtggatcctcccacntcaggcntccagagttagttggaaaccagagggtttgttgcggaccacaacc

SEQ ID NO: 375040 - DNA, 239 bp, Homo Sapiens
  misc_feature (54)..(54): n is a, c, g, or t
  misc_feature (196)..(196): n is a, c, g, or t
agaacttccaatactgtgttgaatagaagtagcaaaagcaggcatagtcttgtncctgatcttacaggaaagctttcagtctcaccattgaatatattagctgtgtgcttttctcacatggcccttattatgttgaggtaatttccttttatgcccactttgttgagtgctttattgtgaaagggtattgaatttngttaaatgcttttcctgcgtcagttcagattatcatatagatt

SEQ ID NO: 375041 - DNA, 227 bp, Homo Sapiens
taagttgtaatgtattgtatataaatgtaacattgttataatacaattatatgtatacaatgtaaaaatgtaatatattgtgtatatgtacaaatgtacatttgttgtgcaatattgtgcaatataattgtaatattttcaagccctatatgaaaaagctgttatttgcatgactgtatcctatgaatagttatggaaatgaataaataagctttttagaaacagtt

SEQ ID NO: 375042 - DNA, 484 bp, Homo Sapiens
  misc_feature (32)..(32): n is a, c, g, or t
  misc_feature (54)..(54): n is a, c, g, or t
ttaaccctaaccgacaaaaaatacaccccctnccccccggaaaccaaggataanggtgtccaggataaataacctccaccccacagtcccatgaaataaaaatagaaattattgcctatattatgattgtaaaaatggaggcaataaagagttccagaaatatactcatttataatcaattaaatgatgagtcataatttgaaccctaattatcacattatgtagaaatcacaattcaggttttgtgtccccatttatatgttaaatagttcacatttaaaaaaacattttatcattacattatcaaatttgataaaatcttatgaaaacatctaagtattcaatataaatcatactgttaaaagtataaggtaacattaaaactgctgaggtgccagataagtattttctgttaaatatacacaatttaacatttaaaactacataaattaattcttgctaaaagttgattcagttttacaaa

SEQ ID NO: 375043 - DNA, 532 bp, Homo Sapiens
  misc_feature (341)..(341): n is a, c, g, or t
  misc_feature (411)..(411): n is a, c, g, or t
  misc_feature (469)..(469): n is a, c, g, or t
  misc_feature (513)..(513): n is a, c, g, or t
ggttcaactgttgattgcaggaataaggccttaatatgttaacctcagtgtcatttatgaaaagaggggaccagaagccaaagacttagtatatttccttttcctctgtcccttcccccataagcctccatttagttctttgttatttttgtttcttccaaagcacattgaaagagaaccagtttcaggtgtttagttgcagactcagtttgtcagactttaaagaataatatgctgccaaattttggccaaagtgttaatcttaggggagagctttctgtccttttggcactgagatatttattgtttatttatcagtgacagagttcactataaatggngtttttttaataggaatataattatcggaaggcagtgccttccataaattatgacagttatactgtcggntttttttaaataaaagcagcctctgccaattaaaaccccattggataccggaggtttngcattttggggcaacccttaggggttttaggaaacagccgtcgnccaatgtaattggattaag

SEQ ID NO: 375044 - DNA, 501 bp, Homo Sapiens
cctgaacaggaaccattagagaagaaggcgacccctctaataacccctataataacagggcccggctgctgggcattgtcaacagggaaataactcggtcgctgcttttctggcgaagacgtgccatagcctgggatagtagcctggggtcacagggccacaccgaaagccctcatctctctctaccttctctctgcagaaaaagcgtgaggctgctcctcattgacacccacttagaagttggttgatgaagactgcagtgagcactctcagcaagggtaaaactggcacatttgggcctgaaatggggtcctcggggcctggtaggctcaagtatgcccttggtaatttccagcttacagagaaaagaagagcgttcactttgttttctgctgggcagggtgaaaaagggggcagctacgtgggcccaaaggtttacacgtttttccctcactgcgaactgtcagccttatttccgagttttaggccaccattgacttt

SEQ ID NO: 375045 - DNA, 455 bp, Homo Sapiens
  misc_feature (377)..(377): n is a, c, g, or t
atgaaaatactgaaggaagccctcaagaagatggtgtggaactagaaggcctaaaacaaagattagaaaagaaacagaaaagagaaccaggtacaaagacaaagaaacaaactacattggcatttaagccaatcaaaaaaggaaagaagagaaatccctggtctgattcagaatcagataggagcagtgacgaaagtaattttgatgtcccttcacgagaaacagagccacggagagcagcaacaaaaacaaaattcacaatggatttggattcagatgaagatttctcagattttgatggaaaaaacttgatgatggaagattttgtcccatcagatgcttagtccaccttaaggacccaaaacttcccccaaaanttagttaaccaaagaactggaaacccacaggaaaagtgttcgtgttccggaccttggaagctggttggtgttttaagg

SEQ ID NO: 375046 - DNA, 541 bp, Homo Sapiens
aatactgcatccttttcttccgcagaactagagtcagagttcggcagctgcgtacaaaggcctctgccctcggcttgagcaaaagttgtaaataactagtatttattaagcacttataagcagtttttctcacttagtcctggctccagttctagagttcctctttattgcttttggtgaaagtttggggttgggggtacacctcagaggttcagtaattcacctggagtcccaccctgaacagagctggacccagagccacacacgcccgggaacacacactgtgctggggaggaagtgggcctaggagggcctgcaggtccaggcagctgtagagctgctagaagctggggtgttgctctccccgctttctcatagacacagaggtactgtctgcctgttgtcacacagttcatatgctcgcttgagatggaatctgaaccttggtcccaggatctgtgctttttcccactttgccacactgtctaaggtggctttgaactggaacccaagtgcaaataaaggttggtattcgctcctg

SEQ ID NO: 375047 - DNA, 350 bp, Homo Sapiens
  misc_feature (15)..(15): n is a, c, g, or t
  misc_feature (34)..(34): n is a, c, g, or t
  misc_feature (61)..(61): n is a, c, g, or t
ggaacaatttccaanccccaagaaatttaccccngggaaaaatccccattaaagccctccnacccccgggaacctcccaaatgtttaaaagggcaattttaaatacaaaaaagaatgatgtttaaaattgctttgagtgattcatacagagatgtatatatgcatacatgtatatattcataaggaatataagcttccatcaatagtgattttaaatttgatttttttcttaactctaaatatttaagtaaaaagtaacaaaaactctgcaagcaagggaatttttttgtactgtaattttgaatggaactgaaaaattatgcacgaataaagtacttttctcatgccat

SEQ ID NO: 375048 - DNA, 488 bp, Homo Sapiens
  misc_feature (29)..(29): n is a, c, g, or t
  misc_feature (64)..(64): n is a, c, g, or t
  misc_feature (70)..(70): n is a, c, g, or t
atgaaccaaaatgaatgtctcctgctggnactaaaaagtggctgtaaccaacccaagaccctgnatgtcnaagtaccgcaagtggggctgctcctaagcccggccctgccccatctcagcctcaccatcaccctgctaatgactgccagactgtggggaggcactctcctctggacctaaacctgaaatccccctctctgccctggctggatccgggggacccctttgcccttccctcggctcccagccctacagacttgctgtgtgacctcaggccagtgtgccgacctctctgggcctcagttttcccagctatgaaaacagctatctcacaaagttgtgtgaagcagaagagaaaagctggaggaagccgtgggccaatgggagagctcttgttattattaatattgttgccgctgttgtgttgttgttattaattaatattcatattatttattttatacttacataaagattttgtaccagtg

SEQ ID NO: 375049 - DNA, 605 bp, Homo Sapiens
  misc_feature (418)..(418): n is a, c, g, or t
  misc_feature (527)..(527): n is a, c, g, or t
atatgatactgggcatatggcaatgctcagtgaatattggacagctaatacaatttgcagagtcactgaggaaaagtatagcttcagagagcttctgtgtccagatttcaacgattttctttcatcattatttcgtggggctcccaggaccatatgtggctcacaaaccacaggctaggatgtgtttaacgttaaaagcaagcagtgtgtttctctgaagtgtggctccaccatggtgttcggttacacccagaggaggaggctggtgggcagtcatagaagtgcatcttccagagcaggaagggatcaacagctcttcctgggagacttccattctcctaccccagtttctgagcacagcatgaatctaggagggagtttctcttctggcttttcctcctagttttgtttcctctantcccttttccttgctaaagtgtgttggatggtcaggaatgtgggcggagaagagggggagctggagacatctcatccttcatccagcttgtgtaaaaatgcctcagaantcctcataccacatgcacctaaattataaggtcaagtttgtaaggctgcagcccttttggtttttgcatgttggtagg

SEQ ID NO: 375050 - DNA, 521 bp, Homo Sapiens
  misc_feature (391)..(391): n is a, c, g, or t
  misc_feature (422)..(422): n is a, c, g, or t
  misc_feature (445)..(445): n is a, c, g, or t
  misc_feature (450)..(450): n is a, c, g, or t
  misc_feature (479)..(479): n is a, c, g, or t
  misc_feature (499)..(499): n is a, c, g, or t
  misc_feature (507)..(507): n is a, c, g, or t
tatgatactgggcatatggcaatgctcagtgaatattggacagctaatacaatttgcagagtcactgaggaaaagtatagcttcagagagcttctgtgtccagatttcaacgattttctttcatcattatttcgtggggctcccaggaccatatgtggctcacaaaccacaggctaggatgtgtttaacgttaaaagcaagcagtgtgtttctctgaagtgtggctccaccatggtgttcggttacacccagaggaggaggctggtggggcagtcataggaagtgcatcttccagagcaggaagggatcaacagctcttcctggggagacttccatttctcctaccccagtttcctgaggcacagcatggaatctaggagggagtttcctnctttcctgctttttccttcctagtttttgtntttcctcttattccctttttccnttgcntaaaagtgtgtttgggatgggtccaaggnattttgggggccggaaaagnaggggggnagctgggagaacat

SEQ ID NO: 375051 - DNA, 488 bp, Homo Sapiens
  misc_feature (30)..(30): n is a, c, g, or t
  misc_feature (44)..(44): n is a, c, g, or t
  misc_feature (244)..(378): n is a, c, g, or t
actggggccaccccctgggttgagggaaangaaatttgtgacantttcatgtgggccacattttgaatcctactttaaaaaatagacccaagcacagtggcctccacaccctgtaaattcccagcaccttcgggacgcctgaaaaaaggtggatcaccctgaggtcaggagttcgagatcagccctggcccaacatggagaaaccccgccctctactaaaaatacaaaacattagcctgggtgnnnnnnnnnnnnnnnnnnnnnnnnnnnnnnnnnnnnnnnnnnnnnnnnnnnnnnnnnnnnnnnnnnnnnnnnnnnnnnnnnnnnnnnnnnnnnnnnnnnnnnnnnnnnnnnnnnnnnnnnnnnnnnnnnnnnnnngaggaggatgatggtggtgattatgatagaaatggtgatggtgatgatgacaatggtgatagtagggatggtcttgctctgtcgcaatcaataaatgaatgcataaacac

SEQ ID NO: 375052 - DNA, 437 bp, Homo Sapiens
cctaccctccctcccaccctccacattggtccacaaaatccacattccttttggcagagcccagttttccttgttgccaccccattaatataagtcctcctagggttacctgagagctgatgtacaacatttttaccctaaaacaaaatatttcctcattgcaaatctgtttaagatgctggatcttatttgtgctaaaggcactataaagaatgtggcaaagaataataaaagatgagcctcacagggtacatctgttgactacctactatatacacagaatgttcacgttatcacagatgatcctcaaactgtgatgtaatcacagatgagggaaaatcaggtcagagattaaatatttgcttaagggcacagacgtggccatcttggaaatatggtaagcaaaagcattaccttcaaagtcacttgagaaaaac

SEQ ID NO: 375053 - DNA, 425 bp, Homo Sapiens
  misc_feature (34)..(34): n is a, c, g, or t
  misc_feature (391)..(391): n is a, c, g, or t
accctcccccacccttcacatttgtcacaaatcnacatccctttatgcagagcccagttctccttgttgcaccaattataataagtcttcctagggttactgagagctgatgtacaacagttttaccctaaaacaaaatatttctcattgcaaatctggttaagatgccggatcctatttgtgccaaaggcactataaagaatgtggcaaagaataataaacagatgagcctcacagggtacatctgttgactacctactatatacacagaatgttcacgttatcacagatgatcctcaaactgtgatgtaatcacagatgaggaaaatcaggtcagagattaaatatttgcttaagggcacagacgtggccatcttgaaatatggtaagnaaaagcattaccttcaaagtcacttgagaaaaac

SEQ ID NO: 375054 - DNA, 446 bp, Homo Sapiens
  misc_feature (360)..(360): n is a, c, g, or t
  misc_feature (372)..(372): n is a, c, g, or t
  misc_feature (381)..(381): n is a, c, g, or t
gtagaaggtcctcactgcacctcatggcaggctgctgacggcagatattttaccgggctcactgaactgggcagtcagggaagggtcggctcctgctctgtccagctgtcttcataagggactctgtgacactttttataaaaatgactttgatttctgcataagaaggcttcccaagcttgctgtctagcagtggctgctacagggaattattcacatggcagcaagagagccctggctccctgggaccaggacattccctttgtgtgtgttggaatgagagcaggaggagtgctggtcagaagcccctccccagggcctcttgggactttcagtgttcttcagacaaactggggccgntcctcttgagcntggggatgntgacccacatttgggccccggctctgggcatccacaggaacgttggccttatccgtcatttcgtt

SEQ ID NO: 375055 - DNA, 504 bp, Homo Sapiens
  misc_feature (348)..(348): n is a, c, g, or t
  misc_feature (389)..(389): n is a, c, g, or t
  misc_feature (399)..(399): n is a, c, g, or t
  misc_feature (455)..(455): n is a, c, g, or t
atgtacaaacatatacaattttattgatatctctacagactacaagaattttgttaagtatagtcacaattgctgagtgcaacagaaaaatagtaatttgtcattttctgaaaagatgcaaaaattctgaagatgaaagaaagatacatcaatgatgtcatctgtttcttatttcctagaataaaacatcacataattaagtactaaaaattataggttattagagattctgttcctgtgtacaattgtccaaaaccaccatctagtttattttctggctttgcagtcaagaagggtgggccaacagcagagggaaagcagtatgaaaggcaataactctgagtttcntctcattatgtgttactgccctttggataggctgggactcncccttttttngaagggtgtaagcacccctttcagggcactgggatggtcatatagggaagttaccnggtattccttttcccttaaagcacatggtcccaaggactaaggaaaatt

SEQ ID NO: 375056 - DNA, 392 bp, Homo Sapiens
  misc_feature (346)..(346): n is a, c, g, or t
  misc_feature (364)..(364): n is a, c, g, or t
gatgatgtcactgctctgttcaggatcttccagtggcttctcaccacactcagagtaaagagcaacactgcaaaggctgcctaggccctgtaagatctgcttccccctcccgccacctgacttcatttctatcgccaccactccctccaacccactccagccacgcatctttgctctcccctgaatatgccaagcaggctttgccttagggcatctgcacttgctctttcctctgtttgggaatactcttgcctcagccacacaaagaggcatgtttccgggtttccttaaggttttctggatttaaaaatgttcagcttgtggaatggaaccctttctggccaanttatttttcaaatagtantgctggccattggtgggggatcccattt

SEQ ID NO: 375057 - DNA, 427 bp, Homo Sapiens
  misc_feature (21)..(21): n is a, c, g, or t
  misc_feature (39)..(39): n is a, c, g, or t
  misc_feature (129)..(129): n is a, c, g, or t
cagaaatggtttggagtattnccctaagttattaatttnggcccgatttgccaaatataatcctcagacaaattgtttattatccaatagtaatcattgtagtaaccatagagccctacctatatgccnggtacttttccgtgcattatcctattcccaataactctgtcaggtaaacatgattaagtcacccttatagatgtggatacaggttccaaaaatttaagtaactcacttgtgactaccaaactcatgaatggtggagaaggggcctcaccccaggtaagtgtggctcccagccagcactatccattcccttctcgtaactgctcttactgaataaatcactgatgtggttaatttcaaaattcttaatagcttaataatattcatatgtaacaagattagcatgttgaggtccaaaaaa

SEQ ID NO: 375058 - DNA, 235 bp, Homo Sapiens
  misc_feature (133)..(133): n is a, c, g, or t
gaaagaaagaagtcaaaagataagaaagagaaggtaatgatgcccttctgttcatgcagatatccacagcctttgcaattcgccatttggatttagaagtagaatgagatttgagggccctggaataattgtntttttatgggtatgttcaagaaggatgggtggggccgttgatgggatacctgcacctgtccttgcagagagaggggaacctgcaagtttggggtgttcttta

SEQ ID NO: 375059 - DNA, 285 bp, Homo Sapiens
gagacaaggtcttcctctgttgcccaagctggagtgaagtgtgacacaaccatggctcactgcagcctcgagctcctgggcctaagcaatcctctcacctctgcctcccatgcaactgggcccgtagcacatgccgcaatgcccagctagatttttgcttgtttttattttgtagagacgaggtctccctacgttgccaaggctgtaaaaatgactttaacatttaatcacttggaaagttgtgatatactgctaagtgaggaggaaaaactacccaaacagcct

SEQ ID NO: 375060 - DNA, 523 bp, Homo Sapiens
atgaactgaccattaacagcgcctctttgataggttaccctgatgctgctaaagtaaagccttaagtgtgtttttgggacaacgtgctgcttattccacctcagccacatatgtgtttgtgtttaggatattgtaaatctttgctaagtagtgttttccttggtgaatgaagtcattgttgtcttcaagtgtaccatctgcctagcaaaaaattgctacaaactttctcttatgcaatagtccttgggtacttctaatatttttaggcaagagacaattttctgtactaggaatcttccactgccaggaaaacacagtgccagtaagggttctacataccactggaccatctgcttaataggacatgtattttcctttgagtaggacattagcttttgattataaagctcaactagtataaggcaaaaatattaacatctaggaaggcacagttttagccggggtgtttaaaaaattacagttttgtggggacttaaggggtctttttaacctagggtaagtt

SEQ ID NO: 375061 - DNA, 477 bp, Homo Sapiens
  misc_feature (14)..(14): n is a, c, g, or t
  misc_feature (23)..(23): n is a, c, g, or t
  misc_feature (34)..(34): n is a, c, g, or t
  misc_feature (77)..(77): n is a, c, g, or t
ctccctacccaggntcacatgtnaggttgataanttagacctccaataaaccatgggaaaacatacccccagtccantagagtgcctgcctggaggttaccttccccgtaggaccattgatggaatggagccccaagtttaccagaacccctgagacagccctaaatgttgcttttaggttgaggcatccccgggtaagaaaataatttggatggggtacagaaacgaaaccaaaaaatcttatgggaaataggagagtggctttaataggatggatttaataggaaatcaaagttacatggataaaaacaaaggtagggtaaacctttggcaaagtgtcgcaacaaggttccctcaaggatgccataccctgtgaggaagagggtggtcatcttggtgctccctctccgggtggagggtgctcccggagagattgccagcctgcaggagtcattgcaaataaaaagactgcgcctg

SEQ ID NO: 375062 - DNA, 413 bp, Homo Sapiens
  misc_feature (26)..(26): n is a, c, g, or t
  misc_feature (34)..(34): n is a, c, g, or t
  misc_feature (67)..(67): n is a, c, g, or t
catgggttaggggtggttgggttacngggataantagggtgcctaccccccaaaacaaaaaaactancccccccttttaataaagaagtttagatggaaacagaaacagaaattacatcaattctcacaacattcctttaaaggtgaatcagtaatttaaagccttattctcagcattgaagagagagaagtttaaataaaaacatttatatgactactaagtgaataatggtgtgggactcaaccaatgcaaagccagttaattactttgaaccttaactaaattctctcctaggagtcaaagtagctgaacagctaaagtattccaacaaaggacagtctgacaaaaacattccatattaagtgaccttgatagaagaaaaagatttgcagcccctaagttaacccaagtc

SEQ ID NO: 375063 - DNA, 547 bp, Homo Sapiens
  misc_feature (14)..(14): n is a, c, g, or t
  misc_feature (27)..(27): n is a, c, g, or t
  misc_feature (32)..(32): n is a, c, g, or t
  misc_feature (59)..(59): n is a, c, g, or t
  misc_feature (84)..(106): n is a, c, g, or t
  misc_feature (232)..(232): n is a, c, g, or t
gaacctgccaaaanactggaacttaangaatncaagccctccaagtaacgcctcctaanaggcaaggacccagggtccgctgtnnnnnnnnnnnnnnnnnnnnnnnagcaccctggcaagggaggtccagaagttcctgaagctgaacaaggaaagctggtgctgtgcagcaagccgtggaaggccctggactccggagccaaactcctgaggcttgaaagggattctgccncatgactatctgagaccctcaggcaggtcattcattaaccttcctgtgtcttggtttcccccagacatgaagaagatcaagtgaaatgggcattatcttgtggatgtctcgatgtctctcctatgcactctcaggacacggcccagcacagggcacctgtttgaggtggtggtgttgctctcattgttttcttttgcttctctgttttgataggacgctaagtgccaaaggaattatttaactcctagcagctggaatctccctgctctcaggttcttaggtttacaaaaagaactgtcttgacaggcaagttcc

SEQ ID NO: 375064 - DNA, 457 bp, Homo Sapiens
agatgaggatctgggcttcctggtcaggggaacgtcatgaggagcctgtgccagtgctgtgtgcttggcgtgtgcgtgtcggcagctctgtggtggttcttcagggcaccctgatgggagtccctcgccttctctccacagcgccttgggtgtctcctcctggagcgaggcattgaacctcaggtgatgtcagccctggttcgtctcggcctcagaggagcccggctatttttcctgaacagccccccttcctccctgggagactttcggggtggccagcgtgcttgcttcccaggcaggctgaggtctacctccccgcaggcgtctggcctcaggcctgcagtggatgattgtgggctgtgtggcctttgcctttaggggtcgtcccttcctccataaaataatcctaacagttgtgttttgcgtctattgtggaataaagatgagtattacagag

SEQ ID NO: 375065 - DNA, 475 bp, Homo Sapiens
  misc_feature (206)..(219): n is a, c, g, or t
  misc_feature (383)..(383): n is a, c, g, or t
  misc_feature (398)..(398): n is a, c, g, or t
  misc_feature (420)..(420): n is a, c, g, or t
catttatagaaagtaagcaaaagttaacatctctcatcaaatcattcattacaatttcagaactgtaaacagtttggtagtggaataagtgaatattattggacattcttaaagtgaatatggcaaatctgtctacctcagtggatacaccggtctcagaagacacctgactggttaaaaatgtctgacccatccccgcaagcccnnnnnnnnnnnnnnaaatgtttcccgatcttgtgggtagtcttatgggtaaatctaaggctcctaaaggatttttaaagggaggcttaggcaattagggaactggctttacagtttaaatggggtttttttaatgggggcacacttaactaggaggtgttaatgtgtataattatttngtggatccaagggcntagggtctttttttctggctantacccccggcatattctttcaaaggtcacaggtgttgtggttccccggccatttc

SEQ ID NO: 375066 - DNA, 482 bp, Homo Sapiens
  misc_feature (37)..(37): n is a, c, g, or t
  misc_feature (66)..(124): n is a, c, g, or t
  misc_feature (148)..(185): n is a, c, g, or t
cacagccctgtaacccccagctactgggaaacctganggcgggagaatgcttgaaaccggggaccnnnnnnnnnnnnnnnnnnnnnnnnnnnnnnnnnnnnnnnnnnnnnnnnnnnnnnnnnnntacagagccgagactctgtcctcnnnnnnnnnnnnnnnnnnnnnnnnnnnnnnnnnnnnnnttgagaggatttggtcatcattttactgctctcttcatgtgatggaaatcaattttccttctcaaatgggatcagtatcatttccctagtcatacatccatccagtttttgttacttttttgttggcatacattaatcaaaatagctctgcttcattgaggcatgcagtcctcagactctcggtggaaaggctgtcatactattagtgaccatagtaactttttataccaaaggatggttgctggataattttaatatctttaccaataaagtactttttggaaatacaaagaaaaa

SEQ ID NO: 375067 - DNA, 685 bp, Homo Sapiens
tgcatacatgccccctttctttccccattcctactctgactcctagcttgtacaagatcaggttggatcatgttcagaatctgcattgaagttgatatttttctatactatttattaattttgttgattaaaggaatacattcaaataattttgaaatagaaaaatacaaagatatttactttctattctataaatattgcaacataatcaagggcatattttatacacattttaaattctgcatttttacttatatactatgactatactcttgagttggcacacattaaaatacacacttaactcactgcatatccctgaacatttaaaagggaaagaagaaaattaatgtttaaatattatatgtgaacaaggaatgtgtttttacctaatgtttagtatattgtttatatttaatcaccctgtgccaggaaacttaagtttccatcattttataagtaagagtaatatagctcagagaaagtaaatagtttaccctaagtcctacctaagtggtagagctgggatttgaacccaaggttgtttaactcattgcaccctcccaacccctacaggcttgtagtgtataacatacagttgtgttccatgccaaaccatagtgatttattttctgttatcatgatatatatctttgcgtaataataaatggcactcatgacttac

SEQ ID NO: 375068 - DNA, 527 bp, Homo Sapiens
  misc_feature (438)..(438): n is a, c, g, or t
  misc_feature (485)..(485): n is a, c, g, or t
  misc_feature (494)..(494): n is a, c, g, or t
  misc_feature (499)..(499): n is a, c, g, or t
gttgtagaggagtctagcaaaacaatccctcctagactttgtggtcagtcagcaagcgaagaatgtgggggcctgtgcagctgggcacctgaccgcgtttgctgcaaaggagcagcccccgtctggaggggtaggcactgtggggtgggggcctggctttcttggctgtgagagagaaaatggcagaagcattatggaaagacaaccgtcactctgttacaagcagagaccaaggacttggaacgtcctccaaactctgggcttgagaaatgaaggccgaagtcgctgcttgagaaagccactaaggaaaggagttttgggagatgccaccagggagcccgttcggggggaggcaaaagcgcctcacgcattcttgttccttgtttgcttcttcggttttttagattaaacatgaaatcaaagcttgattaaagcatnatcttgaatgttgcttgctccattcttcttttttcttcggtcccaantacctcgtntttantctgggtttgttgttgtaaaggaaacct

SEQ ID NO: 375069 - DNA, 499 bp, Homo Sapiens
ggaaaacacacgtgtcaaagaaaacattaaatccagtgtttgatcaaaggtacggtattttatccagctgaggatagactgcccggttgaagtgacggattaagaaggccctaaatggtgccctttgagtggcccaaagcacataaatcagactgttgagaagttcaatcagaaaccaacttttagcaaacatacttctcaaaacaaataagcattttgaccttcatgtagaagctctaaatacagtaaattcaagttacaaccctgtggacatgtagactagtgattaaataaagatcaggttactgatggccctgaagaactcatttttgggggttatatctgttgacacttaactatgttatcaattaaaactgagaatttaaggatacatatatttttaattttatttttaaataacagtaagccccaaacatcttaccgtatgacatattggaaaaacaactgtatttccaaaaattaaaaacataatgaaagg

SEQ ID NO: 375070 - DNA, 339 bp, Homo Sapiens
  misc_feature (11)..(11): n is a, c, g, or t
gattgcactgntgaaataattcaaaaactttattgacctataacctgattagaatatgccagatgggaatcaatattgtacagaaagttgtacagaattttttacatagaaaactttacatctgtaccatatacattttgtccatctgaaaaaattttctacatccactgttaatacggaatgcttgacaatcttgtcttttaaccatcagagcacaattcacagtatgattacatttccagtaaatctaacctccgcaaaccatgccagatttgttattttaatatattcaacggttaaattctgtacatagggtaaaatctacatcagggccccacc

SEQ ID NO: 375071 - DNA, 463 bp, Homo Sapiens
ctaaactgaagactctggtgttcccttttgtgataggggagaataatagccccccaaagatatctacatcctaacccttggaaccctgtgactatgttatgtcacatggcaatgggagacttgaggttccagactgaattaaggttgataatcagctgaccttgagatggtgagactatctgggatcatctgggtgggtccaatgtcatcacaatgttccttataagagagaggcaggagagaaagaatcagaaaggcggcagcatgaggaaggctcagcctgacattgctggcttagaagatggaggagtgaggccatgagcgaaggaatgcaggaagcctctagaagctggaacacacccctgctgacacctggacttgtacctagtgaaacccatttcagacttcagacctccaaaactgtgcagtaataaagctgttttgttttaagccacaaaaaaaa

SEQ ID NO: 375072 - DNA, 330 bp, Homo Sapiens
  misc_feature (69)..(69): n is a, c, g, or t
  misc_feature (89)..(155): n is a, c, g, or t
aaattttaaaattattagctgggcatggtggtgtgtgcctgtaatcccagctactcaggaggatgaggnaggagacctgcttgaacctnnnnnnnnnnnnnnnnnnnnnnnnnnnnnnnnnnnnnnnnnnnnnnnnnnnnnnnnnnnnnnnnnnntttctagaaaaagcctaacaaacagataaggtaggactcaaccaactgaaacctgactttccccctgtaccttcagcccctgtgcaggtagtaacctcttgagacctctccctgaccagggaccaagcacagggcatttagagctttttagaataaactggttttctttaacaag

SEQ ID NO: 375073 - DNA, 489 bp, Homo Sapiens
ttccagggtgctgggtgtggcggaacagttatttgtttcaatatgaaacaagagtttgaatggatatcttcaaggggatgcattttattggagacatttattgcctggggctttctgttttcagtctgactccccagctttctgtatcattgttttaacatacatccccttttctcctttattggaagagaagctataattctccctcatttccatgataatccttttcagtctgttttcctcaaaggacaaattcttttcaacaactattgtaattattttcttagagggccatttttaattgccgtattgtttagctaagccctattgtcttggtgtccttcaaaactgtcagttgcattaaaatataggggtgggaggggagctgataagcacattgttgtaattgatttgtatgtttgaattgtcttatcagaaaacaaggttatgaatttcatctgttgagacacaaaaataaaatactttctt

SEQ ID NO: 375074 - DNA, 297 bp, Homo Sapiens
  misc_feature (190)..(190): n is a, c, g, or t
  misc_feature (230)..(252): n is a, c, g, or t
  misc_feature (273)..(273): n is a, c, g, or t
cccaagtaggcattctaggctctatttaactgagtcacactgcataggaatttagaacctaacttttataggttatcaaaactgttgtcaccattgcacaattttgtcctaatatatacatagaaactttgtggggcatgttaagttacagtttgcacaagttcatctcatttgtattccattgattttntttttcttctaaacattttttcttcaaacagtatataacnnnnnnnnnnnnnnnnnnnnnnnagacagcaaaaactatctgangatttccatttgtcaaaaagtaat

SEQ ID NO: 375075 - DNA, 287 bp, Homo Sapiens
gtagctggagaagagtttataatcataaagtacatttttgttattaccttgtggattttaattatccatcttgtctaatcttgttctctgtcatcctagataatgaggtgtttgtgggagcagagctctgcacacaccaggggatgtaataaatgtttgcacttggcccagtatattatgaatgtggcacagtaaataaagtttgtgtacaaaatactagtttatttctatgggagccattatgttcaggatatataaaatgtatctaattaaacaattttgaatct

SEQ ID NO: 375076 - DNA, 556 bp, Homo Sapiens
  misc_feature (457)..(457): n is a, c, g, or t
  misc_feature (465)..(465): n is a, c, g, or t
  misc_feature (470)..(470): n is a, c, g, or t
  misc_feature (478)..(478): n is a, c, g, or t
  misc_feature (521)..(521): n is a, c, g, or t
  misc_feature (532)..(532): n is a, c, g, or t
gagtttcagaggtgattcagtagtaaatgtatggggagaagaattagaaaaacccatctctttttaagcagtcatcattcttaaacatctgaattgttttacaacagagtcagcaaacctttctagcatttctaaaagatggcagtttcttggagaccacatctttgcaaggcagtattttcaaaatataaaatagcccccaaaccaaacctttaaacatgaagggcaaatgggtaaagacttaatattctttttgtgtcaagtatacttaatgtaaatctagttgcttgtgaagtagtaatagtaatagctcctattattttgagcactgactatatgtgctcagcctctgtgcttgggatctgacatcactatctcatttccctctcttcaggcagtttcggggaagggagtacctacccgggggtattgcctttgccccgggggttcaccaggnagtttacntgtanttaggagncaggggttttcacccccaaggtgtttaaaaattccaggagctncctggcacttngggggttttacttcacttaatcgt

SEQ ID NO: 375077 - DNA, 1684 bp, Homo Sapiens
  misc_feature (1409)..(1488): n is a, c, g, or t
cttggcacgaggtcctctccatctgtcccaaggacatgagagctgatatctgtgttcatctaaaccggaaggtttttaatgaacatcctgcttttcgattggccagcgatgggtgtctgcgcgccttggcggtagagttccaaaccattcactgtgctcccggggacctcatttaccatgctggagaaagtgtggatgccctctgctttgtggtgtcaggatccttggaagtcatccaggatgatgaggtggtggctattttagggaagggtgatgtatttggagacatcttctggaaggaaaccacccttgcccatgcatgtgcgaacgtccgggcactgacgtactgtgacctacacatcatcaagcgggaagccttgctcaaagtcctggacttttatacagcttttgcaaactccttctcaaggaatctcactcttacttgcaatctgaggaaacggatcatctttcgtaagatcagtgatgtgaagaaagaggaggaggagcgcctccggcagaagaatgaggtgaccctcagcattcccgtggaccacccagtcagaaagctcttccagaagttcaagcagcagaaggagctgcggaatcagggctcaacacagggtgaccctgagaggaaccaactccaggtagagagccgctccttacagaatggaacctccatcaccggaaccagcgtggtgactgtgtcacagattactcccattcagacgtctctggcctatgtgaaaaccagtgaatcccttaagcagaacaaccgtgatgccatggaactcaagcccaacggcggtgctgaccaaaaatgtctcaaagtcaacagcccaataagaatgaagaatggaaatggaaaagggtggctgcgactcaagaataatatgggagcccatgaggagaaaaaggaagactggaataatgtcactaaagctgagtcaatggggctattgtctgaggaccccaagagcagtgattcagagaacagtgtgaccaaaaacccactaaggaaaacagattcttgtgacagtggaattacaaaaagtgaccttcgtttggataaggctggggaggcccgaagtccgctagagcacagtcccatccaggctgatgccaagcaccccttttatcccatccccgagcaggccttacagaccacactgcaggaagtcaaacacgaactcaaagaggacatccagctgctcagctgcagaatgactgccctagaaaagcaggtggcagaaattttaaaaatactgtcggaaaaaagcgtaccccaggcctcatctcccaaatcccaaatgccactccaagtacccccccagataccatgtcaggatatttttagtgtctcaaggcctgaatcacctgaatctgacaaagatgaaatccacttttannnnnnnnnnnnnnnnnnnnnnnnnnnnnnnnnnnnnnnnnnnnnnnnnnnnnnnnnnnnnnnnnnnnnnnnnnnnnnnntttcacttgctttcaagatgatgaccacacatggattttgatatgtaaatattgcatgtccagctggattctggcctgccaaagaagatgatgattaaaaacatagatattgcttgtatattatgcagttgactgcatgcacactttacatttatttataatctctattctataataaaagagtatgatttttgtt

SEQ ID NO: 375078 - DNA, 548 bp, Homo Sapiens
cactgttagtcaaatcttcatctccaaataatacaaatttgaatgttcaacagtcattcaaataaacatcatataactcaaaattaagacattcatactatagaaaccagtctttaattactaaagttaacatatattattgcaaactaacatagctcaatctatatttgctacactcctaaagtggccgcttatcagtaaggggaaacatttattattgacatgcattactgtgaacaagaaaataaatagggttttgaaaatatctcttaaaaatttaattttaattaacaaaaataaccattcaggttgctgaacattaaaatggccaatctattgaaaatggcttcaataattgcttttaaaaatgaatacaaaactaaacagtgattaaggtgctagcctcatgaataggacaattaaaagctaaaaacattagtgttgattttctataataaacttaagccaaaaacaatgacctcaatatttacttaagacttcttgttttcatacttttctcctcattaatataaaaacaaagagctcaa

SEQ ID NO: 375079 - DNA, 455 bp, Homo Sapiens
  misc_feature (275)..(325): n is a, c, g, or t
  misc_feature (431)..(431): n is a, c, g, or t
  misc_feature (445)..(445): n is a, c, g, or t
aaagctactaaagaaaagccagaaacagcgtaagaatgccctactcaaatatgattcagagacgagggtggggactttattccactggacttcagtcccagtgacaaggccactactattgtgaattaatatcaggctaattaaacttgatgttattaaatgttctatccataaaatttttcattcagaattcttgtttttcaaacaacattctggattattatttagctgtcaaagtagctgtgttcttagaaaaatacatcagtcagggctgnnnnnnnnnnnnnnnnnnnnnnnnnnnnnnnnnnnnnnnnnnnnnnnnnnnacagggagggtccacatgagggccagggagttttgaggacccaactaaggtccaacatgggtagggaccctgttctcttattcccccctcttacccccccaaaaanttaggttcaggacngggtggggca

SEQ ID NO: 375080 - DNA, 420 bp, Homo Sapiens
  misc_feature (40)..(40): n is a, c, g, or t
acccgtgaaatccctttgccgtgtaccccccccattgaanggaataaattttttggccatgttggataaaacgtccagggtgtaaaagtatcccagtatgaggggtaaagccccggattataataaatttgtcaaccttcaggttttccttgcctagccttttctgtgatatacaaagtgcacatacaactacatgggtaggagaattgttgaaataagttatcattgttcaaacaataatttgttggaaccaaatatcacccacaatgcaattgtctacctttaaagaatggccatagagtcaaaaactttcttttgaatcctggattcactatttatttgatgtgagatcacctttacttttataccatcaatttcctcagtgtaaagagtgtattattaaaattccctcgtacggtc

SEQ ID NO: 375081 - DNA, 404 bp, Homo Sapiens
  misc_feature (358)..(358): n is a, c, g, or t
agagatatcaatagatttacttagatccattcacttaacatcaatgcataacacattccaaaagcgagcatatattaaatttaaaatggatcatcttaattgggttcaataattggataaatggtcaaacgattttcattttctatgttttgggccatgcatttcattccttattgatttgctttacttaattaacatatcaattattcattttaataggaatagagaaaataatcatgagaaagagcagtggtagagaatatacttctcactggctgcacacaacatgtatgggcaggtgatgatacccaaacagctaatttctgcagagaacctaaatgggcacatcttgggcacnatgtgggataagtaggaatggtttaggtaatcctaaaaaatgagga

SEQ ID NO: 375082 - DNA, 503 bp, Homo Sapiens
  misc_feature (96)..(96): n is a, c, g, or t
  misc_feature (321)..(321): n is a, c, g, or t
  misc_feature (334)..(334): n is a, c, g, or t
  misc_feature (435)..(435): n is a, c, g, or t
  misc_feature (442)..(442): n is a, c, g, or t
  misc_feature (460)..(460): n is a, c, g, or t
  misc_feature (465)..(465): n is a, c, g, or t
  misc_feature (477)..(477): n is a, c, g, or t
  misc_feature (493)..(493): n is a, c, g, or t
ataaccattccattaagggtccttgtagctgaaatgcaggcagggtggcccttgaatgcatatgaacccatgtgatgttgaatgtctagaattttnttttgtggagagataagagtattttctttccccacttctcccatttattgatgttggagaatcatgccagagctagtggccttgatatggctctttctcagtctcttttgagatggaattcaaatttgctatccccagatgcggtttaaaaggctggcaaagtgttgtcatcaagtgagcgatgattgtgggatatgatgctaccatttgatttgggggtcattnggatgccctattncctgattaaggagcactgatgttatccaatgggaaaagtgttcctctggggctccctaaatatagttgcagtgtttatggggaaggggacttgtccccgtngtgtganttgtgtttggcaagcacngggtnggagagatgttncaggtttagttatccngagagcagac

SEQ ID NO: 375083 - DNA, 505 bp, Homo Sapiens
gggttaaacatgctactgtgtccctgataaattgatgggatgtgtgagccccagagaggttggaggcactggttttgcaagatgaaaagtggaaagaaacagcgggttggggcctagtgttaggcagagtgaagacttcatagttatttcaaacagaacgacaacaaaaaatagagccgtgggataattagttttcttttcttcagaaagcattttgattagcctgcaaagtgagttgtgccttgcgagctgatggctgggttcagagccttcatttggctgaggatgtcggggtgagccctgaggaggaggggatatttgggatgtccctggtggccagttccagggttctgccccaaatattcttttgtgagagagcccccatcccctctcaggtacggttccgtcctgcaggtcagtgagaagctgtcagcaaggtttctttcaggaagcccaacaatcaaaaaagctgctgtttagacagctgatctcttggtctgaaaac

SEQ ID NO: 375084 - DNA, 264 bp, Homo Sapiens
  misc_feature (105)..(121): n is a, c, g, or t
cttctacttacagtaattgcaagaggagacctcacattcaggactggcctagtgaacgtaatccatgctttaaactggccattaaacagtcccacatggttggannnnnnnnnnnnnnnnngagttgtgctttcacaaaaccttgtcaaagacctcatgcaatatcactttgaaagttattttctgtttactacacaaacattgtaatataactgttaatactatttatatatttgaaaggtataaaaggtaggagttaaaaaa

SEQ ID NO: 375085 - DNA, 439 bp, Homo Sapiens
atgctttagattcacacggaaggtgtttgtgtttctcctcccccttacttgcatgtaaatcacaaaaactgtgtgacttacaaggaaagcacgaggcccttgaggaatgatgatgcacattctgctgtgaggaggcccagaaaaggccaaccagggcccaaccgtgcatgatgacagggtgaagagaaggcaggtctgggcactggggcaaagagaacttaagtctctgcagagagcaaggagtaactactgagagagaatcaggacaatcctgcaggtggcccgcttactgttaaatcgtccctctgttgctttatcctctaaaatatgttaagggataaattctatatatatagttatgcatttgctgtcataccagacaattttttatcatgagcacacttctttaataaaaatgagtgatctacgagaaaaaaaa

SEQ ID NO: 375086 - DNA, 292 bp, Homo Sapiens
  misc_feature (70)..(70): n is a, c, g, or t
  misc_feature (77)..(77): n is a, c, g, or t
aatattatttctatatgttaacaacaaataatctgaaaataagaaagcaatcccatttacaatagctacnaaaaatnaaatacctagaaataaatttaaacaaggaggtgaaatatatttacaatgaaaactataaaatattggtgagagaaattgaagaggacacaaaaagggaaagatattccatgttcatggattagaataattattatttttaaaatgtccatattacccaaagcaatctacaggtttaatgcaatccctatcaaaataccagtgacattctttacag

SEQ ID NO: 375087 - DNA, 402 bp, Homo Sapiens
  misc_feature (219)..(219): n is a, c, g, or t
  misc_feature (237)..(237): n is a, c, g, or t
  misc_feature (267)..(267): n is a, c, g, or t
  misc_feature (310)..(310): n is a, c, g, or t
aattcattcatttaattcaaaaatattaaatttatccatgctcgttataacggcaggcactctggtagctactagacatacaatattaagtgatactatatatttgccactctcatagagcttacagtccaatgagacagacagtagactaatagcaatagcaacatgaacaataaaaattaattaaaagttaataaaagtgctgggaaagcaaaaggngcatgtcatggtagagancactgcagcaggggctacttcagtagggtnttcagaacttctcccattcaaaagacactgtggcactattgtngggaaaaaaacatgggcaacctgccccctcttcacagcttcaactggggacctagtatttcccctgaggaaacatccttttccaactttttt

SEQ ID NO: 375088 - DNA, 936 bp, Homo Sapiens
atttttcaagaataaacatttcctatattaatctgatataaaaaacacttcacattatttcaaactagtcaataaattaacattatataccaaaatagcaataagttaacaatcccttctttcacattttaatcaagtatattctcaaaagtcttacaatattacattaagatttaatgtatcaaatccaacagcatttcatctcaatatttaacaatattatgttcaatattgaatagtaaaaagaagctaaactttatctctttgtgtattgatttcagcaattctgacagtgtttgatcctccatgcacgtgtttctacgcatcaagaaagcacagctacaaggttaacccaaagaacaatttaaaagctatttcaatggcaatttctgtgactgagtcatgaaaacagacataaagttcttgaggttttggatgaagaaaaagtctccctactacccagtaagccataactggtggtgcttttttctgatcagtccagtttccaggtgaacattcaaacaacacaccatgttctttaacagggttaagagaagacactgactttgcagaatctgaatggtctccactatttagtcctttctttttctcttccaccaatgtctgttggaaaactgcacaaatagaaagacaacactgatggaaacttctttattagctgagggtggatagagccacttagctgtgccacctcttcaagggtaggagtaataaagattccttgcactgtttctaaggcaacgtagtggaaaagtgtgttctcaggaccagatgtcagtttcactgtgttatatatttctaattctttttcttgaaggtcctttttcaagtttcccaaatgaaatggatttggaagagtagacttctttttagtgaccttaagcaaggtcccactttcttctaaaccatcagagc

SEQ ID NO: 375089 - DNA, 753 bp, Homo Sapiens
agccccccagtgtgtggttggcctgtaatgttgcccctaccctcatgtccccctcaaaagtacacatcctagaaagtgaacaaaggaaacctgtaaattagggactgactccctttgaaactcacagtgaatgtacaaggagtttgtaatgacttcagttggtgacttgaagtttgtttccctaaccaatattacactcttgtttggatttattttactatttcctatcctaacttgtttagcaggcaaacagattgatgcagaccatgttaaattgaaaaagggatactgccactctttaaggattgagtgtagaactttcaccaccactaaattacacaatgaataaaaatacaaaacacataattcacagactatacctcagcattaacagtttatagatattatatagatacttttatatctgtctaatatttttacaatcaccaggtacaccatcattaaatacaagttacagaaatatgtagataccattagttagagggttacttattgcttacgtcagcaagcagcaaataagggcacaggatttgaactgaagggaactacttcctatcaccagtggcgttaagagagaacactgcatttcacaaagcactgcttttatctagtttatagaaccaagagcagcatatatcagaccaataaccactattttagtatgtattatagaattttaaaggatttaccttacaaatggtacctaactactctataaatacgcatgttgtg

SEQ ID NO: 375090 - DNA, 320 bp, Homo Sapiens
ctgtacatagatatagacacacactttaaaagacttaccaagcactttttaaaagaagaaactattttgcagtcctcccctacccactccctgcccttcccactgcagagatgacatcccctcttctcccactggccttttggcagagaatctggttctgtctcttttttaatgtaggaactaactatttttaacttcttcctggggcctgagcagggaagggtgggactggaaggcactaaggggaagggagaagccctcagggcaggccctgctccccctacctccttgccagggcaagggtggagtgtggaagacgt

SEQ ID NO: 375091 - DNA, 218 bp, Homo Sapiens
  misc_feature (93)..(93): n is a, c, g, or t
  misc_feature (200)..(200): n is a, c, g, or t
aatgtgacagatctagcaaattctttttatttacataaaatgtgtacacatactttctctgtacacagaaaattctaagtatatatatatagntatatgattcccacatattttacaataaataatattttactcttgtttctaggtgaaaataaaaagatgtttcaaaatattaatcaccaaccacaaaattacaaaancatgtggtgaactcagag

SEQ ID NO: 375092 - DNA, 186 bp, Homo Sapiens
  misc_feature (35)..(35): n is a, c, g, or t
caagatttataacctcctaacatatacttttttantttattatctttttttggttcaacattaaaatgtggttgagtttatagatgactggtgctaaacttgcctctaaaacaaatagccacattgtttgtatctaaggggagtgaccctagaatattacagaatgctcagttccagtgatttatt

SEQ ID NO: 375093 - DNA, 386 bp, Homo Sapiens
  misc_feature (45)..(45): n is a, c, g, or t
  misc_feature (98)..(98): n is a, c, g, or t
ccaacatccaggcccctgccccaataaaacaggcccccaatttancccccccacagttttaagagcagggaactgatttggtaccataatttccaccngtttaccgtttttagcactccctatcccctgatccttccatggtgatgccacagaatgtccttagactcccaaaaaggaacagcactagaagatgtgagcatatttaatttgtaatgcaaacctgccatttaggagtagaaaatgtatgataaaactcaagtattacatgcagatcattttaattttctactttgctttaatgcaatattgtttattcactccatgtattgtattcagagaaactcctgtattgtttcctactttgtgaaatatatttttataaatac

SEQ ID NO: 375094 - DNA, 504 bp, Homo Sapiens
  misc_feature (20)..(20): n is a, c, g, or t
tgaactggtctggcaacatnaatcccaaaggtggaataggtcccaaaaataggttccaataacagcactacgacccactgtacctttaaaaaccacctccacctctaaccttgggtaaaaactggccttagtcgctcagttagttgtgacaatgtccagcaaagtaggtcttcctagtccaagtagtttagttccaggaagcagcagccaactaagtgggaatggaaatagtggaacatcaggacctagtggaagtactaccagcaaaactacttcagaatccagcagctctccctcagcatcccttaaaggcccaacttcacaagaatcacagctcaatgctatgaagcgattacagatggtcaagaagaaagctgcccaaaagaaactcaagaagtaatgtggccaagtaggtttttgtatcatattagcctaaagatgaaaggcttattattatgatataatctgtaatacactgtaatttaataaaagtcttcataatca

SEQ ID NO: 375095 - DNA, 350 bp, Homo Sapiens
aacttgactgtttttactgaaaagacgaaatgcaagtataaagcgagggtatcttcagcaaagggcaggctgtggggcaggccgtctgtctgagtgggagctgcagctgatgtggacacgggcctccgtggagcctcaattttattacatttgagtaggaatgactttgtgttataacatcaaagaaagaatctgaatatgagggaactgcagaaattaaactttcagtctaattctcagaatgccagagtaagatgaaccctttacagtaatagtgaaataattcgggctcattttcagtagaaactcaagctgcttcaatatgggaaatacaattttgacaatacaaa

SEQ ID NO: 375096 - DNA, 304 bp, Homo Sapiens
  misc_feature (249)..(249): n is a, c, g, or t
aactcagttttattcctgtgcctacgcaaccacattattggatgcctagaaaatgttcaaacttctaaccaagtcactggtaaccctctgtgattttggcttaatcaggtttattcatcagttttgcccatatttcacttgagctctagtctcattaccttaattacagcttcctgtatgtctataggcttttgcttctataggacccaatttatatgggtatcaactctatatggaagccgtttttgnaatctcctaggtaatggctttaattttcctaaaattcctgttattatcaaatcag

SEQ ID NO: 375097 - DNA, 422 bp, Homo Sapiens
ggctatttccaactcaaacacgcaagcaatcccataataaaaacttttcctataactgcaaggtaagggtaagtcagataggtacatgtgtgcatgtacgcatattaaccacatatttaaaatgtcccacgcctcacacagacactcctacacagccatcagctgtacaggcctacagacctggctcatgcccttggatgtggctgactctacttctagactgtcctgaagagattatctgaatcttggacagagattatgatgtcatttataacagtgaaaaaacggaaaacctcaatagccactagaagaaatgactgatgagtaaattatattaaaataacacaatttattttttcgtggaatagattaagaatggtgatgcgggaatacgcttatggtatattaaatgagaaaacaag

SEQ ID NO: 375098 - DNA, 495 bp, Homo Sapiens
  misc_feature (318)..(318): n is a, c, g, or t
cctctcttaagtaaatgaaaaccctattgtttttgctaactaaaataaggttttagttatagtataattttataagtggatacagtgcttgaaatcacatttccattcttccagggctggtgatgacaaacaattccgaatcaacaactcactgaaattgattccaactttgtagaagaaagtgtcacacacagagtcagcccccattcatgtttccccaacactcaggaatcatcctaggctttgtctgggtaggataggagtgtcaagtaggaaagtgggataagagggtaaagggggtattaaggtatttgcctnaatgttaatgttaaggctggcttaatggaatgtcaagggataatttatcctccgtgtacttaaaacaaccttttattgtttaggtcactggggtattaggtccccttaaaagggactttgggggggttactgggggaacttcagggctgctctcccgttgttacccaaggcctcccc

SEQ ID NO: 375099 - DNA, 521 bp, Homo Sapiens
ctatactttaaaagacagatgggtaaacagaggattacaaaaggatgatggtggagtgtgtcaagaacagcagaggcacaggaaaaatactgtcatgcatcacataacagggttgagttctgagaaacgtgcccttaggcaatttcttcatgtgtgaacatcatagagagtacttacacagacctagatggtatagcccactacacatctaggctatgagcctgtatagccatgttagtgtacctgaatactgtaggaaattgtaacacaatgatattccatgtatcctatacatatttaaacatagaaaagttagttacagagtatatggttgtatagtcttatgggaccactgttgtatatgcaggttcattcgttattgatcaaaacatcattatgtggtgcttgactgtacctacaactatctggcagcttcattgtaaaaagtagcatttgaatgagacttgttggatgaataggaatttcccagagggacaaagtacaaggaatggtatttgttt

SEQ ID NO: 375100 - DNA, 1190 bp, Homo Sapiens
  misc_feature (36)..(36): n is a, c, g, or t
  misc_feature (487)..(527): n is a, c, g, or t
  misc_feature (655)..(655): n is a, c, g, or t
taatacctataccataaacatataacacataaacantccggggtggataataaacctatggtgaaatcctgcccaattaattccagcaggtttaatgccttttaaaattgttttggcaggggaatgaaacaagattaagattccatagttaaaaacaactggtaaagaaatctttggggaccctcaggtttggaaggcatctgagccacatctaactatgtcactgctgtgtcaagcagttttctgaattttctatgaaaatgttattcttgaacttatatcttaagtaggcaattagcatcccttcccagtgaaaaatttggggaacatgaatgttaaaagttccactttcatcttttcaaattcatcaaaaatttcaaacaagatcacctggatttggctcaaattagaggcctgaatcttttgtttttaaactgaaacatttacgtaagtggtcatggccccagagcttgtctacaaacttaannnnnnnnnnnnnnnnnnnnnnnnnnnnnnnnnnnnnnnnntcaatactgttccattcacttggaattagcttgactgagaacagaaataattaaataagtccttagatggctaatgtagaaacttcgattgaattcaaaaggctatgattgtttttccatggaaaaanaaagacaatgttttcgtatttctggatcttcgctctttgctaagttatcaatagtctttgatttgagccctttaaaacttgaaacagcaaaatgtcagatcaatgggaagcatttaaaatgccaaagacaaactcatgtttgctggagaacaattaacctcattaatttgaaaggcagctgtggtattggctatgagttatgttaatatcctattgaaggttcatcttaaatctttcctaaaggtgtgaaagagaattaactggaagaggtcatgacccagggctaatgaagaatgttctaggattgcaaaaatgcaaactcattgtttcactgacatagtaagtaagagaattatgagtgataatctcagttttgtcttcttcgtttctgcagaccgctgacactttatctgaggaagttaatctgaggaatgacttcattttaagcaatttagttctggttccccggagagttgcatgctttgaaatacaacccccagagaagaaatgctattggtcaaatcgttctttggag

SEQ ID NO: 375101 - DNA, 440 bp, Homo Sapiens
  misc_feature (378)..(378): n is a, c, g, or t
  misc_feature (393)..(393): n is a, c, g, or t
  misc_feature (400)..(400): n is a, c, g, or t
  misc_feature (414)..(414): n is a, c, g, or t
  misc_feature (421)..(421): n is a, c, g, or t
ccttcggaggtttcccatctctgagtaaaagccatgttcttttcagcggtcatttgcagcctaatctattctggtccctgccgaagctcttgggcctcctctgctgatttcctcttctcttgttaaattgaagtcacactggcttccttgttattctttaaagcagccagctggtccaactcctcttactcagcttggaagacactttcccagatattgttatgattcactcccttgccacctccagggaatttgcttaaatgccacctcaatgaggccgccttttacaaccctatttaaaattgtaccttcctcaagtatctgggtaccctttcttgcctttatttttctctgtaggcacttaccatctaggcatantatatattttacctntttgtanttgtatctattctnaccccantagggattgttagggttcc

SEQ ID NO: 375102 - DNA, 444 bp, Homo Sapiens
  misc_feature (26)..(26): n is a, c, g, or t
ttcccaaattacaaagttgaggcccnaaaccggaaagacccccaaattaaaaggcctagacaaccgtaatgaaaatttttaaactatttgtatgtccattttgaaaagtgtaccgccttaatggtaaaagtgtttttccatttgttccattgttttccattatttgtgatcatgttgtctttcaatacaggcataaaccttcccactcttgaacaaagcagctgctttttaaaagcggtaattgcttctttaccttttatttcttttgtaaatgaagcttttctttaagaatgtgactttaaagtgttgtctattgcataaaacagttgacactcacttattgtaaagtgaagattgttctactgcatgtgaagtggaccatgcagatttctgtatgttctcagtatgcatcactagataataaagtcttttgtgaacaaaaaa

SEQ ID NO: 375103 - DNA, 374 bp, Homo Sapiens
  misc_feature (31)..(31): n is a, c, g, or t
  misc_feature (56)..(56): n is a, c, g, or t
  misc_feature (92)..(92): n is a, c, g, or t
  misc_feature (246)..(246): n is a, c, g, or t
aaaaacatcagcaggccccataatgccctgngcctttccacccttagcagtgcccngcctaacagtgaaataatgtgcctcattttccatantcgcactgattactcctagggggcgcagatttacccagagagacatatcatgaaaccccagcaaagggatactgcatcctagcagttctggtggtgttttatcattaccttttcacttgagcataaaaactgtttgacaaatactaattgtaanccagcagagctgaatagaatattttaagaaacaaccctaattttcatgaattacatatttgagttcatactgctgcatgtcaagaatgaaaatcactattacaatgatgaaataaagggcatctgtgg

SEQ ID NO: 375104 - DNA, 490 bp, Homo Sapiens
gagctggcccggcgaagacagacctcctggacttgaggccgacttcaccaaatccgccccgggaaaaggcgagggcaaaggcggggcggacagacccagctgcggctgagggactgcggtccctagcaaggagcagagatggggagctggatccgcgcagaaccccggaaaagcgccacagggattgcaccgagaacaaatcctccgcaccctcgcccagggctggggcgcagtgcgctggtgctcctctagctgggcggtccctgtgctccaaacgagaagatagctgacttccgaatccttcactctttgatcctgacccaagccactcgtgccactagggagcgcatgccttatgggaatactcgcttcctgtcttccttgtggttgaagcctttccgttaatgcccagagcctcccagggtgggatttagtggggttagggagcaaaacagggttagtgggagacattcagcagagcaggcagctt

SEQ ID NO: 375105 - DNA, 451 bp, Homo Sapiens
aggtttagcctttggattatggtcacacaggatattctgctgtgttgcaacccatgtggtgataaggctcacagacctgagctctttacgggagcatcaactcacagttaggggactgggcgtggctgattgagggtttggaactggtggctatgccagctattccatctcaaaacagccttgaggccccttttcaatttgagcagctgctagatatcttatcagagctcagattccagatttcacatcccagcagccggttctgggtagcagatcaatttccaactggaaaataactatataatgtatgcttattggaattctgccacagcagggaagcttgagtcaaaatgtgtttcccctttgaaaggagaaggaattggagcagcttttcctgggaggcccagggtatttcttttctgggtatcttgggctgaaaattttgttttac

SEQ ID NO: 375106 - DNA, 534 bp, Homo Sapiens
ctggaagaataaacacagaagaagcaaaaaaggaaggaactttctcactgaaagtttctatttaatattaagtcttaaaagtactcctggaaggacaaaaggtgttcttaataaattatattcgcaaatattggatttaatcctaccagtaatgaagcagtcagttactttctagatgtgcagaaatacgtaatgaacaaaaaaactaattcctattccattttttattaggtccacagttatttcacttctaaataaatatggttttttaaaagtggcacgcggtgggaatgtaattgagacaggatgggagttcctagagaaattttacttcctcaatctgacactccaccttacttaaaattacagtcttgggtctgtaattcccttatctgactctcaaggaaatgacaaagtaatgcctagattggactaaacctcatttaacttcaagactgacctttctcaaagttgaaccttcgtcttgtgaggaacagaaagatcaagaactctgaagcacctcgactttccacc

SEQ ID NO: 375107 - DNA, 421 bp, Homo Sapiens
  misc_feature (116)..(116): n is a, c, g, or t
  misc_feature (151)..(151): n is a, c, g, or t
tgcctaaacttgaaagcccattagaccttccttaccccccaatacccacaaaagtttaagtggaatccaggagtatacccaaggcaggtggagtaggggagctgggagtggtccanccccgggcaggcaatgagggattgtgaatctgtgnagaattttaaagcaatgatacagctctaaatgcaatgtactatccctggacttagccctggaaaagaaaaaagatattagtggaaaaactggtaaaattcaaataatgtctgtagtttggttaatagtattataccaatgttaatttctgtgttttgataaatgtaccatggttatgtaagctggatgaaagatatgtgggaaatctctctactatttctgcaactctcctgtaaacctaaaaatgtttcaaaataaaagatttaatgct

SEQ ID NO: 375108 - DNA, 519 bp, Homo Sapiens
ctgcagtgtaggtgatggccacctggtggcacatcacactaatgcatggagcttctcatttgtcttcaggattctgaaagtaaagccaatgtttggatgttatgggagctatgcatttcattgtattgtttcttgttaatagttttagaaaatactcttcacattatagttcagccatcaaaaaaaattcacccagaaatgaaggtactagtattctccatattgcagaaatcgtatttagaatttgctttaataagcagtgagttatagagaacaggattatgtagttagaaaagctaagaaaaatgggaaacgaaaagagttaaggttggacttaatggacatatggtatgggcatatatatgtatttttaaatagtattgctgctgttttaactattttaataaatatattacaaaatttatggcaatttttaaatctttagaattattacctgcgaatatctcttaatgaatttcgttagcttctctttgaaaatggctttttgtggtttttctt

SEQ ID NO: 375109 - DNA, 444 bp, Homo Sapiens
gctgggagctgacattcaagaaaagtgcattaaaaattccttgagaaggcatattcttttgagagccgtaaatgaaaagtgcattcacggagaacatgctcctttgttgtgagaggaaagaaaggactgttgttgcctttaaggaacaggtttcccagttccccggaatgtcagggtcacatgaggaatgggtgagcacttagggccaagattgtcgtgtgcttggcccggcagcttctctctaagtgacctctccagcatcactctgtgccagtgctcatatctgaggccacttgagtgtcacgaggcagagcctggaaacattagctttggaaaccgttccttcctttttatgtggaggaagtaaggtttcacaagacacctaagctgggacatggtgatgtggccacttgggatagttcccaaaagcagaaaagcagccag

SEQ ID NO: 375110 - DNA, 483 bp, Homo Sapiens
  misc_feature (14)..(14): n is a, c, g, or t
ggagagtccccaanccggccagttccccaaaaaacctaattccactgccccctaaagtttttaattccacctaagaaaacaaggaatggtccactccaggttccaaaattggttcctaggtgcctatgccatgaccataagaggagaattgggaacttatcccttcaaatagcccataatcccacaaaaacacatggactgcctgatcctgccttatgaatattttccaggatcccatatttagtcaattttactaagtaaaatttttagccttgctacttattgcctgtgatgggggcagggtattctggattgctgcataaacatcttagtcatcttgctcaggataccgttaagtccagatgtaaaagcgtgcctcgcatttatccgttcactttctgattctgttctccaaagtcagcttttgaagatgctactagccaggaatatttcttgaaaattcagttatttgcatatgtttgc

SEQ ID NO: 375111 - DNA, 653 bp, Homo Sapiens
  misc_feature (33)..(33): n is a, c, g, or t
agggagcacagaatcctaccgcagagcgggcanccagggtaccaccagtaacttttccctcctactttgaagctcaactttcacatagctttagcttggttgtttaaaacttttccaatataatacagcaatgagaataatttctttttaaaaaaaggcaggaatctagaatgctagcactgttgcttacctgtcagtatcacacgtaagtctcaaaccctactgaatcacacaggtagggtttaaagtccaagatttaaagaaaaaggaaaacaaaacaaactgatgaaatggaaattgtcatcagtcatgcccagggaagaatcccaagggttttcaccaggtgaccaggtttccaaaggacatgacacatgttatatacatatgctttccagagagggcatgttagtgaacacggggaactatacatagagaatctaagcttgtgtccaggctgccctgcacacttcaaaaatgtacaactcaggtgcaaatgttccatcaggttgtctggtgcagaaagcacaaagcaggcaacaaggcgggctttcacatggccaaggggaagcctcagcaaagcccctctcaagctgcagtgtcttcataagttgcacggccctggctaaaggacacagtgcacagttaccaaaagg

SEQ ID NO: 375112 - DNA, 430 bp, Homo Sapiens
  misc_feature (64)..(64): n is a, c, g, or t
aatggtaaaggttaattgtatgtattcctttccccccccagttttttggggttttaacaagtangggagtattcccccctggcatcacatttccacacaaaccttttagtcaagatacccttttaaagaaaagccccaaacccgagttagaatcaccacacgtttggaagtctgttgagtagactacgacaaggatcaatgtgcttttcccttggaaatttactatgtcctttggccccaagaggcctttatggagaacaatctgttccctttctttgaaatcagaaaagtagaatagtctgcaacaggtggctatctagaattttgttccaaagcattaagaagtcaatcagatcaaagctaaagaggggaaaatgttaagacactcagagagaaactacttaaacatcgataaaggagatatattttt

SEQ ID NO: 375113 - DNA, 444 bp, Homo Sapiens
tcaattcagaattagtaactattatcttcctaataaactatttcagaatgttttttagatatttagaactgttgcaaaaatagaacagacagtttctatataccttagaccaaagttcctccattattaatgccttacattagcatggtacatttgtcacaattaatggaacaatattgatatagtattactaactaaagtctgtattttcagatttccttagtattttacctaaggcccttttgttaatgccagggccccatccttaccatatgatattagctgttacatctcctagggcaactcttgggctgtggcagttgtaactatcaatttctgaacacttactctttgccaggggacactggggcttctttatgtgttaggctttccaattcaccacaggaaatcagagttgtggcattattaactggcattttttca

SEQ ID NO: 375114 - DNA, 340 bp, Homo Sapiens
  misc_feature (12)..(12): n is a, c, g, or t
ctaaaatttatnagtgaagcctaagttgcctaagggggcctgtaaaaatggcccccaaccgaaagctggataaagctaagtgctaacctcagaggtgacagagagggagtctcatgatgcctgagataatttctggccattaggggtgttcacgttacagttacattacaatttgaaatgaaagatgtttaacctttttttacagaatactctaaaatagggataataacacatcatttgtctatctgatacaacttcataatatttatagatacttttgaccctataacatattatccctattgaattctttctgccagatcactagacttaaaaaaaa

SEQ ID NO: 375115 - DNA, 163 bp, Homo Sapiens
tttgttaaaatagctttcttttattagggaacttttgagaagttaaaaattctgcttctgaattgtatttgaatagtatgggcttacaacaaaaaccagataattcttgcttctattctttttgaatatttttcccctctaataaagtacttgattcgaatac

SEQ ID NO: 375116 - DNA, 328 bp, Homo Sapiens
gacagtggaatttagccataccaaggactatactggaaacagacttctgctgctgaatgtgccctgatgtgaccaggttgcacttggaagagatcctcgcgtcttcatgaggcacttaaagcttataaaagaactgcggctggaactcatctggtgctccccatgagagtgctctgcttgtagactggccagtgtccatgaaacaactgtaaataccaacatgtgtgcatgggtcaacagtcttggccatttctcatcaaaagaagccaaattcatgatcaacatctctgaagtttcaagtaaggcccacacttctttgaattactct

SEQ ID NO: 375117 - DNA, 259 bp, Homo Sapiens
aataatttgagtaatttaatcagataacattcaagtttatccccagctcatttgccttttattcttcatttcagttagttacatttccactggttatcatcaaggttgtgcatgcgccttgaaatgttcacaaaaggtccacgatacagggatttataataggctatatgttatattcagaatcccaggggaactaatagactctgaaaatattgattaagcaagatgtaaaaatcttatacagtttcatctacaacag

SEQ ID NO: 375118 - DNA, 341 bp, Homo Sapiens
atgattatataattgttaaatcacttaggagaattgtaaaaataaaatgtacaacaaacatgtagcagctacattgctaacaaaacgtgtatttccataaataagtgtacctttaacacttttcaaagaacattatctccgaaaatctcgttttattttcagtaaaatagctactgaagtgactccatttccttgaggtaaccacaaggaaaacaatgcatagaatcaaggcaattacacagacaattcaggcatttactcaaaaattcattttttaataataggtaactttggtcgtgtaaatacagtcttgtcccaggtgtgggtctccctattacagt

SEQ ID NO: 375119 - DNA, 472 bp, Homo Sapiens
  misc_feature (392)..(392): n is a, c, g, or t
  misc_feature (397)..(397): n is a, c, g, or t
  misc_feature (458)..(458): n is a, c, g, or t
gtcctaatctacttgtcccctgctctcgatgcccaagagtcaatgggctctgtgaacttgtccttgattttcattattgccctgggctccattgcgggcatcctctttgtaactatgatcttcgtggcaatcaagtgcaagcgagacaacaaagagatccggacctacaactgcagtaattgtttaaccatcacttgtctcctcggctgttttataaaaggacaaaacagcaagtgtctgcattgcatctcggtttctcccattagcgaggagcaagacaaaaagacagaggagaaagtgagcctaaggggaaagagaattgctgagtactcctatggggcatcaaaagaaatcaaggcaaggaaggaaaaaattcagttaaggaatggacntccgnctggggtaccccggggatgtggggagggagacaggacaaggtggaacgtttgttcatttgntctttccctggacc

SEQ ID NO: 375120 - DNA, 275 bp, Homo Sapiens
  misc_feature (161)..(161): n is a, c, g, or t
cactttttgcttttttaaatgtaatcctccacaaacaatggtaatttatattataattttgacatagaaaaatatataaattcaaacacttaatacataatacttttcacaactgaatttgtctctgtttccccaacatcaaggccccatgaacaactcangccaaagctaatttgctccaactgaacacccctgctgcctgttgaaacaagggactgtcacagaatgataatcacctataaacaatacatttaggaaaagctctgaaatatagc

SEQ ID NO: 375121 - DNA, 563 bp, Homo Sapiens
gctaaatacaatatgcaaaagatgatggcaggtccccgactaaagaagattaatgtgttcagttttcactggttaagtgaattataattttaaatattccattcttatttatgtctttatgataattcagactattttattttgaacctgttttctactctggcaaagaaagataggcagaactattagtgttccatatacattatggaatagataaagcttgagagataaatgacctaagttttccttccagagagactcttccattttctctcattacaaaaccagaagatcagctatgtggggccatcagctcccagcctaaggtcctataacccgaagcttgaaggcaatcagtacctctgcttttcaaaggtaaatgcattcattttctttgattcagttataagcaagtatatattttcataatattcttgacattacctgagaaataatacttcatgctaaatcttttactgccacttttctcattcatttggtttatcatttcagtttaatgagaaaaattaataaaggttttgattgcactattttattaacct

SEQ ID NO: 375122 - DNA, 498 bp, Homo Sapiens
  misc_feature (25)..(25): n is a, c, g, or t
  misc_feature (60)..(60): n is a, c, g, or t
atgggaaaaacggaggtcctttttntcctttttttaaaaatactcctacaagcatccctngggtagaacagaaattcctaagccagatgggggagggggtgtgtgcacacgcaccccatgcatacacactatttctctatatttatatatgaaaaggtctaacatgcatgtcattattagaataccagaaaagattgaggcagaaaaatatgtgaagaaaaaaatggacaaaagcttcccaaatttgctgaaagtaatttactaattaaaaaagcaaacttaaaacaggatgaagtcaaagatacctacataaagatacatcataatcaaactactagaagcaaagatgaaggaaaaaatcttgaaagcagccagagaaacacaactcattacatatagaggaacatcgattcaaatgcctgtagatttctcatggagaaaaacggaggccaaagcacagtggaacttgatgtttgaagtgctaaaagaaaagaactg

SEQ ID NO: 375123 - DNA, 498 bp, Homo Sapiens
  misc_feature (422)..(422): n is a, c, g, or t
  misc_feature (453)..(453): n is a, c, g, or t
  misc_feature (474)..(474): n is a, c, g, or t
gtttctcctagccctattaggctacactgtagtcaccttctatgagagcaagggaaacaggaagatgggctcctggagtccaaacaggatgtggacgtccctggtagttctctcttttcacacaacttttccctgagaactgtcccagtcaggtggaccttcacaacaacacgaacagctaaaactctgagagaaaaccctgactttcagaaagcataaagctgagaaaaaacaacccgggaaattggagacatggggataaaccagacagtgggaggaaagctgggacgaggggatgctcttaattctgtatatggaatcaacaggaaggtcccggggttcacccccgaggcttgccaaaaatgttgccccaaacccaaataaggcacagggacagggttttggggatttacttcagggtnccttacacaacagggcccttgacaagcattnggcgggggagcagttgggcanagccaaggttttttgcaacttgaa

SEQ ID NO: 375124 - DNA, 604 bp, Homo Sapiens
gagggaacaaatctagaaggcatgcctgagatccttgctgtgaagaattaggtcttcccacaaagatgatttctaaagccagaccccagaatggatagtttatgctctggtattgggctgccaagtagacattttaggagccagccttcctctggaattccttgactaaaatatctgccttgatgaataagacaaggatagtaggaaggtttaggataaagatcttcatcagaatatccacctccctaaatgaacaacaattttcttaactgaagagtcaacatgcagatgctcatgaggaccgagccactttgcaaagtaaaaatcaactcctataattggagaagaaggaaaacttcccttttaaagagcttctagaatttactaatttaatataatttttctgaccagacaactatggtctcaaaaatattagtgagtactgatctattacttggtaaattttattgatgtgaaagcaaaaagatggcctttttgaattctatcaacttctttcttcaacaattattttttcttacatggattcagtttctgatgattttactcaatttaacttctttctggaagtcccataggtacaggg

SEQ ID NO: 375125 - DNA, 235 bp, Homo Sapiens
aggaagaactgataagttttgcacaattatttaactcctctgttaggccttccttatttcctgttctctttttaaaatttgactaagatattgctaatgggcttgggagcctataaaatgatcagaattgttgccttatgttttgcatgtttggggtaacattggagccagatgtactcttaaataaaaggtaggcctacaaaaccagtttctcagttgcattcaaaatgtgatt

SEQ ID NO: 375126 - DNA, 373 bp, Homo Sapiens
  misc_feature (63)..(63): n is a, c, g, or t
  misc_feature (333)..(333): n is a, c, g, or t
  misc_feature (356)..(356): n is a, c, g, or t
cggcgagcattcactgtggaggccctctgtgagaaccacttaggcccagcaccaccctacagncatttccaacttctccatccacttgctctgccagcacaccaagtcctgccactccacagaccccatcccagcaccactgccatctgccagaacagctgtgtggtatgcagtgtcctgggcaccaggtgccaaaggctgggctacaggcctgccacgaccagtttcctgatgagtttttggatgcgatctgcagtaacctctccttttcagccctgtctggctccaaccgccgcctggtgaagcggctctgtgctggcctgcttccacccnctaccagctgccctgaaggctgncccctgttcccttaacc

SEQ ID NO: 375127 - DNA, 498 bp, Homo Sapiens
tacatatcacaaactttggtaaataggatagtaatctgaagaacttttgccctttttaccccatttactgtaactcttgtttctaggtaatcgttctctctcaacaaactccccaagcgtctgtgtaacaagcccacatgttctaacaaatgtctcccatcgcacttcaacagccaggtccctattttttataacgtattaaccttattattttccttattattttaaaagaatctatgcacattagcaaaatttaaaagatagagaaaaatataaacagaaaaaattatgtttacttctaccaccctaaatcaactattatcaattttatacatattttactccatcttttttcaaagtttcttacattttccaatgtcattaaaattctctgtgaatgtaaattttaaaaactgtacctactgttttttggaaatctgtaacaagctatgtgtaatcattcttctaatattaaacatattgtgtccagaaaaaaaa

SEQ ID NO: 375128 - DNA, 432 bp, Homo Sapiens
  misc_feature (16)..(16): n is a, c, g, or t
  misc_feature (158)..(158): n is a, c, g, or t
  misc_feature (166)..(166): n is a, c, g, or t
aaactcctccggcagncctaacccggctgacccacttccccagtttgccccatatccagaaatcctcggtcccaagatgcatattttccttttgtaaacccgacctgttagaaattaagaatatgtcctgccagtcaaaaaaatcctatgaccaacantttttttnccttaatggttccctaaaactcctgtagttgatggtgtcttgccttaggtttaatgaaagagattttaatatatggcgtggttatgtggagttgtatctctatcagtattaatgggctcgggatgatttatattcaactgaacccccaaattcaacattttgtgttgaatatttattttatcagttattctttatcctgtactcattttggatacttactaaagtattgtatgtatttgttataataaaatggcttgccgtgtttg

SEQ ID NO: 375129 - DNA, 497 bp, Homo Sapiens
ctacatcagagcattcatactggcgaaaaaccctttgagtgtaaggaatgtaggaaggcctttagacttaattcatcccttattcaacatctgagaattcattctggtgagaaaccctatgaatgtaaggaatgtaagaaggcctttaggcaacattcacaccttactcatcatctgaaaattcataatgtaaaaatctaagaaagtcttttcaacttctgtgttatagaacattctatgaatgtagtaattaatctattttgctccatacatgcaactgcgttggcattagaggttttataccattaaaagagtgtgacaatgtattgtagtccatcatcactcaaacctgaaacttcagcatatttgttctaaaaactaatcctgttataaggaatgaggaaagacatttaccgttcatccctattcccatcactttgtgtcatactgggacaagacggttaactgctctgtgccataattttttaatttatgac

SEQ ID NO: 375130 - DNA, 522 bp, Homo Sapiens
  misc_feature (13)..(13): n is a, c, g, or t
  misc_feature (26)..(26): n is a, c, g, or t
  misc_feature (37)..(37): n is a, c, g, or t
  misc_feature (63)..(63): n is a, c, g, or t
  misc_feature (77)..(77): n is a, c, g, or t
  misc_feature (84)..(84): n is a, c, g, or t
  misc_feature (125)..(125): n is a, c, g, or t
cggggccaaccanggggaaaaggaanaattccggggngaaacaaacccctaatttttccaagncatttttaaaatanaacagcntaacatactaaagcctaaaataaactttaagttacttaaantgtcctaaaaattactactctatgtatcactcagacattccaatagaaatggataaagtcaaaatacaggctttcccttccttgacttccttggcagctggaagaataatcccattgcctatactcctaatacagaccatatacctactcttcttcctgatgccctagtgattctgtagcaggtcatgatctaacagtttgctctcagttcatggaacggcagcaatgatatgatgctcagtctttggtctgtctaaatgtgcccattcttcaaaactcagcattactccaccctttcccatcatctctctttgattttctggtctgaagtctccgggttgtacacttcccatttattatccctttgtcttagtaattcatttggagataacataaa

SEQ ID NO: 375131 - DNA, 384 bp, Homo Sapiens
atgtctctgtataaaagtttctagggaaatatgaatgagaaaaatatattttgcacaggtataaggcatgatcctctacccagggagggacaacaaaaacaagtctccactcccactgggcagggaaggttggaaggaggtatacagactgtcattacacctgctggcccctgctgtttgaggacctatgctgtgtctacctgggggtgggctagagggagagccctacctggatacccccaggctttaggaaccaagcagcaaaggcccttctttgtggaactccctgtatgtgcagtattttggccagagaaactgttggtatgaaaagcctctgtgggtatcatttttctcttggtaccatccagacagggaagaaccacc

SEQ ID NO: 375132 - DNA, 459 bp, Homo Sapiens
  misc_feature (414)..(414): n is a, c, g, or t
cagtaacacctatccttctgtgctgaggcagagaggtattgccacgtaagttgctctgcctaccagggctgtaagaaccatcccgggccaaaagcagagtgtcttccttcactggctatggtcagcactgagtggggcaagctggggccacatgcactattatccctcagcccgtgcctctcccaggtagtatgaatggaaagaagatccagaaggaagctcagcatacagccatgccttcctgctctgtctcggcccacccagtcaaagatgcaagcttgtcccttgctttctcctttctctcctcttggtgaggtgtggcccaatccttgggagcttcgctgttgtctccaccggtgcacatctcttccactgggctccacatctctctccaaagaatgcagagccactaantcctaccggggaactttcccagccagaaggaggaaaggttgtttc

SEQ ID NO: 375133 - DNA, 515 bp, Homo Sapiens
  misc_feature (17)..(17): n is a, c, g, or t
  misc_feature (23)..(23): n is a, c, g, or t
  misc_feature (63)..(63): n is a, c, g, or t
  misc_feature (70)..(70): n is a, c, g, or t
  misc_feature (78)..(78): n is a, c, g, or t
  misc_feature (87)..(87): n is a, c, g, or t
aaattgccccaaccttnaaaaancctcgaaacctgggttctttggaaaaaacggcaaggaaanccccccntccgtccntcccatcantgcctggaagcccttgtgaacactggggacgaatgccaggaacttggggtcctagggggccctgaagctgaaatgcctgccctctgtctccttaacaacctgtggaatgttccagcaaaagacacagccttcttggaggcccggcttatgtgtcctgggaggtgtggcagaagcagtcccagccctgaagggatgctgcccatccctaaagagatgaggtctgtaaaggagtgtggtcccagaggagggactcggtgtctagaactgtaattagtgtctcaaacctgtccacttcttgtcacttcttcaggaatcaccaggccaatctccatcagctctcccaagaaatatgacctgtattaactagctcctaatgaccttcaacagccattctccaccacagcagcaaaataaaatcttcgaatgtt

SEQ ID NO: 375134 - DNA, 172 bp, Homo Sapiens
ctgtctcatccctcaatttccagtggcttccaaaagaagtgcttccccactggcagtcaggaaaccagagcaggacgaaggggtgtgggagggaagtttttccttttggtgtagcatctaggccgggagtgagatggttcccaagcccacctgtcgctcggcctggatacag

SEQ ID NO: 375135 - DNA, 336 bp, Homo Sapiens
  misc_feature (111)..(111): n is a, c, g, or t
gaatcactgtacatggtggtcttgactggaaaggtctctaaggctggggaggaccctacttggcttggtatttggagccctgtctgtaggggctgcccagcagacagggcntcctgtcgtcagtcattgcctcccccaatcatgtcagagtctgctcaaccctttggaaaatatggctgggaggggacaaggggcttggggagagatgagcatttgtcaggtgtctagcactaggccaagtgctgggcatatagcggtgagtatgacctggtctttttctcactgtctgatgaaaggatagatgggcaaataaagtgggaacaaattcttacaagt

SEQ ID NO: 375136 - DNA, 112 bp, Homo Sapiens
taatggccaaactgcagtgactcacaaggctcagctcggggaagacacagcccaagcatgctcacatgggctacaggcaagactaatgtctctggccaacagccctcaaggc

SEQ ID NO: 375137 - DNA, 734 bp, Homo Sapiens
  misc_feature (78)..(78): n is a, c, g, or t
  misc_feature (90)..(90): n is a, c, g, or t
  misc_feature (94)..(94): n is a, c, g, or t
aaaaaccagttcaggaaagggagataggaataaaggtttctccatgatgagaattagaagtgcagacaactgggccanacattctttccnagcnccaggcctaggagagactcctctttctcgtctggaccagggacagatggcgggtccaccccaacacaaccaaggtgggtgactttggttcccaagctgagattgagtgggggcctggtgacctctcatgacaactcctgggcttagggggcaggtgaaatgatgggaggaacagcaggcctctctcaagatcaggatgccctttttgtccctctttatagaacatagtctatttcacagcccctgagtggacagtaattacaatggggggaagatgatggcacagggaatgacagagcccagaatttgggggtgggaatgggacagggggtggaggactgggcacaatttaaagtttatgtggaagaatagatgtgagagaataactaggaaattttgtaaaagaagagtgaagggactcatcccaccacataataagacattagaaattgacaatagttaaaattgtatggctggtgccagatgagacacccaagtaagcgaagagaagagaagttccagaaatagatctaagtctatgtaagacatcagtgtgtggtaaaggtggcatttcagcatggttggggaaaagagtggcttccaacaactggaggacccaggacaagacaggttcagagtcc

SEQ ID NO: 375138 - DNA, 330 bp, Homo Sapiens
aaacgggcaactctggaccccataatatcaaaaactttcactactggaatgcctcatagcatttacagagatccagaaatggaggctgtaaaaattatgactaggtaagagttggctagagacaaggaagcatttccttggccaaaaatagagctgaactctcctggctgttgccagcattacaccacatacatttccaccagttatttgaagaccccttcacaaccaaagacagccagggcttcgcaaggcccagacaccccgctgactcatcccatctgcagcgtgcaaagtgctatttgtcactgcctagttatattccactctgcc

SEQ ID NO: 375139 - DNA, 325 bp, Homo Sapiens; identical to SEQ ID NO: 58111

SEQ ID NO: 375140 - DNA, 338 bp, Homo Sapiens
gtgctccatttgatcctcacagcaaccccagggattaaacagtggggacttagcacacccgttttacagatgaggaaatgttctctgagaagaacctcagagaaggagaacatcatcggtggcctggatttagagagtctgtctaccatcgcctggtcttgagtgatctcagtttggcttttgctaaattccctcaaaactgtgaacattcatcttctcccaggcttagtttgtccctgtcccctctgacctgaacctccatcctgaccaactatcttccataatgaacttaacgacagcagagacttaagcactgtcttgattttatcattgtctcg

SEQ ID NO: 375141 - DNA, 432 bp, Homo Sapiens
  misc_feature (396)..(396): n is a, c, g, or t
acttctgttaggttatatattatagcattagtgatctaagattaccacaaaagcttggcaagtccaagaaatgccttcatgtatgttattacataaacagatgttcaaagaggagggtttttcaaatttgttttaatatgacactatccaaattaagaaatatgactggtctttgttgattttgctaaaatagttattaaccttgatgatattaatctcatgtgtacttggcacagtattaacacatagtctatctagttacagcccagtttcattaattttaattatagcagaataaacagtgtcaatccaagacccgaatgtccattccaaatcaccttaaggcttcctgagttatttgtttggtttggtttttttccaccttaaggacttatnaatcccatgggaacgtttacaccagggtcaagtatt

SEQ ID NO: 375142 - DNA, 535 bp, Homo Sapiens
  misc_feature (28)..(28): n is a, c, g, or t
  misc_feature (67)..(67): n is a, c, g, or t
  misc_feature (78)..(78): n is a, c, g, or t
  misc_feature (83)..(83): n is a, c, g, or t
  misc_feature (91)..(91): n is a, c, g, or t
  misc_feature (122)..(122): n is a, c, g, or t
  misc_feature (135)..(135): n is a, c, g, or t
  misc_feature (180)..(180): n is a, c, g, or t
cccacgaacctccgggtcgggggaaggncccccaaacaacccgccggtccacggcccttggtaaaangtaaagccccnggaanggaaaaantacctggaccctgggtgtaaaccgtcccccnggggaataatagncctaagggtgggaaaaaaacccaaaccccaaacaaaataacctcnggaagccttaaggtgatttgggaagggacattcggggccttggattggacactgtttattcctgcctataattaaaattaatgaaactgggctgtaactagatagactatgtgttaatactgtgcccaagtacacatgagattaatatcatcaaggttaataactattttagcaaaatcaacaaagaccagtcatatttcttaatttggatagtgtcatattaaaacaaatttgaaaaaccctcctctttgaacatctgtttatgtaataacatacatgaaggcatttcttggacttgccaagcttttgtggtaatcttagatcactaatgctataatatataacctaacagaag

SEQ ID NO: 375143 - DNA, 335 bp, Homo Sapiens
  misc_feature (82)..(82): n is a, c, g, or t
  misc_feature (183)..(183): n is a, c, g, or t
  misc_feature (239)..(239): n is a, c, g, or t
tcccagtgcatgatcctgagcaagattatcatatctagatacattagtttttatctgtgaaatgggaatgatagcacaatcntcatagaattgttggtaaggattaagtgagttgatatgctcaaagtgtgcatgctggcatagaacaagtcactgtttacaagcctttaaagaaggagctgntctggcactgtaaacttgaaccttttttccccaaatctaatggatataggcaaggnaattatatttatataaaataaatgtttgactacctttgatcataactttatctcatcttgacctgttcctttgaaaagatataatactgatatgtg

SEQ ID NO: 375144 - DNA, 873 bp, Homo Sapiens
  misc_feature (836)..(836): n is a, c, g, or t
tggagatgcattgctccttctctgaagggaatcccaaagccttgtgtctacagagaacctggagttcctgaacctgatgctgactagtgaggaaagatttttgttgttatttcttacaggcacaaaatgatggacccaatgcacacaaaacaaccctagagtgttgttgagaactgtgctcaaaatttgaagaatgaacaaattgaactctttgaatgacaaagagtagacatttctcttactgcaaatgtcatcagaactttttggtttgcagatgacaaaaattcaactcagactagtttagttaaatgagggtggtgaatattgttcatattgtggcacaagcaaaagggtgtctgagccctccaaagtgaggggaaaccagggcctgagccaagctagaattccctctctctgactctcaaatcttttagtcattatagatcccccagactttacatgacacagctttatcaccagagagggactgacacccatgtttctctggccccaagggaaaaattcccagggaagtgctctgataggccaagtttgtatcaggtgcccatccctggaaggtgctgttatccatggggaagggatatataagatggaagcttccagtccaatctcatggagaagcagaaatacatatttccaagaagttggatgggtgggtactattctgattacacaaaacaaatgccacacatcaccctttaccatgtgcctgatccagcttctcccctgatttacaccagcctcgtcttcatttaagccctatttccatgcatgttcccccaaacctggcaaggggtttccccattgggctaatngcattcgagttcaaaattcaaatggtttgggtttttt

SEQ ID NO: 375145 - DNA, 431 bp, Homo Sapiens
  misc_feature (408)..(408): n is a, c, g, or t
aaaaaagtcaaccccaacccaaccccacaccaaaatggtccaacccccgtaatccaccccgtcccagaccctgttccacactcctcacatgtttaagagttgccaaccgtaatgtacagatggttttataatcctgatttgttttccctcttaacgttagacccacaaatagtgctcgcctttcctatgtagtttggtaattatcattttagaagactctaccagactgtgtattcattgaagtcagatgtggtaactgttaaattgctgtgtatctgatagctctttggcagtctatatgtttgtataatgaatgagagaataagtcatgttccttcaagatcatgtaccccaatttacttgccattactcaattgataaacatttaacttgtttccaatgtttagnaaatacatattttatagaacttc

SEQ ID NO: 375146 - DNA, 464 bp, Homo Sapiens
  misc_feature (30)..(30): n is a, c, g, or t
  misc_feature (54)..(54): n is a, c, g, or t
gggaaagttgggaaagccaagttcccagcnggggttccctggaaggagtttcangtgaaattgccccaaactgaacccagcatcccattcgcccgccgtcccagccccctagtttgccttgtttgggttgacttgtttcctttcctgcctcctcattggttcaggaatgaatgggaaatggaccaccaagttaaagcaggatttgccttcagaccattgctttcctcttctcttctctatcaagacctttctatcgagtgaacttctcagtgaagactcttaagtagatttcccagtgcatgtatattcacgtacataggtacaggttgggtgtatacatattaaaatttggatatgttcttttttagcgggtggatgggctgggaaaacttataatactctctttcgaattgagcacagaataaaagctatactcccccagtacatacacacacaagtaaaag

SEQ ID NO: 375147 - DNA, 515 bp, Homo Sapiens
ccaacggtaagtgtaccccatgtgcttgcttgcaggctcgattcaaggtaactctcgaatcaggagagagcaaggcaaaaagcctccggacatgcttctttgggaaaggactttttctgtagctgcagagtgggcaggaggaagaaggggctccccctgaagaccccgggcagggacaatggaaaagcttcccagccccgagctgatgtttcctcacctatcactgcttataggacagcatccaaatgctttcatgtcactcagcccaggcaacccaaaccagtcctggctacacccagaaataagagttacctctgcattttctgttgccatttttctggctctagaagtatctgatgcgcgactatgtcatagaatgtccacgcatctcagagtagtctatttttctgttcagataaaaaatatatatatatgtatttttagcaaatttataatagggcaattgagtctaatttcttcttttgtaatacagaacaatatcttaggaaaaaaaa

SEQ ID NO: 375148 - DNA, 279 bp, Homo Sapiens
gaaagtgagccggccatgaccccatccaaggagggcactctaatcgtccgccagactcagtccgctagtagcacactccagaaacacaaatcttcctcctcctttacaccttttatagaccccagattactacagatttctccatctagcggaacaacagtgacatctgtggtgggattttcctgtgatgggatgagaccagaagccataaggcaagatcctacccggaaaggctcagtggtcaatgtgaatcctaccaacactaggccacagagtgac

SEQ ID NO: 375149 - DNA, 529 bp, Homo Sapiens
gctcggtacccaacaaccccggacaagctcactgctaatgagactcagtccgctagtagcacactccagaaacacaaatcttcctcctcctttacaccttttatagaccccagattactacagatttctccatctagcggaacaacagtgacatctgtggtgggattttcctgtgatgggatgagaccagaagccataaggcaagatcctacccggaaaggctcagtggtcaatgtgaatcctaccaacactaggccacagagtgacaccccggagattcgtaaatacaagaagaggtttaactctgagattctgtgtgctgccttatggggagtgaatttgctagtgggtacagagagtggcctgatgctgctggacagaagtggccaagggaaggtctatcctcttatcaaccgaagacgatttcaacaaatggacgtacttgagggcttgaatgtcttggtgacaatatctggcaaaaaggataagttacgtgtctactatttgtccggggttagtgggagatcct

SEQ ID NO: 375150 - DNA, 495 bp, Homo Sapiens
  misc_feature (14)..(14): n is a, c, g, or t
  misc_feature (30)..(30): n is a, c, g, or t
  misc_feature (39)..(39): n is a, c, g, or t
  misc_feature (46)..(46): n is a, c, g, or t
  misc_feature (59)..(59): n is a, c, g, or t
  misc_feature (69)..(69): n is a, c, g, or t
tacccatttatccngaaaaaagcccctacngtgacctantttaccngaaatttcctacngaagcccccngaagctggagtgttaaaactgcctaaaactgccatataattgagtcacataatatagtaacaatgccatacaatttccttagatatattttaatactttgactactattatcgtttgtttactggcaagtgctagatgataacaaaatattaggaaaattgaaacagccctttattcttaaatagatttttcctctagatacatgattgtagttttaaaagatatatacaataggaacacattccactggtaaaattattttgagtgactattatgaaaataaaaatataaatatttcagggtggtatttcacaaagaggatagtattcaaccaaaaccagcctgatttttttaggtgcttcaccatgcttaagaaatattgttaagcagaatccaatagttaaaacattagagtctacatctatt

SEQ ID NO: 375151 - DNA, 419 bp, Homo Sapiens
  misc_feature (11)..(11): n is a, c, g, or t
gaacaaaaccnggaattggaaccccatgaatgcccctaccgtcaaattggggaggccttaaacatgctgacatgttgccttcaggtggcccatcacataggtggatagtatttctgccccgggtttccagaatggtctttgaagagctcactgatcatggtgtattccatggtgcataacagacagattctgtggtagtacctaatgcaggcagaggtgccttcctgcaggtgtgccagagcctttggtaatgagccattatgctccgtcagtcattctgctgtaaccatgcatagtcatcctgtttccttcctcacagtatatggagttggcatgcattgttccttggtagaatttactttgtctgccatattgataatatccacttcagcagctacactatgacattcccttaaaaa

SEQ ID NO: 375152 - DNA, 584 bp, Homo Sapiens
  misc_feature (415)..(415): n is a, c, g, or t
  misc_feature (422)..(422): n is a, c, g, or t
  misc_feature (453)..(453): n is a, c, g, or t
  misc_feature (485)..(485): n is a, c, g, or t
  misc_feature (498)..(498): n is a, c, g, or t
  misc_feature (507)..(507): n is a, c, g, or t
  misc_feature (514)..(514): n is a, c, g, or t
  misc_feature (519)..(519): n is a, c, g, or t
  misc_feature (526)..(526): n is a, c, g, or t
  misc_feature (551)..(551): n is a, c, g, or t
  misc_feature (572)..(572): n is a, c, g, or t
tgacctcaggtgatctacccaccttggccttccaaagtgctggaattacttgtgtaagccaccgtacctggcctattggaacccccttcttgaaacacctgtgtgagcaccctgcttaccatctaccagtgaccacacccacatagggttctatttcagtgagactacagagccaacaaagtgcactagttagctgtgatggaaaacctaccaagctttactgatggatctctgctgaaaagaagtaggctaggttatactgaaaccatgagcaagaaaaatgttcagctggtcatgttgggagtcattgggaatattctagcccatgatttcattcacattggctgaactctcagctccacctattacgtgagcgtggctagtcacctaaggtctctgagtttctttgggaaantaaagtngttagggttgactgatcccccagatgttctngcaaactcagttttcagatattaggttttccntccgggggagctnttgaaccgntttttancaggnttaggcncggcatgcaagggtttagttatatnggggctttacaaggggagtantggaatgtgtcc

SEQ ID NO: 375153 - DNA, 483 bp, Homo Sapiens
  misc_feature (39)..(39): n is a, c, g, or t
  misc_feature (50)..(50): n is a, c, g, or t
  misc_feature (88)..(88): n is a, c, g, or t
gggaaaatcctaggctgaacaatgagccctccacacacntaaaacaattnagaatagattcccctgtcggcacaaaggactttgtgancccgtatgttcctgggccacagaggttgcctgcaaagcttccttcccctcagaattcccccctagaaacacatacaaagtaaaaggagtctggagaattccttccccaagcaagtggcagccatatgacgggagaggtcccaacgcccagctggtgggtatgggtgttagcacaggagctgagagtaaggggctgtttcctaatggcagaaaaacatctgctgagcctagagctgcccagagtgaggtgcaggggatttcatggagagatcagttttgtccctctgagaacaaaatggcccagtccctgaataaaactggagattgaaccgtttggagaattagggaaagatacaagacaattgaaacttagatacttattaatagaaacactca

SEQ ID NO: 375154 - DNA, 330 bp, Homo Sapiens
ctggtgggaaaggagggttcctggaaggcttcctcagaggtagtggcattgggcccaaaacttacagtagggaagagcatgtggcaaggcacagaggagatgggagcctcccctggtgaggggtccagtggtgacagagctcagtgtgggtccagagatggtgtcaggtgagggctgagaggggagggcaagtgccccttgagatgggctgaacgtgatgatgatctgtggccagtgggagatgatagaagtcttgaggttgggaatataagaattaggtctcttttagaaagagaggacatggagaaaatccatatatttttagctacc

SEQ ID NO: 375155 - DNA, 332 bp, Homo Sapiens
gaatgggcactaagtgaacacaggaggtactttacaccaaataatgcacttctctatataggctaatggaatctatgggtaaacctcaatttcaaaatgattgttgaacccaaggatcagctcacatccgttccacagctaaaactattattctttgccttcctctaaactctgatgtttattacaaccttatcaatggcaatttataagagaaaagcataagaatttccctcaaaaagtgaaaccaatggggaaagggagagggaaagggctctaaatatctgagatgtcttttgtggtggttggttagcggcctctttttagcactgaca

SEQ ID NO: 375156 - DNA, 175 bp, Homo Sapiens
gtgaaaaagatatttaattgcaaaatagaaaagtaggccagagtacagttttaagggtaattgcttttttatacagtatagataacctagagggatttcagggttaaacagttcataaagcaataaaacactgaaaaataaagcaagaaaaaggggtttgaagtaatattttacc

SEQ ID NO: 375157 - DNA, 460 bp, Homo Sapiens
  misc_feature (57)..(57): n is a, c, g, or t
  misc_feature (63)..(63): n is a, c, g, or t
  misc_feature (77)..(77): n is a, c, g, or t
  misc_feature (104)..(104): n is a, c, g, or t
aagaaatggttaaggcaactccttcaagcccaaggggaaacacatgttttgtttccnagctcnactttgtacccctnacctctgcaaaacacgggaagaacccnggaccccctggcatgcatgctggcggcggcatgccctccccttcccacaagccccatgctgctgcagagggagcctgtgtttgcaaaacccagtggactgggactgggtctgctgtctgagcagctccctggtctccggtgggaactgcacacaagtccactggcctggcttggccccaggcattgcaattgacagacatttgcatttcatacggtaaatgaggactcagcacagccaaccataatcagcatgtctgggatagactggtctagaataaaaatgaagtttccattgctttgtttgctttaaaaattccacaattaaaatatctgtcattgaaagcttagaaaaaaaa

SEQ ID NO: 375158 - DNA, 197 bp, Homo Sapiens
cacatcatgtcatggtgcggaacctggtgttttatctatttattgtgccgtgtttacagttttttgtacactgtaccttcattggttcctgtgctgtagtaaatgtgttaggtagctgtggactccttggtattttgtaaatggtataacataacttggttcccctctgggtccttgagttttctgtgtatcatgtg

SEQ ID NO: 375159 - DNA, 408 bp, Homo Sapiens
  misc_feature (370)..(370): n is a, c, g, or t
atcagagattgcatgttggtgagaaaccctataaatatgaaaaatgtgggaaggcctttatcagtggctcagcctttgttaagcatgggagaattcacactggtgagaagccactcaaatgtaagcaatgtggaaagactattagcggtagtatcaacttacagtacataagagtattcatactgggaagaaaccatatgagtgcggggaatgtgggaaagcttttctagtatatggaaagcttacccggcatcagagtactcacactggtgaaaaaccctttgggtgtgaggagtgtgggaaggccttcagtaccttttcatacctggttcaacatcagcgaattcataccagtgaaaaaccttacgantgcaaagaatgtgggaaggcctttagcactagctcacc

SEQ ID NO: 375160 - DNA, 372 bp, Homo Sapiens
  misc_feature (19)..(19): n is a, c, g, or t
gcagctctacgcaggagtnctccaggttctgcagggaagtagggctgagggctgacctagaggattgtagtgctttctaatcttaattgggcccgaaatctctttgagaatctgatctaagcacctacttctttccatagaaaaaatgcatatcctcccaattttgcatgtagttcagtaggttcatagatcctgaagtctaaccaaagacgtcagattaagaatccttgatgtattaaaaagaccaccatactaaatcccagatccaaatcctgatttgagcaagcactcagttaaatgtcttaatttggaaagctctcccccacaaacctgccaggtggccttgggcaagtcatctgccgtttctttcta

SEQ ID NO: 375161 - DNA, 319 bp, Homo Sapiens
  misc_feature (31)..(31): n is a, c, g, or t
  misc_feature (202)..(202): n is a, c, g, or t
cctggatggctttggaaatgttcctttcaanagtgtttcccgagggagctcgagcaagttcactgctgccaacagctcacctccagggccttcccttctcctgtctttggttggcaggctggtgtcaaggttgaaggcatgggttttggtgttggcccagcctgggtccaaatcctggctctggctctactccctgcttgancttgggaaagccacttgacctctccaagccccatatccgtgtctgtgaaatggggttaataatacctccctcccaggattgttggaaaatcaaattaaatcctattgtaaagcctgg

SEQ ID NO: 375162 - DNA, 494 bp, Homo Sapiens
  misc_feature (28)..(28): n is a, c, g, or t
  misc_feature (54)..(54): n is a, c, g, or t
gagacattgactttaggatcccagaagnggacccaacacaaaatatcatgtcanttagaaggaaagagtccacagctttaatcctctcccagcacctgccatctgtcactgtgattaccccccacagtactatactttggcagattcctcagacacaaaaaattgaaaatgattatgagtaaacttggggctattgtcattctcatccagaacagtaacaatcacagccgcttggctttggaggggaggggtcccattatccctggcagttactgtaaaaatgaatcgttcttgttcttctctgtcaaatactctggaggctgtcaaaactcctgtttttcggtccagatcaaagaaggaggcattcggtccaagctgataaacaatgtctgcatttttcccactgtcttcatctgtggcactaatagttgttaagtataacccacgtcggttgttttcagaaactgacagctcaattacaggctggttgaaaa

SEQ ID NO: 375163 - DNA, 411 bp, Homo Sapiens
  misc_feature (73)..(73): n is a, c, g, or t
tggacaccaccagccaccagtccctggcatgcccagtgatcctggttccctggcttgtaggggctccagagcntgcttcctggttcctcaagggcagatattggacactccttatttgtcaccaaaggatgactgtaggccgtgtgctggcctttctttctaagaagctgctttgagctcctggactcacctgaggctccctgggggattgacactcagttctgtcactgtcaaggatgcagagagctggtggtaggtgggaagcatggtgtccacctgcctgctgaccactggaccgctgctccatgctgaagaaaagttgacagtctccaggggacatttcagccatgctgaaagggaggctggcagtggtcatttggcccggatctaacatggcacctcgtctccaaa

SEQ ID NO: 375164 - DNA, 370 bp, Homo Sapiens
  misc_feature (212)..(212): n is a, c, g, or t
ggaaacaaatattgatcagagggtcttgtagagaaagtggttaaaaactgacctttttatagcctggagttgatttctggaaacttattttatactttttgaaggtaatttaaaagagatgattctttattaaagccaaaaagttgaattctattaggtggataataaactcttttgctttctttgtatggtggttttgtcattttccctcnaagggcctcatatctgtcctcttattttcaagcagtcccaggacaaagggatggttctagggcccttttctctgactttctgctggcatgccatctcccctagtggattactgaggactgaggatgcacgtttctaagggagaattagttgcccgact

SEQ ID NO: 375165 - DNA, 357 bp, Homo Sapiens
ctcatgatgatctttagtggtgatcagggaatccagcttttcttaaaagtttttcctcaaatagaacaatttcaaatgatacacaacttttgggaggccctgagagtgaaatctctaccatggagctaccagagcaaccctgcagatagaagaaaaacatgcactactgctaaggagcagggatgaccacaggcacaggcaaccagaaagcagaaacaggtgacttccagaaacccccgctgccccgtcacgcacctcccgtaacaagaacgcagcacgtcacacagttctcgcgctgctaggtatctagaaacagcagaaagcaagtcctttaaacaggcagcatgttcatttata

SEQ ID NO: 375166 - DNA, 465 bp, Homo Sapiens
  misc_feature (400)..(400): n is a, c, g, or t
  misc_feature (445)..(445): n is a, c, g, or t
ccgatagggatctcctgtattgtgagtgcggccaaaaactctctcttactgatgcagagaaagttctcagagcccaacacttacatcgatggccccagcagtgcacaggcccaggcctcctccccgacgttgtcctgcctggacaatgcaactgaggccctcccggcagactcaggcccaggtcccaccccagatgagccctgtatgacgacgtggacctgtcagagctcacagctgcggtgggagcctaccgagggaagccacccctgttgcagatgacccaaatgagagagaatttgaccgagtgttacctggggaccttcacacctgttcaagttccttttcttgcatgggccccagcagttgccggggcggagggagaggcagggcgcttgggacntggggagtttcagcattcatggggaggtttgaagggacaactttnaaggaaggttttagggcagg

SEQ ID NO: 375167 - DNA, 477 bp, Homo Sapiens
  misc_feature (35)..(35): n is a, c, g, or t
  misc_feature (74)..(74): n is a, c, g, or t
  misc_feature (104)..(104): n is a, c, g, or t
  misc_feature (163)..(163): n is a, c, g, or t
tagtggcgggccacctgtaggccccagctacttanggaggcctgaaagtggggccagaatggtttggagccccnggagtttgaggttaatagtccagcacatgnatcgtgcccactgcccttcccagcctggatgaacagagtgagacccctaactcctaaanaataaataaataaataattattaacaaacatatcccataacacagacttcagagttttacttcttgctcccacctcatgtccacaacttcatttctcctgtgtgaaactcacagaaacaatagagtatgcaaaaaatataaactacccaattatagctggcaaagtactctgacatacaagaagaaaaactgaagctatagcaaattctccaaacaatgtagaattgccatgatctcttataattacagaaaaagggcatttggtttttccaatttaaaaagaaagcacttttttcctatttacataaagttac

SEQ ID NO: 375168 - DNA, 593 bp, Homo Sapiens
  misc_feature (152)..(152): n is a, c, g, or t
catacttcacccccatccagccaaatgatagcaattcagttggagcaactatcctgacaagttatgggatgtaattaattagacaaagcaccaagaaatttaaaaattgaaattataactgaaaaacacattttaactccaaacacatgagnaaagttgctggtttgttttatgccaataggacaacctagctctgcagtgtgaactgtaattttgccaattcagtaatataaataatttaaaaacaaaaattatcagttcaccatggcttatgttttcaccacacagaaagaaagtactgacaccccttcctgaaagtgaatggacatacatgtgcccaaagctgggatacctgtatattaagggttaaaactgacaaaatacccaaatgagttaccaaatctctgtccttataaatgtgtgaagtgggctttgggtgtcggacaaaccagcactgttagtttggtttgggatcactcaagttgctcacctatcttctaaattaaagtgatttagaatgtatttgaaggttaagattttgtaatggtttttgagacaagcttccaaaccaaggctggaaaaaaccagtctct

SEQ ID NO: 375169 - DNA, 349 bp, Homo Sapiens
tggtggcaaatgaatttatcattttagtatagttttcgataaaggatatagcaacatcttttgataattgtgctttacaacttgaatgctgattcaaggcattatttggatgtgagtttaatcttttcagccttgtaaatgggaaaatatatattaaaattgattgtcaaatacagcatttctttggaaaccaccttaaaacattagtgctatggttatgagtgtatgtgccagtacttaccagtcaatgcattgtggatatgagctttcgttgactgcttctctgcagtcgttgatgctaataaatattgtcctgtttcttcatataataaattaatttttcaatttc

SEQ ID NO: 375170 - DNA, 435 bp, Homo Sapiens
  misc_feature (19)..(19): n is a, c, g, or t
  misc_feature (36)..(36): n is a, c, g, or t
  misc_feature (46)..(46): n is a, c, g, or t
  misc_feature (118)..(118): n is a, c, g, or t
aaataaaattccaaaatgngtaaatttcccccttangagtccaaancccctttcctcaaaccccagttcctgtgagaccttaacaaccctaaggttcctgaggcagtggcccagcaancctttttcctggaaagggcaagatagtaaatagtttccagccctgcatttcctctgtcctcgattaccccagctctgcagttgtagtgggaaagcagcccatagagaatacatacatgaatgggcacggctgtgttccaataaaaactttatggacaataaaacatacgtttcatactcacatctagatatataagtcttttgattttttaaccataaaaaattgtaaaaactatccttgggccagctttgaagaaccttgccttattaaggcatccagtgaatgtaaataattaacttctctcctctgcattctag

SEQ ID NO: 375171 - DNA, 357 bp, Homo Sapiens
gagtgaagtggagctgataggtccatagtatataagagaacgtggcaggccaaattaaggggcaggctactgctactctaccccagccaattgttggagtgcaggagggtgagtcccaggttgccaactcttctgatttttctagggatgcctgacattggaattgccatgcaaagtcttctattttaaatgttggaacaaatcctttaaagtgttacaaaatatttccaggccaaacccgaaaatgcatgtgggctagttttggcttgtggactctcttctgattaggagtttggaaaaatctccaacttcttttgtctccctaggagtcctttggattataataaaaaaaccatt

SEQ ID NO: 375172 - DNA, 401 bp, Homo Sapiens
  misc_feature (289)..(289): n is a, c, g, or t
  misc_feature (372)..(372): n is a, c, g, or t
gttacagagatgttgggcagagtatgcaggtgtttcattgtgaactctagctttgatcatggtaaaaagttaaccttttctattttttaatggatgttataccaactattcagaggaactcatacttcaaaaatattaggaaaatctgtcttatagtttctctaataaatatctgaaatctcagtacgacatgaaagaatgtcagaccattgttattgttgaaagtcatttgatgaatggtaaattctatggaaaagtaagtgatttgcatgtataatatcaggaaaanttaaggcatcccaagtgtgactgggacaaagagagcagatgcaccagtgcctgtgccataaaggtccgaatcccccatgtgtnctcttttcagagctgggccagaccgggaa

SEQ ID NO: 375173 - DNA, 291 bp, Homo Sapiens
caagcaggttggtttggcttgtgtgactatgatggtgcctgattttgagcagagcaatttgtgttgtgacattttaaaatccattctggcacttggtgatgaatgtgttggctggcagctaagaacttgctagaatgcaagtatgcaagtcttcaccatttataatcgacacttcctttccaggaaagagcctttctaatctttgaatcagtggatttatcaatttgcataaaatatgccatcctcaatgaacacatttatcatctaccacttaactttccttctgttaaa

SEQ ID NO: 375174 - DNA, 540 bp, Homo Sapiens
  misc_feature (25)..(25): n is a, c, g, or t
  misc_feature (31)..(31): n is a, c, g, or t
ggtggtcatgggggagaaccattgngggaanttaggattataaggtaaaaagtgtgggcatattctccctcttttctaccaaagggttttcaaatgggttccctgaggttttttgtggttgtcccgtgttgttactgtggttctggtcaaccaggttggattttggtccttgccctttccttctagttctccttttattaataggaaggcaggcaaaagccccatttatgtgtgtgttttcccctcagacagctttcatccactgctctgcactagaattgcacaaatcttcatggtgagcaattttaagaaatgttagtgaaaggtagaaattatttcacaaatcagtttctctgctccttcatattaataataatatttggcttcccattgctctttggagttgtttattaaatatgtgtttttgacaacctcctcattagtttcttaaatgagtactggtttgtaaagaattatcaacattatccattccatttatgaagaagaggagaacagctaataaactgtattgtaaaatcc

SEQ ID NO: 375175 - DNA, 881 bp, Homo Sapiens
ataatatatgtgctattcaaaaaatgtgatcatttaggacattatcacaagttgctatggaaataactgaagacttcctcaggagaaggaaagaaaatgaggaacataatgatagagtcggggctcgatgcagctgaaatactgaatactgaaatactagaaaccaacaaaactggtttctagaattctccagggatttgggcttgggaaacttggtaagaatagtttttatttttgaacattcaactttggttcttcaaagtaatctttaaacatgggaatatgttttcaagacaatttataggacatacttatgtagttggtgaggtcttctcaaaagtatctacctttgttagataataacaagtgattaagaaaggggagatatggttttatactcataacaatttcctgtgccattctctgtacacagaggtgattcatttactctcccattagtagaacttgcactttgggctgtctgttctagtatttgggaagtgtttatgcttccttccagggaccatcttatgatcagaggcaggatgtctgtgagatggttagctagagttagcagtgtccggggagagtggctttagaccagtcagtaccttgctctttgtgcatggtgcatgtcaagtcaggaagccaagaaaccgttggcattaaaatctagatgcataggagatccttgctatgagttgtgggatagggagtggctccatctatccttgtgggtgaaagagtccaggagctcctttagagattgtcaagtcctgagcgatgagctgcccttaatcctcagaagccttacaaaaattgagatgtaccatttctaccctttgagaaaaaagaaatagaaacttacttgatgcagaatg

SEQ ID NO: 375176 - DNA, 321 bp, Homo Sapiens
ctaaattgtggttcacatttatgctaaaaattgttccttatctgaaattcccaatgttaaataaggatcttatatttttatttgctaaatccaacaacactacattgtgttttaaagtgaattcggaaagaagctttggtggttttacattgcagtctttctcactgttttagcattagtcctatacacaaaattttccaactatatgtatttatggtgctgtagagagtctactgtaactctaattctaatttttgaaacagttagtgctcaaataaagatcgataactcctctggccatccagtagcacactgacagaa

SEQ ID NO: 375177 - DNA, 285 bp, Homo Sapiens
gtttatctgaatttggtatgtgtatttttaaagtcatcactttagagtaatatatcacagtgtgttaagatggctaataaaaagaaaattatacttggatttacttttccatgtaaaactgaaggactgagatgtaagataccaatttggtgaaataaggatttagctcaacattgtatgtttttgagcttggccattatttaagacaacatttgagagttttgattacttgacatcctaatgtgctaaggtatcaacaactaaaaaataaagtatcatgaaaat

SEQ ID NO: 375178 - DNA, 226 bp, Homo Sapiens
cactgaagaaaataaacaaactctaagaggtgtgcatatataacatttctttagatctttacctaaaaggaattttaatatattattggttgatgtaaattttgtttctgtggagttttgtttgttttgctttttgtagactgccatgtgcaagtaaaattcctgcttctgccatgttaaaattttaatatattttaaatgataataaacagagaaaacaaaattt

SEQ ID NO: 375179 - DNA, 250 bp, Homo Sapiens
  misc_feature (143)..(156): n is a, c, g, or t
gtctattttacatatcaggaaagtgaacatgtttcaatatagccatatatattgagaaggaacttaccaccccttcttccaatcgaggcatttcatttgttggttgaagcagatgagaactgtacagattgaaaatgatttgnnnnnnnnnnnnnntagaaaaaaacgaaaaccaattggtgcaactctccttgtaaccaaaggccctttctgccttctgtggtcatgtaggacctggcccttccttcct

SEQ ID NO: 375180 - DNA, 316 bp, Homo Sapiens
  misc_feature (75)..(75): n is a, c, g, or t
aagttatcacattaccatgtctccaaaaggcttctagtaaatatgcatgtttctttcttagcaaagaagtgatgntaacacaatgggagtcatgaacacctaagcttatgtgcaagatcccaaagggaaggagctataagggagttgtggaaggagaaaaagcttaatctaaaatcttatttagaaatgattcttctcaaacccctgcttactactactggaaaataacaccaccaagactgagaacatttcagtagaggagacaccacggaagccgtacactgattttcaacactaatcattagatcacagataa

SEQ ID NO: 375181 - DNA, 462 bp, Homo Sapiens
  misc_feature (359)..(359): n is a, c, g, or t
  misc_feature (381)..(381): n is a, c, g, or t
ctgcctcaggaagcttggcttccctcccatgggaagtgctggaatccactcttgcctgaccctcccataagaaacaagggaaattcctttacgtgagccgccttgctcagaacaaagcttggcgtgtttcttattcctcatcaatctgacaaaatgggtatttatttgtgcctctcaagcgtgtggcttggacatgatgttccgcatcgtggaagtggccgtgcaccaagtggaatatctgttactatagtaacagttcctttttattgataccagaataaacaggaatgcaaaggctgtctcacttgttgggcacatttcagcagcctccgttcccagaggtttaaggaaccgccctntaggagggcagccctccttggntagtctggggatttcccggttggagttgagggaacccaggcaacaaggttcctggattttccctttcccaaggatttggac

SEQ ID NO: 375182 - DNA, 759 bp, Homo Sapiens
  misc_feature (43)..(43): n is a, c, g, or t
  misc_feature (118)..(118): n is a, c, g, or t
  misc_feature (131)..(140): n is a, c, g, or t
  misc_feature (182)..(206): n is a, c, g, or t
tccagaagtgttgcatccttgaggcgaattaactgtaagacanttttaattatgactactgcaatttgacaccatttgaaataatcaattcagagacactaaagatttcacaatattncattggtattgtnnnnnnnnnntactattgtatggatttttgtattgctgttaagtattgtttnnnnnnnnnnnnnnnnnnnnnnnnntggaacctcctggggacatgttatattttgaagtgattaaactatttaattgtgtgtctatattttggagtggaataatttcttcattaaaaaatgtttttaaaaacactatatcttgggtggtttattcctttgtttcagtgaatctttcctaaagcaacgtggagtcagtctgttgaaagaaggaaggcaggtacttgcagtttaaagcaggacccattgatggaatattgagccaccgaggcaaaatagctcaccttctcttgccttgggggatgcatggtttttaccattctactgttttattagcatctgtgagcatctaatagaaatactattctgctatttatggaaatccttattataattgatatggaagtgagtttgaaattctaacagctaacatatttcatgtttgtatcacacactgttcttaacactttatgtgacttcactcaattctttgaatcctctgcatctagccatgtattctgcaaatattaagtgctcaatggtttttttgttgaattactgaataaatgaattagtggtg

SEQ ID NO: 375183 - DNA, 590 bp, Homo Sapiens
  misc_feature (534)..(534): n is a, c, g, or t
  misc_feature (548)..(548): n is a, c, g, or t
  misc_feature (566)..(566): n is a, c, g, or t
ctggatgatcatgacccctgggattctgcgcggggatcttcatcttcttcttgatcaagtacaagccactcaagtacaacaacatctacacctacccagcctggggctatggcattggctggctcatggccctgtcctccatgctctgcatcccgctctggatctgcatcacagtgtggaagacggaggggacgctgcccgagaaactccagaagttgacgacccccagcacagatctgaaaatgtcggggcaagacttggggtgagcccacggatggtgacagttaatgactgtgatgccaaactcaagagtgacgggaccatcgcagccatcacagagaaggagacgcacttctgagcggccaccagccatctggggctcttcttcctttcttccccccgtgtatgtaaatgaattcctgaaccccatacttcacctaatggtaggggcttgcttgtggtgcacaggattaattaacaagttaattttaaggtggccactgtacactgctctaaagtatattccctccccgnccccagtatatggnagtaccacttcaaagagntacactgtacggggactgcagatt

SEQ ID NO: 375184 - DNA, 481 bp, Homo Sapiens
tgtgggccaggtggggtggggagtgatggctgtcctcctctgtcggccttttaatgaccgttctgtgtcccaagtaagtctctgaccatccacagccgcccctcctccatacccccagggaataatttttccttcaaaccttccctttccaagggacactgggtttgcagacagcaaggctatgtggcagagaagaaaaagtccagcagactcaggactcccgggctgcaggcccccctctgccctgatcccatgaagtgaccttgggcactccctttccctccctgggcctcagtttccccatctcccaaatgggaggaggagccggattgggttatttcttagggattctctttgtgtgccttgctggcttccagacctgccgtggaccttggcttcctctgaagacttgcaggcaataatctccgccctcccagttgtacctcctccccacctgcttatttaaaatcaagtttattgt

SEQ ID NO: 375185 - DNA, 305 bp, Homo Sapiens
  misc_feature (22)..(22): n is a, c, g, or t
  misc_feature (29)..(29): n is a, c, g, or t
  misc_feature (73)..(73): n is a, c, g, or t
  misc_feature (89)..(89): n is a, c, g, or t
tccatttaaaatgtttaaagcnaagcccnaaaaattgaaatcagttaagaatttggagagtttatccttaaanggaaatggtgtaattnctttttcaaagaattttgtaacccatctttacagtttctttgcttggaaaacttgggttgttaactaccagttaacaatggcattactttccaaaacgttatctaatgggcccaatgtgtacctcaagataaacacagtatgttatgtctaaaaatttccttgtctgttgatttaaatggttctgaaatgtctgtaataaagaaattttcaaagtt

SEQ ID NO: 375186 - DNA, 432 bp, Homo Sapiens
  misc_feature (356)..(356): n is a, c, g, or t
  misc_feature (395)..(395): n is a, c, g, or t
ataaagagaaccagtataagtaactacatgtgtaagtttaaaacaaagtataaatttattttgtttgtaacatttgtcttttcctatttgatttaaaatataatctcaattataaacttgtgttgatggtattatataaagatgtaattttgggttatagcaccaaaatggcagaataggaattttctgtaggtgtttcccacataagtatcaattttgacaaccatccatgggcaagagtaccttgtgggagttcaggagttgacagtaaaacttcagcacaccagaggagtaaaggaaatctaaggaataggattcattggcaaaggggtattaaacagttttcacttttaccntggcattcacccaaccccccaaagtgggccacagcttcngttaaccaggaggcccctttattttctttcccccggg

SEQ ID NO: 375187 - DNA, 220 bp, Homo Sapiens
aaagctaaaatgccagtaaataaaagtgctatgacttgagctaagatatttgactccaatgcctgtactgtgtctactgcaccactttgtaaacacttcaatttactatctttgaaatgattgacctttaaatttttgccaaatgttatctgaaattgtctatgaataccatctacttctgttgttttcccaggcttccataaacaatggagatacatgc

SEQ ID NO: 375188 - DNA, 579 bp, Homo Sapiens
  misc_feature (20)..(20): n is a, c, g, or t
ggtaacttttagacatgggnaaataacctgccccagggcacacggggagtgaaggggaagggcagagggaacccaggttcatctgaactccctgggctacaaataacctgtttgtcccaccttgagctaaggtatccgccttcaaggcccatggataggaggccttgaaacggataccttaagctcaaggcctccctatcatggcccttgaaataattccctcgtctaaaaatactcattgcatcatgcgacccaggcaggtatcaatctgccataaatcttaactctcgagccgtggtatcgggtagctgttaccctggactccccatctagtcagcagggccagtgggacaggaactgtatgcaacattgcctctgggacgggccttctttatcccttaaatgtgtgctatggtatttcacaaaagaaaacatttacaggacatccccttttaatcatcagggaaatatataaattaaaaccaaaatgagatactactacacacccaccgaaatagctaaaataaaaagacagaaaaaacccttctatgattaatgaggatataaatcacctggaac

SEQ ID NO: 375189 - DNA, 411 bp, Homo Sapiens
  misc_feature (66)..(66): n is a, c, g, or t
aaggcccttgaaaagcgggaatacccttaagcctcaaaaggccctcccctatccatggccccttgnaaaataaattccccctccgtcctaaaaaatacctccattgccatccatgccgaccccaggcaggtatcaatcctgcccataaatccttaactcctcgaagccgtggtatcgggtagctgttacccctggactccccatcctagtcagcagggcccagtgggacaggaactgtatgcaacattgcctctgggacgggccttctttatcccttaaatgtgtgctatggtatttcacaaaagaaaacatttacaggacatccccttttaatcatcagggaaatatataaattaaaaccaaaatgagatactactacacacccaccgaaatagctaaaataaaaagaca

SEQ ID NO: 375190 - DNA, 544 bp, Homo Sapiens
tggtcctctttggtgggcctcttgatgtgttgttctaggggctatcttaagagacacttccacttgatacaaagcatatttcaaatctaatgttgtatgcttggcaaaggaaaaggtaaataaagttatccggaaaggtttcctcccccagaatgaagtcctcaatatacctctcttcaaaaaggcatcattatgttttaaggaattgtggttaatttttgtaggtataataatggcattgtggttatgttttcaaagagtgctcgttttttagagatacatctcaaaatatttatggattaaccataataaaaaaccgatcattatagagggaagtctgcataaatatctccaaaaataattcctaggctccaagacagcattacaaatgtagcgtttaaagaattattgcaacaaaaatactaaaggaattgctaaggaaataatttatggcatatacacacactaatctgatactaaatgatagtctgttgtcatttctaatcattttacatactctatggggggaggagtgaaaaatgac

SEQ ID NO: 375191 - DNA, 833 bp, Homo Sapiens
  misc_feature (36)..(36): n is a, c, g, or t
  misc_feature (581)..(589): n is a, c, g, or t
catataaaaaacccatggatataaaaccatttcctnctcaactaaaacagagtgatctaaaactaacacactgcaaggggctgtcagtatttactgtcaacagtgatgaaggcataactagattctattgcactgttttgcaaaataaacatttcagacaattttttctttttctgtttttcacatctgtttcaaaagtatcagagaaggcatttaataaatcaatggtattacaatttttaaattaaaatatttctctcttttcatatttttctttctagttgatcaatatggttttacaactaacgggactatataaaaaggaaaggaaatacttcttaaggatagagctatcattattctttatactactgtcagacaaatgttgctgttctgtggccctaatttggaaaagatgttggttgatgttattattaggtagagagagtatttatactcaggcaggtgtatacatgtacctaacaaagaaaaagaaatgcagatgctataaaaatggaggagtgtaaaaaactcccttgtacttagtggaattagttgctacgattgctacaaataaggannnnnnnnnagcatgagaacctctctggaatctgaatggaagagttcacataacaacggcacttgagggaagttcagagtctgaggccctttgctcagaatcagaggacaaggaggaaagtgaatatgcttgacaaaaacaaacaatgaaacagctatcatctatccatgtctcttctggagagaaagaaggaaaagctaacaaaacattttcagtgttaatatttagaaaatagttttctagtaagagaaac

SEQ ID NO: 375192 - DNA, 442 bp, Homo Sapiens
  misc_feature (26)..(26): n is a, c, g, or t
  misc_feature (44)..(44): n is a, c, g, or t
  misc_feature (190)..(198): n is a, c, g, or t
gggaaaagatgttggttggatgttanttattaggtaagagagantatttaataccccaggccaggtgttatacatgtaccctaacaaagaaaaaagaaatgccagatgcctataaaaatggaggaagtgtaaaaaactccccttgtaccttagtggaattagttgcctacgattgcctacaaataaggannnnnnnnnagcatgagaacctctctggaatctgaatggaagagtttcacataacaacggcacttgagggaagttcagagtctgaggccctttgctcagaatcagaggacaaggaggaaagtgaatatgcttgacaaaaacaaacaatgaaacagctatcatctatccatgtttcttctggagagaaagaaggaaaagctaacaaaacattttcagtgttaatatttagaaaatagttttctagtaagagaaa

SEQ ID NO: 375193 - DNA, 403 bp, Homo Sapiens
  misc_feature (15)..(15): n is a, c, g, or t
  misc_feature (34)..(34): n is a, c, g, or t
  misc_feature (40)..(40): n is a, c, g, or t
  misc_feature (61)..(61): n is a, c, g, or t
cccaaagatttatangcacaccaccaatccctcnggaatnccggtattaccatgaatgccngcctatatattttccatattcctaacttgtccttttccaagcaaataacctaatatatatgtgccatgcagtctgcccttgacaagttgttcccaagctgaagagctttcactgtacaatgtgtggaaaatcaccatagatcatggctgaaatagtttgtaattgtctgagtctgtgcacgtacttttagataaaatgctgctgagtgactgcatgatgagatacaacttctgaatgctgcacattcttccaaaatgatccttagcacaatctattgtatgatggaatgaatagaaaactttttcactcaataaattattatttgatatggtattttcccta

SEQ ID NO: 375194 - DNA, 390 bp, Homo Sapiens
  misc_feature (21)..(21): n is a, c, g, or t
  misc_feature (45)..(45): n is a, c, g, or t
  misc_feature (82)..(82): n is a, c, g, or t
acagggtaacccatttttagncccccattggacctcaccttcagncccatcctccccacacactatgtcctgtgccttgganaggggaggtggctctcccagtgtaaaacttgaggcattcactagaggtgaaaacttgtccagaatatataaaagccttagattgtagctgttcctaaaaacgtaagtactcccattgtaatagggtggcatcttcaggtagtgcacatattggcaatagaggtcctgaattgtttttctaagactgatctgagagccattgggccatcaagcctttatatatctgcttctaaaattgccccacctgctctagatggatctttgggcctttcctcagtgttcatgcaaaaattaaatgtctttttcagc

SEQ ID NO: 375195 - DNA, 305 bp, Homo Sapiens
aatagacatggtttaaaacaccttctaatgcaaagtagaagatttacaatgctgcttcattgtcaggttccagtgtcctccttttatccaacaaaatctaaagagttatctcattggaattttcagcttcagtgaaaattctgtgatgatctcaaatgttgctgcataaaatgtataattaatggagtgaagtggtttgtaaagaaacattttattagaacaagtgagggtaaatgacctaatagagttcaattctatgcttcaatttccaatataatatgcaaatatctactctgcaaaaccgt

SEQ ID NO: 375196 - DNA, 525 bp, Homo Sapiens
ttgaaggttatagtaaatggaaagatgaatctggaaagctaagagaattagaggtcatggctggatgtaaaatcaccatggaaacagctttcatggccaatttgtggggatatgtcaaaaggcagtaacctgtgacttatttttttccaaagccctttctatgaaggttacaggctctatatctgctttcatgatgacatttgtctatgtttttgtaggattctattctgacaagcacaaaaccctgcaccaagttgaacctgtcctttgtgatgaggctgttgaacagaagagcagcgtagcagtctgtctattcttgctccacattcagctaaatgccaactccgatccctttgagatggtgaacaggctgaacccagggatcgtgtcatccctcagtatccagacttcttcagagaaccatgtggtgaaacttcttgattaaggtcgcaaaagaagagacaactatacattttgtgatgctgaagggaaatgtacaagagcactactgaagaagtccagacc

SEQ ID NO: 375197 - DNA, 422 bp, Homo Sapiens
  misc_feature (318)..(318): n is a, c, g, or t
tgtaacacatgcacgcaaacatgcacgtataaatcttattagaaattaataagaactgtgaaaaaaaaacaaacaaccacaaggggccaagagactcaggagctcttctgaaaatggggtgtggcagggaagcccttctgaaaacttggcatttgaatggaagcttacaaaggtcttgaaggagagcaccaagccaggcttcccatcaagtgcaaagtcctgtagcagaacgaggtgggggcatctggagagcaccagaaaggcccacgtggcagtggcaaaggggctgaaggctgagtggtgggtgggagatgaggngctgacctggggtcaggctccagaccagaggggctcgtaggccatagtgagtagtatgagctactttccaattgtggagagctttgagtctaaaaaaatttaat

SEQ ID NO: 375198 - DNA, 608 bp, Homo Sapiens
  misc_feature (18)..(18): n is a, c, g, or t
  misc_feature (30)..(30): n is a, c, g, or t
  misc_feature (41)..(41): n is a, c, g, or t
  misc_feature (71)..(71): n is a, c, g, or t
  misc_feature (93)..(93): n is a, c, g, or t
  misc_feature (109)..(109): n is a, c, g, or t
  misc_feature (117)..(117): n is a, c, g, or t
  misc_feature (139)..(139): n is a, c, g, or t
  misc_feature (143)..(158): n is a, c, g, or t
aggtggctaatcccctanaatcctcaaggnacctttggggnaggcccaaaagacagggggggatcaccttnagggccccagggaggttcaaangatcaccccacccccnggggtaanatggccaagacccccatctccnattnnnnnnnnnnnnnnnnaaacttagagtttttatcttcccctaaaagaggccgtgatatttgcagcagcctcaaattgctcttaaggggtttaggtgtgcagaagctttcctttccctacccagtaaccatgtgactactaacgtggtatattgatttattttgtttgctgtctgtctcccctgccccactgctggaacagaggctccaagaaaacagggaccttattattcattactgcatccccagtaatgaaagtacttagaaaataattattgaatgaatgaaatctaaactgtgaacctgagggtgtttgtggcagtgtttgttttactgaattgtagaaggacataaccgtgttttcagtgtttctatggaacaaacttgtacattttatttcacttgtgttttgtcttaaaccctactgctggaaacaattttatgtaataagcaatgggcccaaaagtc

SEQ ID NO: 375199 - DNA, 522 bp, Homo Sapiens
  misc_feature (423)..(423): n is a, c, g, or t
  misc_feature (435)..(435): n is a, c, g, or t
  misc_feature (463)..(463): n is a, c, g, or t
ccagaagttggagacatcaggctgtttaaatgatcatagcctagcaggattggattaaaaccacaggcttttgcagctggaatggggttcagtgaacatctcccccattcctctcttgctacaaataaggaaacaggcccaggagattaagtgacttggctaaagtcacatagcaaattagtagcagagccgggactatcccttatccctgtgggttgggcaacactatttagtcctgaaaccgaatggcagataaaccccatgagggttcaggctgatgtgccctccagcagtatctgagaagctgctaccttcaggggtgtgtcagggatgaggacgggtgcctgagcttaggttgtgggagtggctgagagggcccagggaggcttcggggacagctgtgttgctgcatggggttgggtnttttgcctgggntcgcacttggttacccatgggccacctncccatttttctgttgccttatcttcactgttttcagctgagttccaagttgtttaatct

SEQ ID NO: 375200 - DNA, 329 bp, Homo Sapiens
ttttcattcaacccaactacttttagacatacccactccaaatagttagcagcctttttaggcacacggtacatgcgaaatggcatcccaaactaccgtaaccattttactagaggtaagaaatctgggagaaagtaaatcaatcttgaggctcttttagaaaataaagcaaaacacatgaaaacaattaaagcaactttacaacgtcaagataaaaaattgttttgtattcaaattgtttttatcattagaagggctttaaaatggaggtaactattagatgcgtttaattttatttgtaggaaaagcctttgaggaatttatattct

SEQ ID NO: 375201 - DNA, 495 bp, Homo Sapiens
  misc_feature (103)..(103): n is a, c, g, or t
gaggatgacaatcatcagagcctgtgcatcactcataaggaaacggagaaaccaaaagattacaaggctttctatgggcacagccttgactttgtaaaagcanggacattgtcccctgaccacaggacaagccagggcaggatttggccctgcaggaaggacagaggtgcccttaatggacaccccacgccctgccccacctccccttcactctggaatccagagataagcataacccacagacccgaaataaacatggcaaacccaggtcagcttcaaaagttgttgttggttttttcccaaaaatagaaattttattctctagtgaggcattatcagaaaatgctgtgaaattggtattcatattttataaaatttataaatgtgtaaaacgctgatgagctaaatggatctattttgtactgctgagcataattttatatgttatcataatcattaataaaaattagatgaatttaaaagtcataaaaaaaa

SEQ ID NO: 375202 - DNA, 433 bp, Homo Sapiens
  misc_feature (333)..(393): n is a, c, g, or t
gggtgaagtccagctgtttaattatccagagaggattccataatccaaaagagtccatagagtgggaaaactgaccatatttccaacaaatcctagtcccagaatgttaaaatagccacaatgggaaaatgtccaatgaggcacaactaaatgaaaattatcctcattgcatacaacctcaatttcaaccattagaaaacactgggttgttttcaaatcacagtgtggtgctacaaagaaagcagttgagtgtttatgtaatacaatattgtgaaagcttgtggaaaacttttcttaaaatttttaaggccttggccaggcgcattggttcannnnnnnnnnnnnnnnnnnnnnnnnnnnnnnnnnnnnnnnnnnnnnnnnnnnnnnnnnnnnaccatccgtggcttaacacgggtgaaaccccatctctact

SEQ ID NO: 375203 - DNA, 616 bp, Homo Sapiens
gatttgaactgaaagatcttttttgaagatgagtgtcatggaattgacatgatttgaagtgttatggcacttcctttgaataaaaaaatcaaagttgctaacaagttccatgtacttaaaaatattgggacagagcgctcaaagctatgaaaagttttgggccacccatgaatatgagataagattaacaagagaggagaaggaagtgaaaaatatggctttccatgcatttccaattgtatgaattaccattgaaggctagtgatgaaatgttactctctaggagtcagtgttttcacatctaaaaatggtatcagtcatagaaaaagcttatctgtctactgccaaaaagggaagagggtaatagcacgtattgagcacctactgtattattcagatgaggtcctgccatacggaaattccagtccccactgttctgggggccatgcaatcgtctttagataataggtgtggggctaggggttccgctgtgaagttaccttccttcccagggtctcagccagcacaaagctgtggtgagatttgggtccaggtctcagactccagattccaaaccacatttaaaaaaataaaatcatcaccctgtagacatgcc

SEQ ID NO: 375204 - DNA, 349 bp, Homo Sapiens
  misc_feature (41)..(41): n is a, c, g, or t
gccccggccaccccccagggccacctctgcaactgtgccgnagcttctcttccccagcacctgcactgacacggagcaccctgtaggttgtctgcttgaggcctttacctaaatgcttgccgcagctgtttctaaactacaaaagcacacaatcatgaaatgaggcagaggtgggctgagtgccacaatggatgccaagaggaagagagatggacatggcgctgggaggctctgggcaccactggaggggggcgctgagttcccgggctgccccggctgggagaggagtcgagtcttaatctcctttaaggaaacataataaataaactactttgccacttaaaaaaaa

SEQ ID NO: 375205 - DNA, 289 bp, Homo Sapiens
  misc_feature (51)..(51): n is a, c, g, or t
  misc_feature (58)..(58): n is a, c, g, or t
  misc_feature (110)..(110): n is a, c, g, or t
  misc_feature (122)..(122): n is a, c, g, or t
taaaatatgcaaaaggaaatgtaagtgcatttctagtcacctcatgccacnacaagcnatttatttaaaagtgaaaccttttgtatattattgtgaactgatttgtttanttaaacttttantttggtgaatttacctttgagtttttttatattttatgtcacaaaatgaagtcctatatttttcagtgtttatgaatattaatataaactatttttttctagaatgactaattgtgtaatatctgtattatgtgataatttgaaatctaataaatattttctccatg

SEQ ID NO: 375206 - DNA, 453 bp, Homo Sapiens
  misc_feature (432)..(432): n is a, c, g, or t
  misc_feature (443)..(443): n is a, c, g, or t
attagaagttaggatgaatacatgttacactgttaacttttagcaaattttacttttgttgaaaactttgtgtttgggattttaattatccttcgcaattaataagacatcatttagtccaaattaacttagaattggtatagatgattccttcctggttctgtaagtactttaaggcttggctgagtacaaacagctcacacatttgagcagaccaattattaggcaattttcctaacttcatttctacaagagtttgtttccctattagttactgggatacccatagtgtcttcttccctcagtcacccagggaggaaaccatctattcatcctgccctgaaagggagttcctcctagggtctgggtcagacctctgtatggggcatttaatttaaggttttggatctcctgtttaggaggacctgctgngtttagggggntttttccgtg

SEQ ID NO: 375207 - DNA, 473 bp, Homo Sapiens
gactgaatgcatttgggccatccgtgggttactgggttaagaatttttgataggaaggttatcacagaatttttgattgtctgtggcctccatgctttcaggctacacccctgtttatactgaacaacaaggtggaatggctgcttaaggagggtaaaactaggacaggggcagttcaaactaatagatgttttaacctttccacctgttggatttctggtaatcaccaaatgaggagggggtttttccagtcttgcatgagcttcttgtataagggttttgtttttagggcataagaatctatccatagacgacagtatctgactaatcttaaaatttcctaagttcttgtttagtccctggcagaggaaaggatatgatgcctttaatccgttcaagctcaattagccatttacctttgctaattaaatgacttgttctaatatttgactaaataaatttgaagactccat

SEQ ID NO: 375208 - DNA, 388 bp, Homo Sapiens
  misc_feature (359)..(359): n is a, c, g, or t
  misc_feature (364)..(364): n is a, c, g, or t
gcaacccgaaaacagaaatgctatataggaggagaaaaggctttcaacaaagcattgtcattagggttcggttaaatatgcatgcatttgaaatatacattgacttaaatgcaaatagtcaggctgaagctctgctgtaaagtaaaggtacacccacaaaaggacagagccttttctggagaccagcagaaatgtggttgtatttatattagtggggacagaaattatgatcgctctggggccgctgcagcctttctgctgacaagttgcatgccactgttccgtagtgactgttctttacctgggaacggcttctccatgggcaaccccaacccctttcacaggggcggcattcgttngcttnttctcttttttaaaatggaacaca

SEQ ID NO: 375209 - DNA, 1284 bp, Homo Sapiens
  misc_feature (25)..(25): n is a, c, g, or t
  misc_feature (72)..(72): n is a, c, g, or t
  misc_feature (133)..(133): n is a, c, g, or t
  misc_feature (135)..(135): n is a, c, g, or t
  misc_feature (142)..(142): n is a, c, g, or t
  misc_feature (144)..(144): n is a, c, g, or t
  misc_feature (230)..(230): n is a, c, g, or t
  misc_feature (756)..(813): n is a, c, g, or t
  misc_feature (1203)..(1203): n is a, c, g, or t
  misc_feature (1208)..(1208): n is a, c, g, or t
  misc_feature (1237)..(1237): n is a, c, g, or t
  misc_feature (1257)..(1257): n is a, c, g, or t
gtaccccaaaaaccccgcgcccatncacccctggatgggcataagtaagataaaataactgtgagctcgcanaaccgaaagggcctgaccccttacttagctccctccttgaaacaaagagcagactgtggananctggganancgcagccagctcgctctttgctgagagccccttttgacagaaagcccagcacgaccctgctggaagaactgaaagtgccctcgccnctcggccccggggcctgtggggttggatgccgcggttctatacatatatacatatatccacatctatatagagagatagatatctatttttcccctgtggattagccccgtgatggctccctgttgctacgcagggatgggcagttgcacgaaggcatgaatgtattgtaaataagtaactttgacttctgacaaaaaacaaaaagtgctgcatggctcgcatggaatccacgcgctccagggactctgcccgcccccgcgactggagacggcatctcgttcacagcacccaccctcttacctgataagttccatcgtatcaaactttctataaacaaaatacagtataatcagaaagtgccatttcgccattatttgtgatcggtaggcagttcagagcataagttaactgtgaaaaaaatgtaaaggttttatttaggacatttgcatggctagtcatcagtccattttatgagttaacaatgtattttgttgagggaagtttttaggggttgttttgggttcnnnnnnnnnnnnnnnnnnnnnnnnnnnnnnnnnnnnnnnnnnnnnnnnnnnnnnnnnnaatacatatccaataatgccttccatctgaatgtaaaataagtacccatgatttctattatagtatcagtgtaattatttaaaaaatgattttgaggcagttaagcatgaccaattaatgtcactctaatgcttaggctgcgatcctatggtagcaattctgtgctggtataaatcttacttataaagtaggaaaagagaaccgaggaagcacgtgaaacttactaattctattcgaggattttacaatggcatattttttcagtattaaagcgaaaatgttttcaactctgggtccttacctttttccagcttcatatttgcaagtgggtaaattgggattttgcggtggaaggagacaggggaggggaaaccggttgggggttagatnccctncctggagccaccattaaaggctctttccnccaaatcgccttaccttagncttttacccctttaagtagctcccttg

SEQ ID NO: 375210 - DNA, 379 bp, Homo Sapiens
  misc_feature (43)..(43): n is a, c, g, or t
  misc_feature (45)..(45): n is a, c, g, or t
attgcttgttgtcataaatgggccactttgaccacttatgacntncaggagtgaaaaaaattgtaattactaagaaaggaacaaagactacgataaccttaagtgtttaggtcagaggtaaaagccaaaaatattggttcccattgagccagtagttgagcatagctttagtcaagataatctcggctgttttagtggctgccctactacttgtttgggccttcacctagttgcaactgtggcagctcagaatcataatccattttgtttggacaatattttcctcctaccagaactctccagccatggaaaattttttagagtaagggaagaaataacctcttttggaaattagcttggattacactttctaaaacct

SEQ ID NO: 375211 - DNA, 404 bp, Homo Sapiens
cagccatattccacttttacctgtatcacaaggttttctgattattgtcactatgtgggagaagtcattactaagttactatcagaatccctgcctccaagataccccttgactcaactgccccaaaaccctccgtttgttgaagtcttgaattggatcttgggttttagaatagaaacaaatacagctgttaggaatggcttcgatacaaactatggaacttgaagagatgtggaccagggatttgagaaggaaactgttctttcttctgccaaaaatacaatttggtacttgaaggggtacctgggcacccagggatggaaacattttaagttaagcactttaccttttaaatgccacgttaaaaatgaatatattcataacagatacttacgaggaatatg

SEQ ID NO: 375212 - DNA, 677 bp, Homo Sapiens
  misc_feature (49)..(49): n is a, c, g, or t
  misc_feature (56)..(56): n is a, c, g, or t
ggcccataggggcatgcctgaggaacacccttgtaatcccaccctttgnaattttncccgaaaggccatacataactgtctcctaacctgccctcctagaattttatgcagcaaggcagcaccaacatgtgacctcaccatatttcataatttttatttcagagcccaaacagtaaaatacactcaggcaaaatgaaagacaataggctattcttcccactgtgatgagagaataagcacttcctggttaacgggagaagaacttaactgaacagatcactgggaagttgatactaccaaaaatcaaggagacgtgctataaatgaggtgaagacacaggaccagagacccaatgtgaaaaaagaaagtcatgtaagttaagtgactgtcacttagctatacaaagtaggaacagttactaatctgcctctaaggaggtcagttacattttaatagctgtatgaaacatttctacattactgtgcgggcatctccattcatgcccattcaagaaaatcattgttgatcccactagtattttcactaagcaataaataaagtcagtttttgataggtccaagacataagtctttcaaacaataagtgtttgagtagacccagatgttatgataatatctaaaatttcttggaaactatttcaataatagacaagctaa

SEQ ID NO: 375213 - DNA, 339 bp, Homo Sapiens
  misc_feature (39)..(39): n is a, c, g, or t
cctcaaatgctgggaataatagcaaaaaaccatgcgccnaacccagaccattttataataaggcacttaaaccatctcccacttgggtaacaggaacaaccttgtaactttacaaaatttgaattggcatagaagaaagcaactttcagcccagggtctgaagacctctgggactcccatgttgtgtgctggtctgtgagcccatctcagtgaaaaaagctttcactccaacctgggccactttggtgttttccccctctgttttaaaaatatactgagcccgggtgagttggtcggatcacagggtcaagagatcgagaccatcctggccgatatggg

SEQ ID NO: 375214 - DNA, 428 bp, Homo Sapiens
  misc_feature (151)..(151): n is a, c, g, or t
  misc_feature (168)..(255): n is a, c, g, or t
  misc_feature (266)..(286): n is a, c, g, or t
cccccaaaaggtccttcaaaacccctggctgaaaagcctgcctttcctcctaatgcccaatcaaaatcctgtaaaagtaacaaagatgtccctgtaccccaagtggaagatgccttaaagtgcccttatataaaatggtcctgggctgggncgccatggtttgtgccnnnnnnnnnnnnnnnnnnnnnnnnnnnnnnnnnnnnnnnnnnnnnnnnnnnnnnnnnnnnnnnnnnnnnnnnnnnnnnnnnnnnnnnnccacctttacnnnnnnnnnnnnnnnnnnnnnttagccaggtgtggtggcacatgcctgtagtcccagctactcaggaggctgaggtaggagggtcacttgaaccttgaggttgagtctgcagtgagccacgaatgtgccactgcacttgggtgacagaacaagaccccgtctc

SEQ ID NO: 375215 - DNA, 525 bp, Homo Sapiens
  misc_feature (472)..(472): n is a, c, g, or t
  misc_feature (508)..(508): n is a, c, g, or t
ggtcgttgaacattactgataccctctttgatctaaaccctcctttcgtgatcacgcctggtggctcaaagaattgctcccccagcttactgttcctgttggtgctgaaagaatgctcgtaattgttaccaaacagtggacggagcaaggcaacatgtcccctttgcccagctggctcccagttggcacttcattatggcaaagacagagggggtggggtccccgggccttcggcatttcatttgcacccacatgtaggctcacttcttggcctgggaattgatcggtgccagatgctccatctagccagcatccccaccgcagcagggctgcccgcctcctgtttcgtgaaaaacggcccggattttcatcagaccttaattggcctggggtctggccttcattctaccccagcctctttcacagactgctgggccactggctgtttccctcctccagccagggacaattnccggttcccgggcaattgaacctggggccagggaangcttgccaacttcatag

SEQ ID NO: 375216 - DNA, 407 bp, Homo Sapiens
  misc_feature (13)..(13): n is a, c, g, or t
  misc_feature (28)..(28): n is a, c, g, or t
  misc_feature (36)..(36): n is a, c, g, or t
  misc_feature (78)..(78): n is a, c, g, or t
tttcaggcctaanatcccacctccctanaaactagnccctgaaaacaagtttttttggatctcacccctgacgatgtnaaattaccccaggtgaccctcacagagaggaccaaagacaagaccagaaatcatccctgagacaaatgcataattgacttttcctgtgcttcctttcttcacgtgtaaaatgtagatttactgagactcagagcctcacaagaatgcgagcatctgcctcactgcgtccctcccccgtcttttccctcctgcttgcccttgcctttttaaatattgccgtgccccagaccccctttggaaaaagcacagctcacagatgtttctgtggcttgtggttgttttcgtgggctcgttctcaaccttggcgaaataaacctctgtggattgac

SEQ ID NO: 375217 - DNA, 415 bp, Homo Sapiens
  misc_feature (350)..(350): n is a, c, g, or t
  misc_feature (357)..(358): n is a, c, g, or t
  misc_feature (362)..(362): n is a, c, g, or t
  misc_feature (372)..(372): n is a, c, g, or t
  misc_feature (374)..(374): n is a, c, g, or t
cgtggcttgtttaagacccttgcctcccatcatcttgatataagcccaggaaatgggcaagatggaactggagccccatggggccgcactgacggttcccacaggacaggcatcctcattccgctttagtgaaatgacgggatgattgggcaaaaacggggcgagatgtttcttcactccgatgggccccatgccaggaccacctcctccgtggggaatgcagaaggtcttgtgaagatttaggtgagagacatcagacccgaagtctccagggcgacagattcccacctaccacaaaggcaagggccaaaagcaaaagtcaagagcttggaagcaccctccagtgtganagccatnnctgnccgctactcncntctcccctcagaggaaaagcagcagagccacatccatggtg

SEQ ID NO: 375218 - DNA, 445 bp, Homo Sapiens
gctagggtttgctaaattccatcttgtgatccattctcaaccgtctggcgattataactactttagatgttccaaataagtcagtgtgagctaccccacaaaaagtactcttttctcaaacctgtctattaaaaataaataaaagctggtggcagctttactcctgctgggggggcagtctccattgtactgttgtctttgaaattgtgatttcacaggactatttactaatcgactgttgttactatggcaattaatagctcagaaaattgcagatgctacatttcaacaccaagctctgggcaaaaggaaatgcacataccaactgaagtgcatggttgcttccgatttgcagcagcctgctttatcttacagatcacctctttagcatgcatgcccttctgtatcttcttcgcttgcttcaataaactaatttgcctcaact

SEQ ID NO: 375219 - DNA, 432 bp, Homo Sapiens
ttgtgtttaaaccaagacccaatccagtgaaatattgaatgtcaatactttttgttagaaatgccctctgaaaatgttagaaaatgtaaaactttacctgtgacaaggaataaattcatgattagaagaattatactgtttttcttgtgcaaataatacttaaggcagatgttcagtctcacagtgatgttggaaagcatattttatgcagtctaaacactatttctgtattagatatttaaatgcatgaggataaattctaattgctttttgtttaaaacagaaacataggagaagcattagccccagtttgtataaaatgtctgctgcaactgaattcatgatagttcatcaaaactgaaaatcattccaattttgtaaaactgctgctactggttttatcaataaagttttagcagatggcttaaaaaa

SEQ ID NO: 375220 - DNA, 542 bp, Homo Sapiens
  misc_feature (253)..(253): n is a, c, g, or t
ttctcagtctctctgaaactatggttgtcaatttgttgttttgatgttacctctaagtagtcatcaaaagtaagaaaatattgtgttacattaaggttacgctataagtctcaggagagggctgcttacgtaagcacctaaaggaaagcagccactaatggaattggtatccccatttcagttattgttttaaaatatacacccatgacattgcaatattcagtgttttttgaaatggtttaagcataactcntttaataagatcttaaatgcccattcttatttaaagtcatttttggttttcacactaaattacgctttttttcccctttacttttgcatctattaactctaatccttaaattattattatttttacttttgttttctcaaggagttatctcaattttgaggaatcatgctggggcaaggattgcagttgaagtattttgcttttggagtgtataatagtatgaataattttgtgatgttttggggtttggattactttgggaagatctgtgtcattaaacatcataaaa

SEQ ID NO: 375221 - DNA, 474 bp, Homo Sapiens
  misc_feature (422)..(422): n is a, c, g, or t
tctgaattaggatatttttgctccaaattcttattttacttaaccagaagggaaaaaaagttgtattttcctgaagctacaggcactttgtcatgtgatttttgagtctcaatttaaggctttgtaaaatgaagagtagaattccaagaaaaatgagaaataattttgtaaaacttaacaaaatcactaaattaaactatatgggaggttatgaattactttttcttgggtagaccctaaaatgtcagtagcatgcaccagaatctgactcccattatgcttctaagcacatttcattgaccttgtctctcatacttcaagaaaaggacagtacattgctacattaccctaggaaagtctgtgtgaggatctgccccttcagtctgttattggcaaagtaataaaatgtcacctacaggggngcctctggggcctactcttagtttcaagaggctacccgaaaaaaattaaata

SEQ ID NO: 375222 - DNA, 256 bp, Homo Sapiens
  misc_feature (134)..(134): n is a, c, g, or t
  misc_feature (189)..(189): n is a, c, g, or t
  misc_feature (203)..(203): n is a, c, g, or t
  misc_feature (208)..(208): n is a, c, g, or t
  misc_feature (234)..(234): n is a, c, g, or t
gtgggagaggaacaggttgggggaggaaaatgaagagttcttttctcttctggtttccctgccctcccattcaaaagccaggaaatttctacagctaggcaggatgattggctccggcattccttaatttcagnctcaaaatcaagagcttacaccctcagggtcttcttgcagtagaggagggtggtncgacagtgaaacanttggnctcttcatactgagttgagtccactnctgccattcttcttcatgacct

SEQ ID NO: 375223 - DNA, 468 bp, Homo Sapiens
  misc_feature (23)..(23): n is a, c, g, or t
  misc_feature (51)..(51): n is a, c, g, or t
  misc_feature (69)..(69): n is a, c, g, or t
aaacgggtaaaatgggaaccganccatgcccacttaacctagaatatttanccattttgacacatcccngttttttagagaggaaaacaaacacagtttccgccatgggtagtgtaaaagccatacccttgttaggaacgtgttttgtaagacacatttgggttgtccattcctagagcatgtcaaactttgtacttcaaaatatatttagtatgattgttagtggtaacatatatcaaggctttgaattaactgttttatttaattttcacaagaagcacttattttagccataggaaaaccaatctgagctacaaatagttctttaaaataagcccaggttatttagctattctagaaagtgccgacttctttcaagaagcaggcattgtaggacagctgagaattatcacatagcctaaattctagcctggcagcaagagtcacatctgagatgtccaaaaaaaa

SEQ ID NO: 375224 - DNA, 322 bp, Homo Sapiens
  misc_feature (181)..(181): n is a, c, g, or t
caaggcttcctaaatgaaagacatcggttacctgcttatgggaaggtgagcagcaaaggaattgaagttcgggacagggtagaattatgggttttcattgtgtttcatgccaaacccacaaaatccaaaatagaattcaagttaaacaaacttctactacaaaatggaaggggaaaaaggntcaggaaggtctatgagaatgagctgacttatctcgttaaatcttaagataaatgagggtaacccaaggctgcaccttggtgtaccaccctgagtggagttgaggtgacttcatttgattgcttcaggcgaactatatagg

SEQ ID NO: 375225 - DNA, 607 bp, Homo Sapiens
ttagtccttctggtcagtgaacgaaaattctagacctacagttactggctacttgcatttgtcagtttagagaaaaggtaaaatgaggcattttcaattgtagaatagactaacatttaccacagaagtgcttcagcattctaaatggattagatcactcattaagctatttttatatgccaatttactaatgccttacatcaatccactaataggttgttgggccccgcagtagagtcccctatgcagtccccaattcctgttttcctgtaaccatgtgactggtgatgccagagtgataaccatgtctgcctatcttgtactagactcttcatgctgatcggatcttgcattgaaataaccatgtggaagaacaatgaatcgattaatgatgacatgtacaaccatatttaaagagcaatagtgtccgtgtgtcatgaaaaacttatttgtaaacgtttatatggtatgattttgattttatgtatgttcataaatcctgcactgtatgatatatgtgagttaaaacattggtgcatgaatttattttcaaagtataaaacacatcacttaaacattttatgtgtcaaataaaatttgattatgt

SEQ ID NO: 375226 - DNA, 522 bp, Homo Sapiens
gcttctttctcatttccattgtttttataaaaatattttggtattgttgcctgcattttagccacttctaactttttgtattatgaatttggagaggataacaagccaactttagaccctctgccagtggcgatggtgtttttcttccatgggtaagccattgtgaatggaggctggtggagcagcacactgtgtgaaaccctggcagcgctcatcttggcttgttttagcagtgcctctgtttacaccataagatgttccgcatgtgtccaaaatttcgcctgctctgaaaaacatgcccccgaggctctgtgcagtttggggccttggttcccacctgcagatgcggtcagttgcctggctcctggggccagagtttcctctgttacttgttgagtctcttgtcttcactgtcagaagctgaactgacttgggggctttgctgttgatccactttagcaaaccctgctgcagaggactgtaaaaacaaataactaaaaataaacttagaaaatacaactc

SEQ ID NO: 375227 - DNA, 312 bp, Homo Sapiens
aaagcttaataatttaaatttaattacatatagttattgatgggaagtaattgatatcaaaatattttataagacttataagcgactcctaacaactatagtcttgagaaaaagagaaaagagacaggaacatgttgggagggggacaggagaagaaaaaagaagctgaacttggggggaggggctgtattaaccattaatagccagttggctcatttttactggtgataccgttcaatctttcgataagaaaaacaggcatcgccaagaaaagagttaatatttaggcaatctcacctgaaaacactaaag

SEQ ID NO: 375228 - DNA, 649 bp, Homo Sapiens
  misc_feature (470)..(470): n is a, c, g, or t
  misc_feature (564)..(564): n is a, c, g, or t
  misc_feature (584)..(584): n is a, c, g, or t
  misc_feature (602)..(602): n is a, c, g, or t
  misc_feature (609)..(609): n is a, c, g, or t
aaaatggactacttcagtgaaaaattgattccacgtagttctaataactctgtgaccttggacattggctttttatagacacagctcttcccacctgctggtatggacaccagtttgtacagactgttgtcacacaccctggctcaaagtcaaaagagaattttaattactcatcaagctgccaaattctactaattgcccccttgtcagcatatttcattaattgctgaaaggtaaatgagttacatattttgtttggaccacgtcacctgtacattttcaaagcctcggattgtttatcttgcaaggagagaaggggcctcttctccacagatgcagctcaaattagcaaaactgaactgtagagtttcaggcctttcccttccttaaaatgctgataggatttctaggaccagactttggatatttattgggcttcttgggtcttgctgtttaaacacacccattgnccctttctttcttagggccctgttaaggcaaagctgggagtaggcgtcttgggggaaaagggcccaactggacccaccctaatttttgttcgtngccaagtcttgcaggagggnaacatgtttaggtaggtngttaacncgacaactttaggggttccctgttgtggaaatggcaggca

SEQ ID NO: 375229 - DNA, 476 bp, Homo Sapiens
aaatgagttacatattttgtttggaccacgtcacctgtacattttcaaagcctcggattgtttatcttgcaaggagagaaggggcctctcctccacagatgcagctcaaattagcaaaactgaactgtagagtttcaggcctttcccttccttaaaatgctgatagatttctagaccagactttgatatttattggcttcttggtcttgctgtttaaacacacccattgccctttctttcttaggccctgtaagcaaagctggagtagcgtcttgggaaaaggccaactgaccaccctaattttgtcgttccaagtctgcagagcgcacatattaagtagttgttaactgacatctttagggctccgtgagtgaaatgcagcaagcctgcccccagcagcctgtggggttaattcctgaggctgttccttcgtttaagggtacacaggtgaaccctggaagtttcccactagggcc

SEQ ID NO: 375230 - DNA, 479 bp, Homo Sapiens
  misc_feature (23)..(23): n is a, c, g, or t
  misc_feature (32)..(32): n is a, c, g, or t
  misc_feature (70)..(70): n is a, c, g, or t
  misc_feature (87)..(87): n is a, c, g, or t
  misc_feature (99)..(99): n is a, c, g, or t
  misc_feature (186)..(186): n is a, c, g, or t
  misc_feature (201)..(201): n is a, c, g, or t
  misc_feature (234)..(234): n is a, c, g, or t
  misc_feature (406)..(406): n is a, c, g, or t
ctacccaaacccaatgtagaaantggtaccgnaatgatttaaaattcaaccgcaaatgtatggaataacnaaaatacaagttcctgncccttttttggncccagtttcctttgggggaagggaagacaaagaagggtagggaacgggaattttgaggggcaaagaaacctgtgttccccatggaantgctgagacgtggcnccctggggctatttctccctaataaaggatgancccaggtcctcatttccaaagtcccaatgctctgaaaaccaaaagtattttcataacccatttgaaaccaaacctgacctgaacttacactgataggaagctatgggtaattatgatgtgttccttttagtgtgattctttgttgcagaaatgtcaatatattttatgacantggttccctactagggattatacagtatttgctgactacttcctaagagccaaaaataaaaaatctgaattcc

SEQ ID NO: 375231 - DNA, 453 bp, Homo Sapiens
  misc_feature (375)..(375): n is a, c, g, or t
  misc_feature (407)..(407): n is a, c, g, or t
cagtctggctttagaccccttgctctgaactatcactttattgcttatcactgttactgttgttccagtattaagagcatggctgttttaggctgattgccttctctcctgggacctggcatcaccaaagcactatgtctcggaaatccattatctttccccagtctttcctccgttattgtgaggccttttgaaaatgtaccttccggcctccctgatgtcagagggaggcactaggtgctgcccattgtgattagatgggttctggtcttctgcctgcagtgcccctgctcccctttgtccctgtgctcacctctaacatgctctttgaggctgaaggggagggattaaaagagcaaaaacaacccgggacgntgggcttacggcctgttaatcccagcactttngggagggcccaggcgggtgggatcacaaaggtcggggggtttaagg

SEQ ID NO: 375232 - DNA, 431 bp, Homo Sapiens
  misc_feature (416)..(416): n is a, c, g, or t
caaaggagacagtcaatggaagatggaaagaggggaggttgggaggattgtgtttcaagctacaatatctggagcatattttactgattagacaatttatatgagtaatagaaaatagtccaacttttaacaacatgagctgaaactaaaccaaagtactcttctttccaagtcatgaaaaggaaaccttaaatatatttccaagaaatcctgaccatagtctgtagatctgtttttaaaatattttccgctatcttcatttctaagtttcaatattcctaggatttgggtagtttgagagatgtaacttcatttagggggaaaatgataatagggaaatttcctatggtagggcctttcccccttaaaaatttaaatgtgtccccgggggcaatgggaggggtttccgggggttncatcactttctgggc

SEQ ID NO: 375233 - DNA, 368 bp, Homo Sapiens
cggggactgggggcctagtggctgagtgtgggcctatactgcccttgcagtttgcaatgaaacaattgtaaaataaagagagcagcccaaaacagaaagttatgagctgagaatatgggaataagcacacaattagttctgacgaaagaaatatcttcctgatgttattaacaatctactagaaattgtgtcctctttaccaacagaaaaatattgatgtgcaagaaaataagcttatttctaacttaattttttaaggggtagaaaatatgataaattttgcatacatacaatttatttatttatattatagccctgtatgatacaagcattttctcatctaaaagtgttattttaactcagaaaac

SEQ ID NO: 375234 - DNA, 432 bp, Homo Sapiens
  misc_feature (46)..(46): n is a, c, g, or t
  misc_feature (115)..(115): n is a, c, g, or t
ggatgggggaggccgtgggaagcctcctgtattcctcaaaatttgnacagcctaattcccggttttttagaaaaatgcctgaggcccagtagaggcccctctagtcactcactgnctgctgtttcctgatataattattgagaaagctatctcacttaatagaagaaaacacgcactatcaaaaccagatagcctaacgtgcatgtgaaaatcgagaaagctgaaaacaaatcccaggtacccttctctgaactggagtgtttccacagacttgaataatttatgaaattatcacaccagtatttctcatatcaccaagaagactttctctcctgcagtagaggattgttatatttgcctaaaaaacacgattccaatatatgacaagggcagataatttataagtgaatgttaataaaattggatgtgtat

SEQ ID NO: 375235 - DNA, 450 bp, Homo Sapiens
  misc_feature (384)..(384): n is a, c, g, or t
  misc_feature (419)..(419): n is a, c, g, or t
aatacagtgtgatgctttgcaggtacataatgtgaaattattagatcaagctaattaacatctttcatttttttcagtggtaatacatttgaaatttgctgtttcaatatatattattgactgtagtcaccctgttgtgcagtagatctcaaaatttattccttgagtttagctgcagccttctacccattctctttcccaccttccccagcaccccaccctcatcctctgataaccatcattctgttctctacttctaggagttcaacttaagattttacctgtaagtgagatcatgtaatgtttgtctttctgtgcctggggtttattttatttgggcataatgtcctctaaggatcccatccacattgtcccatatggggngattttgttattttaaaagggccgggtagtataangtgtctattactacattgtcttcatccacgg

SEQ ID NO: 375236 - DNA, 360 bp, Homo Sapiens
tggcacgaggcacaaactccgaatgagtgaatcctaaagcgttgctcctggaggaaatacaggctgctggtcacaatatttttatcagctgatcaatatataccttgtcttatgtgtgtttctgcttcaggacactttatttaatatatacgttgattcattaactctgaactctctaggcaacagcattataactcctgccttcacaaagcttatctaacacacacatttcctcttcaggcacatcccagccttcttgcacttaggattcagcagtatgcttaagggccattttcaacagcaaactcatcagcgcaaacacaaacatgtgaaaaacgtagcacttaaagagactgcaaa

SEQ ID NO: 375237 - DNA, 435 bp, Homo Sapiens
  misc_feature (19)..(19): n is a, c, g, or t
  misc_feature (27)..(27): n is a, c, g, or t
  misc_feature (32)..(32): n is a, c, g, or t
  misc_feature (46)..(46): n is a, c, g, or t
  misc_feature (63)..(63): n is a, c, g, or t
  misc_feature (83)..(83): n is a, c, g, or t
tgttgctatcatgggcatnaaacctancagcnaagggaatcccccngtataatcagtcagccnaaatggagcaggacccgtgntttgtagctgatacaacagggcagcatcctctagtgagggggccagggcttcctatttcccttcattaaaaaatgaaacaccagacctgagtcccatatttagagattacacttagttgccactgtgggtgtgcaggcaccaaccaaacccagttggcaccgttgtcttttctctgcaatgatgtattgaatttaataatggaggtatatgaaattgcagagtgattggaactgaaaggtttgaggggctttgtgtaaaattgatatgtaagggatttggaagtaggtgagggattcttccccaatacttattcaattttggagtcaaataaccaagcatttacaaatagcc

SEQ ID NO: 375238 - DNA, 436 bp, Homo Sapiens
  misc_feature (33)..(33): n is a, c, g, or t
  misc_feature (47)..(47): n is a, c, g, or t
  misc_feature (58)..(58): n is a, c, g, or t
  misc_feature (66)..(66): n is a, c, g, or t
  misc_feature (426)..(426): n is a, c, g, or t
cctcccctcaagggaattgaaaaccccttgtanggtaaagccccccngccctaccccnggaaaccntgagggtaagtaggaattgccttgaaggcccctgaaagttccaaggcctgccagtaatgcctgattgtgccctgtgaaatagcccactgcaccccccagccttgggccagccatccagaattaataagagacagaaagtagaatgatggttgcccaggggttgcaggaagggcagcgagagggaattactgtgtaatgtgtacaaggtttcagtttgggaagaagaaatgagtcctggagatggattacggtgatggttgcacagcagtatgaatgtacttaatactactgaattgtatactcgaaagggttaatatggtgaattttatgtgtattttatcacaataaaaacattgaaanataaaaaaaa

SEQ ID NO: 375239 - DNA, 515 bp, Homo Sapiens
tatggtgaggttaggaaaagaaagtggactccattcttttgagcaggttaaagccattcacatccattctgacatgttctcagttcaaaatggcttgctgacaccaacactaaaagctaagagacctgagctgagagagtacttcaaaaaacaaatagaagagctttactcaatctccatgtgaagttcaaggaaagttcttcctcagtgtaatgaactgtctagcaatattatagttattcttgaaagtaatgagtcaaaatgacacagctgaaaatgaataagcatctgattttatgactgagccttttcctgtcccaagaggtctttaacaatattttctctatcatcaatgagtatattttatttttattataaaaatgatattgtggtggactgctaaaaatatcacaaatggcaatgtaaaaatcaagacattttctcaagaactgtgtaccactaaaagtaatatattgtcaatgttcacagaactattaaacataaaggaaaaacat

SEQ ID NO: 375240 - DNA, 355 bp, Homo Sapiens
cattgactcccccagcgaaatgtttccagattctattaagttttcgctctttccaaagcttttcctcttcagcctataaaaagcaagcagctatttccttcattcccaggggtacttctaccaattggagctgggctgttggagtcatctccactgcctaccaccaggacaagcagagaagtgtgagtggaagagagagaggtggcagggaaatctcccttagtgtgagctgtgtggtcaggggtcccaggtgcccacagtcatagaggaggtaggggcccacttgaaaatcaccagatgcttttttcagaccaggcctgagtggttttttgtctcccagcctgggttgcttata

SEQ ID NO: 375241 - DNA, 285 bp, Homo Sapiens
ccccctcagcagctctgtctacagcacttggacatgctaaggaacgggtactggctctgcagccccctccctgctgctcagagcagggtggaggcctcctcctctatgggtgggacctcaaaaacttgggattttctggtggtgatgggtcacacccatctgttattttctgaactgtatgcagagggggccttggggttgctgggctaccagacttctcattccagtttcaaccagagcaggcctacatctactttaaggtttcatgtaagactgaattaggag

SEQ ID NO: 375242 - DNA, 509 bp, Homo Sapiens
  misc_feature (159)..(260): n is a, c, g, or t
tgccgggcttcagcatggttggaggaaaacacgtacaccaaggtgactgactgatctggtcatgagcactggcctcatgtatacctctcactgcctgccagtcctacgtgtatttctacttagttccctttcctccatgaatatgtcctatttttgtcnnnnnnnnnnnnnnnnnnnnnnnnnnnnnnnnnnnnnnnnnnnnnnnnnnnnnnnnnnnnnnnnnnnnnnnnnnnnnnnnnnnnnnnnnnnnnnnnnnnnnnagggggaagaaatttgcattcctgatcttcccaacttcttcaaattcacaacacttgaatgacagtcttatttcagcacttactgctatcacctattacttttatgtgtgtcttacctatttgagatgccagattccttggaagtagagaccgtgtctgaatcatcattgtattaaaccactcatccttaacaaatgcccaagccatggttaaagttcaataaatactttgttgaatttattaataaaa

SEQ ID NO: 375243 - DNA, 511 bp, Homo Sapiens
  misc_feature (208)..(208): n is a, c, g, or t
  misc_feature (268)..(268): n is a, c, g, or t
  misc_feature (499)..(499): n is a, c, g, or t
gaaagaggtccagaataaaatatattttgatattatgttggctgtgtacatatataaaacctttgatgtctatgtagtttatatagactatttactagtcaggtaaagagagagggatggtatttcttgtttacagtttgtttacattttaattgcttttacttctccagtgttctattgtagaataaacctttttttccaagttagnccttcataacctataacacattcattctctcccatactggtgttactgattaataactgnccatcagaacccaaaccactgtttttcataaacgtattgtttcccaagatatatactttaagcccataataaaattacaaattttactatttttattacttcttgcaggagataagatttttttaaatgaaggggttatttactatttttattaaagtataatagagcatctaatcagctaagggattgtaatttttaattcttttgaaaaataaatattgttttaaaagncgtatttcacag

SEQ ID NO: 375244 - DNA, 537 bp, Homo Sapiens
taggcaagaaatgtgaaagagggtgcctctacagtgttggtgacccaacactagccaacttgagtcagaaaatatggaagaagataaattactctcacatatctaagacttttccatttttcttcactttctgttgcagggcccatatgagtaaatctatattccgtctgctccaacacacaccttccttctcttaattttgctttcccacccaccaagaaatttgtaagtcaaaatttatttccatgagtaactatttctaaatgattggaaatttttgaaaaagtggtatggtttatatacctaatctgcttatctgctataagtcatatgagaacaacagctaggatgattgtccaagcagctttagatgtgtttagggccaggcaaaaggtttgcttgttttttctttttgcttaagatctgggagattagcaaatttctcaagactatagactgaactgtaatttttaccaactcttgctcatgagcctcaaaatgaatatatccttgaataaagtataaatatttcaatag

SEQ ID NO: 375245 - DNA, 708 bp, Homo Sapiens
  misc_feature (21)..(21): n is a, c, g, or t
  misc_feature (40)..(40): n is a, c, g, or t
  misc_feature (46)..(46): n is a, c, g, or t
  misc_feature (96)..(96): n is a, c, g, or t
gccaagggaacccctttaaangggaatggtttcccgtaanaactcnaacctatggtggggaatgccaaatttacctatagtgtaaaaattcaatgnacttccccaccctattccgcaggggcaggaggatcagaagtccttaaaacagctgtggctaaaagccccaagcccctccccactgcccccgtgataaaaatattaaagaaattaacaaaacaagcatcagatgagtcaatgggccttgtaccatgtagacaacagataatttatagcgacttcttctgcaggcagcctgagaaacaagagcttgcatacgaaatcctgccctatcattaaatataataatgaaaaaaacagggccattaaatgagaccctaaaaaagtctagctgccaatcaggttgggaagataaataaaacagcatagtttattttaacctatatcttccacactaacctagtttgtctatagaaaagccatctgctggcaccaggccagtatgtcttaattttcttgttattctaagtatctcatttttccaaaagaggaaatgtgtaagtagcaggtgtacataggtgacacatttctacaaagccttctctgtagtcttgacctgtgtggggacagggtctacttttggaagcattttcaaaggcagaataaaactttacttgaggttttctccatagaaggacaccagagttgtgc

SEQ ID NO: 375246 - DNA, 430 bp, Homo Sapiens
gctggacagctgataaaactaccttctgacaaagtttgatttaattagactctaataaaaggtcctatgagactttctaaaagactatattgggaagaaagaaacctcagaaaagtctaaattatcaagtagtaccatttaaatactcttactggacagctaataagctaccttcagacaaagattgaatgattaaattgaactccatacagaactgctaaggtgtcttcaaaaaggacttgagaagatgaaagcatctttagaagggccacttaaattcacttgcttgatagaaataaagcctcaagcaagttgttataacttcaggattcgacttcactgactctaagagtataggacatccataatttggaactaatggatagtccacttctgttccttggcttctctgttcaccccccttttggcc

SEQ ID NO: 375247 - DNA, 477 bp, Homo Sapiens
  misc_feature (395)..(395): n is a, c, g, or t
tggacagctgataaaactacctttctgacaaagtttgattttaattagactctaataaaaggtcctatgagactttctaaaagactatattgggaagaaagaaacctcagaaaagtctaaattatcaagtagtaccatttaaatactcttactggacagctaataagctaccttcagacaaagattgaatgattaaattgaactccatacagaactgctaaggtgtcttcaaaaaggacttgagaagatgaaagcatctttagaagggccacttaaattcacttgcttgataggaaataaagcctcaaggcaagttgttattaacttcagggattcggactttcactggacttcttaaggagttattaggacatccccataatttttggaacttnaattggattaggtcccactttcttgtttccatttggctttcttcttggttccacccccccctttttggcccacttacccctt

SEQ ID NO: 375248 - DNA, 429 bp, Homo Sapiens
  misc_feature (37)..(37): n is a, c, g, or t
ttaagaaaaactccacatccctgatgccaagaagtgnccccataccctcccctctgccagctccccaaacttgcctcaggatggaaaacaagcggcagggataggggtaggagggctgtgttcccaagcacaccaaaatgaaaaaagcaatccgttaagctttaaatatataattgtaaactaaatcatctgccatcttctctcggcttccagtgtagaggttacccattatttttgctaactggcaaagtaattaataaattcaagacttacctagcgtaggagcatacttcgagaaacactggtcatgaaaaaatctccacaatgaacataatgctcaggagattggtattgatgtgttttgctcttcagtgtgagatgtgccccttagatttaatcctgtatcgtctcctgaaatcaaacatcctg

SEQ ID NO: 375249 - DNA, 356 bp, Homo Sapiens
cacttattgatgaatgtaagtcatttgggaaagttttggaagagtttacattttaatagcaagacaaacatgtattatgatggagcttgtgatgtatttctgcctcctggagttttattttgtttttctgcttatgttttagtcataatgccacaaagttgtggaatttttgtgattaattgctgttactagtactaagagaagcaccagaagagatgccaagaagtttttatatgaataatttctatcagtgaggaattaaggcatatgggaaaatattcatttagttgtattttatacagtaataactcttaggctgtcgtgtaagtccctttattcggtttcatagtctttat

SEQ ID NO: 375250 - DNA, 434 bp, Homo Sapiens
  misc_feature (305)..(305): n is a, c, g, or t
  misc_feature (327)..(327): n is a, c, g, or t
  misc_feature (353)..(353): n is a, c, g, or t
  misc_feature (359)..(360): n is a, c, g, or t
  misc_feature (362)..(362): n is a, c, g, or t
  misc_feature (367)..(367): n is a, c, g, or t
  misc_feature (373)..(373): n is a, c, g, or t
  misc_feature (380)..(380): n is a, c, g, or t
  misc_feature (408)..(408): n is a, c, g, or t
  misc_feature (422)..(422): n is a, c, g, or t
tctggaccaggctgagcctctgctttcctccagcctgtcctcggaagtcgtcactgttttccagtattacagttacttcaccagccacggcgtcagtgacctggagagttacctgagccagctggccaggcaagtttccatggttcagactctgcaatcactaagagatgaaaaactgctacaaaccatgagtgacctttgctcccagcaacctcctgggcccagcaggaagtactcaggactctgggctctgctattaaccagagaggacaacgaagtttaggcgaggctgttgacgcttttanttgggcagcagcttcccaaaantcaggcattttcaggggaaaagggcnttgctnntntttantgttgnaaggcanttaaccaaaggacaaaccttccagcttnccaggaaaggcagntttgctgggggt

SEQ ID NO: 375251 - DNA, 503 bp, Homo Sapiens
  misc_feature (391)..(391): n is a, c, g, or t
  misc_feature (425)..(425): n is a, c, g, or t
  misc_feature (444)..(444): n is a, c, g, or t
ggctgtttcacaacaccaggagttcagctatgggcagtttgggccatgcaacatgtctgcagcaagaatccttcaaggtattgcagcatgctgattgaagaaggaggattgcagcatttatacaacatcaaagatcatgaacatactgatccccatgtccaacagattgctgtggccattctggatagcttagaaaaacacattgtgcgccatgggaggccacctccctgtaaaaaacagccccaagccagactaaattgatagccataagtattggatagttgaatcacaggaatcctttttgtggattggtccatttgggaatatcttaccctccctgatgttttgggggtttctatgacaagagtcataaaatcagtttggggattgnataatgtgtagtacttgcccatgtggaacagtcntcttaatttgtcttgtggnttttaaacttttgggttcaggaggggtctcttcccttatccttgccttttgggaatttt

SEQ ID NO: 375252 - DNA, 486 bp, Homo Sapiens
  misc_feature (113)..(113): n is a, c, g, or t
  misc_feature (343)..(343): n is a, c, g, or t
  misc_feature (420)..(420): n is a, c, g, or t
  misc_feature (446)..(446): n is a, c, g, or t
aatgttgtggaaggaagggaaacttcaggaaaggcttgctcacctcgctcggggccgcggaggtgcctggccacagtgccaccctcctgaccctgccgaggtactcgagcacncaaccacgcatcccctcactggctgcagatcacatcagtttttcagtcagacttgttaatgtcaagggtccgtcacggtggtgataccactgtgtgacaggaagcgagagtcaacgcagggagcctgcaccctgcaaacagccacagcccttcactgaacggggagcataaatcccaccctagttagaaccatggcttttgttgcggaccagaagttgccagagccacantttaggggttgagatgttttacctttttgcggtgtttgagtgtgttggatttcctttttaagattagaaagtagggnaaacttgccagttaagggggagacgnctttactttaaaagaggtttcatttttttgggtttgacaa

SEQ ID NO: 375253 - DNA, 526 bp, Homo Sapiens
catctcatctttataacctggtaaacaatgccagaataaaaacaacaaattcaatgtatttaagtcggtttcgacagtgaggaattaaaattaaatttatttaaactattttgacttttacccaagtttttcttacagttccatctcatttttccctccttacatagtttggggagtagagaacagtctatttttgactcctgtgtaactgacatggacacagaggcctgcggtcccttggaggattagtggcccacgcaggtgtgcaagacccacgggtcccctcaatcagaagcgggatgtgtggcagggagctttggagagctttccattttggattagtgatttccctgtcgacttttccctcgtttttgtcacagcacactcggaacatttctcatcagctgtgtacactatgtcaggcatttcaaatatgtttctggaagttgtcagtgctgttctctatgaggcctgaaggaaaaattcaatgtttgtagtaaataaagtacaaaaattatatcagtct

SEQ ID NO: 375254 - DNA, 462 bp, Homo Sapiens
  misc_feature (24)..(24): n is a, c, g, or t
  misc_feature (35)..(35): n is a, c, g, or t
  misc_feature (42)..(42): n is a, c, g, or t
  misc_feature (51)..(51): n is a, c, g, or t
  misc_feature (248)..(269): n is a, c, g, or t
aaaccccttgaatttggcggtggnccggttagggncaaaaanggccatacngtggcctttaaaaatatagcaatggctccccctcaataggccaccccacacactttcgggtccagggtccctggggcaccttggctttggggccctgagaatcccatggttccccaaagagaatgtaaatataaataatgatgtttgattacacgtgtccgtataaaggtattcccactttgaaaagtaacttaggnnnnnnnnnnnnnnnnnnnnnngcccacttaaaatttcacacattttttaaaagggaaacggttttattccttacgctttatttgaattggaaccctgcatttaaattttagcatgttgaggttctttagaaaggaaagataagtttacatacaatcccagacagaatataaaaaagactcatcaaaagagaattctaattccagtcaagtgacc

SEQ ID NO: 375255 - DNA, 487 bp, Homo Sapiens
cccaaaaaatatcatttaaatttacctagagaacacacatgcgtgtgcagtgtagtaaacctcatgtgcagtggctgattacctttggagacagagcagatgaccataagcctcatctgggtaagaacagctcaatttagccatcataccccaggctttaccagccccaggaccccaaagcctacattattctgattggtagcatagcagcatttcttcatatctgccttcctagtatggatacaactttaggaaatggtcctactagactagacagaaatttgactcaaaatggttgaggccatgccaacctgaatagaagtgccagcacatggcttctgtgttatctgttatctcactgctttgagaagcataaagcctcatccaaaacaatgatgtgagggaaagcttacaaagaacactgtggaatggcccttttcatatatgagaaaatatttgaaaacacgtacaatacattaatactatg

SEQ ID NO: 375256 - DNA, 505 bp, Homo Sapiens
  misc_feature (435)..(435): n is a, c, g, or t
  misc_feature (452)..(452): n is a, c, g, or t
gtggaccccttagggtactgaggagcagagcttggaaagtgaagccaggacataagggttctgtgtcacctctgtcacagctgactcagtgaccttcagtgagtccattcctacctctgggattctgtcctcgggttccgaaagacagggaagggagaaaaataagtacaaagtagtgagttttacataaagcctgttattctgttctatttttacaatgttaaaaatgtcctttcttttatgttacaatagtaagagaagattataaaagtttctttttgaatgccctttatagattaaaaggttgcctccctgaacaacttttgtctcagggaatacttactggttcttgaagcccaaaggtgtaggaactcctttggacaatatccatgtttttcaaactttttgattgcctgccataggggaaaaaaggcntttagtactcttatatntaaccgaaataacagtctataaaaggtactttagtggaatgtaccccgatatt

SEQ ID NO: 375257 - DNA, 490 bp, Homo Sapiens
taatgtcatcatgtacccactgtgtgtcaggagcaattctgctatctgcttgtgtaaaacaccttgtaaccttgtttgaacgtaaaaagaaacgcgagggagcttggaagaacgtgtccaaggtgaaagagctgggaagcagcagagctcagatttgaccccaggctacctgactatctgaccttcagcctcccaagagctgtacttttctatactcctgctctctcctttccaggttccctctgcacctcacgcagctcagcacactcctcagtgtgtggcacttcatcaatattggtctatgcaaaccttttgtcttttagttttatttctttcccttcattcccagtcccctgcctactttcctttttcccaggggcacccatccaattttaatgttttgatacatatgctcgaaaagctaaagcattgttctgcatatgtgtgcattttaaatgtccataaatggcattgaagctgtgaatcagtt

SEQ ID NO: 375258 - DNA, 492 bp, Homo Sapiens
gatagctgtgtggcgtgggccaagacatttaatgagaagttactgtgcaccaaactgccgaacaccattctaaactattcatatatattagtcatttaattcttacataacttgagaggtagacagatatccttattttagagatgaggaaaccaagagaacttaggtcattagcgcaaggttgtagagtaagcggcaaagccaagacacaaagctgggtggtttggtttcagagccagtgcttttcccctctactgtactgcctctcaaccaacacagggttgcacaggcccattctctgatttttttcctcttgtcctctgcctctccctctaggctcccactttcctctctgctctagttcattttctttagaggcagcccgagtgatccatgaagtgcaaatcttggccaggtcagtcccctggtttaggaaccctccaatgggctcactttcttctttagggcaaaagtcttttaccccatggcctt

SEQ ID NO: 375259 - DNA, 391 bp, Homo Sapiens
aggggaggagcatgcaggagtccagctgggagagtggggccagtcccagtgtgctagggcaaggaggccaggggcctgtggaagcccagtgcttcagctcccaccaggaaaaatgtctggggtgggaggaagtttctcatttcctggctacttccccactatgtggaccatttcatgaaactccattgcatagttctcagtggggggggcagaaggggtgcccaagcctgcccctctctgcctcccaaaaatatggctttggaaaggagttcccaaaaatgaagaggaccctctgaatcagcaggcctacccctcacagggatgagatcttgacagtctcggggaagaggcaaggggtacccaggctggagttcctgagggtgctgccggc

SEQ ID NO: 375260 - DNA, 280 bp, Homo Sapiens
tggatggttggtgatgtattctggaaaatggggacccaggagaaatgaaagagtgtggtttgaggagttccatcctacagcccaatgagacaggccagggggtccctgagacattccctccttggatatcatctgcgccagcttcctgattcacagatcgggaaactgagacccagagaaacacatagttagttagaggaggcttaaacccaggcttcctgacagcaaacaaccctgaatttaaccctaataaaagacatcactttgtttggtgaatttc

SEQ ID NO: 375261 - DNA, 290 bp, Homo Sapiens
  misc_feature (99)..(99): n is a, c, g, or t
agcagtgtataaacataaagcattacttttataattggatgttgtaaatgttaattttgacattaagaagaagtaaacaagactaatattgagattgancgccttagcaacttccttttaaaacgacaatgtcaacgagagtctaaatttgtatgtctttccagctaagtgtctcacctacatacgaaggagcaggaaaatgctgttttgggaaacttgttaaacagtccattactcctgtgtagactttgctcaggtatgaacatttcaaatcttcaaagtaaaatgga

SEQ ID NO: 375262 - DNA, 321 bp, Homo Sapiens
tatgttgctactgaacataaaggggccaaatcccacactagggagccttgggagttgttttgattgtggatatgtggagttacatggaagtgcaaaggatggctcaccatatgtctatctactaaggtgcacaagaaatataattttagttttctgaaatgtgtctaaatttctgtttcaaatgcaattttgcctattattatggggtgcattgtgtccccccaaaatttatatgttgaagtcctaacctgtaagacctcagaatctgactgaattgggagatagaatcattaaggaagtaattcaattaaaacagggtta

SEQ ID NO: 375263 - DNA, 363 bp, Homo Sapiens
  misc_feature (208)..(274): n is a, c, g, or t
  misc_feature (311)..(319): n is a, c, g, or t
attctcaaaactatattccttagaatttgattttaccctgctgactttaagagttataataatatcaaatgtgatgagctaatatagatttcctttttaaataagaataacttcaagctcactcttaacatagtctgggatctctcagggagtaagttttaaaagaatactaatggcttgtaagaacaaacaggaataataatctgannnnnnnnnnnnnnnnnnnnnnnnnnnnnnnnnnnnnnnnnnnnnnnnnnnnnnnnnnnnnnnnnnngatgtagccttttaaaaaagggagtcttaaaaatgannnnnnnnnaagggcaagaggaaatcttgtaggtgctaactgccttgagcctg

SEQ ID NO: 375264 - DNA, 191 bp, Homo Sapiens
gtttctgaagaaataaagagtatattaagcaaagggataatttatatttcaggttggaaaatttaccctaaacaaattaaaccatggaaagtgcaaacacatgaatgaaacatttttttacatcaaagtatcatcaaagattcttgtttcatttgataaaattaatatttgaataaaaaaatttttaaatc

SEQ ID NO: 375265 - DNA, 414 bp, Homo Sapiens
  misc_feature (19)..(19): n is a, c, g, or t
  misc_feature (73)..(73): n is a, c, g, or t
gtgggctcctgggggtttnacaatccagattgacttttaagcaaggtcactgattagatacccattctctctncttgtttaacacaatgtccactgttaggtaccatgtggtgaagtaggcagtgtcatacactgctggtggaaatggggataatttaatatgaacttcctagaaagtaagttggaaatatgaattcaagggccttcaaaacttccagaccccttgacccaacacctctacttctaggaatccagtctaagtaaataataaagggcacaaagatttggacataaggatattaataacagcattatttgtagtaacaaaaaaactgtaataatcttaatgttcaaccatagaagaatatttaaacaaatcccggtggagtccaatgatagtatgtgatgcagccg

SEQ ID NO: 375266 - DNA, 453 bp, Homo Sapiens
cctgatataaatgaaatgtcctaccgaatacatcccaggacggagggagtggaaaaaaacacagatttaaagcctctgcagtgagaatctttttcagaggtccagcccccacaaagaattctagacaacagacttaaaacaaatggtcacttgagaagcagagccgtgtcaaagccaagaggtgtcagatatacacttgagatatctatcttagggatgagagaaaaatgtagcttctaagggtatccaaccaaatccccacttgttttattttagaatttctaataaggaaattccttcctctgtcgttcgggatattatcaatagctctgggcttcctgtcttctaaaggaacttcctgcctgatttcaagggaactctgggctgttttcgttaggaagggtcccctgtttctggatccagtaaggggaacatccagcgggacttttcagg

SEQ ID NO: 375267 - DNA, 458 bp, Homo Sapiens
  misc_feature (68)..(68): n is a, c, g, or t
  misc_feature (114)..(114): n is a, c, g, or t
taacttaactaactgcctggaatggaaaaccttatttccccaaaaaacggctccccctggggccccanaatttgtaaataattaaccaacgggaaatacatttccccactgaantcctgagaaaagaattcgcctaattatataaactccccactgctccttacatcctcttttccccaggcactttaacatggactcccaaaatgctttggctctcccactctacctagtatagcagatggagtgacttgggagtgtactgatttagagacaagaaggcaagagggagacgggcggcagctagaagcggcccatcctcagagtgtatgcaagacaggaagtgtctgaatatggaccaaatcaaaggctgaggcagctctgggggagccctgtccggtgtttgaggaactcgaagacacaacttctaagacattcttactacagcacaaaagtctgtt

SEQ ID NO: 375268 - DNA, 465 bp, Homo Sapiens
  misc_feature (343)..(363): n is a, c, g, or t
gttgaccctgcaactttagaagcacaatcatttattaataatttttttgaaactcccatctacccctgttagagaaatcaacaggttctaggaattaaatatgtctctttgtaacccagagcatgttcaatttttggaaaccgtatttcagtgattttcttaataccttacatgtgtagggcatcttcccccagaatcttacagtccctttctgtgaagagaagtggacacacgtgggaactctcaccatctctggactgtcgtcaggaaacgcctgcaggtccttgccctgtctgtatggtgtcctcacttctccatccatacaggtggctccagtgggcannnnnnnnnnnnnnnnnnnnnacatgaagcaatagaagtacaaaatacttattttttcaaaatttaatgtgttccatgaaacctgttgggcagtcgctttccttcccccacatctaaattctt

SEQ ID NO: 375269 - DNA, 504 bp, Homo Sapiens
  misc_feature (352)..(352): n is a, c, g, or t
  misc_feature (448)..(448): n is a, c, g, or t
gacttagaagagttcatatcaaatagtgttattgaagtatgcagaaattatatttcacccacatcagtaaggtcaaatgccttatcctcagcaatgtgtaccaggttgataggacattgccacagtcccaccctgtctgatctattggcaatcttatacagtccgattacatagtagaggtaacgtggggtggggtcaggagcctgtgcgtgggttccagcccactggaccctgcatggcagagacaaggggcatgctcattaaggggaagggtaccccttgctatttactgtcttgaaaaatatgcttcccttactgttagtcagagtctttgctgcttcaaaaccacatncagcacaagagtgttttcttcagcagacaacctcgtgtttatgtcgttctctacaaacacagctatcattcttcttaaagggggaagggcactgtnactttggcctctggattcttaaatggggatgtttaaaaccaaccaagtgcccgagt

SEQ ID NO: 375270 - DNA, 529 bp, Homo Sapiens
  misc_feature (16)..(16): n is a, c, g, or t
  misc_feature (35)..(35): n is a, c, g, or t
  misc_feature (60)..(60): n is a, c, g, or t
  misc_feature (75)..(75): n is a, c, g, or t
  misc_feature (121)..(121): n is a, c, g, or t
  misc_feature (190)..(190): n is a, c, g, or t
  misc_feature (217)..(230): n is a, c, g, or t
aactggcccaacatgntgaaacccttgtcccctanttaaaaatgagaaaaatttaccccngccttggtggcaggncaccctgttaattcccagcctactccaggaggctgaaggccagganaaatcgccctgaaaccccaggaggccagaggttgccagtgagctgaagattgtgccattgcactcccancctgggcaacagagtgagactctcttnnnnnnnnnnnnnngcattaagtgaatgcccagtctgtacagttgagcaagaaagaaaatggcggatacaagaggcatggtgcaggatgaggccgtcagaaatcacgtgaccgtgtgtgcatgctgaggagctgtgggacgcatccccagctgccggccgggttctccccacggagagcacttgtgctttgctttatgcctttgtgtattgcagtctttagcaatcaattagatattactgctataaaaaatgggaagccaagtaggatattacgaacaaggataaaaataagtgtgaggaaggggaggagtg

SEQ ID NO: 375271 - DNA, 420 bp, Homo Sapiens
  misc_feature (42)..(42): n is a, c, g, or t
  misc_feature (52)..(52): n is a, c, g, or t
cataacattgcaagggaaagccccaatgtttgtccacctaantagccacaanccttggaagtagtaccaagaccctagaagcccacttttagacttccttgtggctcttggaacacttatcagtgatgattcaaatgcctgtacaattagcccaagtctttaggtgttgattctcaaataaaaaagtattcctcagtatcagaaccagctaaagtaagtgaatgctgtagatttatcctaaatttgctgtagcagtggggaagagggacggatatttttaattgattagtgtttttttcctcacatttgacatgactgataacagataattaaaaaaagagaatacggtggattaagtaaaattttacatcttgtaaagtggtggggaggggaaacagaaataaaatttttgcactgctg

SEQ ID NO: 375272 - DNA, 508 bp, Homo Sapiens
  misc_feature (433)..(433): n is a, c, g, or t
  misc_feature (466)..(466): n is a, c, g, or t
  misc_feature (476)..(476): n is a, c, g, or t
  misc_feature (482)..(482): n is a, c, g, or t
gtcaatatcatggtacttatcacattgtagttacgtgtttccatttctgtttctcacattagtctaaaaacttgtgaaagacagggagtgtgtctgattcagctttgtgtctctatttcacagctgaaggacctggcccacagtgtgcccagagaagtttgattgaatggttcattcactttactcagtctggcaatgttgggggagatggccatgaattccattgctttccttccctgctaatcttatttaaaggattcattggctttaaggactttgcctcatccaaggcttcatttgtttcagagaaagcccaaagactgtaacctgcagtcatttgtcatttttttgaggtctccaaatgatcagataaaccggggaagctagtgagtagacgtgagttattttaggcaaggcaaatgagcctagctgnacctctcgcatccatttttcaacaatgcctggntacctccttncacaangtgtaactcatgtgtactgggaatcc

SEQ ID NO: 375273 - DNA, 397 bp, Homo Sapiens
tgtttctcacattagtctaaaaacttgtgaaagacagggagtgtgtctgattcagctttgtgtctctatttcacagctgaaggacctggcccacagtgtgcccagagaagtttgattgaatggttcattcactttactcagtctggcaatgttgggggagatggccatgaattccattgctttccttccctgctaatcttatttaaaggattcattggctttaaggactttgcctcatccaaggcttcatttgtttcagagaaagcccaaagactgtaacctggcagtcatttgtcatttttttgaggtctcaaatgatcaggataaacctgggaagcctagtggagttaggacgtggagttaattttaggcaagcaaaatggaggccttaggcttg

SEQ ID NO: 375274 - DNA, 543 bp, Homo Sapiens
  misc_feature (112)..(251): n is a, c, g, or t
  misc_feature (268)..(301): n is a, c, g, or t
ctccaggccagacctctctcttaggcttcagcgtatctttccaactgccaactggacctctccacttgaattacatcccataggcacctcagattcatcacattaaacagtnnnnnnnnnnnnnnnnnnnnnnnnnnnnnnnnnnnnnnnnnnnnnnnnnnnnnnnnnnnnnnnnnnnnnnnnnnnnnnnnnnnnnnnnnnnnnnnnnnnnnnnnnnnnnnnnnnnnnnnnnnnnnnnnnnnnnnnnnnnntaagaccctgtctcttnnnnnnnnnnnnnnnnnnnnnnnnnnnnnnnnnngataaacaccaaacttatcaccctctcatccaaactgctcttctttgagagtttcccaaagaatcatctgttaattccttcttctcccctaactcttcacatgtaaatacccagccaccaagttcagttgatatccccctgcaaaattgatttatcttggcctgtctttgctattctcctaatcaaggcagtttcttaattttccgtccttgccctttaaactattttccacatagcagacc

SEQ ID NO: 375275 - DNA, 460 bp, Homo Sapiens
catgttcagtagccctatgatagtggtagttagttcttgtcccagtccagtccacagtctcatgtttcaggtcatatctctcgggaaactgggaatacacttgggtatttttgttacatattttgcacctttagaccgttcactgcagactaggtgtacacagttgtcaggactgtaaaatgtaaagagagattaaggctgtgtttacttatcacacaatcatttgaagtcaagcagctctttgtcttcatgatttcagctgatttttgtagaactaattcccatccaaatgatctgtatataactctagcctctctcatcttaaccagtgggatgtattatgctgcctcaccacacagctaatttaaaaacttttagcctctgcctttcagatgaagtaaccatttaaatattactactagaaattctgacattctggatacactttgacaaaaagacc

SEQ ID NO: 375276 - DNA, 354 bp, Homo Sapiens
gcgggaaatgagctggctctgcacattcggcctcttccagcggctccctgtttcccagagctgagatttctttacatcacagtggttcaaggagaaaaacacagccagatccttcctcatctcaacataaattaaacccagaggcagtcagcggcacagtccacactcgtaaccgttacactcacctggaaataaaagtatttttgtgcggggactgcaaggactaagcccggccgcactccgagtttctcctcctcacagtgactcattgctcaggtgaggaaactgaggctcagagagggtccgtggcatgtccaaggttactctgctgtgtccccagaggcaaggaactat

SEQ ID NO: 375277 - DNA, 380 bp, Homo Sapiens
  misc_feature (286)..(286): n is a, c, g, or t
gtgctggtccaggcttacgcgctaacagtgaattagaaggagaaaacgctctgcagtggcagcggaagggaggaccctgtggctggagaaatcccgccgcgaacacccagcgaccaggtctacagcagcaccaggtctgtgcttccccctggtggtcacagattttactacacgcggcccacaagtaaaatgagtttctcttcagtggcccggttatcttctgtcgtgtaggaggaagtccagagccacggaaattcggtaaggatcggataagggcaataaaatncgcagcttttaaatctttttcatgggagtttgaaggacagacgttttgactgttggggagccatcttcatctttattaacctgggtaaacaatg

SEQ ID NO: 375278 - DNA, 448 bp, Homo Sapiens
  misc_feature (404)..(404): n is a, c, g, or t
  misc_feature (438)..(438): n is a, c, g, or t
gcctgaaaagcatgcaggggtttggtccactcacctacttgaaagcctgtgggcaacgttcttttgagccaagacttctctgaatggccctgctggtggaaggggtgaggcaaaggcctctaacttggaccctttccacaccagactggcagcacttcccccaggcagccagtggtgggccctgagccctcaggtccccagctccttgagggatgaacctgggagcccaagagccagtggctgagctctgagaaggctccatctcccacctgcccttgagcgcgctctcaggctgagaacacggtctcatcaggcgccttcctggcctgatgctgtgctgttctacgtcacacggttcgattcacaaaagccagaactagacctcaaccaggtcatcttccccntttgccaagttgggttcagggtgagggcaatttntaagttcaat

SEQ ID NO: 375279 - DNA, 488 bp, Homo Sapiens
ccaatgtacactgccaaacacaagagtaggacacatctgttctgggttcttgacctatctgtctccaattcatctccccttttcagccatttcaacaaactactctttggagctctgagatgacatcttgttgttttatatagatgtatcttttaaaaatagttcacgtttggagaattcttttgtactcatttgctttttgtctgagaaccatgtctatttttataactggagtgtgagttctgtatcttctcacattctgtatactgtatccattttctagagaacccagtagcttttatacagtctcttcttaccaccccttgtgggtttcagaacaagctttattttattacggagtatattaatgacaactaattcctgttccaattctacctgttttagttgtggaagggtagttttgtgtaatccagttgattgctcctcgggcagagagaggggctcaaaggatacttggatgtctttca

SEQ ID NO: 375280 - DNA, 444 bp, Homo Sapiens
  misc_feature (433)..(433): n is a, c, g, or t
ataatattgtcgcaaaatgtgtagttgcgtgactctaagcacctttggttaaaacccctctattttgatttttatgaaaaaaataatgttatttgggctaaatctatggaacctggacaattaaaaaagtgtttattatgtgcccattcagatgtgatttctaaatgtactctttttagttactctttccaacaactttgcagtagcttaaaaatgttattcttttcaattgtttgaagctcagagaaggcacagaacataaccaattaagtgacagaaccatgatttgaacccagatctgtctgacttcaacacttaattctcataggcaggggagggaaaatactgggaatactgacaagccggggattaaaatgctctccccaatataccccatattattttggggtcccatcttggctggctctggtanggtggttatat

SEQ ID NO: 375281 - DNA, 519 bp, Homo Sapiens
  misc_feature (50)..(50): n is a, c, g, or t
  misc_feature (71)..(71): n is a, c, g, or t
  misc_feature (87)..(87): n is a, c, g, or t
  misc_feature (97)..(97): n is a, c, g, or t
acccctgtgtccaaatgccagggttcaaaacccccggtccccaccgccanccgtgtgaaccctgggaacantccacataatataccngtgcctccantttttgtatccaataaaagggaaccctactgaaatagaagttgttgaaagggatttggtgagataagtcccataaaagcactcagcacagtggcctagaaaatagagcctgcataaatgttagttatgaataaattacttaccctacctcactggggtataaccgtggtttatagataaactaagcagcatttttgagcagtggttttagaaaagcaagctcacacaaatctgtgcagggagtatttcatgacttccatggggtgaggaattttattttttctatcaggtgtgaagaggacccaatggacagtaaactctctagttattgctagagtaaatgttggagagtttctcacagtaacctccaagagggattgtgtctgtcttgtttgctgttgcatttccagaacctagcatgac

SEQ ID NO: 375282 - DNA, 356 bp, Homo Sapiens
  misc_feature (88)..(88): n is a, c, g, or t
  misc_feature (107)..(107): n is a, c, g, or t
  misc_feature (196)..(196): n is a, c, g, or t
  misc_feature (251)..(251): n is a, c, g, or t
  misc_feature (260)..(260): n is a, c, g, or t
  misc_feature (262)..(262): n is a, c, g, or t
  misc_feature (265)..(265): n is a, c, g, or t
  misc_feature (305)..(305): n is a, c, g, or t
  misc_feature (334)..(334): n is a, c, g, or t
ttttttttgccaaacacagatttgtaccaataaggatactgaattagatgttaacaacagtgttttcaaaaaaagatacagcaatgangtaaaaagcactatgctanttacaaatgatttacagaaacaactaattaacctaacataaatccccttaaaatgcaaaccatacataatcttaacatgaattacagantaaaatattttcctagtaaattaggtgtaaaaatccaaacttgcttttttaaatntaacacccngnaantaaaggatactgttccttttttaacatgtatttctcaaantaagggttcaccatgaacattattttagntatttttacatcttctttagct

SEQ ID NO: 375283 - DNA, 869 bp, Homo Sapiens
  misc_feature (34)..(34): n is a, c, g, or t
cttcacaataaaactacaaacagacactgtcganataaattgagtgataagtatgtctatttactaacatgagccaatttgaactttagttttgagatctaaaaatattttaatccacatgcatttagtgactataaattgaaggcagtgttcttttgacaaccaagcttattgaaaactttggcattaatgttcacaaacatgagcactattttgaaattaaaaatagactatggtttgctctacatgcttgtgaccctgcaaaaaataaaggaaaaatattcatgcgatttttctcctcttacattcttatggcttaaaaaatataaccagggttttatctaattttaatcaatctcttggcaaaggatcatataaggttttacctgctaacaagaatacctcatttgaaagagcattaccacaagcattggagggaggtacagttgacatggtgaatttgattttacaaaaactaacaaagctggggggtggcaaagcattgacttaactataatcactagtcacaccaatgtgagattccgaatcattggtcagccacagtgatgccaccttggcatcaaacttgcctgttccatctttatcaatgtatctggaagtctgacttgagtaccagaagccaaaacgctcagaatgctaatttgtgccaccttaatggcccatgtgttcagtaaataaatttgctttttacatctcgtcaaatcttactgaattaaacctttcatcagagttctacatatccccaggtgggcttgggaaacgtgaggatagggttttattgtgttttatattatggatagttgaatgatgattctatatgttattgttatatttgttttcattaaaaa

SEQ ID NO: 375284 - DNA, 539 bp, Homo Sapiens
cacgacggtgccagggacccgcaacgtgggccaccttaacaaagcatccggtggaggaaaactaaggttcccggtgagcaagaggaaaggagcccagaggtaccttggagaggatataaataagaaagactggaaaacttaaggtacaaggagtcataacatttagatgttaaagactcgtaaaggttcacactactggaaatgatttttttaataaaccaattctgttcaacaggttaatgacactagtccttttcatgaagctgatgaaatcaagttttggtcagcattcctttcttcttacattcgaaaactacataaaaactgtaccatttattaaagataaaaaaatgttttggatgcacagtccaactatggaacactgtagcagtctgtttactaatctcccttaatggctaaaatcagagtgaatgttatgctcattttctaatgttataataactccagaatgtcaaattcttacattttcttttaaatagtgttgaaggcctcaataaaattgaaagtgtgcgttcttt

SEQ ID NO: 375285 - DNA, 204 bp, Homo Sapiens
tgacagagcaagactccatctcaatttaaaacaaaaaaagaatgtgtttttaattttgttaatgtttgtctgttatacatagcactggtaccgcaaacattttacttaaactcttaatagcatttctttcgccagatactttaatatttcaccttacattaatcctggattcacatttctttaattgaaataaatgttaatgac

SEQ ID NO: 375286 - DNA, 332 bp, Homo Sapiens
cgcgttgtcagaggtgtatacatgtcactagagtttccgtacctcgcagaatgcacagacgggcttgtgtagcacgtgttggctgagggcacctctggccagcggggagtgactggggtaggatgcagtctgggagtactgctcatcaaacaaggttccatccgggaagtggggctattaaaagggtactgtgcagagctcctgtggtaagaggcatagtggagtggcccagagatagctgtgtcatgagggagggccggatactggctctgcatggggtgaggatgctggttgccatagctcccatagttatagcttcccgtgtatccatg

SEQ ID NO: 375287 - DNA, 618 bp, Homo Sapiens
  misc_feature (30)..(30): n is a, c, g, or t
  misc_feature (36)..(36): n is a, c, g, or t
  misc_feature (41)..(41): n is a, c, g, or t
  misc_feature (80)..(80): n is a, c, g, or t
  misc_feature (92)..(92): n is a, c, g, or t
  misc_feature (137)..(137): n is a, c, g, or t
  misc_feature (144)..(144): n is a, c, g, or t
  misc_feature (173)..(173): n is a, c, g, or t
  misc_feature (199)..(199): n is a, c, g, or t
  misc_feature (208)..(208): n is a, c, g, or t
  misc_feature (236)..(275): n is a, c, g, or t
aagataggccccctacggaaaacagtcaantccggnctggnccaacagaaaacccagacccccatgaactttaagtaaantccctgtttccngaaactaaagtttaatccaccccccacatgaacccccaccctcangttccanttaggaaaaaagggccacttaggaaatancccccatgagttaacaatgtaatagnagaataaantccttcctgggggaatgggtgttgggtnnnnnnnnnnnnnnnnnnnnnnnnnnnnnnnnnnnnnnnnggatgcctatgatagcagtcatttagcccatcctgtagaggcctctccgttgatgtaagcaaagccaggaaagtgttgcatgtgctcatattcagaattcctgcgcgttgtcagaggtgtatacatgtcactagagtttccgtacctcgcagaatgcacagacgggcttgtgtagcacgtgttggctgagggcacctctggccagcggggagtgactggggtaggatgcagtctgggagtactgctcatcaaacaaggttccatccgggaagtggggctattaaaagggtacttgttgaggggaaagaaattccacaaagttaaaattagcttgaggttgcat

SEQ ID NO: 375288 - DNA, 350 bp, Homo Sapiens
  misc_feature (228)..(228): n is a, c, g, or t
  misc_feature (288)..(288): n is a, c, g, or t
cacacgtgggcaaggcaactgaacccaccaggtcctgttattttattaaggagcatttacattatgatagcaagtttcaacacattcatcaacaaggcggtcttcaaatcaatcagtcaaccccccgagttagaaagtagagtcatgaggaagagctgcttggctgtaggaagtagggttaatgccctctaatccccggaaagggccagactgaagccagagccagantcctggcaattcaccagtttctcatcacaggtaaaaaggcaactgcatcccacatagctntgaggggggaggcctcccgggagggccaagccttaaggtttggggtttcccagaccctgggg

SEQ ID NO: 375289 - DNA, 735 bp, Homo Sapiens
  misc_feature (160)..(160): n is a, c, g, or t
tttctgtgaatgtttgcagtctcctaccgtctcaactacagctgcagttgctaaaaagcacttaactcgtaacctagaggcaatatagcttaagtagcaaaaatatttttttacagtaagcttcagtcatccatagtcactataagttggttatcgatcngaaatggttagaaccagaattgtttcaaacttggggggttttcggattttggaatatagtcaagcatggcttaaccacagggatgtgttctgagaaatgcgctgtcaggcagtttttcctgtgaacaccatgtgtacctacatggacctaaaaaacaggtggtggagcctcctccacacctaggctatatggtgtatgtagcctgttgctctagactggagggcacgttactgtactgatactgtaggcaactgttaacacaatggtatctgtgtatctgaacataacatagtaaaggtacagtgcaaactgtgttctaatatgtggcccctcattgactgaaaagagattctctgcttgactatttgcattgtatttgctggttaagtatccccaatcccaaaatccaaaatgctctaaatgagcatctcctttgagcaccatgtaggcactcagaaagtttcagattttgcagcctttcagatttggggatactcaacctgtaataggaaaatgtcttttaattatgtgcatatttacagtaggaattaaagatttgtttagctaaaagaaaa

SEQ ID NO: 375290 - DNA, 308 bp, Homo Sapiens
ggtctccttatacctaagaagttatgaaaatcatgtgtacttctggaagctttcgaaagaatcttgtccctcatgacagcattttatcatgaaagcagcttctcctttctgggctgggcttgttcaagttcggtgtgggcttccactaaggcacttgtcctggagacgttggctttcccagctgcatctgccccaaaaggttgtaggcacagctgtcgtagcgttgccataaagagtttgccaaatctctgatcctccctttccattgcttctcctagtgatgcacgaagattaggtgcatttatttt

SEQ ID NO: 375291 - DNA, 413 bp, Homo Sapiens
  misc_feature (337)..(337): n is a, c, g, or t
agccaagacccgtttggagcgaactgccttgttctttgctgtgtggaaggttctgtccctactgctgaactccagttcctccccaagcaccctggcctcagaaatcctggcttccccaagttagtgctgtctgacctgagccaggccactgcttggtgcctctacaggccactgtgcatgttgagaattgcccaaggattagtgaagctcctgaccctggcgaggccataatgaacactgaagtgcacaggccaagggatgtaattgaaaggcatttatttttgtgaagatgctataaaattagcatttaaatatcccattcccttctcttggcctnctcctatccccctatggtatttcttccttctctcctcaaggccagggttttttgtgaaaggcattggctcatcttt

SEQ ID NO: 375292 - DNA, 816 bp, Homo Sapiens
  misc_feature (20)..(20): n is a, c, g, or t
  misc_feature (33)..(33): n is a, c, g, or t
tagcaaccctcaataaacgnggtgaacttcttngggcaaaagactaaaccctctgctgggaaacacgctgggctgcctgcatcaactcctccacccagtggccagcccagccttgccctttaaaatttaaaaaatcaggttcctgaagtcccatctctgcccttctccttacctgactttttagcttctcaacctttcccaaaaggcaggctgaggaaggtggtattggcaaagcaaaagcattctggggggataaaaaggcccttttcaggaatgaggcataactgatcccacagagccaaagctgaaaacacacgaaagacaggcaactctttccctttactcccaggtctaaataaaggtgcactcttgccttgggagtcctaatatgtagcaggaaagaaatacctggagagaaaaagcattaggagtacatgaaatcccaaagaaagcaggttcacttcataaagtaggaaagtaaaactcatggggacactccccaggttgcaggaaactagagattcatttgcagaggccgtctgctcccagccaacgtccttcccacgcctctgcccagctcactgctgagtgcacatctggagggagtcaccagatattgtcagtgtcatcaacaaacctcctcaccagccactcactctacttactgcaggcagagagatttataactgctgagaagaaaggaaaagatggggaaggggctgttgctctcaaacatgtcctcccagagagtctaaagccactggcatgcctctggggccacattctttctgagggagcaccagatgtcactttgta

SEQ ID NO: 375293 - DNA, 332 bp, Homo Sapiens
aataacccattaggaaaatgggaatttttttataggcctgcccatacttcctactttgcccaaatagcactttattatcaagatacacccatggctcatttcagactcactgaactttttttatatgaatgcacagtcgtcatattttgggcagtctgtgagttcttggtaactcatccccttactacaaaagcactaagtgaacaatacaaaagtataaaagcacaaatttgaacttacatagtttagtttaagtatgtttcactagaaaatcaaatatttagatttctcacattgaaaatgcttaggattgaggtttagctgcttccttt

SEQ ID NO: 375294 - DNA, 324 bp, Homo Sapiens
  misc_feature (13)..(13): n is a, c, g, or t
  misc_feature (33)..(33): n is a, c, g, or t
ccattgttagccnctaattacaggttcatgttnccctgtttatgtagctttcccctatatagcctgaaaaagtattaaagtcaaatataaggtgggaatgggatggaagggaggagatcaatacaacttatatttttgcagtttctactggaagaaaaaagttttcaatacctagaccaacttgttgaatttttaaaacttatgcactataaatgcaactttctctactgctttcatcagtgcctttaggaagctttcaaatttttttgtactgtggtttgtattaaatttgcaatattgatgtaaaatacatgacatgctagt

SEQ ID NO: 375295 - DNA, 343 bp, Homo Sapiens
aacttataacaaaataattggccatcttcattggattgtgaagccatttcctcccacatgttcgtaaaaatggtagccatggcccctgactgaacccaggtatgaatggccttcattgattttgtagaccctgaccttctctgttcttccagagaaggtggtactcagataaaaactttgaagcattttattgttcagaatatgactttgatcttctcataagactcaagtttttgaatgcttaaggctctttatcgctagtgtatgtaaggtaatatcattgtccctaaccaccatctgcctctccccccagacacacataagtttatggataactacagag

SEQ ID NO: 375296 - DNA, 324 bp, Homo Sapiens
ccaaccctcagccttttaacctttgcccccgattttccccttcccattttattttcacttcccattttaagcctggctcaaagcccttttaggaacaataagttactgaattatatgaacctatttgaggtaatgatgatgccctgggaaggagcagtattgctggatcagaattcactttttccaagttacagattttaataaaccactgtgcaaagcattaggataaatttttattgaaaattgagtgaatgactgaacaaatcgctgggtaatgctgtttaggttgttctattttccacggattaaattaaattgctatgt

SEQ ID NO: 375297 - DNA, 484 bp, Homo Sapiens
  misc_feature (263)..(263): n is a, c, g, or t
  misc_feature (362)..(362): n is a, c, g, or t
tttttttccatgttaggtgcatgatccttcatcaataacatggaaaaaaatcaaaataacattacaccacacacaattggcatatcctattgtgtaagcgagtgcagaggttgaacacatcacaatagtgctgaacacagaatcacaagtaatgtcaaaatgataacttccaaccaaaaaagaaacaatcacaggccaattacttatatacaaatcaaccctaaagacaattatgttccaaataaagatgtccacaaaagaanttcaaaggcaacattatacttatttacaaatggcaactaggccatgtctttaacaggcttattaaaaattactatttcacattttccaaacatacggtngtattttttgtttgtttattttcaaaaggggcgggcttaactttggatggcgggggttttaaattaaaacttggtgggggtttacccggcgggggtttttttggcaccccattcctttgggg

SEQ ID NO: 375298 - DNA, 479 bp, Homo Sapiens
  misc_feature (228)..(228): n is a, c, g, or t
  misc_feature (231)..(232): n is a, c, g, or t
  misc_feature (367)..(367): n is a, c, g, or t
gccgagacagaatcagtgaattacttggcatggacaaggcagctctggacttcagtgatgccagagaaaagaagaagccaaagaaagacagctccttatcagctgtactgaactccattgatgtgaagtatcagatgtggaaactaggagtcgttttcactgacaactccttcctctacctagcctggtatatgactatgtctgttcttggacactataacaactttnttnntgccgctcaccttctcgacattgctatgggattcaagacattaagaaccatcttgtcctcagtaactcacaatggcaaacagctcgtattaaccgttggcttattagctgttgttgtatacctatacactgtggnggcattcaattttttccgaaaattctacaataaaagtgaaggatgggtgatacaccagatatgaaatgtgacggatatgctaacatggcttattatggtcccccatgtatgt

SEQ ID NO: 375299 - DNA, 756 bp, Homo Sapiens
  misc_feature (39)..(39): n is a, c, g, or t
  misc_feature (89)..(89): n is a, c, g, or t
  misc_feature (141)..(141): n is a, c, g, or t
aaaaagctgaaggagtctttgacagttaagatctggggnaaacgctggattctaggcaacctgtccctagaaggcatcgcagtgctaancatcctaagcatgcatggtggctccaacttctgggggtgataccaggagacnccatggggatatcaatgggatcaacaaggcctaaggtgctacagctaaagtcatcaccgaccctgatatcctgaaaacctgtgtaccagacctaagtgacaagagactgcaagtggttgggctggagggtgcaattgagatgggccaaatctataccaagctcaagaatgctggacgtcggctggccaagtgctctgagatcaccttccacaccacaaaaacccttcccatgcaaattgacggagaaccctggatgcagacgccctgtacaatcaagatcacccacaagaaccagatgcccatgctcatgggcccacccccccgctccaccaatttctttggcttcttgagctaagggggacacccttggcctccaagccagccttgaacccacctccctgtccctggactctactcccgaggctctgtacattgctgccacatactcctgccagcttgggggagtgttccttcaccctcacagtatttattatcctgcaccacctcactgttccccatgcgcacacacatacacacaccccaaaacacatacattgaaagtgcctcatctgaataaaatgacttgtgtttcccctttgggatctgctaaaaaaa

SEQ ID NO: 375300 - DNA, 496 bp, Homo Sapiens
  misc_feature (37)..(37): n is a, c, g, or t
  misc_feature (72)..(72): n is a, c, g, or t
acatttgaaaaacactcaaaatactgagagtaaaggnggcccaacccttcctcagggcccagaaaactgacnggaaccccaaaggcttatcttaaatccatcaactcaatttgccagaaagtgctgacagaccacccacctttgcaacacagggctcaggattcttgcatttacaaccactaagaaaagccttctgggagaagaaaagcacagactggtgaacataagttactgaaaaagggttgactgcattctatatctggcacaggaaaagaaaaattcaaacagctgtgaaaccattatatttacaccacgatactcttacatgaaccttgactttcctacagcaacagtttcattcacaaaaaatacataaaagattggaaagctttggggtagcaccaagtgacagctagctgtcattgaatagttttaattttttcctagaggcaaaatttagagaaaacttaaagaagcaatttatagaaatgattcc

SEQ ID NO: 375301 - DNA, 523 bp, Homo Sapiens
  misc_feature (478)..(478): n is a, c, g, or t
  misc_feature (511)..(511): n is a, c, g, or t
tcaatctagaccttgagactaactgggagacagctggtgctgcagagtcacacactggctctgtgcctccagcaagccgtgtgctctgtctcccctgcttcccgccacatggagtgcagaagggaactcattcattattttaaatacaaaaaaagtaatacatgcttattgtaatagattcatgcaattcagaaaatgtaagaagtgaataacccctagaggtaatagtaacagtttggtgtgtatcctttcagacacagtgatattaatatatgtttgtgtacacatcaatatatacccacctttttaaaaagtaaggaatatatttacctattctgctctgtcttttagttacttaatgtcttttccatgtcagtacataggaggatctccttccttgttttcagtggtgtgcacgatttctttgtatttagccattagcctgttgatggcaatctcagttgtttctgttttcttnattacaaataatgctgtggtcttaccattgtgncacctaacttta

SEQ ID NO: 375302 - DNA, 442 bp, Homo Sapiens
cctggaaatgtgtcaactgcccgtcagcctggattcaattctgagggctaagcacgaccttatccatgagtggcgaagacacccctgaggaaaggattgcttgcacctcacatctgtcttcttctaagattactcggagattttcaaacaacatctgagaacagaagccccctcccctactcagagaggaacgagggtggcccacctctcaagggccttggattcctgggaccaccctttgctgggaggaagaatccacaccgaatccttctgtcttcatggcctgctgtgctgaaacagaacagcaggttccatctttcacatctttttttctcccccagatgaaagacgactcaggaacggtagggctgggcagaggtgtctcttccttcgagagacaacaaaagcttcttaaggggagggagctttaaaggcttgttag

SEQ ID NO: 375303 - DNA, 345 bp, Homo Sapiens
  misc_feature (43)..(43): n is a, c, g, or t
taaagaaaaatccttccatattggcctgttggttatataaccntccaaatttaataaaggaaatacttacgtagtaattacatttcccttgaaaaaactatagtgaatagaaatccctagccatttcattttttatgtttttaatgaagatctttaaaataccataggtggtaatcgtggaaaatttgaaaaatctcatgtcagtgtattaagatggtggagaagtttttttctccattatttaatggaactttgggtctttttattaaaaatgtgagactcatgaaattttggcagctgaatatttgtgaaataagaatgaattattaaaagatgtctttccat

SEQ ID NO: 375304 - DNA, 654 bp, Homo Sapiens
  misc_feature (21)..(21): n is a, c, g, or t
  misc_feature (33)..(33): n is a, c, g, or t
  misc_feature (63)..(63): n is a, c, g, or t
  misc_feature (141)..(141): n is a, c, g, or t
  misc_feature (184)..(184): n is a, c, g, or t
  misc_feature (219)..(219): n is a, c, g, or t
  misc_feature (241)..(241): n is a, c, g, or t
acaaaaccatgctgtgccccntgtgaaaaactntccctcctaaccctatttccccgggttggncctcccgagaaggggatggatgaggtaacacacagtttgggatacgtatcctgttgaatgaatgaataagtgaaaggntaatagtccctctgaggtaaaaatggccttgtcagaattttgnaaatccaacagattcctattaaagcactctgtgtnccaataacatgcatgcattgtnccaagtaatcacaatgtgaattggtcaatttatgagccttgccctactttagaaaataaagaaacctgcagtagcctctaccacacagcatgtacaaagaccagtatggacttgcctatcttccctatgtattggacactgtatgcaaacaccagaagtacttaacaagtagtggtttcttgatttttagatatgtctgtagcctcttagcccttttgccgggaatcaactcattctgatgcctctgcacctcagttcctcttacaaaagcctccagatgatctaaatctagttagcaatgtcagcctgtggactgcagctgtttgggacattgtattcctttgtttgtctcttgttgttctgaaggattgtattgatcacaaagctatatgcataaagattctcattgttgt

SEQ ID NO: 375305 - DNA, 448 bp, Homo Sapiens
  misc_feature (359)..(359): n is a, c, g, or t
  misc_feature (386)..(386): n is a, c, g, or t
  misc_feature (392)..(392): n is a, c, g, or t
  misc_feature (428)..(428): n is a, c, g, or t
  misc_feature (434)..(434): n is a, c, g, or t
tggaattccatgacaagtccaatcaacattaactagctttcaaggtcgatgtcagcaaaatgaaattgccattagaagcatcacaatcagtgtccttcctcatttggcataggtggaggaggactgcagagttacctttagtaatatctcatgatacaatgatgcttcatgtcaaatagcaattaatatcattttaacttaaataatgtggatattattttacattttgatattaatttttttaaaacacttgaggtttaaagaaaagataaaacaaggtagctttgtcaaggaatgaggaatttagatcttcactggttaatctctttaatttcaaatttaggctactttaagtgggnacgtaccccaactttaaaataatgtcntggganttggcctccttgggttaagggactctccaaaaaccngtcccnggacatgggttttt

SEQ ID NO: 375306 - DNA, 490 bp, Homo Sapiens
gtggcaaacaagcttcaagtgctcaagaaactgtaagaaatgttgatgtgactggcctgagtttcagtctgaaaactttgggtgcctaaatagtgaaccatagttgccagaaaaatagaaagtaaaagaaagcattgtaccgtttaaacatatgcaaataaataggtagaaacagatagaaaacagtatgttttagggagtataattttggggtaacatatcttttattatttttccctaactggggagggggtggaagactatattgccaacaaaatgaaagcttttaccccctaaacatgtcaaacaattcagcagctgataattacatttattggagttaaaaaataaagtgggatcttaaggagaattagtttatttgaatcatggtgactgagagtgaaaagagaaaaagacaaatgtgaaacttctgtttcatccactaaggagtcagcagaaagtaccacggaacctacagacctcaaacacc

SEQ ID NO: 375307 - DNA, 556 bp, Homo Sapiens
  misc_feature (67)..(67): n is a, c, g, or t
  misc_feature (150)..(150): n is a, c, g, or t
  misc_feature (527)..(527): n is a, c, g, or t
ggaacttaatgtcagtaactcactctctctctcacacacacacattgtattatttttcctcagggtncttaagtgcctatagtacgtaacaatttttgtcctttgtagaattataaacagtatcaagaatttagaccacaaagtcaattntaaaaaactcttgctttaatcattaaatcttaaaggaccattagaaaaggccagtcacattctgttctccagtcttgcaggttacataagccatttccataaattctatagccttcttcttagagtaacacacactcttgtttaggaatgttcatgttggttttgttcacggactgaggattgttagtgggcaggagtttatttcttctcaattttctgggagataaagggggaaagcagtcttcaaaaatttaaggaccaaaaatcttaaaggacatttcacaaataatagtactccatgtaaagtgggaattcaaagggcattcacaaaattggccatactttactgtttgtgagggagtccaatatttgacttngggaccgggggcacaaactatgtcccttc

SEQ ID NO: 375308 - DNA, 567 bp, Homo Sapiens
  misc_feature (459)..(459): n is a, c, g, or t
  misc_feature (475)..(475): n is a, c, g, or t
  misc_feature (483)..(483): n is a, c, g, or t
  misc_feature (488)..(488): n is a, c, g, or t
  misc_feature (534)..(534): n is a, c, g, or t
  misc_feature (543)..(543): n is a, c, g, or t
  misc_feature (548)..(548): n is a, c, g, or t
aagaataataaaataaaacagatgtagtggtgacagctgtagcattgtaagctttagagtagccctcatgcttctggccatgataacactagattctcaagttccttaggccagagtggtcacactgaagtgtctgtggagactaggcaggtcatctaagcaaaggggttgttgtagactattgtacataaataatagctgcctctccctgagggtggattacacttcccagccccaatgccttcacccttgccatggaacttgctttgggcaatgaaataacagcagatacttcaggagatagtgtatttttgttaatgtaccctttcctcactccagtgatgctccagagagactgctccctgctctgctggctgggggtgaagatgatgtgggagcagaaccacagttcaacccaccataggataaggcaatgttgagccaagaaataaacctttnttagttaggccagagntgtttttngtccnttgttactgtgggcttaaccatggccccatttattttccagttccnggtttaggnctttnggggttatggggtttgggg

SEQ ID NO: 375309 - DNA, 564 bp, Homo Sapiens
  misc_feature (94)..(94): n is a, c, g, or t
  misc_feature (104)..(104): n is a, c, g, or t
cctttaacccggatactaacctaggataatccacaaacatgcaggccctggcctaacaagtgtttgcccataaaaacttccttggtgaaaagantttggcctanggaggatatactacccctgttaaccccatccaagttctccctgtcgaataggggcctagtttccctctgaacatattcccattatgaaaggggagcaatgcaggtgccgtgccccttagggctactgcgaatgtcaaataagatcgtgatggttggatgcacaggaaggaattgacaaatgagctcccattggtatgatagtgattttctgcctcttgagtttcattcggtagaatttcttgctgtcacttgcaggcttactcacctaaggctatttgaaagtgttttgttgaccacaaatcaaaacacagtgacgcaagaaggcacagtggtagaaataacaaatccaaagaactccgtttcagacagtgtcacctgaggagcttcaccaaacagggcttggttttccaaaatcaggccagcagagcctcctcaactgtgcagctggccaaagctaaag

SEQ ID NO: 375310 - DNA, 286 bp, Homo Sapiens
  misc_feature (13)..(13): n is a, c, g, or t
gatacctactgtnctatgccacagcacttaatgtcagtgttctatggcatggcacttaatgtcagttttccaccccatctgtgaacgtgtattcaatcattatactgtatttagcctgagaatgaatatggaaaagaaaacaacactttcttcaggctttttgcaactttttaaaagcaaaacaggctccaattccccctcccaggagttttgtttgtatccaaagagaggacatgctcattgccatggaatccttaaaggactgagagggaagtgatctgtggca

SEQ ID NO: 375311 - DNA, 324 bp, Homo Sapiens
  misc_feature (104)..(104): n is a, c, g, or t
  misc_feature (146)..(146): n is a, c, g, or t
gaaaaacccataaccacctcagatggatctgacgtggctaagggacaaacagcaaatatttcagtcattttgattttacaaataaaaaatgtgttgtgtttttntccgacattatttcctgactgcactgttctgagaatggagtncacctggtccctctggttgattagaatctcaggtttcagctcctgctgttctgagcgaacttgcctgatgcagggctgtgctgtgtccagatgttgctggggcctcactttttctcttggctggaggtccaattgccagagcctcccacactgcacatacaaaggtctgagcccaggg

SEQ ID NO: 375312 - DNA, 316 bp, Homo Sapiens
aataaagttaatttcaatgtttaaagacttgttattaaaataatagcagtttctataaatttaatatttcaataaaactcccagtatttattgttaacactggaaaaagttttccaaaacgtatatggcagaaatatgggccttgatgtgaggacagcatcaattaatgagggatcctctcccttgatcaaaacaccttccaccaagacccacctttaacgctgaggcattacctctcaaagtgaggatttggggcaggggactaatatccaaactgttattcaacatctggacagggtgtttcacaaccaggatt

SEQ ID NO: 375313 - DNA, 431 bp, Homo Sapiens
  misc_feature (358)..(358): n is a, c, g, or t
  misc_feature (374)..(374): n is a, c, g, or t
  misc_feature (387)..(387): n is a, c, g, or t
  misc_feature (401)..(401): n is a, c, g, or t
  misc_feature (409)..(409): n is a, c, g, or t
caaaggtgtatctttacattcaaatgcagctgtgcagaaaagaaaacctcaaagactggatgaatggacgatgtaccatagaggagagagagaggagcgtgtgtctgcacatcttcctgcagatcgcagaggcagtggagtttcttcacagtaaaggactgatgcacagggacctcaagccatccaacatattctttacaatggatgatgtggtcaaggttggagactttgggttagtgactgcaatggaccaggatgaggaagagcagacggttctgaccccaatgccagcttatgccagacacacaggacaagtagggaccaaactgtatattgagcccagagcagatttctgggnaacagctatttcttcntaaagttgggccntctttttcttttangggcctgntttctattttggaattgcctgt

SEQ ID NO: 375314 - DNA, 286 bp, Homo Sapiens
ttttttttaaatctaaaaagttcaacccaaattagtccttgttgtaatgttcaaaatattctttaagaacatagcatggattttattatgcaggcaaaatccatattcctatggattaaactgctttgatcagttaatctgttaggccaaggtaagaaaagaaattctaaaccatcaggatatgctgagtctgattctatcgcattaactctttttatctttaaattatactctgtagatgtactaacaaagaagtgatgggagaaaattgagggatgtctttttt

SEQ ID NO: 375315 - DNA, 359 bp, Homo Sapiens
  misc_feature (64)..(64): n is a, c, g, or t
ctcgtgtactgcgtataaatgtatgcatctgtattcgcccatctacaccaaaataaacctttgnaattattgcccaggcagaattaatgagctcagttctaacagcgcaaagaatatcttcatactacaggtaaaacaaacagcttctcccttcccttcttctgcacagaatggctctacgaagtctgcctgcaaaattacgtcttttagaaaaccaagtagctggctgttttgtgagcagggaggatttcaggacgaaccacaaacaagctgtttgtttagattttaaggttgacagttcatttacacgtatgccccataagtattctataacatagtcctgaaaaagcactgaagga

SEQ ID NO: 375316 - DNA, 406 bp, Homo Sapiens
  misc_feature (251)..(251): n is a, c, g, or t
  misc_feature (293)..(293): n is a, c, g, or t
  misc_feature (324)..(324): n is a, c, g, or t
  misc_feature (345)..(345): n is a, c, g, or t
  misc_feature (377)..(377): n is a, c, g, or t
tttaaataaaggaaaacagaactatagcaaagcctaacaatgtctgttaaatgaatagaaaatagaatgagaacaattaataagaaataaatttaaagagctatgagatttctgaggagagaatggttacttctggtgtgaagggttagaaagatttcacagaaattgcatttgtgctagattttgatggatggtaaagagcaacaggcaacagagatgaaaggagggaatgaaaccttaaattatgtccnggggaactagggagtggcccagttaggacatggaacacaggngatgtgtttggttggggggaggaagtttacnggttaagtcttgggaattgcngttttgagggccagactttggaggactcttgnaacccttcagttccactgggctccggggg

SEQ ID NO: 375317 - DNA, 358 bp, Homo Sapiens
actcccaagcttccctttttcagacataccaaagcccacctcagtctgtgtgtatgccccaaattgctattctgtgattcccaaataaaacatttaatttagagatttgtttctatgttttcttttgattgcaacaggagcgtatggggaaaggcaggataggacagcctgcagaggccatcccaggccccaaagccaccccatttctctgcattacagttggtgtcagcagagcccaagccagggattaggggacactatggctcagaggttcaagctaagcatgggttaaacagtcttgtgaactatcctcagaccctcaccaccatcttcaattttacatctatgaaaaaacttt

SEQ ID NO: 375318 - DNA, 538 bp, Homo Sapiens
  misc_feature (465)..(465): n is a, c, g, or t
  misc_feature (505)..(505): n is a, c, g, or t
  misc_feature (519)..(519): n is a, c, g, or t
cagaggagggacacggaattactcacagctgtgctgtcgacattctctgtgggcctagcagggaaggggacagccctgtggcaatgggcatgacacggatgctcctggaatgcagtctcagtgacaagttgtgtgtcatccaggagaagcagtatgaagtgattatcgtcccaactttgttggttactatcttcctcatccttcttggggtcatcctgtggctttttatcagagaacaaagaactcaacagcagcgttctggacctcaaggcattgcccctgttcctccacctagggacctaagctggggaagcagggacatggaggaaatgtgggctttgcatttaaagggagacatccgtgggaaaactttctggggagctaccacaccttgcccgggttaaggttgcaggttcccccggggacaacttttcttgaagtttttggaagcagaatttccagttnggtagctttttgggcccatttttttgggggccaattttgnaacaatttgggganccctttttaaggcccaaga

SEQ ID NO: 375319 - DNA, 388 bp, Homo Sapiens
attattgtacagtttctttacctttcaagtataaatgtgtatataaaatgtaaatacaaagaattcactaaaaaccactcataacaattactgtgtaaataaaactggtaagcagagtaattacttgaaatgagtcttcattactttggggatatctgttttatttaactgcatctcaaggaaacaaaggaaataatctttgtttttgtttgccaaatttgtcttccaaggaatgcactaagccttcagtctttttagactgacagtactggcagctaaaatattgtactgtatcttctcttgagcccagtatgtaggaaatatgtgataattcacatggtcagtatatggcagtttttgttgttgttgttacagtatattttcaatt

SEQ ID NO: 375320 - DNA, 383 bp, Homo Sapiens
  misc_feature (53)..(53): n is a, c, g, or t
  misc_feature (77)..(77): n is a, c, g, or t
ctggagcagaatcacctctggcacagctgggtccacaagagcccgggcagccnggaacaaccctggggacgggcagncagactccgtccagctacccgggaagaggcacaggcagccggaagcaaaccctggggtgggcaggcagggttccgtccagctgcccaggaagaggcacagggcagaggcagctccctaagccttcctgaggactttgtgttttctaagaacttgaaacactacagactgagtttttaagagaataaagtacgtggaagagactgacaggtctgcggaaggctcccagactcccagatggcgtctaagcattggcaccctgctgaaaggatcttttgatctactctcaacgtgctggagcctcaggg

SEQ ID NO: 375321 - DNA, 441 bp, Homo Sapiens
  misc_feature (349)..(349): n is a, c, g, or t
  misc_feature (364)..(364): n is a, c, g, or t
  misc_feature (376)..(376): n is a, c, g, or t
  misc_feature (407)..(407): n is a, c, g, or t
  misc_feature (420)..(420): n is a, c, g, or t
ggcacagaggggaaggctaggaatgtgtcccagcatcttagatgatttgcatgattttaaaaagtgaaataagattcataaatttgagcaaatttttaaagtggcagtaatccttacattttgattcagttgattttcagatccccttcacatatacgtattttacagttgcaattatttaacattaaatgttatacaattgtatatattgtctaactacatatcattgttacaattttgtcaaaatgttatacaattgtatatattgtcaaactattgttacaattttgtcaaaatgttatacaattgtatgtattgtctaactacatattctttgctacaattttgncaaaatgtatagggntgtatatattgnctaactacatatcgggtacaattttgtcccngtttgttgaggcngggtccccccgtgggcccggg

SEQ ID NO: 375322 - DNA, 158 bp, Homo Sapiens
atataaaatgctaaataccttcttaaattctttgtaaaatgatataggtataaatatataaatcaaggttaaataaggtgggaaagttaaattataaaacctaaaattacggaaaaatcaaaatagactagaaaagttaacttgatttttaaatagaa

SEQ ID NO: 375323 - DNA, 446 bp, Homo Sapiens
gggacgggaaggcctatggcagtttacccctaatgcgaaccatgtaagctggctttagttgtaacaaacgattttaatccaaagtaaggcccaggtgctactataaaatccatatattcctgttgaagttcttttgaagtcctatctctatttattatatttgaaagttgtcagccaccagtcatccagaatttccttcctgaatctccatgctcatatgcaatgtctacatcaaggtcttcttaatgactattattctcagggtttagttttctaccttctgcctactattttggtctgacatttttgtagccttctgttattattggaaatagtctcttacataagctgatttcgagaactttcaaaatctcacatagctaatggaagttgctttctgctttcttatgactgtttttataaataaactgtttcataaataatgt

SEQ ID NO: 375324 - DNA, 323 bp, Homo Sapiens
gagagatagcaatcaaagcaattaggggtgttacagaggcagctttttgctgcttgggttttgactgtatcagcatttctattgcagacctctattttcaggggttttagagactcgaccataaaaatttgtttcaggcttaaaagttttgaaagatttttttaggtatctgattttaaacaaatagatcttgtttttatattataggagggaaataaatggagtttactagttcaattttgcgctaatataacttttaataaacttaactttttaaacaaaaacataaaatctaattagttcatagttggttgatgcttttt

SEQ ID NO: 375325 - DNA, 520 bp, Homo Sapiens
  misc_feature (20)..(20): n is a, c, g, or t
  misc_feature (72)..(72): n is a, c, g, or t
  misc_feature (74)..(128): n is a, c, g, or t
  misc_feature (151)..(177): n is a, c, g, or t
attagctggccgtggtggtncgtacctgttgtcccagctactcgggaggctaagatgggaggattgcttgancnnnnnnnnnnnnnnnnnnnnnnnnnnnnnnnnnnnnnnnnnnnnnnnnnnnnnnntgacagagtgagactatgtctcnnnnnnnnnnnnnnnnnnnnnnnnnnngagggaccccagctgctgtgactttggaaactaaaggtgttaacaaaggtcaagcctttccttaggatcgtttctggtttcacccttatgtgattcccaaaactcaactattattgtcagaaactggcccaaagacccagggctgcatttgcccaggcctaggctgtatccttgaattttctgctgcagttcaaaggcctggagaaactgaaaatgcattcatttgggtttttttcccttgaaaagaaagagataaattattttcatcttggaattttagagttgaataaataatcccaataattacagatcaatcactaataaactaacattgggaccagcc

SEQ ID NO: 375326 - DNA, 411 bp, Homo Sapiens
  misc_feature (33)..(33): n is a, c, g, or t
  misc_feature (40)..(40): n is a, c, g, or t
  misc_feature (110)..(110): n is a, c, g, or t
aaccgaaatccaaaaactggcacagcaccaccnaagcccncatcctactggtcaaaaccgcatcataaggcctaaatccaaggagagggaactagggatgcctatttttngatgggaggagtgacattgaagcattgaagaggtgggaagaatttttggtgattggatttgtagaaactgtggttaaatagttgacggattatttgtatataagtctgtgtcccttccatggtagttccataatgttttctgcctggagcaactagtcttgaccgtatctgctatgcatagcacagtacctggtacacaaaaagatttcagtaattgattgttgaatgaattaataactgtcttgccattttcagtactttaattatttttccaaaaagtggatcaaatgttcttttttta

SEQ ID NO: 375327 - DNA, 484 bp, Homo Sapiens
ggaacagagttaaactctgtggacctgcaaatttaactccagaggtattaccacacctgtctatgccacccagacagaaggctcaggtgagagctttctgcttgtgcacttgaaaattgaggcctcatcaacaaatcctctttatgaaacttgcgtgattagtctttccatcgttgcagctgtttccatcaatgcagtgtccctttaagaacctgcaggattactaatggatacaggtcatggtgacagacttaagtaaaccttcagcaataaacaatcatgttgagttttcatatgattaccatcatctcatgcctatcccaatagggcgaagaatgcatgaaggaaatgaacatgatggatcatatacatcatactgtcatcccccaagagtgagacaaacagtatcttgaggaggctcacactgtcttcctgataaaagccaacaagaatgtgcattaaaatggatcctgtattttatgat

SEQ ID NO: 375328 - DNA, 442 bp, Homo Sapiens
  misc_feature (358)..(368): n is a, c, g, or t
  misc_feature (371)..(371): n is a, c, g, or t
  misc_feature (377)..(377): n is a, c, g, or t
agacagtagcagatgggacatggtgtttgattgtgagaatcagtgagaattcgtgcatctctgctctgtggggtttggagaaatgctttggcagaagagtgaaagaactcctgccaagagcccagacctctacaaacgttgtatgtccttttttaagcagaaataaaatggttgaggatgtagtcacagtagagagtgatttttttctaagtccctgtcctctactctgaagcgttataaaaacctgtaaacattatacaaacccacaaaccttataggaaactcgtaagtgtgttgtgactgggaaattgatttcattaggaaccccagttttctttaaggaactttgtgacttggnnnnnnnnnnnccntttccnaaagacttgtaaaaatagttgcccccaaaatgttcagcacttgcacaccctccggggactttggg

SEQ ID NO: 375329 - DNA, 266 bp, Homo Sapiens
tgtaaagataattccatgttagacattactatataaaaatacgcaaattaaaagcatctttaccatgcttctaagctaccacataattccaaacaatccacacaaccaagaaaactactcaaaacattcctcaaaaagtctcaacaaccagtatcatatgaggactaaaacagttcttgtcgattttcaaaaagatagggagaaactcttaagtcattagcatattaacataacttctaacaaaatttcctgtaggaaataaattc

SEQ ID NO: 375330 - DNA, 630 bp, Homo Sapiens
  misc_feature (16)..(16): n is a, c, g, or t
  misc_feature (26)..(26): n is a, c, g, or t
  misc_feature (47)..(47): n is a, c, g, or t
atgtgcccttcaaggngtcctagggntggccatcaattcagtacacnacttgcctaaaacagttggactcttagatgccttggaactgcaacataagcaactcaacaatattagtggcatcctttatagcataccatgtcaaagacgtttttctatcaagttgtattctttcctgttctataacctttgtcatctgttagactctgtatgtgtgatttgtaaaaagcaggctgaaactatggacatgatttctgaagagcacatctccactgactttcataaagcaaatgtccaatatttatttattgagagttttttagtgcaatctgggccagtatttttatagattatgattatgtggtaatttatccttcctaactctttaatcctgaatgatggttggaaatggcctagaattaggttactctgttcacaatgctcattgttagcatgcaattggtatttgacttggaagtgttgtgttgtattttttgaacccctaggcttcaggaaaactgctcttttgtaaaaagaatagcgatgacattttctaatgtgcagaaatgttccaaaaggacaaaattgaaaaccaaaaactatgttattaaaacaaaaaaatgctaacaagag

SEQ ID NO: 375331 - DNA, 186 bp, Homo Sapiens
attaaaatatattgagattaatacatgaaaatgcttagaagtgataggaattattgagaaacattatgatggtggcattgccttttataaacatggagtgaaagccaaaagaactcaacgtttgctgtgcttaaagaattgcttcaggacccgagcgtttttatgtatgctgttcctgcagttagg

SEQ ID NO: 375332 - DNA, 529 bp, Homo Sapiens
  misc_feature (19)..(19): n is a, c, g, or t
  misc_feature (31)..(31): n is a, c, g, or t
  misc_feature (51)..(51): n is a, c, g, or t
  misc_feature (68)..(89): n is a, c, g, or t
  misc_feature (99)..(99): n is a, c, g, or t
aaagaaaaaaaatgtttanaaaccaccgggnaagaataatattcccccccnttgtgttccccgagttnnnnnnnnnnnnnnnnnnnnnntaatccaaangccaagtagctgaagtagttccctggatcaacagatggcaaacaacccatccacacatgcagtgctgctcccctggcaagaaagtaccttaaagagcctcctgtcctcaaaagggtcctcagaatctttccagaggttgtcctgtggttttgtaaaatccacctattggcagaattctaatcaattaaaagccctggatgtaaaatgcccagccctagctccactgttacctttcaaatgcagcaaaacagaagaaaatattggttaaagttaaagcacagccctgggaccaaagacctgcagctatgtttttttaaatttatatatctttaagtattttatagttttcttgaatcttccataaacaagctctaaggtgacaagactatattacaggagaaaagaaaaatgtacagagtgtgtatacaca

SEQ ID NO: 375333 - DNA, 418 bp, Homo Sapiens
caagaccaccagagtggtgcccccagaaccctggcctgtgtgccgtgaactcagtcagcctgcgtgggagatgccaggcctgtcctgcccatcgctgcctgggtcccatggccttggaaatggggccagggcaggcccaagggaatgcacagggctgcacagagtgactttgggacagcagccccggactcttgccatcatcacatgagccctgctgggcacagctgcgatgccaggagacacatgccactggccactgaatggctggcacccacaagccagtcaggtgcccagaggggcagagccctttggggggcagagagtggcttcctgaaggagggggcagtggcgcaggcactgcaggggtgtcacacagcaggcacacagcaggggctcaataaatgcttgttgaacttgt

SEQ ID NO: 375334 - DNA, 646 bp, Homo Sapiens
  misc_feature (523)..(523): n is a, c, g, or t
gaaaaagctgtggatagcagctcagaggaaatagaagtggaagtgcctgtggtagacaggcggaatttaagaagaaaggccaaagggcataaaggacctgctaagaagaaagctaagctgacctgaaggaagaagaaagtggatgataaatcctcttctttgtaacatagttgttgtttttaaaatatggtaattaataaacagcatggggcacaggacaaaaatttccaaaatttcaatttgaacttacttactatgcagttttttgcttccctttagaacgtaggaattcaccattgtttttaattttccaggctatttttggtaaatgcaattttttatttttattaaccatgtttcaattttgggaaaccagatcatattatattttctttatcaggtgggtacatctgaccattatttcaaaaatataattaaaaagctgtggaaagtagtaggagtttccattacttataaggatcacagaaatcttttatactaagggttttaataggaaaacttnggtgaggggttctagaagttttaaattccaaaactaatcaccaattttttaaaatgtaggcatgcctaaacaaaaataagtgtcaataaattagaaaaaatataacttcaagtaaatgagagc

SEQ ID NO: 375335 - DNA, 391 bp, Homo Sapiens
  misc_feature (21)..(21): n is a, c, g, or t
  misc_feature (36)..(36): n is a, c, g, or t
tgtgtactcaaatttggcacntaagttggagaatgntctgagacccatttaaattgttttaaaaatagcttgatcttgacccttatgcaaaagaaactaagactttgtgtcattatttgaggtagctaaggactgatgttgaaagtgtattcagtctatagtaagctgatgtcaggtcagtaaattttgtttggggatgttggtattttcgatcaagttaaaatcttaaagcagacaaaaatagtaaacgctcctatttgtgttagattttgaacaattgtattaccctatattttctttaattagtcaaaggtaagccagattatttcattctaaatgaaaattaaagcactttggccatttattttttcaacaaatgctaatactaagt

SEQ ID NO: 375336 - DNA, 480 bp, Homo Sapiens
  misc_feature (353)..(353): n is a, c, g, or t
  misc_feature (422)..(422): n is a, c, g, or t
  misc_feature (465)..(465): n is a, c, g, or t
gagattgaaaatgcagtggagaccggccgggcactgctacccattctccagtggcacaagcaccccaatgattactttagtaaggaggcatccaaattgtactttaacagcttgaggacttactggcaagagcttatagacctcaacactggtgagtcgactgatattgatgttaaggaggctctaattaatgccttcaagaggcttgataatgacatctccttggaggcgcaagttggtgatcctaattcttttctcaactacctggtgcttcgagtggcattttctggagccactgcttgtgtggcccatgtggatggtgttgaccttcatgtggccaatactggcgatanaggagccatgctggggtgtgcaggaagagggacggcttcatgggtcagcagttcacggtgttcttaatngaccacaatggttcaaaatgaaagagaacttggaaccggctgnaaaatttgggaacaa

SEQ ID NO: 375337 - DNA, 135 bp, Homo Sapiens
ctgacctccgatgatcccacccgcctgagcctcccaaagtgtgggattacaggcatgagccactgcacccggtgatctgtcagccactttccttgtcctctacagctaatcacccagttctgtgcctgtgtttta

SEQ ID NO: 375338 - DNA, 593 bp, Homo Sapiens
  misc_feature (19)..(19): n is a, c, g, or t
  misc_feature (60)..(60): n is a, c, g, or t
  misc_feature (72)..(72): n is a, c, g, or t
  misc_feature (82)..(82): n is a, c, g, or t
  misc_feature (122)..(122): n is a, c, g, or t
  misc_feature (162)..(162): n is a, c, g, or t
acactcaacggggcagaanaccaaccaggggtggccaggggtggggaaaaaaggcccctncccacccaattnccctgggcangcctacccccccacccaaagccggtaattttgggaaaaanccctcccctggggcccccatttcccggccccaaaggcccngccacaacaaaatacaaatagggggtaagtccggtgaagggcctgtcctcctaatgtggccttcctcctacataaccccctatgaagtctgggtacccactacttgatgcctttagaaaatccccagtttttgggtaactgttccttgcaattttagatgttgttgcatcactataaagatatacttcatcccacactgtgccagtcccacatggtttcgactcaacttgaaactatgaacagctattgcaaaaaggaaaagctaatttgaaggtctccaagacaaactttatttgtttgaagaattataacactcagattttaaaatcaatatgttatctaaaaaactcagatatggaacttaattcaataaaacactatttcacataaaaaaagttatgtgaagcaagtaatggatagggactttattt

SEQ ID NO: 375339 - DNA, 110 bp, Homo Sapiens
ccggttaaaatgtgtgtgtcaagatacgggagatttcagggttaaagtatatttcagttttctttagggcaacatatatttgaatttaaaagcactttatttaaaaaaaa

SEQ ID NO: 375340 - DNA, 515 bp, Homo Sapiens
gtgtcaaggctggggggcaagggcctcaggagcctaagacacagaaggaaaagtctgctctcccatgctggataacaggcggacacacaaggacagagccctcggctgaaagaatgcttccgcactcctagtgctcctctgggccctctgctggctccccttctgttaagcgcctttcactgtgagtgttcctcacagccttgtcctcggctgccctctcctctcaggaccttcttcctggctgaccggagccactgccatggggtcaggtgccatctatgtgctgaaaactcccagatgtactatctccagccgggccctctctcttccatgctccaaacccctatagccatctgcctgtttgacagttctcctggtgtggggcggggtggaagtcatgtgtctctacagcacctcaaaaacttacccagacccaaatttgtgatctttctacacaaatctggtccccctccactgttcacatctcaagattgggccctctgtccctccagctg

SEQ ID NO: 375341 - DNA, 382 bp, Homo Sapiens
  misc_feature (215)..(215): n is a, c, g, or t
tgtgtccttaagaccctcagctcaaatgtgactgcctgagggaaacttcccccagatgcgcccctcccccagcctaggttagatgcccgttgagcatcaagtctgccccaacattattgatctcttgggcacctacagtttcacttcttgggatggagcaaggaggccctgttctgaaggagcttaccatctggcctgagagggtgataaagggnaagaaaaatgtaaacaaggttcaaactttgataaatgccattaagaaaagtggggtgatgaagttatcattgcactctgttattttccttcatggctatctatcacaacgtgtaattagttgtgtgtgtgtcattatctgatgaatgaatgtcactgtttcccccat

SEQ ID NO: 375342 - DNA, 466 bp, Homo Sapiens
  misc_feature (391)..(391): n is a, c, g, or t
  misc_feature (410)..(410): n is a, c, g, or t
ggcaagcccatcgccgtgctctgcctgactgtggagctgcagccccacgtggtggaccaggtcttccgcttctatcacccggagctctccttcctgaagaaggccatccgcctgccgccctggcacacatttccaggtgctccggtgggaatgcttggtgaggaccccccagtccatgttcgctgcagcaacccgaacgtcatctgtgagacccagaatgtgggccccggggaaccacgggaacatatttctgaaggtggccagtggtccaagcccggagatcaaagacttctttgtcatcatttactcggatcgctggctggcgacacccacacagacgtgggcaggtctacctccactcccttgcagcgcgtgggatgtcttctgcgtngcagcccagctgaacccgnctgttccttgttccttcggggggacacagaacagtgagggaaattgaggagttttt

SEQ ID NO: 375343 - DNA, 493 bp, Homo Sapiens
  misc_feature (73)..(73): n is a, c, g, or t
  misc_feature (134)..(134): n is a, c, g, or t
ctaaaattattatgagtgggccttaatataccagttgttcccacctacacatctagccttgcctttgctgggnataaaatttgtaatacccttcagaggttagattccagaagtaccctccctttaggaaattnatttttagaacctagatctgggtgtagcccagaaacacgctctgccctactctgttgtagcatgtagcctagttggttaacttgatattttccatactccaagtttatcggcagaatgaaacgtttttgtcctataagtcttcagcatcctaacattgcctctagcacttagaaggtcatctattaagagctttccagagaacattccccaaaaggccgatgggaatatctgtttggtgggtgtctccttattgtagaatggatacaacaggttatcaaacttgacaccattatacattcagattgtatttatcattgtttaagaaatatgtgtcttgtttcctcagttacgggaaaag

SEQ ID NO: 375344 - DNA, 667 bp, Homo Sapiens
aagtcatttcagattttcagtgaatatatgtttgctgtgtccttcaggtaccaagatgcagggaaatgattaaaaggccctgagatatacaatactgaatggtagggaggaggaggccttctaggttggaaagtcccgtagctgactagctactaaatgttctatcagctattgataagaccgtgttcagaacatacggaaattgtaggatataatttttgtatgttacttgtcaccagctgttcaatattatgaattattcctgagacattacagaagttgagaatgaattgtgcccataaacagaaaacatattaacctatacaatacactcgttttccttttagagacacgaatacccctagctcaaggagtcgatatgtataaaataggcaactaggggcatgcaaatattgtggaaatggtgtttctgattggcactggcagatttattattcgaaataatcctgttggcaaaaaaaggaaattttttttccgtatcataaaatctgatttcaaaaacttgctcctttttgactttctctataagcttgtaagtctgcattcttctctcatttttatatccaggctctattgtaatttatctgttgctaaccagttttcaataaaatatataataaataagattttcggtttttaaaaaaaa

SEQ ID NO: 375345 - DNA, 430 bp, Homo Sapiens
caggtgagcccttcagaagtggtctgtggggagccagttggagagacatgggggctcctgggaggagccaagggaggtcaaatctccagcaggaggccccctttatggcttttcagtgaattcaaacagtgggaggaaggggcacaccacacacatacacagaacatggaagctactgggatgccagataccaggctggacactgcaccgggccctgaggtttggctctgcaggcagatgtgcagcaaacaggccttcagggcgacagggtcctccagcatctcccaaggcagggctggactggagcaggcaccgactcccgcccactgatgactcccatggggggtttcccgatgggaggaggcaggggtggggctggggaacaaagactttacacgacataaaatcaaaggagcagcctcaaccagtt

SEQ ID NO: 375346 - DNA, 534 bp, Homo Sapiens
tataagtgatcactggaacggagtgaccactgagatgctgggggtcactgggcctggaagaccatcccagcctctgagttctctttgagtatgagtgattacttggattttagtatctgttctctctgagcctggatgggcttggggccagacctttgcctgattcctgattcccatgagaaatcagaactgctttctgcagcaaatcagggcttccccctaacatctgaactcctgtaaaccttcatccctggccccctatcttgggcccattagttttggggatggggcacagggcatagctatgactttgctttctggttggagcctggccggaaggaagagccctggaggtggttgggggcaaatgtgccctgagtccttggggtggttctgcttattcttcaagtttatctgaatctgtggggagtgcatgatccccatgttgcaatatggagtctctgccctgagatcttccccatctcagttttccttccatgaaagagtacgtgtaaatacatagtgttccataag

SEQ ID NO: 375347 - DNA, 484 bp, Homo Sapiens
  misc_feature (459)..(459): n is a, c, g, or t
  misc_feature (473)..(473): n is a, c, g, or t
cgtggaaagctatatgagaaaatcacaattttctgaatcaaatatttgtaaaaccatttggctatttaaagactcttagggtaaatactccctggaaaagcaagcaatccagacttatctggtctgcaaaccttgatttcagcttaatatcctttcctgaatctaattcattttcacccactaaggtcatttcatttaagatccattgtttttgaaattttgaagtagcccagtttggcagctctcagcacctgcctctgccctctcctatacttcaactatattgaactctagcttcaatctagttcctactaatccatggcaaaagttattaactggataagcccaatcttgttcaggcacgttcttctaaatgcctggacctaaataacttctggttggggtaacttgtgtttcattctcaccttaggcctcagtgtggaaaggtaacacttaccntccgtggcaatgtnccttggtacaa

SEQ ID NO: 375348 - DNA, 198 bp, Homo Sapiens
caaattacaaagacaatacatgttctttgtgggaaatctgaaaaatactaccaaatagaaaataaaaatcacctgaattcaccacgaccacattgtttaaaaccacatttctgggttttaaatcagtcagtggctgggcccaaaggcacttttgggtaagataagtgaagaaatgcccacaaggccaaggtgtcactt

SEQ ID NO: 375349 - DNA, 480 bp, Homo Sapiens
  misc_feature (28)..(28): n is a, c, g, or t
  misc_feature (55)..(55): n is a, c, g, or t
tttgccaaagggccataacccctacggntccaaaaagcctggggcaagcaccccngggagcggcccaaatagaatacacccccaaaaacttccccatgcccacgcacatccacagcccaaacttctgaacacctagagacaatgaaaaacactttgaatgaagcttgacagaactgatgcattgtaaaatagggaatgattatttgaatggtagtaggtttcttatattaaacaataatgtacagaacagagagatacatctctgaagtctaaaagaaaacaactgccaactctgaatcttatattccacaaaaatattctttgggaatgaaggaaacataaagacatctttagaggaaggaaaacaaagaacatttgttactctagaagaaaggctacagtaaagttcagtgtataactgaaaagaaatgttaatagaaggtttgggatttcaagaaagaagaatgaacaatggaatgg

SEQ ID NO: 375350 - DNA, 425 bp, Homo Sapiens
tctttgccttgtaaatagcctgcctttttcaaaaaaatcaatattatcaaatgatacaagagctatcacaaaaggcacccaaacttctgaatatgtgagacctttagctgagaacatttgtatctaattttgaacaatcctattcaaaaagctcctattttcgttaatggaaatgccatgtttctcttagagttacgaaagatctcagaaagtggcaaaagatatttaatgtagccagagctatatatttctgtttttctcgtacttcaagtattctgaaaaacatataactgaccttggtggtgttcacaatgggatgaaacagtatcttaggaattgactttgaaattagtatggaaattcattgtttttaatataacattgagcaacagaaagccttgaatgataagatcaagagtctcccc

SEQ ID NO: 375351 - DNA, 578 bp, Homo Sapiens
  misc_feature (28)..(28): n is a, c, g, or t
  misc_feature (36)..(36): n is a, c, g, or t
  misc_feature (64)..(64): n is a, c, g, or t
cctgttatcccaacactttggaaaaaantttcctangggaactaaggctgggaaaattgacccnggaagaaaagagcagacaacccagctgaggcccctgtgaacagttaaggccaaatgtgaaaaatccctgctcgtttttgcccttaatcagtccagaaaacacttgcccacaaccaacatgggtgggtgccagcctccaggccatgggcagcccacacacacatccacaaactggcaacctctggcccaagtcaacaaccaaacctaaaccgcaacaggagtagcccatagtaaccttgagaacttaagggtgtgaggagaggtgataggaaccactttgcagccagaagcaagaaggggaagacgatgcaaactaccccctgaaaaggtgtttggggggctgccatatgccaggtgctcctaaggagccccaaccctgatgcacccactaaagaggaagctgagtttctcttggatctcagccaccagcagctgattagggtgttttccctaaatgcctaaaatagataaggactgagcaggggaaaaggtaggacttctgggggtcagaagcc

SEQ ID NO: 375352 - DNA, 349 bp, Homo Sapiens
atgagccaccacacctggccacaaatgcattcttaagacaactgatgctgtgaaagactctacctctcttcccaaagagagggaccacatggccccaccaatgagggacgctgcctctttggggatttctctctgccctcttcaaagtactgtctcactaggaaaataatagcaaagaatgagacaactagttcctgccaagctaggacagacagtgttgtagacaagacattgcctgaggaccccacagaatgactgcctcctgggtgggtccagcttcctaggaggatacaatggaattaaattttttaccccgtaagggttattttttaaaagggttgttgttttt

SEQ ID NO: 375353 - DNA, 484 bp, Homo Sapiens
  misc_feature (12)..(12): n is a, c, g, or t
  misc_feature (28)..(28): n is a, c, g, or t
  misc_feature (379)..(412): n is a, c, g, or t
ctgcccctgaanaatcaacaaccctttnaaaaaattaacccttaactgggtaataaaaatttaatttccattgtaatcctcctaaggaaactggacccacccaggaaggccagtccattcctgtggggtcctccaggccaatgtccttgtcctacaacactgtctgtcctagcttggcaggaactagttgtcctcattctttgcctattattttcctagtgagacagtactttgaagagggcagagagaaatccccaaagaggcagcgtccctcattggtggggccatgtggtccctctctttgggaagagaggtagagtctttcacagcatcagttgtcttaagaatgcatttgtggccaggtgtggtggctcatgcnnnnnnnnnnnnnnnnnnnnnnnnnnnnnnnnnnaggattgcttgagcccgggagttaagagactggcctgggcaatatggtgagaccttgtctctacaaaaaaaa

SEQ ID NO: 375354 - DNA, 482 bp, Homo Sapiens
  misc_feature (377)..(377): n is a, c, g, or t
  misc_feature (414)..(414): n is a, c, g, or t
  misc_feature (472)..(472): n is a, c, g, or t
ctcacacccaagcagttaacctactgaaaaatgcatctggctccattgaaatgcaggtggttgctggaggagacgtgagtgtggtcacaggtcatcagcaggagcctgcaagttccagtctttctttcactgggctgacgtcaagcagtatatttcaggatgatttaggacctcctcaatgtaagtctattacactagagcgaggaccagatggcttaggcttcagtatagttgggaggatatgggcagccctcatgggagacttacccatttatgttaaaacagtgttttgcaaaggggagcagcctctggaagacggacgtcttgaaaaaggggggcgattccagatccattgctgttcaatgggggcagagtcntaggaagggagttcaccccattgaaggaagctttttncccattcccttaaaccggaccaaaagggcactttttcacttttgaaggggttcccccntttgaatttg

SEQ ID NO: 375355 - DNA, 795 bp, Homo Sapiens
ttttttttagtttggggtggggagaggaggtagattgccaaattgaggcattttttctaaactccccgagattttcttctttattttatattttcatttttcatcctaatttactgaagccattttctttggttaactttagaattatctttctttatactaaccagcttagcatgtaataattcttgcccatgtgactacaaaacattagatatctccacaaataaaaacgagattcacctacacaaatattccttctctttaagttcacaaaatgcaagaagaaaagaaaaatgatgttaggttgtcagtaaggaaagcatttctagatgagaaaaagaaacttaagtgttatttcccccctacagttttgaagacccggctgaacacagcataaaaattgtcaggaccagtgcattctctttacagtaggaggtgagctaggggttgggttggttcaattctggcagccaattcaagagagaaccatcaaagtgacagtgccttttgtccgtttaaggatggcaacagcttcttcatgggtgactccttctagactctgcccattgacagcaatgatctgatcgccccttttcagacgtccgtcttcagaggctgctccctttgcaaacactgttttaacataaatgggtaagtctccatgagggctgccatatcctccaactatactgaagcctaagccatctggtcctcgctctagtgtaatagacttacattgaggaggtcctaaatcatcctgaaatatactgcttgacgtcagtccagtgaaaaaat

SEQ ID NO: 375356 - DNA, 435 bp, Homo Sapiens
caactgtgaggaggaggccatgtaccactgctgctggaacacatcctactgctccatcaagtgccagcaggagcactggcacgcggacacaagcgcacctgccgccggaaaagatgaagctggcccttcccggagtcaccccgatgattactcttttcagacacagcggtttttgtttccaagaagccaaaattgtttagaatttgcttcccattttgcaccagcctttaaacacttttcgtgaagaaattttgcacagtagtttaaatcttttgttaatgctcctccgaagtttttcagggggtaaaagtaacatcagtggagggtattattttaaataaattttaattgagaatttgttgcattttcagcaaattttaaaacatttttaggttttacagagattttaacctttaaacaacagatctttaaaaa

SEQ ID NO: 375357 - DNA, 332 bp, Homo Sapiens
  misc_feature (112)..(263): n is a, c, g, or t
agacatgaagaaataaaaccatgtttattcacagaagatatgattgtctatgtagaaagtctggttaaatctgcaaaaaaagctactagaactaagtgactttagcaaagtnnnnnnnnnnnnnnnnnnnnnnnnnnnnnnnnnnnnnnnnnnnnnnnnnnnnnnnnnnnnnnnnnnnnnnnnnnnnnnnnnnnnnnnnnnnnnnnnnnnnnnnnnnnnnnnnnnnnnnnnnnnnnnnnnnnnnnnnnnnnnnnnnnnnnnnnagaaaacctttgtcatctcatgttaaggcaaagactcctctggatgtaacacaaaaaggcatggatcca

SEQ ID NO: 375358 - DNA, 930 bp, Homo Sapiens
tggatttgaacaaatctcatgaaatatgacctgctcagatctctgatgggaaaaggttttcacagtttccaaacgcagggatctgttttggatgaagagaaggctgaggtccgacccttaactgcagttcagggccttggtcacagctgcccccatgtgcccctccaggcatctctccacacatcactccctcgtccccagctgtgtgacgcactctgtcctcctgtgttactaaggaccttcaaactttatcccacctagcacactcttgcctatccgtcaagtttcagatgaagaggacctcactggagaagtcccttccactcctgcagcagggccgtatcaccgtgaaggagcctgtcactcactcgcctccttctctgcagcccgtgatttccacatgaaaattcccgtctattccaataacaaagcctaacacgaggcacaaagtaaattctaaagttaaaggcctgcaggaaaatccctctatatgcaaatgcaattgacttcctgaaataattctgtaaccatatatccaggaaggcactccttctttgagtgttagacataaacacatgttagacgtaaaggtgttgaataaacggttgtggaacaaatgcaagaaaataaaactccagaacaagaaacatacataagaaagggttactctaagcagtcaactgaataatgatgtatcaggaaaagggaatattacactcacaacttgattttaatatacagccatctgcagcacataggttgtgtgaaataattctcctttattcattccacttctttgctccagtttagggatgatatggagattttttaagtgaatcacccacaaatataactttacccctgcatggaacccttatatcaccagagaaaagaacacttttaaaatctggcaatgaaaagaaacgattt

SEQ ID NO: 375359 - DNA, 111 bp, Homo Sapiens
ttctcttcatccaaaacagatccctgcgtttggaaactgtgaaaaccttttccccatcagagatctgagcaggtcatatttcatgagatttgttcaaatccaggccgggca

SEQ ID NO: 375360 - DNA, 356 bp, Homo Sapiens
  misc_feature (26)..(26): n is a, c, g, or t
  misc_feature (31)..(31): n is a, c, g, or t
  misc_feature (38)..(38): n is a, c, g, or t
attaattatgaagattatgatattanttgantgcaganttttttgggcgcgctgccccctccccaccctgccactcttgacattcccactgtgcgttttagaagagagcctttttctaaagggatctgcttaaagttttaacttttatacctatctgagtgaattacagacaacctatcatttattctgcttcaagggtccccagggcccttgtacaaccgacagctcttacttttaaatgcaatctcttttctacatacattattttcttaattgttagctatttatagaaagcttcaatagaactgtttcaactgtataactatttactattcaaataaaatattttcaaagtc

SEQ ID NO: 375361 - DNA, 420 bp, Homo Sapiens
  misc_feature (345)..(345): n is a, c, g, or t
  misc_feature (372)..(372): n is a, c, g, or t
  misc_feature (390)..(390): n is a, c, g, or t
  misc_feature (406)..(406): n is a, c, g, or t
gaaatcagtacacaaataacagttgccacagtgtaccagtatttcaatttctaaagaataccatagagtctgaattagaacctttaactagattgcaaaggaatatactaaattgaaaacttgtaaaagggaagtaataaacaccataatcctagataagatcctatggtctttcagagtttttccatatacagtaattatttgatgtacagtaattattgataaccaaaatgacaaaaactgaatctactcttcaaattcaaccatgtatcttaaaaaggagtaaaatgtactgttttcagtgtttcctttggtttcttacagtttataatttttataaatttnacttccatggggacctttttttataantgttccggtctcttcccnaaccaaaaattttggntttttaccccttgg

SEQ ID NO: 375362 - DNA, 534 bp, Homo Sapiens
ttctcagtcaactgcacgttttcaacttaagtttacttaaaattttctgaaaagaaatgtacaaagacagccttcaattaaggattaatcactatggcaactgagatgtggtgactgaagggggaggatgtattctcccctcagtttcctgccagctgtcatagtcaacctctgctgcctgaatccaagccaaaatatagactgtgacccaactctaagaaactatatctgtatttttataaattggtacaagtatcagactataaaagaagacttaatcccttgaattggatgacagacacttggcactcttgcaagtgtttgacagagaaataacgggtcgctttgtagtaaaacctggattaatagtaagcccctctttatgttattgcagtgtggtgtaaatgagagaactaagcatgctgtcagcctggggtgggaggtagcgtgggggagtgtcttttatataaccagtgcaggtttaagcactgttcagaatactgtaaatacaaaatattgtgttagtaaaaaaaa

SEQ ID NO: 375363 - DNA, 449 bp, Homo Sapiens
gccagtgtcattggcagattgacccctgccagctcatctgtgaagtgtgataaatatattgctgcagacccacagaatgatccaggtgtggcgggaaagtcagttcaatattaatcgagcctgttaacctccattcagacttttcattttgtccttttggtggtggagatgacccagcaccgcccctggagcctgctgtgtgtgagctcctggcacaacctggcatctattggctcgggagctgcaacgtgtcctccgcacccggcactgccctcacataatattccacgcaggctgctcccttgctctggattctgggataaccatcctgcacggatccagagttggtgcctacataccagaggtaggatctccatccacagggggccacacggcaccatcttaacaccaaggcactgcacaaggcttggcatgggtttaggggtcca

SEQ ID NO: 375364 - DNA, 512 bp, Homo Sapiens
  misc_feature (449)..(449): n is a, c, g, or t
  misc_feature (459)..(459): n is a, c, g, or t
  misc_feature (472)..(472): n is a, c, g, or t
gacttcagcatctgtttgctaacgtggtcttcccacaaccagctaaaggctgtttgattgattgccggttcctgtgtgctcggtttgcatctctccaccagccttatcatcctgcatgagttacctctatacatgtgctcatgtctaagggccaggtctccccaagagcaggatgcaggtcatgcctttgttactccagcactaacagtgcctacgtgcataggtgtccaatgagtggggagtacttaaatggttgaattctactcaaagactcacgtgaagtccttatgactgcattttctctaagtctgttttttaaaaaatccaataattagcttcttatgggttcatatattttctctcaagtgtaagacaatatatattttaggattttgttttattatgttttgctgggaaaaaggaaaactctttctgggacatagggtccngtggcccctntttactattatantcactctgggctagagggcgagccccgtgggcaggctctt

SEQ ID NO: 375365 - DNA, 210 bp, Homo Sapiens
  misc_feature (117)..(117): n is a, c, g, or t
gaggcaaagaagctacatttctttttattgatatgcagtaatttacatatttctggggtacatgtgatattttgatgcatgcatacaatatgcagtgatcagatcagtgtaactggnaatgcatttctaatgccctggttggggacaagagaaaggagggaagagggcatagctgtaggaaggagggaagaagagaagaggtaaaagaga

SEQ ID NO: 375366 - DNA, 382 bp, Homo Sapiens
  misc_feature (18)..(18): n is a, c, g, or t
  misc_feature (25)..(25): n is a, c, g, or t
  misc_feature (73)..(73): n is a, c, g, or t
  misc_feature (276)..(276): n is a, c, g, or t
  misc_feature (311)..(311): n is a, c, g, or t
  misc_feature (325)..(325): n is a, c, g, or t
  misc_feature (345)..(345): n is a, c, g, or t
gagtatttgctgtatttnatttgtncacatttagcctatttactatagatggcaaatacgggaacagattttnactttactaggcataatctcagtgacttgagcaggggtatggagtggggctcatgccaacgtgtcagatttagacatatggagctgacagaggacactgttagagacagcattttcttgttcttgttattcttggagcataagaattatgtgtagatttggggaaaacactttgcagaagacacacagttaagtgacaactantttaactcaaagaaattgctcttttcaatgatgtncttgttgctgaaancagtttacattttaaacatngtaataggatttttttccccatgtggggaatgggtgg

SEQ ID NO: 375367 - DNA, 515 bp, Homo Sapiens
ttatggagtgaaataaatgtatttgacaattacaagtgaagaattaaactgaacaaaatatctccaatggtctcatgaactctatcaggtaaacaataatatgaacacttaacagcctgcaaagccctctggtacaacgcagggtagggtaagaagaaagtcaggagaacagtacaaaatgttaggagaaggaaaaggattaaattgcccacattgacctgaaaagaacttctgaaaggatggcatttgggtcaggagttgaaggaataatagctttttggttgtggagaagttgaatttcactatgagggttgggaccattcacgtaaatattgatcaataggtacagatcccctgttatataccagggactagacaaaatgctcaagatacagcgtggaacagatgactctcctcatagtgtttagttgtagaagagactgaaaaggtgaaagtcattggtaatcctactacccagtaaagacccaatgaatatttgttccgtttaaaaaaaa

SEQ ID NO: 375368 - DNA, 442 bp, Homo Sapiens
  misc_feature (37)..(37): n is a, c, g, or t
  misc_feature (56)..(56): n is a, c, g, or t
  misc_feature (157)..(157): n is a, c, g, or t
gaattaccttcggggagattccaaaccttccattccngttatgaaacaatggcagnggttttacctttataaattataccccaaatattttataataaagatagctgacatgaattgaagggagaaactgttttatccctcattttatatatgaggnaagtaaaagcccaataagttaaataattactcaagaaatggataagccagtactcaaacttaggaagttggccccaaagcccatacttatactatactgacactactgacagatatcactagttacctaaacaagaatccatgccacccacttcctttgtgagatcccatctgtgtgacattcacgttcttagtctctctaaaggcaagaatggatatataacctagttctggccaatggaattagaagaaatgccttctaggtctttcattttgtaccctggtg

SEQ ID NO: 375369 - DNA, 629 bp, Homo Sapiens
ttccattcccaatctagtgctagatgtataaatctttcttttgattcttcctaacaaaatattttctgggttaaaaccccagccaactcattgggttgtagccaaaggttcactctcaagaagctttaatatttaaataaaatcatattgaatgtttccaacctggagtataatattccagatataaaacagttttgtccagtccttccctagtgccctgtgtggatttttgtgaaaatgtcaaagagaaaacttatatactatttcccttgaaattttaaactatattttctttacaggtatttataatatacccaatgcttttatcaaacagaattttaaagagcataataaattatattaaagaaccaaaagttttcctgagaataagaaagtttcacccaataaaatatttttgaaaggcatgttcctctgtcaatgaaaaaaagtacatgtatgtgttgtgatattaaaagtgacatttgtctaatagcctaatacaacatgtagctgagtttaacatgtgtggtcttggtattcttaagggaacttccacattatacatttgatgtattgaccagaatatgtaaaatatgcttataaatcagaaaaataaattgtttctcact

SEQ ID NO: 375370 - DNA, 319 bp, Homo Sapiens
gcggcctggaccctgctggaaccggagctgaagaccatacccctgacccctgttgagatccaagatttggagctagccactggctacaaagtgtatggccgctgccggatggagaaagaagaggatttgtggggcgagtggagccccattttgtccttccagacaccgccttctgctccaaaagatgtgtgggtatcagggaacctctgtgggacgcctggaggagaggaacctttgcttctatggaaggccccagggccctgtgtgcaggtgagctacaaagtctggttctgggttggaggtcgtgagctgagtccag

SEQ ID NO: 375371 - DNA, 535 bp, Homo Sapiens
  misc_feature (502)..(502): n is a, c, g, or t
cgagataaataaaaatgataagtaaccacccaggttactaccacccaactggtaggcagaaatggcccaagtcatgaagtcacatgactaaataaagcttgggaaatactagcataaagttaattcatgtaaacactaatgatcacaggcacagtatccttggcttctgtttcttcgtggcgtgtgtccacatgagccggcctgaatcataaagcccagcctgaaagcagctctctttctcggaagggctgatgtcatttgtgtgtgttttatcagctgctcttcaaggagcataactcctgtggcttctgccattatctttatgccatcagaattctgatttcgggaagacctcaagagagcattgaaataggctcacttacagtcctcacccctttttgcatcaagggttcacctctgcttccctgcacctcctggtaactggggtactccagcccaacatgggatgggtaaatttacatattgatgggattattaggcnggaaaaagggaaggtccatacacagggtacaac

SEQ ID NO: 375372 - DNA, 540 bp, Homo Sapiens
  misc_feature (99)..(99): n is a, c, g, or t
  misc_feature (454)..(454): n is a, c, g, or t
ctgaaaatagctgcctggtttcactccccggttttacgcctcttgagaagcagagtgatgcctagaatgagccctggactgggagggcacgtcccaggntttgaatcggggcctttgttccttttctgctgtatgactttggtcagatttctccttctgagaagtggagccaattaagcgatctccgatatgctgtaatctctgaaacatttcctcatatgtttctagcaacttccaacctgaggtctgatagacccagggttactttgcaagctaactgacatatcagtctcattgtctggtaaatctaattttaaccacttaatacttattttaggcttcacaaattattttaaaagaaaagataggggcataacaagaagaaagcttcggttacaatttccccgaaatgcctgggatctgggattcctgcttcctggctgtgtggcagagnaagatgagggatggccctgggagttcagacgggactagggtccaagccccagcttcttccacttgttaacaatgttctcagcctca

SEQ ID NO: 375373 - DNA, 471 bp, Homo Sapiens
cccggccttcaaaaaccccaggttcctcggcccttcccccaggaggcccctgctgaggtgaagtgggcataggagagagagtggacagagaatctgaatactgggtcacgttgcagttctgcgcccttggaatgccataggctcccaggcccataagcccggcttcactaggccctgggtgtctgggttgtgaaatggggtgtctccttcccaggattgccgtaaggacctggattcatccaagcttaaagtaaattgctttgtaaggtgggagacaccgagtacaggcgagggactttattaggtcagggatttaatcaggcatctgtttttacagatttctttattcctgttccctcccctccccttcctgtcctttcacaataaagaataacaacttgacacagcttagagactaaaaatcatccttcaataaagcagcagaagttgcaaagtttcctatgatgctat

SEQ ID NO: 375374 - DNA, 353 bp, Homo Sapiens
  misc_feature (44)..(44): n is a, c, g, or t
  misc_feature (71)..(71): n is a, c, g, or t
  misc_feature (100)..(100): n is a, c, g, or t
tgtttggcctccaagaatataaaactgttacctgagcctggaanccatgggcttgaaatgaattaattacncttggggaaaaaagacacccttgtggcantaagtccttgcctttggttaaagccttatttcacataattgcctaaaaactcatttttgtttaatatactacctatagtttaattatcggcacttgtactttgtaacttgatatcttacctaggattgggaatttgggacatgacacgtactataaaagtcagtctatgtacatactgcttattgatgtgctgtgatatgagggaatctgaaatgtttcataaaaataaagcttaaaaattgtcttacactgg

SEQ ID NO: 375375 - DNA, 311 bp, Homo Sapiens
  misc_feature (290)..(290): n is a, c, g, or t
atgcagagcctgcctggggagcagctgtgctgtcacaggacagacagatgttgtcagaactgccaccaccctcccgagtccctgggtccctcctagccagcactggccacagagagcatggggcagccaagtgggcactgaatggagcccctgccgtgccctgcactgggagcccagccactctgcctggcctcattcctgctctctctcaggaaaacgaggggctgccctcctgcccaccagcgctgaccaacagcagctgtatctttgctgcttaaaccttcttgagncgagagccctttgtccccggg

SEQ ID NO: 375376 - DNA, 296 bp, Homo Sapiens
  misc_feature (167)..(167): n is a, c, g, or t
aggggactgcgttaacggttactaaggaaaactggaaatactgtctggtttttgtaaatgttatctatttttgtagatattttatataaaaatgaaatattttaacattttatgggtcagtcaactttcagaaattcagggagctggagagggaaatcttttttttnccccctgagtggttcttatgtatacatagaagtatctgagacataaactgtacagaaaacttgtccacgtgcttttgtatgcccatgtattcatgtttgtttgtagatgtttgtctgatgcatttcatt

SEQ ID NO: 375377 - DNA, 550 bp, Homo Sapiens
  misc_feature (379)..(379): n is a, c, g, or t
  misc_feature (447)..(447): n is a, c, g, or t
  misc_feature (480)..(480): n is a, c, g, or t
  misc_feature (509)..(509): n is a, c, g, or t
  misc_feature (520)..(520): n is a, c, g, or t
  misc_feature (532)..(532): n is a, c, g, or t
gactctctcagtgaggatttatggctgagagctcttgacctgcaacagtgcggcctcaccaatgaaggagcaaaggctttgctagaggcccttgaaaccaatacaactctggtcgttctggatataagaaaaaatccactcattgatcattctatgatgaaagcagttatcaaaaaagtcctccagaatggaaggagtgccaaatcagagtaccagtggataacttctccatcagtgaaggaaccatccaaaactgctaaacagaaaaggagaactataattctaggaagtggtcacaaaggaaaagctactattagaattggattggctacaaagaaacctgtaagtagtggcagaaaacactcccttggtaaaggantattatgcgcccgcacctcttccacctgggtgtgtctggtttcttgccgtgggcgttacttgcaggancgtggcaaaaagacacaggggttttcccctttnattcaaaacacgtggttttatgttattcngttgccggcanccgggtttttcngttgattttgacagtttt

SEQ ID NO: 375378 - DNA, 391 bp, Homo Sapiens
  misc_feature (282)..(282): n is a, c, g, or t
  misc_feature (287)..(287): n is a, c, g, or t
  misc_feature (344)..(344): n is a, c, g, or t
  misc_feature (363)..(363): n is a, c, g, or t
gtcagatcttgtaaaaaggaactctttctagcaattaggtcaaagtagttggttcaggaaagtcaatgtgaaatgaagtagttttagtttaagaatctattctatgaaatatacttgaagagaagaggacaggaagataagctttaagttgtaacaaccttttctggcttacaaaatgcatcagtctagcctgataataaataacctatttttcctcacataaaaagctagaaagttggacctttattttaaaaccaagcaaagaaagcacacaagactatncactnaaaatactttataggaaaattaaggttttgtggggattttaaaaaaaggccctctcnggatacctaccaaatgttntaccttgtggccattttgggggaaaacc

SEQ ID NO: 375379 - DNA, 146 bp, Homo Sapiens
cctttgaaattttgtttacatttttatttgtgtaatgggaaataccgtcactagctcttgggccagggaatgagaggctatgtagatattcattatttggttaaattgaccttaattaattaaaaatctacccaaaatgagccagg

SEQ ID NO: 375380 - DNA, 292 bp, Homo Sapiens
  misc_feature (26)..(26): n is a, c, g, or t
  misc_feature (92)..(92): n is a, c, g, or t
tagccacaatttattgacaatccttnctttattcccttaccatgtgccagaaaacgatacaacctttttctgtgatcttcacaggaatctcngcaaagcaggaattgccatccttattttatagacgaggaaaagaaggctcagaaggtcatataagtagctcaaggtcaaacagcccgtaaatgttaggattctaacctgactctgtttgactccaaaattcatgacttttccactatgacattctatttttcacactggtgctgtgatattgtgatataataggaaacat

SEQ ID NO: 375381 - DNA, 478 bp, Homo Sapiens
  misc_feature (15)..(15): n is a, c, g, or t
  misc_feature (81)..(81): n is a, c, g, or t
  misc_feature (96)..(96): n is a, c, g, or t
gcccaactcccagangaactttactgaaccgtaactgtgaaatatgtccaaatcccaaaacccaggtgaggtcaaaccccnactgccctgaggaanagggctggatgcagggccagctcaacctgaaaaatcccctcccactcggcctttcctgtggggccttcaccagcctgcctgggggtactgtcgtgcacttggctgcgtgcctggttctattggccctaggtgctgcctctgttgggtgggatgggacggggtagagggagcccaggagcactgggttctccctgagaacactgggcacaagagtactggcctcttctatccctggcactgtcctttgcacttgtttggtggccccaatgtgagtcgctgtaaaaaatgctgccgttactattttctaagaaatgacttttctgtgaaccaacagtaacaaaaacctcagtaaccaaaataaagttctatattttaaaaaaaa

SEQ ID NO: 375382 - DNA, 286 bp, Homo Sapiens
agtccctgaccatccatccagccaaatcattggctacctcccatgaatcagtatataatcacacatctggccatttcttcttccatgcaaagtgcatgaccagatgcactgctcgaagttctgctctctgggaagattttccttaactgctgtccttcggggatgtcctagaaaggggctgtagtgctgcagctgtccacttttgggtggtgcctgcatatcgtgcagaaccatttgtgaaccaggctctagtcttcccttcctctgtcaattgatcatggggaat

SEQ ID NO: 375383 - DNA, 441 bp, Homo Sapiens
  misc_feature (331)..(331): n is a, c, g, or t
  misc_feature (383)..(383): n is a, c, g, or t
  misc_feature (390)..(390): n is a, c, g, or t
  misc_feature (401)..(401): n is a, c, g, or t
  misc_feature (413)..(413): n is a, c, g, or t
  misc_feature (430)..(430): n is a, c, g, or t
ggcggaggtcctgaagcgtcaaggctatgatgcggcgtgtgacatctggagtttggggatcctgttgtacaccatgctggcaggatttaccccttttgcaaatgggccagacgatacccctgaggagattctggcgcggatcggcagtgggaagtatgccctttctgggggaaactgggactcgatatctgacgcagctaaagacgtcgtgtccaagatgctccacgtggaccctcatcagcgcctgacggcaatgcaagtgctcaaacacccgtgggtggtcaacagagacgtacctgtccccaaaccagctcagcccgacaggacgttnaaccctggttgaaagggccgccgatgggccgccaacctacttttggcttctnaacaagnacaactttaanggccccgcgggnttggaagcccgttgctngttaattcaaa

SEQ ID NO: 375384 - DNA, 212 bp, Homo Sapiens
  misc_feature (117)..(117): n is a, c, g, or t
gcaagccctgctagtcagggactccaaatcgcgccaacagccttaccgtaataaatggagtgaatgtgctggaaagacatacctgcagcctctctcataacatgtggctgaagcagnaaaatggccaagggttggggatacagactggggaggccagctttctctttccactgtagttataactgacatccactagttcacaccacactttg

SEQ ID NO: 375385 - DNA, 253 bp, Homo Sapiens
atgaaatatataacagcgtatatttttactttcatggtcttgctattaatgtttttttaaaaaagtattcttggtattcttgaaaattgctaaaagagtagattttaagttttctcaccacaaaaaatgtatgtgaggtaacgcatatgttaattatctgtttaactgttccacagtgtatacatatttcagaacaacatgttgtacaggatgaatatatataatttttgtcaataaaaaagtcagtctcagc

SEQ ID NO: 375386 - DNA, 328 bp, Homo Sapiens
  misc_feature (307)..(307): n is a, c, g, or t
gagctggacaaccctttgaaatgacagagtctagattcttcaccaaacagatgaaaagacaagtagagacaacatgtacttgagatataagctatacatctcatcactggaagaaaggagacttcagcctcttttcaaggctttccagaccacatggaactctccagagccctccttgaaagtttttagaaaaactaccattttcagcaaagattcatgtgattatgctgctgaggaccagtcattctgtaaacatcacatatgtgatgctttgtaaatgtattaattgtgggtcaattttcatggntatttcccattaacattgtat

SEQ ID NO: 375387 - DNA, 544 bp, Homo Sapiens
  misc_feature (394)..(394): n is a, c, g, or t
  misc_feature (473)..(473): n is a, c, g, or t
  misc_feature (518)..(518): n is a, c, g, or t
  misc_feature (529)..(529): n is a, c, g, or t
gtagaattagatctttccaagcctgctttctgtatcaaatgcactgttcattggcacagggtggtctcatggaccagaagacctgagacccctgaggcctgattttggcttgatggtggtctgatgcaggccatctttgggatcttcacttttccatctgtgaaatgggaagaaggccaatctcagtgccatattcaccctcaaagtttttaggcttgtgagagcacatttgatggagagctctgagcctctgtgccttgccttagagaaaactgatagaatccaaacgtgcatttaaaatattttctggagaaaaattttcctcacccagagacacccttattgtataataaatattaacagaaataatattagtgaaattaatgatgacatnaaagcagtcattgtggtgatgtgactgggcacacaggccatctctccagttatgggtcccgggagccagcaggccaggncttcaggggtgtcttcaagggcctctggcacacgtgcaacccacnttgtgcccccnctccattcccctctt

SEQ ID NO: 375388 - DNA, 488 bp, Homo Sapiens
atatgttcaagactgcttttttctaattttaaaactttagttcacccactttgttatggccacaactattacatgagaacttcaagttgaataactgaataacttcagttttctctaatgttgcatattcaagaagtaagttttatctcatgtgatttggactctggaataaaacagtaagttttagctcagtcgtggtgtgacccccttgcacaggaatgttgggtgagctacagagctctggtcactcagtgattcttgcaagtccctttgtgctttggatgctaaaaaacaatgccattgggggtctcaacttcccccccatttctgaggattgcctggtgacttgctaatgggttacacatataaatgacctgtaaacctttaatattattttagtttttaatctttttaaaataaccatatgaaagttatatattctctttatagagaagtgcatatgaaaataaataccaaaaattttttgt

SEQ ID NO: 375389 - DNA, 343 bp, Homo Sapiens
ggaattgtgtgtgtgtgtggtaagaacaatttgatgtgttcataatttgtaggtgtactggattactgtggcatgtttctcagccaggctttcctgagaaattaagtcctactgccccgcagcatccattgcatgtaatggatcactttctttcccaagaacataggatgatccaggttatgtactatctttggagaatcgagaagacagtcactcaaacaatttcctgtgttgcagttcagataagaaacctgagttgagaaaggctgaatggtgtctgaaagggcttcacatcaggtgaggcttttatagttgggtaaatacagtagtatgatggggtagg

SEQ ID NO: 375390 - DNA, 516 bp, Homo Sapiens
  misc_feature (492)..(492): n is a, c, g, or t
aaaggatttaatattacctcttctaggagaattaacattttagaacagtagcctgcagagggcaatgtttaacccaatgaagaggctcaaattgtggactgtcaggcactgtgataagtggtagattcatggagacacaagataatcatgaccctcattgtcttactatttaagtcaccacacctttcacttattaggcatgggccacctgacttcacttttcatgaagagtagggcaagaaaagcataatggcccatatttcaagcaactggtcccaaaacacacaagctgaacaaaggaggaaacgcagacagtggggtgggctggcctcttgattcacccctatcttggccctcttccagcagcattccaggcaagtgccatcagctcttatttattctttattccttcacacccacctaggggcttaacatcattgatggaggaaatttggaacccccaaggagttgacttagtagttgttccggggncccggggcccattttgggtttttt

SEQ ID NO: 375391 - DNA, 444 bp, Homo Sapiens
tatccacctgaagggagacccaaccttttgttaaatttccttggtttgaaggttccttgtaaacatgccagatgttttgaagttccaaagtcccaactcaagtagttaataaattcctcagagacagttccccacttctcctaacccaggatcccaggtcaggacaaacaagcaatatgcctcccttcccataccttctggggttagtcacagcacatctcatgcttatatttcttggtctcagtccccctattttggtccatgtagatttttttccctttcttgcaagctcagccaagcatttcaggagatgtctgttacattttatgaagcaatccacatattttgtagcaagagagtctttgggctatctagtcaacaatgttgttgaaaactgaagccagatgatattaattcttctattaaaatatttcccacattaaa

SEQ ID NO: 375392 - DNA, 391 bp, Homo Sapiens
atagtagctaaatatagcttcccggcacagatatttaaagagctatgttgatgatgttatgtctgaacagagaagaaagggaagaaaataactttttttccccccgtaaagaagagcaaagttacaccaggttttctgtggggctgcagggagccgagcgacggtgaggtgtcaatgttttaattatagaatcaccagatgttcatgctacaactgtcaccaacttggggcttgggatttagatttctgttgccaggcagtcatttctttataattacttctcgtttctatttaaaaataccttctccttgggaaagtaaccccaggatgagtgtggcgcttctcaccaagctcaggagggcttacccagaggggagggctttatggagga

SEQ ID NO: 375393 - DNA, 203 bp, Homo Sapiens
  misc_feature (31)..(31): n is a, c, g, or t
  misc_feature (80)..(80): n is a, c, g, or t
gattgtaagaatttttggacccctaactgcntatttaaagcgattattttataaacatagggcaagtgaccttgaagtcntttttttcagtgaaggttttgtgagaatcataggaaataatgtctatgaaagcatttcctacattgtaaagtgctcaaaacatacgttgaaattattaataaaagcaaagatgaattgctgtg

SEQ ID NO: 375394 - DNA, 428 bp, Homo Sapiens
  misc_feature (68)..(244): n is a, c, g, or t
  misc_feature (261)..(292): n is a, c, g, or t
taacaaaccccgcacatgtaccccctgaacttaaaataacagttaaatttaacaaagaaagtggctannnnnnnnnnnnnnnnnnnnnnnnnnnnnnnnnnnnnnnnnnnnnnnnnnnnnnnnnnnnnnnnnnnnnnnnnnnnnnnnnnnnnnnnnnnnnnnnnnnnnnnnnnnnnnnnnnnnnnnnnnnnnnnnnnnnnnnnnnnnnnnnnnnnnnnnnnnnnnnnnnnnnnnnnnnnnnnnngacggacactccgtctnnnnnnnnnnnnnnnnnnnnnnnnnnnnnnnntagtgttctctaaatagcttagagaaagacaataattcaattattttatattttaaaaaattaaatattgttttataacaataattcttagatgtttaaaaagtgtttactgttttaaaataatgggttataaaat

SEQ ID NO: 375395 - DNA, 301 bp, Homo Sapiens
tgttagaaaacactactttcagacatttaaatgcatataggcaatgcttaagtacctaaaaaagcaattttaagaaattactgaggtatctctattaagagtgacatattcatattttattttatgtatatattatttctataacatacaagaaattgttgcatttatcattttaatgcaaagtagtatcaagtataatggattagatgcaaaaataactgaggtaggaatctcagttctgtgttttaatgtggaattcttatgcttattaaaatattttgattagctgttgcaaaaaaaa

SEQ ID NO: 375396 - DNA, 435 bp, Homo Sapiens
  misc_feature (393)..(393): n is a, c, g, or t
gatgggggtctgcttttagacttcatttctagagcagagcacctaggtgagaggaatacctgggagagagactgccttgcccatggtggttaaacctacatgaggggactgaaatctctttggatgccagtccagatccctttttaagaaaaatgggcttgtggttccaaggctgagagctggcaccacacactggtttctaaatctctggcttggattttatccaagcgcatgttcctaacgtgcccgtgagcaggaggggcaggcgcagtgttaatgatctagtttactgatagacaactaaatgcccaagagggtaggtggctcaccaggcaggactggctacataattttcaggacccactacaaaatggaaaatttgggggccccttntttcaaacaggtcaggaaaaacattgcttttttggttttctt

SEQ ID NO: 375397 - DNA, 195 bp, Homo Sapiens
cccacaaatttccgcaactctcctgatgagaatcatccacattcatttggcccttttgcagtttcaagaaaactgtttatagtgtacaagtgcacgacaaagtagcatccaatatgcaaacctatcacatccaaatttcatcacatacacatgtaagaatctgcagcaaatgagaagataaaggtaagatgcacc

SEQ ID NO: 375398 - DNA, 342 bp, Homo Sapiens
  misc_feature (42)..(42): n is a, c, g, or t
cagtttagtattggccttagcaaaaaacatcaaatatatttncgtggtacattgacctgacacttgattaacacacgttgaacttgatgtttttcccgtatgaaggaagttatacaagaagttggccttgcttttttcgttgattttaaccgtggacagggttggggttgttaattgttaggtggctggtaggatttcagctcctcgattgaaaaagaaaaacagcccatctcgtgaacctcagtgaccaaaagaaatggtcactgtgtcatttgggtgcttgttgtgtctcatcccagtgtagtgtgatggctagggagcaaagagaaggcgagcctctga

SEQ ID NO: 375399 - DNA, 289 bp, Homo Sapiens
tcagctgcctggagtagttaaaatttttctgagcatattgcttcccccaaccccatgaggcgggaaagagatgtttagagacatatttctcttttaggaagaaatgcagaaccactgagacctggacaactgttggtcttattttctgcttggatgagataccttcctgctatttcttaaggaaatatagttatccatcctcacagtcacagctgaataccaggcagttggttgagtagtgagttcttctggaagatggacgggaaaactgtcaacaggattgatcatt

SEQ ID NO: 375400 - DNA, 519 bp, Homo Sapiens
  misc_feature (36)..(36): n is a, c, g, or t
  misc_feature (41)..(41): n is a, c, g, or t
gtgttttccaataccgtaagaagaccccgttccacngttanggttaataacaaagaataaagagggtccgcctatattttgagagtgcctaaatgactgtccatagtttccctcatgttgatttaggaatcaacgcctaagaaacaaatatagaagtttcagcccattaaagaatgtgtcttttgaccttggcttcaaaggaaggttattgtttagacaatttgtggggttaggagagagatctactctagagactagagatgacgtttcagaaataggtctactatagagagccctgtatgctaggctcatgaatatagaagtcacccttaaggaagagagacatcactggagtattctgaatataaaagtactatgtgtaacatgggaaaagtaaatattatgaaaattattctgagttatatggtatagattgaaataggaagaatggacgctgcgtactgggtttagctgaaaagtatgctagatattgggaggttgacaaaaactttacatatc

SEQ ID NO: 375401 - DNA, 445 bp, Homo Sapiens
gtaggtaaaaatacctagtcctattatacggcctaaagaaactgaaaaataatggcctatatgtccatttagcctacctcaaaatggtttatttaaggataatacatgttacatttatttggcccttgttttcacaataaaaagttgtaatgataatttgttttagattatatgcccatctgtttatatcgggacacagtatctttttaacacaactcattgataattttttattatcaaaatgtgtgttaatttgaaacaaatgctatcttatttcagagatacaaagcattatgttttatctacatcacatagaaatagaagaaaatatatggaacttgggagagcatatgtgtacagtaaagaaaagaaatctcatgtagtggtcagattccctcccactctaggaggctgactggtcactacaaaatgtgactaaaaaaaa

SEQ ID NO: 375402 - DNA, 417 bp, Homo Sapiens
  misc_feature (388)..(388): n is a, c, g, or t
  misc_feature (402)..(402): n is a, c, g, or t
ccaaattagggagacaaaaccctcctaccccattttttctggggctatttaacagtttgaaaactgctgcaattaaattcccgtattaattattttggaatttagcctatttcctattacgtttgttttaggcaagtggtttatttcctagttcctcctaaatctctcagccagttttcaatacccccctttcccctacttaattatttttgggaaaaaagttaaaaagctttatatttattttaccttttatttttaaagttgacaatcaaatgatataatgccaagttcaatatccacacatttctccctgtgcttattcccctggaacctcttacaaatttttattacagaaaatttcaaacttaagtaaaatgaacagaattcnacaacaagtcaccntgtaaacattattaa

SEQ ID NO: 375403 - DNA, 448 bp, Homo Sapiens
  misc_feature (22)..(22): n is a, c, g, or t
  misc_feature (27)..(27): n is a, c, g, or t
  misc_feature (36)..(36): n is a, c, g, or t
aaaacccatgtccaccataccncaccngggatggancccctgagggatattaatgcccgaagtggaagaaagcccagtgaccaaaaggataaatacctataggattcccactccctatgatgtattccatagcagtccaaaatccatagacacagacagtagaaaggtggttatcaagggctggtaggagagggagttagtatttagtggtatagagttttagtgtttccgggtaaaaatgttctagagatctgttgcaaccatgtgaatatacttaacactaccgtactgtacactgaaaaaatggttaagaggataaatttaaatggttaagaggaaaaatggttaagaggataatgttgttttgttaccacagtagtaacttttaaaaaccctcatgtatgttctttccctttcatggcaaataaacttaaatgtggaaaaaaaa

SEQ ID NO: 375404 - DNA, 493 bp, Homo Sapiens
  misc_feature (109)..(109): n is a, c, g, or t
  misc_feature (141)..(141): n is a, c, g, or t
aatcctgtcccttgccccttccaaaactcctcccccagtaatccactagggcctgaaaagtccgggaaaacatttccccagctcctccttaagcaagtaagggtttgcnattccatattcctgcccaatgaccatcactgnacagaaaccctggtaggggaagagaaagagaagacattattcactggcagcagctggagtcggacgtttgggcattaatatatatgtagtgttttgttggtgccttccaagcatcttcctgagaatgaccccattaagtgttctaggttgctaagatattaggtagtcatttcttgcctttgctgcactttctgagttcttgataccaacaaaagtatccttgactttgactcccaaatttctcgaacagtgtgtaagcaggtaattccctatattcgatcctttcctgttcaatttatctagagtgttttattcttacttcactcgatcttgactaacacatgaataaagc

SEQ ID NO: 375405 - DNA, 493 bp, Homo Sapiens
gagagcagcctgtctgtcagcttcttcactgcaggctccttttccagagtctcatctcctgcctagaacgccttttcccttctcttctcttcatcactgtcttcttcacccctgccccttgccaaattgctctgtatcttgacattttaaacattctcctctttctctaatcacctgcctagattcactggagcaaagctgatggcataagaaatctgctattctccccagatccctcccctgatcatttatagacacttgccatctcccgcattcccagaatgcttatcttgaatttacacctgttgtaaattgccccattcatgaattaggctaatgattgtctttctttgttcaattgcttcatgccgaaggagtcacctctctgggttctcacatgctgtaaattattagagggcgaaaagcaaggtcccagtagtgctcttcaaccaagctggacacaaaatcagagctaatcaaatgctaaaaaaaa

SEQ ID NO: 375406 - DNA, 477 bp, Homo Sapiens
agacctaggtggtatagccccctaataccccaacgcctatatggtatggcctgttgctccctaggcctacaaacttgtatggccatgttacctataagagaatactatatactgaatactataagagtgattaacacaatggtaagtatttgtgtttcctaaacatagtgaagcatagaaaaggtacagtaaaaatgcaatataaaagaaaaattggtacacctatattgggcacttgcgggactggaagttgctctgagtggtgactgaatatgaagggacattattgtacatcactgtagactttataaacacacttaggctacataaaaagtaaaactttaaaattcttaacttctgaatcttttgtaataacacttagcttaaaacacaaacacggcaacctgcccgggtccccttccacactgcggaagctttgtcctttcactcttcataatgaatcttctaccgctccaa

SEQ ID NO: 375407 - DNA, 435 bp, Homo Sapiens
  misc_feature (274)..(274): n is a, c, g, or t
  misc_feature (381)..(381): n is a, c, g, or t
  misc_feature (404)..(404): n is a, c, g, or t
ggaaaggacgctctatttccctcgtgtctctacctggtaggtaaatcggccgcagaaaagaccaatgctaactccaccctgcatttgcagagatccgtcgctcacaccttttcttgtcttccgttgaaaaaagagaatcgtgggagtaggacctatttgccaatctcctggtaacactatcacaactggccacttccgcccaacgcccggtagtctgagagcctccaaggtcctcccccgaacccctgaaggtccctgcagacgacggcgtctnggggtggtcaccgttatcccttaggtctggagaggggacatccgagcgagggccacttgcggccagggcccgagcttcgttccagcttccgggtgaccacagagttnccgcgggggggcagagggggccngaaacccagggcgtttcgttccctgtttttc

SEQ ID NO: 375408 - DNA, 202 bp, Homo Sapiens
cctaagcaatgttgagattgggggaggaactgcacacaatcgctgctcacatcagaataaacctgagtgtttttagtagctttctatccacacagagcatccccattagagccgggttttattgtttcaaatgcctctggtttcaagaaagtgttttacctaaagcaagactactactttaaatatgctctattgtatattc

SEQ ID NO: 375409 - DNA, 310 bp, Homo Sapiens
ggcatttgtagccctctgctcccatcgtgaacatgctgagagcaatgacaagtcagggctgatttttggaaggtgaacttgcaacttacctcaagtgaatactgttttcagttgtgcaagaagtgctttatgctagtagatatgtgcatgtttcctagagggaatgttttcaagttcagattgattctgctgagaatggacggcaactcggaggcctcaagccaataatgtactacaggccctgacatgttacagctgtgtaaacagggccattctatttcctaaatcacaactaataaagcagaggatg

SEQ ID NO: 375410 - DNA, 194 bp, Homo Sapiens
aaacgagacgtcaagttctacaatgtaagattaattacaataatgagttataattaaacacagctcactgcatcatctcaacgtttggttacatacaaccctatcaccagttcaaatatgaagtccaatgacttaccaaaaagcttaggatatgtttcaaattaattttgtggcaaaagaaaagtttatacttc

SEQ ID NO: 375411 - DNA, 329 bp, Homo Sapiens
cctgggagtctttcatctcccgaggctgccacttcttcttaaacctgcccagtgactgtgctggattttttctcactcactgtgtcagatgttaacaacctgtccagaagtttctctacaacctgccccagtcagtcagcctctagaactgtggggccagaaacttctaaactgtaaaacaatccaacgtactttgtttttctagtttctaggtcttcctgcatttaaatttatttctttcaggaattagtgtttttcttccattcaattccggtatagtataatcaatgaaattgttctcaacgctaaatataactctgcctcttaac

SEQ ID NO: 375412 - DNA, 305 bp, Homo Sapiens
ggctgttcctgagaagtacaaaagaacattcccagagcttcaggtacattgagatgaggtgggagagtgaggaagatttaagatgtaaaatgtgcactaccagaaaattatttaacacctccagtctctcaagagaatttaaatcttccctgttagtgtcagaatctacttgcttaatactttaaaaattagctgatggaaagaaaaattagattgaacacttcagcccacatcccatgtgtacttccatcaacacaggctcaaatccaatctggtttcaattatccggtaccttttttaatagc

SEQ ID NO: 375413 - DNA, 381 bp, Homo Sapiens
  misc_feature (36)..(36): n is a, c, g, or t
ttacatgcttttgtttaaaagttagaatgatgatgntggttgtaatcagtttttatttaaaattcctgaccctgttagagaatggtgatttaaattagggtgaaatcctagtgtttcctgaataggtgtatgcggaagatttcctcccagacttcgccatgcacaatatgtccatgtaacaaagctgcatttgtaccccctaaatctataactcaagaaaataaataaaaataattttgcagaaggagttgtcaatagaagaaaaatagtcattcatgtagattagccattgtaatctgtgataaaggaaagaaaaatttttaaaaataggattttctataaaagttctcaccatgcttcaatcaaaatataaattatttc

SEQ ID NO: 375414 - DNA, 448 bp, Homo Sapiens
cattaaaggtaaaggtctaaaaattttcgtttcccaactggagttccgcccactcgctttttttaaacttccctgcctatggtttggatatggtttgtcctcacccaaaactcatgctgaggcctgagtccccagtttgattgtgttggtaggtggtgcctttaagaggtgattaggtcattgagatggattaaaggctttctcatgaggctcagttagttctggaatggattcgctcttgcaggaatggatgaattctcacaagagtgggttgttatgaagtgaggatgcttcttgtgttctgttctctttgccctcctcagttcaccatctgctttccaccatgagttgaagcagcatgaggccctcatcagatgggctccctgatcttggactcctcagcctttggactcataagccaaaataaatctgttttctttataaattg

SEQ ID NO: 375415 - DNA, 235 bp, Homo Sapiens
  misc_feature (15)..(15): n is a, c, g, or t
atgagtgagttctcnctgtctgtgagttcacatgagatctggttatttaaaagagcctggcagcttctccttttcttgcttgctctctcactcgccatgtgatgccagctcctcttttgccttctgccatgaatggaagcttcctgagccctcacaagaaggctatgatgacgccatgcttcctgtacagcctgcagaaatgcgagtcaaaatgaacctcttttcttgacaaatt

SEQ ID NO: 375416 - DNA, 488 bp, Homo Sapiens
tagaatttgatttcagaatgtatgcttggtgagtctcagtgcccaggaacacttttggaataatttatcagacattgaacttctgtgattaatcgcttttatagatttactcagtctttaaaaatccgtctctgatttgccagagaaaaacggtggtagccatggaaatcgggagtgaaggagcactgcttcattgtggctcagcccttcctaggggcctctgccctttgatgtccttgagctactcttcagctctggaagttgtggacaaaccgtaggaatgtatgtgtgcgtgtggtggagtgattgtctgtgaatgacaggccctggctattgattgatgttgcatcaatttagcaaattcatttcctcattcttgatggcctgaatatatgtctgcacttttaatgctcctcttaaccagttgtaacatcttaccatttccctaacaaattgaattagtttaataaaatcttttgacacatgtt

SEQ ID NO: 375417 - DNA, 445 bp, Homo Sapiens
  misc_feature (22)..(22): n is a, c, g, or t
  misc_feature (107)..(107): n is a, c, g, or t
aagaaaccccagccagcaaaanacaataattgaaggccaactggtgtgaattccctcctgggaccctcctgagcaaggtcctacagaatgccctccccaaatttgtnccctgaaggacaggaggctggagagcttgtctgcctgcaagtgttccctgagcagtaacttctggataccctggggaatatttgcatgaaggctgaggggacatccatggtgctggcgaaggctccaaggtgggaaggagcaagatggaaacaggaggaggagagcctgagctcctgtggagtgtccatcccagttcaggctaaaaatcagtggtggatcaacaggatctgtcacgggtgctaatgcaaagccgagagggtttttctgcatctcataaaaggtaaagggtaaaagttacaagacaaggaaatagatgtgaaaaagaatcaatttgcag

SEQ ID NO: 375418 - DNA, 395 bp, Homo Sapiens
  misc_feature (21)..(21): n is a, c, g, or t
ctgccaaaaaccaaaggtaangataccccccccagtattaccaacacaatggattttcccagacaaagggtatggtgttgaaaaataactgttacttcctaaagccagccattttatccttctattttgaagactatttattgtaataattagaaaacatgaaatagggaactcccagactgacacagcagttgtttttgaaaaggaaataaactttgatgaattagataatccagatacatcattgtaaactcttactctaggtgctctttggtgagagacaggctttgttctcttgttcataacatttctctgcaaagaattctctatggagtgaagcgaatgaagtgaataatttcttaccaaataaatttatcaatttacaaatctgctct

SEQ ID NO: 375419 - DNA, 675 bp, Homo Sapiens
  misc_feature (197)..(207): n is a, c, g, or t
ttgatttccgtgtgttcattgctagtataatatatataaattaattttggtatcctgatcatgtatcctatgatcatgctgaattcgcttattgtctaggcattcatggattggaagacttcacatttttgtgatgacagtactacccaaaccaatctacagttttactgcaatcactatcaaaatccaaacagccnnnnnnnnnnngcagaaatcaattcataaattcatatgtaattgtaatggaggcaaatagacaaaatctttcttttttaaaggaacatgatggatggctcccacttccccatttcgaaacttactaccaagctatagtaatggaatagaatttagagtccataaagaaactcatacatctaaagtcacttgattttcaagaaggatccaagattgcttaatggagaaagcatagtctcttcagcaaataatgctgggcaaatatgtatacatatgcaacataatgaagttagatccgcacttcacactatacttaaaaattaactcaaaatgatcaatgacctaaatataagaggttaagctatacaactcttagaataaaacataaaggttaatcttcaagactttttatttggaatggattcttagataagacaccatatgcacaagctaaaaaaaccccacataaattggactaga

SEQ ID NO: 375420 - DNA, 315 bp, Homo Sapiens
ttccagtttgggataattatgaatgaagctattgtgaacatttgtttacaagtgtttttatggccatgttttcatttctcttgggtaaatacctataatggaattgctgaattatatagcaattagtgtatgattaactttataggaaatatatatggttagtgtatgattaactttataagaaaccgccagacaaatttgccagagtggttgttaagtgtctcatcccactaacaatggagaagagttcccattgctctacatcctcatcaacacttaaaatggtgaaaacgctttaaattgttaatattttgg

SEQ ID NO: 375421 - DNA, 430 bp, Homo Sapiens
  misc_feature (25)..(25): n is a, c, g, or t
  misc_feature (36)..(36): n is a, c, g, or t
  misc_feature (91)..(184): n is a, c, g, or t
aggatgagaaaagagaggaatgagngtaggtaaagnaaaagaaagaaggccaggccagacgggaagaaaataaaggagaataggaactagnnnnnnnnnnnnnnnnnnnnnnnnnnnnnnnnnnnnnnnnnnnnnnnnnnnnnnnnnnnnnnnnnnnnnnnnnnnnnnnnnnnnnnnnnnnnnngatggagaaagtagaaagaaactcatcaggaacctatggaggaatctgaaagctgcttcatagtcttgctgctaaattatcagtgcagtctgttgatttttgatgttgttaactaaactctaagtttcttcgacatcactcttgggtttattttccctttttcaacatgaaggatgggaaggcccagggagcttttagtcagaccttggcctccaacatttccaaaaaaagtttgtgcattgggac

SEQ ID NO: 375422 - DNA, 448 bp, Homo Sapiens
ttttttttaattctggcatttgccttattgcctcttaaatgaatactggctcacagctccttctgaggcaaggtctgtgactttgcaaacaggcagtatcacattcctaaccaccatggcagctagaaatcatatggcaattgtacctcccaagtagagaggtgcactcctgacaattctacggatctatatctcatgtgcagtgcttatatatgtgactactcagagtcactgtaggtgtaatctcatcctttgtgtcagtgaacatttaggtaaactggagctcatgttaagaaattgatgtttggggaccaggactgggcacacaacataaattggcatccgtggataatatggcaccttccctttcaactattggcttgagtaagttaaattcccatatttaattaaatgggctggaaaagtggggaaagctggtacaaaaaat

SEQ ID NO: 375423 - DNA, 577 bp, Homo Sapiens
  misc_feature (540)..(540): n is a, c, g, or t
tgggagctcccgggagcccaggggagatgctacctcggaagctgaagcggaacctccggcaggagcactggccgtcttttgaaaacttgctgaagtgcggcatggaggtgtacaaaggctacatggatgacccgaggaacacggacaatgcctggatcgagacggtggccgtcagcgtccacttccaggaccagaatgacgtggagctgaacaggctgaactctaacctgcacgcctgcgactcgggggcctccatccgatggcaggtggtggacaggcgcatcccactctatgcgaaccacaagaccctcctccagtccatagacgttccccccagaaaccagggcttctctctcctgagcctggccagggacttcaggccgttcctggggccctgcacatgatggggtttggtggacccagtgcccctcacggcttgccgcaagttttgcttgcagatggaccttcatggaacttggaaggggttcaaggttgacccggggaggaagaagttcaaagacaggggcacaggtttatttnagagcttgagggggcccttgggaacttttgggccatt

SEQ ID NO: 375424 - DNA, 501 bp, Homo Sapiens
  misc_feature (39)..(39): n is a, c, g, or t
  misc_feature (75)..(75): n is a, c, g, or t
  misc_feature (91)..(91): n is a, c, g, or t
  misc_feature (99)..(173): n is a, c, g, or t
tttttggccggaaggtccggccttaaaaatatggaaaantcccccgttggaccagcccaagtgggataaaaggcngaaccatttaataaanctatatannnnnnnnnnnnnnnnnnnnnnnnnnnnnnnnnnnnnnnnnnnnnnnnnnnnnnnnnnnnnnnnnnnnnnnnnnncaaccctaatacctacagttgccagacttttattagtgacgctgatccttcattagtcaagttttagttattttgttggcttttcccatgtagaattcccaagtgacattaacatactttgattaattaaagaaaatttggagactgtttaagatatatgtctagatatcaatgtaaactataagctttaggaacttacatctagaagaaagcctggaatctagaataattatctcaaaaaaaagtatatataccattgtacttgatataagaaaatgtaaacatgaaaccttgacattttaataaacagtatttgtgctaaaaaaaa

SEQ ID NO: 375425 - DNA, 503 bp, Homo Sapiens
  misc_feature (28)..(28): n is a, c, g, or t
  misc_feature (53)..(53): n is a, c, g, or t
  misc_feature (185)..(185): n is a, c, g, or t
ctgggaaataacgggcaagcggccaccnagcccggccttaatcccgtaatttnaagtaaaaacgggtttcccgccatgtgggtcaaggctggtccgggaacccctgaccctcaagtggacccaccccggctcagcctacccgaagtgcctgaagattcccgggtgtgagcccaccgcgccctagnccctctaaacttttaaataatcgtgaaatgtatgcgcagctgaagcgaattcagctatttcctctaccttttgtgtggaatttaaaatactgaacttgtgagatgaacctggtgggcaccagttctcaaacttcttggtcacaggacgcttgcactctcttaaaatgtactgaggacacctaaaagcttttgctcactgttgtttactactgctatttactaacatagaaattaaacatattaaaatattcacttaaaaaacacacgacactaacataagttatatttttattaaaaatcttttccagacaaaaaaaa

SEQ ID NO: 375426 - DNA, 318 bp, Homo Sapiens
  misc_feature (197)..(197): n is a, c, g, or t
  misc_feature (199)..(199): n is a, c, g, or t
ccctttgctgccatcccataaccacgtgcggcttttgttgttgagtccctgtggaatggctgactagagagagattgcaattgtggactgtgttatgcctccttctcagcaggctacaaaagtagaaatatttgcacctggtgtactcccatcatgttcttaagaagccacctgtctaagtaggagtgcatgtaacntnagcactgaatgacccaggaaatacatatatacatatcgattttattttatgactgcagggtacttttagagatgtgacagtcctggaaagttctttgcattccattggttcacttgaac

SEQ ID NO: 375427 - DNA, 570 bp, Homo Sapiens
  misc_feature (455)..(455): n is a, c, g, or t
  misc_feature (490)..(490): n is a, c, g, or t
tattgctcctttgtgaagtactggaacatgttctgtgttacacagtacccccccttacccatgcttccactttcctaggttttaattacccacagtcaactgtgatctgaaaatattagatgagaaattccagaaataaacaatttgtaagtttcagattgcatactcttctgggtagtaccatgatgaagtctggtcgtcctgctgtgtccagcccgggatgtgagtcattcctttgtccagcatgtccaagctgtgtggcacgtatgggcaggaaaaagcatagcatatacggggttcagcaccatccacggtttctgacgtccacatggtcggcgggagggggcgcttcttgaaaccctcatgggatgagggggactactgtggaaccaaaagcttaattttaaagaggtgaccacagactattattggcactatttcagggttttagttancttttttgaatttgttaaacaggttattcaaggancaaacctttccggaggatgttttcttgttttccctttgcttttttattttccttctgatggcttcttgggggtccttttt

SEQ ID NO: 375428 - DNA, 343 bp, Homo Sapiens
aataagactaaatgagggttatcagggaaagacaatgtaatatctatatgttctgaaaatgcagatgtagcacaactttctacatatgagggagaaatggagatcatatacaacaatcattttaaattgtgttagtcatcataggtgatatggtgttgttattttgagactgttgcttgtgtaatatgagatgaaataaaacaatgctatgaagcattctaattttattatcccctgtgtcctgaggaaccaaacgtttcaatgtgaaagacaggtatacagatgtaataggggaagaggttatgtaaaagctctgttaattttggttttggaattcaaagtg

SEQ ID NO: 375429 - DNA, 466 bp, Homo Sapiens
gcagtctttcaaggagatcaaacctgagtctgatcaagtctttgggtctacttaccaattggcaggaaacccagaggacagaggaacatgctgcaccatgtgtatgcaggccaacaagttccagttcaaatatatccttggatccttcagcaaataatgtataaggaacataaaaggtagagagaaaaatctatggataaaaagagacttaaaagaaatgtcaaagtttaaaaataatacaatcctaattatatttggtaaacatggatgttagagctgtttttaaaagctggaatgtcattactataaaagtcaggagtgattacctgtgtgggaagggaaggggctgtgatgggactgatgccttggtggttttagatggttggtaaagttttatttcttaacctggtagtggttctgaggctttttgacttagtataactcattaaaccacacatttattttg

SEQ ID NO: 375430 - DNA, 464 bp, Homo Sapiens
  misc_feature (26)..(26): n is a, c, g, or t
  misc_feature (229)..(241): n is a, c, g, or t
tattttccaggaattccaccttaagncaacgatggaccggggggtatgaaagtaaatccatttattttccagcccccacagagaattccatagtcctttaaaattcccaagatcaagctggctacatgatttcaaaaaaggctaaaacccaggatgaatgccccacatttgaggtaattattgccattaggtcacagtttgtgtaagataatgtatctaaaaccttctnnnnnnnnnnnnntctttaggtgttctgccagaattccagaatacctattgaaaccaaccaggatctcaaactccgattagttaggtttgcttccaatggagttaaagttctaaaagattctagaacttgtgtaaactacctaagaatttaggcaaacaagcctggagccagtcaacaaagaaggttttaaatgaaaaaaggaacaagaaacccactcaaaacaaccctcgtgcca

SEQ ID NO: 375431 - DNA, 371 bp, Homo Sapiens
  misc_feature (13)..(13): n is a, c, g, or t
catatttaacccnatggccccctataatccaagagacacttagagccataatatttaatgctggatcaccccttgggcacactgttccaaagacccagttccaggatgatgaaaatcaagttcctcattttccaggccttacaaaactatactctggaacagtcctcgaaatgcaaatttggctatatcgcagctacagagatgaaagctttgtgaaactctgatattctagttaaagactattcatatccatttctagagtgacttctgattttgacatataaaaatatgttcatatttttcacccattctggatgatgcaaaatctagctggtataaccatgttatttaatttttaatttccgcaaacc

SEQ ID NO: 375432 - DNA, 265 bp, Homo Sapiens
aataataataataacagaaaagttagagtaattgacacaattctcagtggccttcatttttttcgtcttgcctgctcttaagtagaaattcagctaaatatattccactgatagagttcatgaaagaaaataaaggtgatatttttaccctaggattctgccatttgtctgaaagctttagaatcattctacacagatgccaattttccatcaagttctgttactccacagccctgttaaaaattctcagcatggtggaacatga

SEQ ID NO: 375433 - DNA, 758 bp, Homo Sapiens
  misc_feature (28)..(28): n is a, c, g, or t
  misc_feature (42)..(42): n is a, c, g, or t
ccaaggccaaggactttaatacagtgtncccagtctttttangggcacttgcccagaagaagcccagacaaacccaagaaaaaacacgaagaaaaccataacataaagcccagcagaatttgcaccaccaccaacccccactatattcattcagatgctcaattgggccatctaacttaatgcatttaaatgtaaatttatgtaaaatctatagacgtctgactaaagaagctgtttcagtgggaaacctcaatgctctgtaaagaatgatgaacagaaatggcccataaatatgctcctggccactggtccacattgacagtctgatcatgtcacaggatgcaactgggtagctgacattttgtatagtaaagtgaaatgctcagcaggtataagagtttcatgtctttggacactttggtcatggatttgaaataactaagacccctctcgaccagttcccctttgtctgtgattttgatttgatgcttagaatctatattggggattgaatttagaatcataggattataaaatttacttgttatgggaaatcagatgaaccttgtagaaccaatctctttgacactaaagccaaaaatagtgaattccattggaacatgtacatattctgtacactgcaggtatgagaggtctagaatctaaggtggaattatgacaagttattttctgttggactggtcttctgattgttactgaagcaaagcaattcacattggcatggcatgggatagacc

SEQ ID NO: 375434 - DNA, 604 bp, Homo Sapiens
  misc_feature (510)..(510): n is a, c, g, or t
  misc_feature (553)..(553): n is a, c, g, or t
  misc_feature (564)..(564): n is a, c, g, or t
  misc_feature (571)..(571): n is a, c, g, or t
  misc_feature (576)..(576): n is a, c, g, or t
ctaaactatttaaatcctatccattcttcaagaaatgtttcatgacgcttccttaactgctaaggacccgcagattctcttcctcttgggactcacacactgactcatctcccgatcttttggtgctcagcaaagtggaggcctctgttttggacttagagtcaagaccattaaataagactatgctctaaaaagtacacctccgtggcccggaacgagtgaattaacatctatgagtttccatttccttgtctataaaattgtgaaattgcaacttaagattagttctgaagattaaatgaggtaacataggtgaaaatgctacatttatgtaagaaattactctttcataaggatgtcaatgtttaaatacgcattttctcaattttgttaatgaaatactttggaaattcttttttctaatggaaaccggctgaatgtaaaggagacccgtactaaaggaagataccacaggaagcaccagggtctctttctgggtctttctgactntgtgacgtttcagcgcacggaattaaggcgttgttattccggnggaggcaacgngtctcancatancctgttggggtggttttgtaacagacct

SEQ ID NO: 375435 - DNA, 523 bp, Homo Sapiens
  misc_feature (52)..(52): n is a, c, g, or t
  misc_feature (76)..(76): n is a, c, g, or t
  misc_feature (94)..(94): n is a, c, g, or t
ttcccctaccggaccgtggaaccacaaaaacctcgaaaaatctatcactttnaactgaaaccgcaataataactantgggttaaaccctaaaangttccctaggtaacctacttgagttgaaattgactaaaaatccttaaacccctaccctaagagaggtaacgcctattaggatcggaagtgattggaagctttgtttcagatctcgtcccaaaagggagaacggtcaatgacaaagctgctgtgaatagtattctgggggcgtggtggaaccccgattcactgctatctcccgaatcagcaacttgacagagccgcgcctcccgggccttggaagccttccattccgagctggctgggtgggactcaggttttacggtatgctggactttttccccgtgagttaaaacacatttatagtaactaagtggttaatgatgagaaaaaaccccaaactactgtactaataatcaacctctgctatttggtttgtaaaaaacaaaaatacatctataaaaaggg

SEQ ID NO: 375436 - DNA, 364 bp, Homo Sapiens
gaaatattatgcagccactaaaacggacatcaattcagatttctaaatgacacaatgtagcagagacagggccaggttcatgggtgtgggtcctacacagtcatacagggctccacacttacaagggccctacacttggtttaatgctccatggctgccaccttgaaattctgaatagttttataacaagagtcctccacatttacatttcacattgagcctataaattgttagctagtcctgagcagagatgactctgagtgcccattttctcctgtcttttagtaatagaacctcctccctttgcttcatacatacaccctgactagtgtttccacgctggaattccttcccagtatttctt

SEQ ID NO: 375437 - DNA, 518 bp, Homo Sapiens
  misc_feature (306)..(306): n is a, c, g, or t
  misc_feature (308)..(308): n is a, c, g, or t
  misc_feature (469)..(469): n is a, c, g, or t
acaggaaatgtgatcacttgaatgtgtgatattcattcatccactcattcattttgctgaccattaattaattcaattaaccctcctgagtacagctctgtgctaagcattagggactcaagatgattcttatcttcaaggcatccagcctggggagaaaaacagacgtacaactaagctgcagacggacacatcctttagtgatggggacacctgggaagggattgagaaactccttgcagttggccttgggaagctggggaggacttgaaacttctaagtggccctgggagcaaccggagtggngngtgggccagtgcctgttaggcctggggctgcctggctgaggatcccagctggactactgccttgctgttctacaaatgatggagcccttccagtcttcagcttcctcacaagttaaaatgcagacggcaatgcctcttttccagttgacgttgttgagggnttcgatggggaagtttcatggaaagcacttaggcagggtttttgttgag

SEQ ID NO: 375438 - DNA, 467 bp, Homo Sapiens
  misc_feature (11)..(11): n is a, c, g, or t
  misc_feature (70)..(70): n is a, c, g, or t
ccaaatcctantggggtcgggtgtgttccctccctaacagttttcccctgcccttgaaccctgtaaactnccccaagatgtggatcccctaccctatctttttaaagtgccttcctatggggctggtggtttaatgtgcctttatggccctctgttaccttgtttcctataaagtgtttgtttttctttagctaattaaaatttcataagcaacaaataaatttaaaaagatgaggcccaggatgtataattgaatctaacaaatgtcacattgcacagcttagccgtgtgctcgatttgtgatctgagaggcaatgccacttgccatatttgtgatctgtttattaaaagggagaggctacggtttaaacacaggctaagttcgtgatatggttcctaaatataatagatatttctaccacttaccccgtgccgccatgtttccctgtggttactaaaacagaggg

SEQ ID NO: 375439 - DNA, 310 bp, Homo Sapiens
  misc_feature (41)..(41): n is a, c, g, or t
ggcattcccggcacccccctaaaaactaacccactgggggnccatcccaagcctgtgattaacaaacccctagttatttggctaggtagtttccacatggcatagtagggatatatatatgtgaggcacaatacagtgtttatgtgagaataatatagattatttgaatctaggctgcagaacctacctgaaaatgggttttacagttttgtgtaattgccttttctttgtgtttgcatagaaggcattgcatagctggaagatgatggcaattataatttattatgctgtaattgttacctaaatgttt

SEQ ID NO: 375440 - DNA, 292 bp, Homo Sapiens
  misc_feature (82)..(82): n is a, c, g, or t
cagaacttccagggaaaaatgaatcaacaattgaacagatagataaaaaattggaacgaaatttaagttttgagattaaganggtccctctccaagagggaccaaaaagttttgatgggaacacacttttgaataggggacatgcaattaaaattaaatctgcttcaccttgtatagctgataaaatctctaagccacaggaattaagttcagatctaaatgtcggtgatacttcccagaattcttgtgtggactgcagtgtaacacaatcaaacaaagtttcagttactcc

SEQ ID NO: 375441 - DNA, 390 bp, Homo Sapiens
  misc_feature (314)..(314): n is a, c, g, or t
  misc_feature (334)..(334): n is a, c, g, or t
ccctgacgtttcctaaatactggcctggcctgtgccgcccctgcccccactactcacaagtttctgagccctttgtcagttttgtacattcccaagcatgccagcttctgtgcccatggaccttgctgcatcctgcacagcagggttcagtttcatgtatctttgtcttttcctctagaacctgcctttttcaaatatccctgccttttcccacctgggaaacatatactgtatgcgaaagagttgatatatgcaaagtaattcaaacctggccatgtactttgggaaaagaaaggcataggaggatggaattnttgggtgtttcttcacaacnttaaacggaaaaatttcgttggcggatcttgatttccaggaaggaattcttttttg

SEQ ID NO: 375442 - DNA, 452 bp, Homo Sapiens
  misc_feature (32)..(32): n is a, c, g, or t
  misc_feature (128)..(128): n is a, c, g, or t
  misc_feature (398)..(398): n is a, c, g, or t
aatgcccgggggaaaaaaacctgccctcgggngttagtgagcattttaaagcacttgatgccccatagactagaaacaaacaaaaattaaccttgattatgcaacaccttagcatagaaagttacaanggtatgtctttttcaaagtttgcattctatcatgcaaatattatctaaatatgcatgtgctgactactcatctactgtattttaggaaatacaattaggctgcctttctcttcccctatgtagactgtaaataactgtagatctttctcttgtttccctatgtaaatatatgtaaatactaacaagctatgcatgctgctattctaggcaatttcaggtacttttataatatgaaggcatgtacttgaactcgtttgttaacagaggggnaaaaacgctctcaaactctttaaagctgaatagaaattaaagatttcttcctag

SEQ ID NO: 375443 - DNA, 410 bp, Homo Sapiens
  misc_feature (51)..(51): n is a, c, g, or t
  misc_feature (130)..(130): n is a, c, g, or t
  misc_feature (146)..(146): n is a, c, g, or t
  misc_feature (240)..(240): n is a, c, g, or t
ttttaaggggaataaatcccccgtgtgccctgatttggacattccttgtcngacaaaaaaaacttaatttcctagtaaatcctataaaaatgggtaagtcccctaaattacaaatgagaaaattgaagcncaaggaaaaaaataanctagtttgaaatattttgaaaagtaataacataaaactagtatttgtagaagattatgtgttgtatataacaaattagtatttatagaatatgncctatttatcagaagtttataattgtttatacctaatacagttctttttggagtaagaatgattatataaccgttatccatttgggtataaatctgtatttttagttttttccctttgattagtatgtgttacatataaagacagaaaataaagtataaatcaagagctt

SEQ ID NO: 375444 - DNA, 416 bp, Homo Sapiens
  misc_feature (12)..(12): n is a, c, g, or t
  misc_feature (30)..(30): n is a, c, g, or t
  misc_feature (48)..(48): n is a, c, g, or t
ccagaggaatgnatcctaaacccctccaancatgtaataaactcttgnaaaaccatgtatttattaaaaacatttaacatgccttagcatccttactttattactgcaacttcccaattcctcagaggcaaaagtactacttattgtttaacaattcctaagatgcacatttcctacacattttaatgtcattgaaatcttttacaatcaatgaatcttaaaatcaatgactttgtataactgatgttggccaggtggcagacatgactgagttgtcattatcatccacatgtgacaccagtcacagctattcatattgttttcacttcagttgagttatgtgtgttgttggaatcgtatctgttgaccttaactattacataaaatttcttctggatgttgtctgaaaactttat

SEQ ID NO: 375445 - DNA, 351 bp, Homo Sapiens
  misc_feature (40)..(40): n is a, c, g, or t
ccctttctcctacctatgcaccccaacccccagcaccccngggtattaagtagaggcctacatgggaagcagtagcttcctcagcccagagacatgtcagtggaggtggagtggagagtcaggattcccacccagcccggggaatcaagaagctgccccatctgtagtgtaaatggaggacaagtggggaacctgaacatctacccccaacttgccgaaatgaaatggcacctcactatcttcatctgctggagcaaaatcaaacaaagccaactaacacagaaaatttaagtaagatctagagtcttataatacccaaagtgtgcagattttaattaaaaattgtctggc

SEQ ID NO: 375446 - DNA, 495 bp, Homo Sapiens
  misc_feature (285)..(285): n is a, c, g, or t
  misc_feature (299)..(299): n is a, c, g, or t
  misc_feature (316)..(316): n is a, c, g, or t
  misc_feature (406)..(406): n is a, c, g, or t
  misc_feature (418)..(418): n is a, c, g, or t
  misc_feature (430)..(430): n is a, c, g, or t
  misc_feature (446)..(446): n is a, c, g, or t
  misc_feature (455)..(455): n is a, c, g, or t
  misc_feature (470)..(470): n is a, c, g, or t
  misc_feature (480)..(480): n is a, c, g, or t
gtggagatgtagcagagaagatagagagcctgggacagcttgtggacaaagaaaaaaacaaacaaacatgattcctggtgccctggccctgtctccccagtgtccagaacagcagggacaacaatgtcacatgtgcagcagatcagatccactgatgggagagtcacataattgaggatattagggaaataataacaaataaaacacaagcctggtttcctttgctgcttcctagttaatatatcaaattccacttcatttcctggacctctgttatctaactgnatgttcaatagganacaagccaataagtctnctaaacgctcgcatcttagggaaagggaacttgggtgggtggaaatcctttgtttacttcaggaagtgttcagccctctggaagttgttnttaggaggcctnagatctattgtnacatttgatttttagncccacggtncttgcccaccacctntggcccgggngggcctagccggggt

SEQ ID NO: 375447 - DNA, 489 bp, Homo Sapiens
  misc_feature (96)..(96): n is a, c, g, or t
tgctaacttggacctgtcagttaaactctaaggtggacagggttctcagtactaagcaaggagacagaatgctttgttcctttaaaagactgaaanagctgaccttcaatggattgaggcacttttgcttttgtgttaaatgtagatgtgctaaaatatatagatctatcatattttacctacatatgtatgtcattccagtataaaacattctcctctacccaagaaccatagccatgattgttataaatcaatgaagtgtaaacatacattattaaaaaaccacttctgacattccattatgtgctattcaaagatggactattgaactatagaaaagacagactgtgcatttgttcgttgatcctcatcttattcctgacatgtaaaaatcaattttacgtagagtcaacattgtaggtaggttaaaataccagtggcaaatttggaaattcagaaacttataaaccacgagaaatataaaaaaaa

SEQ ID NO: 375448 - DNA, 530 bp, Homo Sapiens
  misc_feature (333)..(333): n is a, c, g, or t
  misc_feature (421)..(421): n is a, c, g, or t
  misc_feature (467)..(467): n is a, c, g, or t
  misc_feature (478)..(478): n is a, c, g, or t
caggcaagaggttaggtttggcccatgggcataggtttgctgacttcagcatagagtcgtgggttatttacaagtgacatacttttcctgggttatctgggtatgttgactccatgccacttgcataaagcagcaatggatattagtattatggatgtccagtaagttattccacaaagaccatgcctaaggtggcatcagccctgggctccacagctgcgtggcatcaaagctttctcttaactctcttacctctaggcaaactgagacctcaccatcctctcccctgcttcccacgacagtcctttgcccttgccatgctcagggttggantcaagttgttctattctcaacagaccaaaatgtttagttaaggcaaagtatcttggaaacaattgtggattaattacagtcttgtacncttgacaaagctgtgcaggatgggcaataagttcataccagcaatnctggggtcccntaataaatacgtacatgtgggacatcgtgcacatatttcaacagttcggagt

SEQ ID NO: 375449 - DNA, 438 bp, Homo Sapiens
  misc_feature (12)..(12): n is a, c, g, or t
  misc_feature (22)..(22): n is a, c, g, or t
gttgcccataangctgtgctantttacccctgaatttgcagtgatacaatatgggtgacaaatactggcccctccataaatctgaagagtaagaagtagtgaaaataaggcttaggatatgaaatggcgttgtcacttgaatcaaggccactttttgtcctacttgagcatctcaagttgggatgcatcatctgatggcacttccggaactggctgtggtttttttgggtgtaccgagagtgccagtgactgtgcttcttacaattcctggcatcttgagtaggtgaaacactgtatcagactgggtgatgggcacattgtcatttcaccaagttcctggaactgttagaattgcttgtgtatggggatcctatgttagttcccctggatacattgttttatcagtcggaattcttaaataaagacatacttcccttc

SEQ ID NO: 375450 - DNA, 616 bp, Homo Sapiens
  misc_feature (48)..(48): n is a, c, g, or t
  misc_feature (473)..(473): n is a, c, g, or t
  misc_feature (501)..(501): n is a, c, g, or t
  misc_feature (540)..(540): n is a, c, g, or t
  misc_feature (585)..(585): n is a, c, g, or t
  misc_feature (587)..(588): n is a, c, g, or t
ggaaagctggcccacagagtgaatgcccatccctaacttggccctcantgcagtaacctccagggccagtggtccctttaactttgttaaggccttgaaaaatctgacaaaagcccataaaacctcccccacagagacatacagacacacatgtacaaacaacattttgcatacaatttcagggagtccatggaccccaggtaggggggactcctgctttagggcaagggtgtcaccctgagtagtcactgattgcaaacgtatctttatactgctcgtatatcctatgactgttccccttctgttgttccctaatcattagaatgttgttgatttttaatgggagccaaggaaatggggtacagcctacactccagccagagaaagcagctgtgacatggcagtggtggcagccagggggtaaaaacaaagaaaaggatggggtcatgtgtactgctgcccttcccacccgnaaggtcactttaggagcttttctctacncaaatttagagtaaggttgtggggcaatggggagagggncagtgtttcagttccttttagaaaggaacgccattccctctatgncnncagggtctaaagttctgcaggcaacgcc

SEQ ID NO: 375451 - DNA, 428 bp, Homo Sapiens
  misc_feature (266)..(351): n is a, c, g, or t
  misc_feature (357)..(357): n is a, c, g, or t
  misc_feature (362)..(362): n is a, c, g, or t
  misc_feature (384)..(384): n is a, c, g, or t
  misc_feature (409)..(409): n is a, c, g, or t
gcctaaggagcaatgcaaaacgcattgcaataaacaaaatccacttcagcatcattcagttcaatttaaaatgatagtggcattcaggctgcgtacagagatattacactttaacaccattcatgatttggcctccagactacaacaacattcaatttagttactcttttgaattgtgtgctaggagcatggactttggaatcagacagatttgaatttgctttcaggctctaaatcctgtttttttcccactgtgggaagggcannnnnnnnnnnnnnnnnnnnnnnnnnnnnnnnnnnnnnnnnnnnnnnnnnnnnnnnnnnnnnnnnnnnnnnnnnnnnnnnnnnnnngcaggnttggnttcagggtacaggactctaggngagggaggagtatctttggcattantcccagtggggggcgccag

SEQ ID NO: 375452 - DNA, 541 bp, Homo Sapiens
  misc_feature (281)..(314): n is a, c, g, or t
gtgtgtatatgtgtggatgaactgagattatgtatgtaaagtccgttgttaatcatttcatgttttagtgttggaagcccagtcctaaagagtctgattattttccctgccctccagtgtggacccagctgccagctggtgagcgtctgcatctgggtgtggtgcccaggccttgctattggtgtgatgtatgcaccagcagcagctacctcgtcttgggagctcattaggatcgggatcgccgaatctcaggcactcacctcagactgactgacttagannnnnnnnnnnnnnnnnnnnnnnnnnnnnnnnnnctaggcattttgaagtctgagagacactggactagtagttttccaacatcacatatgctaacagaacagacgcctgggcccagaatttatggacgtgggccttcaacgtgtgtatttttaatatgcttctgggttatttctaatgcacagagtgtggataactatccaaataaatgcttagaagtgtactttaatatatgagattaaaatcagaattgcaaaatttt

SEQ ID NO: 375453 - DNA, 408 bp, Homo Sapiens
  misc_feature (12)..(12): n is a, c, g, or t
  misc_feature (81)..(82): n is a, c, g, or t
  misc_feature (110)..(110): n is a, c, g, or t
tttttttgtttntcattcagtcttacgaatacttttgccctttgattaaagactccagttaaaaaaatttttaatgaaganngtggaaagcaaggaagtcaaagcaaggnaactatgtaacatgtaggaagtaggaagtaaattatagtgatgtaatcttgaattgtaactgttcttgaatttaataatctgtagggtaattagtaacatgtgttaagtattttcataagtatttcaaattggagcttcatggcagaaggcaaacccatcaacaaaaattgtcccttaaacaaaaattaaaatcctcaatccagctatgttatattgaaaaaatagagcctgagggatctttactagttataaagatacagaactctttcaaaaccttttgaaattaacctctcacta

SEQ ID NO: 375454 - DNA, 423 bp, Homo Sapiens
  misc_feature (408)..(408): n is a, c, g, or t
ggggacaccgcctcactttgagacaacttgaggctgcgtcagtgaccttgtactgttgttatacaattcaatattgaagcgagagattctccagaacttgcccagaagccaagacgtctggaaaggatctcagcctctgtcagcctgcagcttgggaagagtgattcacagagcctgactgtccactgctgctaaaccatacactggccttggctcacacatctgactgaactgtctcctatgactaactgcctctctttcttcagccttgcaagtttcctgggagtcctgggagtgggacttcacatataaaagggggactctggggagacctagttcctggggtttctcttctgggaagtcaggggaagagtattagggaaggaatgggccacagtgcccaacttnacatttgacaatttt

SEQ ID NO: 375455 - DNA, 462 bp, Homo Sapiens
  misc_feature (416)..(416): n is a, c, g, or t
gtggtaactgggggacttctgctctaagaggacccgtgaaacagcaaacaggaggaaggaacttggtggtgggggcaaggggcagccacccagcaacacccccactaggagcacttctgtcctctaaaggcagtgagtttggggataattcattggacgaagggaaaagacaaggctgctacaagaagagggatgagggcaaccctggtgcctcccgccactgcagtggtatgcaggggaaagcaacaatgaaaagaggtacgtgccattgggtttcccgaaaaccaggggtctcgatgttgacaacagaggattcctcaacggcgactggctgtctcggtcatttttcagtgagtgctttaaaaaaagattgagaggttttaaatttaaacaaattttcttgcctttaccaaaantgacagtaatgttagcttttctagggcaactaaaggcttaagccag

SEQ ID NO: 375456 - DNA, 548 bp, Homo Sapiens
  misc_feature (28)..(28): n is a, c, g, or t
  misc_feature (34)..(34): n is a, c, g, or t
ggtatttcaacttggagtcccttcaaancctttncccttaaaaatgtccatcccaaaccttcttccctcaaaatttccttggagaattcccataggcactgcacaaccctgggtccctagatcaggacgtacaaaaaatccctggcaaatgagaggccaaattgaattttccttctggattacaatattctggcaatggcagactttttaaaagatcttcgtatcttgctggcatcatagtcttgaagtcttctcctgaaggccaatctttcaattttaaaacaactgtttctccactcttgtttttctgccgttttgaaacttcttcaaaaccatcccagaattccttaacattggcatttgaaatgatgctatctttgcagttcaggagatcagcttggtggtctccaaaatcaagactaattgattccgccttccataggctaatgttcattttcttatgcacaccagaaaccactgcaggctgtccttgtttccaacattctttgaaaagcttccaattactgctattcttataatccttaagc

SEQ ID NO: 375457 - DNA, 433 bp, Homo Sapiens
  misc_feature (14)..(14): n is a, c, g, or t
  misc_feature (50)..(50): n is a, c, g, or t
  misc_feature (60)..(60): n is a, c, g, or t
agaaagccttttcnaaaaagtttttgaatccttttctgcaacaagctttnaaaaaagcanagcttttactcaactgttctcaactccatggcaaaacttacatgcaaacaggcataacaccaggcttcagctcaggagtcaatcagtaggtggaaaggagaaggctgcaaacagttgggtgagaagctgcgtcctgtcgtcatggagagcttctaactgcagatgcagggttggctctgccgccttactcctgcttggcagagagaaggacccagtaccaggcacctggttttttctgtgaaagctgcaggaagggaaaactgtgaagttatggattagaaagtaagccatcatacttttagtttccttctcttaaagtaatcctatactttagagtatataatgtattttgtgtccaggtgtgggggctcat

SEQ ID NO: 375458 - DNA, 313 bp, Homo Sapiens
ccttccttatttttcttgcagatgaatggacccaggtagtttgtttgccttcagagaatttccctgggaatttcaagtcagccctagaaatgactttggaaacttttttggaagtgcagttaccaaaccatcttcatcagtgactccaagacatcccctcgaaggaacccatgaattgagacaagcttgccagatctgttttgtaaaatcaggccctaagttaatggatttcacttaccatgctaacatagatcataagtgtaagaaagatattttaatcggtaggataaagaatgttgaagataaatcatgg

SEQ ID NO: 375459 - DNA, 502 bp, Homo Sapiens
  misc_feature (33)..(33): n is a, c, g, or t
  misc_feature (35)..(35): n is a, c, g, or t
  misc_feature (123)..(159): n is a, c, g, or t
  misc_feature (198)..(217): n is a, c, g, or t
  misc_feature (441)..(441): n is a, c, g, or t
  misc_feature (446)..(446): n is a, c, g, or t
  misc_feature (478)..(478): n is a, c, g, or t
  misc_feature (483)..(483): n is a, c, g, or t
gtatgagcgcattggcttgtctgccgcaccagnanagggtagaaagccacagcagggggcagtccagcagactctgactcaactttctaggcacctagcagagaaagataagatcaaaaggtnnnnnnnnnnnnnnnnnnnnnnnnnnnnnnnnnnnnngggtgggtgggggaagtaaactagactgaagcgatggannnnnnnnnnnnnnnnnnnnctttagtgtttttccctttgttcttgaacacttttgccctgcagcctcagttttgaattcttttagcaacttgggattagaggggcccatatgtcagaagctcccagcacctcctacttggggagaaaagtgagccatctgctggtcaggaagtcctccagagagggcagcttttccccacaatgggtggcaggaaactttgggggaaagcaggaatgggtgtnccacntgctgcggaaggaactgccctcagagaaggtnggggncggaaaaagggttagaagc

SEQ ID NO: 375460 - DNA, 309 bp, Homo Sapiens
  misc_feature (76)..(84): n is a, c, g, or t
  misc_feature (183)..(183): n is a, c, g, or t
ttatggaataagctcatcttccctgagcacattgccactggaacaaaattagggttatgtgactatgtatgaaggnnnnnnnnncagctcttgtactggcaacagatgatgtcttccataccctcaacagtaaaataaaaaatgacaacaataaaatttactttgtatttacttagtatcagnaaatgctgtacatgtattcattcatttattcaattatcttactcaatttccttcctctggaaagctatgagaggagggaaaaatagtattgagaaagaaacaagacaaaacaaaacaaaaacctct

SEQ ID NO: 375461 - DNA, 268 bp, Homo Sapiens
  misc_feature (15)..(15): n is a, c, g, or t
  misc_feature (76)..(76): n is a, c, g, or t
  misc_feature (126)..(126): n is a, c, g, or t
  misc_feature (224)..(224): n is a, c, g, or t
ttttagattacaacnaaatatgttacagatttaaataacattatacaatggaattattttaaacacttatttttantgatgtgctttcataatttgactaatgataatcaatggtatgatatttgntcttacttcccctaattatgccattcatttgtgctgacaatatcctatgaatacagtatagtaaatgtttattatctatttgaaatttgggaaggagntcatgtatatatttacaaaaacaataataaagccattatttttc

SEQ ID NO: 375462 - DNA, 254 bp, Homo Sapiens
atagattatatcctccatttaataattttagaaggttttataaaataacacaattaaacttcatttgaacttttctaatttgaaatataagacaatttatactctaaattttagagtgctttggttgaatataatcattaaagtagctctggaaggagagtttaggtaatccacacacaaagacaagaataatgaagctaattaagagaataaattggctttgaagtactttaaaattatagcactgctatggt

SEQ ID NO: 375463 - DNA, 330 bp, Homo Sapiens
tgtcaaattgattcaaatttgccaccttataaacatccagctattgcaaagagcctggtataccgtagagtttcagtatatcctatttccatagtttcccccctgtggtcttgcagaatggaattaacctgaattcaacaaaagaggtctttaaaattcataacagcaggtgtcgtctgtctttgaaattcccttgccaaaaaaggaaatgatttcttagtgatatgctttacttctgttgatcactatttgctcttttaaagtgtccaaagatgttttaatagatacttggtatttgttgttttctttaataaagtataatttacatgt

SEQ ID NO: 375464 - DNA, 504 bp, Homo Sapiens
  misc_feature (439)..(439): n is a, c, g, or t
  misc_feature (482)..(482): n is a, c, g, or t
gaagtgtacctcgagattcaggagcaatgcttggcttgaaggttgtaggaggaaagatgactgaatcaggtcggctttgtgcatttattactaaagtaaaaaaaggaagtttagctgatactgtaggacatcttagaccaggtgatgaagtattagaatggaatggaagactactgcaaggagccacatttgaggaagtgtacaacatcattctagaatccaaacctgaaccacaagtagaacttgtagtttcaaggcctattggagatataccgcgaatacctgatagcacacatgcacaactgggagtccagttctagctcctttgaatctcaaaaaatgggtcgtccttctatttctgttacctcttcccatgagtcctgggatgtttgaggggatgtccccaccagttctttatccagggacaacttttccaatnaaaactatgggttttggacaaggttgggttcacccatttaatnggttaccatttttgggggcctt

SEQ ID NO: 375465 - DNA, 482 bp, Homo Sapiens
  misc_feature (43)..(43): n is a, c, g, or t
  misc_feature (50)..(50): n is a, c, g, or t
  misc_feature (67)..(94): n is a, c, g, or t
tcccctgggcccatttgcagtcctgccagaagtttccccaaancccctantgccatatggtgtgccnnnnnnnnnnnnnnnnnnnnnnnnnnnnctccctccccttgaagagtgaaagtcctacagaaaatgccaggcccagaaaggtgtaaggtgttattcccagtctgccgcccgctaaggccgttgggatcgacgcgaaagatctcaatagtactaagaaccaaaaccagtcaacagttctgtgaggaagtctgacgcacggaatagtaggacttttcacacacaaaggacaaataaaccaagagttaattttggctaccaaactgcaatttggttttctaggtcattttcccccaactatttaaaaagaaacattagtgctacacatatgcaactttaagatgctggattctcctatcaagttgcactgagaagcaagtgaaataagccccctcgctgccgtccacctgcacagacgt

SEQ ID NO: 375466 - DNA, 527 bp, Homo Sapiens
  misc_feature (509)..(509): n is a, c, g, or t
tccagcatcttaaaagtggcatatgtgtagcactaaaggtttcctttttaaaataagttggggggaaaatgccctagaaaaccaaattgcagtttggtagccaaaattaactcttggtttatttgtcctttgtgtgtgaaaagtcctactattccgtgcgtcagacttcctcacagaactgttgactggttttggttcttagtactattgagatctttcgcgtcgatcccaacggccttagcggcggcagactggaataacaccttacacctttctggcctgcatttctgtagacttcactctcaagggaggagttttcttttcttacgttttgacttttgcacaccatatgcactagggattctggaaacttctaagcatgactggcaaagtgggccaaggaggaataaagtccttggatggataaatcacagtatatcccttgaggcctcaccttattggccagtgctaggatttttctttttaatctctccgtttttgctaacggnaaactggaaaggctattt

SEQ ID NO: 375467 - DNA, 500 bp, Homo Sapiens
  misc_feature (413)..(413): n is a, c, g, or t
  misc_feature (418)..(418): n is a, c, g, or t
  misc_feature (468)..(468): n is a, c, g, or t
gtctgtcatatatggtgcaattgaaaacttctttgcttcagttttccttctgacacattaattacaaaaccattcccagttcccctggaaaaccaaatgttttataatttctaattctagtgtgagctcattagcttgtttgttatcagattgactgcatataggaagttggatgataacagaaacgcaaaatgttggtccagtttgtttctgcccaacagaacttccaagactttgtgcctgcaatttgagagagcaatttgagagtcgcaccaggatatttagtccacagtttgatttacaaagcctacttacaaaatttatacggaacctggcaaaggaaattaggagtgggacatgggaggaaagccatggcatttccaggggtaggcccacatttaagtttggatccnggggntctattttcccaaaaggattgggttttaaaaaattaaattcccaggtccngttaggggatttttttgtggtggacttggaca

SEQ ID NO: 375468 - DNA, 391 bp, Homo Sapiens
  misc_feature (27)..(27): n is a, c, g, or t
  misc_feature (42)..(42): n is a, c, g, or t
  misc_feature (47)..(252): n is a, c, g, or t
ctcaagctcaactgcaaagctctgccntcccccaggttgaancctannnnnnnnnnnnnnnnnnnnnnnnnnnnnnnnnnnnnnnnnnnnnnnnnnnnnnnnnnnnnnnnnnnnnnnnnnnnnnnnnnnnnnnnnnnnnnnnnnnnnnnnnnnnnnnnnnnnnnnnnnnnnnnnnnnnnnnnnnnnnnnnnnnnnnnnnnnnnnnnnnnnnnnnnnnnnnnnnnnnnnnnnnnnnnnnnnnnnnnnnnnnnnccttatgcttgaaatgtgaggtttcattagggaaaaattttcttgttgaatttctaacatgaaagaataatagatttagctgtagattaaattaatggtcctggtagtttggtacaataaaataaatgaaatgaaattg

SEQ ID NO: 375469 - DNA, 521 bp, Homo Sapiens
gactggtgtggaaagttcagctaattttctgattcaatgaagttttaggtgaggtggtagccttagaggtgtcccattgcttggcaggattatgtagtttcctaatttttagtcctcatgagtccctgctttcctcaaacctccctgaatcactgtaggattaggccccttgagtaaagtcaagaggagcaaaataatgttcagagatgatagacaggagaagttttcaagcaagccacgctcaacacagatgcctttctttcaaaaacaattttatttgtattaaacaatattaaacttcccaattttcatgtctgttaaccttttaaatgacatgccaacattatttcacattagccatcaggcttccatcatgatggcacagcatgctgcatggtggttaaaaaggataaagcttattttaaaatatcaaaaagtttttggtccttgtaaacatgtaagtcatttggaattttcaaaaatgttgtgaaatcttggctttgtataatgccacgtggtag

SEQ ID NO: 375470 - DNA, 435 bp, Homo Sapiens
  misc_feature (15)..(15): n is a, c, g, or t
  misc_feature (32)..(32): n is a, c, g, or t
  misc_feature (47)..(59): n is a, c, g, or t
  misc_feature (157)..(157): n is a, c, g, or t
  misc_feature (197)..(197): n is a, c, g, or t
  misc_feature (232)..(243): n is a, c, g, or t
ttccaaggccccggnctggggcaaacaacagnccctgtccacctacnnnnnnnnnnnnnccattagcctaggccgtggtgatgtaatggccctgtggtcccccagcctacctcaggaagcctgagaacaggaggatcaccctgagccccgggaggtncgaggcctacagtgagcccatgatcacacctactgcactnccagccctgggaaacagagtgagactctgtactcnnnnnnnnnnnnggaatattttacacttcaaggttctatacaaatgtaaaatatcattctattacttatttataatgctgattattctttaaatgactttaaaatgttaatctctgcttgagctacggagaagtatgtaacaaatttgtgaaggattggcattaaagatagtcaaaataaaacatagaaattatggaaaaaaaa

SEQ ID NO: 375471 - DNA, 258 bp, Homo Sapiens
gatatttggcaggcatccagtagtcttcgataaacacaaccaccatctagtggccagaacagccttatcggaccccactgtctgcaatgaaaagctgttcctttcctcatcctttacagggccaagcacccagcatcctgggacagtggccccgtgtgcccagctttgaggatgagctcatgcctggttgctctgggtggagagagggaagagttgaatcaacatccatatgtataaatctccttttgtgcatttaga

SEQ ID NO: 375472 - DNA, 461 bp, Homo Sapiens
  misc_feature (18)..(18): n is a, c, g, or t
  misc_feature (42)..(42): n is a, c, g, or t
  misc_feature (182)..(182): n is a, c, g, or t
  misc_feature (215)..(215): n is a, c, g, or t
  misc_feature (229)..(229): n is a, c, g, or t
ggggctgggctgagcaangccattttttaaaaggccccctcnggtgattctgtcctcagaagatgttggaaaaacccagtgggttaggagcctcagtcatcccactttccagatcctgtgattatgcccactattaaatacagttggcctatcacatagattttatgcctttagccttgttncttttttcctttgctataccaaataaaatcttnctgagctgtagttnccagtccttaaaataatggttgttaccatactgaggttaaacattagtgcatttgcttaacaaggactttaaaacttatcacactgccataatttttaatggtttctataatgattaattaataagaaaatcaataattggattttaagcaggaaactagccaggaaagttgaaattcatagaccaattcaatggaaaacattaaaatgtattgggagatgcccaatattct

SEQ ID NO: 375473 - DNA, 448 bp, Homo Sapiens
  misc_feature (326)..(326): n is a, c, g, or t
  misc_feature (333)..(333): n is a, c, g, or t
  misc_feature (434)..(434): n is a, c, g, or t
aatcttaactgtttattgatttggagattgtatctcattggtaaagaacagttacttccttcacagtctaaagacaaattgtgtattattctgtgttaaatagcatggcactgttgatcaggagtttacttctgtctcattacaatgtgaacttgttgcccataaaataattctcttaagattgatacatcctgactatgtactaacatgtcatgtcagtttattattttaaatagaatgtgctaataacatatcattttaaggtttatgtgaactatttctctgaaaggaataaaaatttgtcactgtataattgaacatatatngcacttngtattcacaggtttgggggaggcagatcagacatgtaaactatgtacttcttgctaattgaaattatttgctacattaaacagacttgtaggaatttaccnattacatgcttgac

SEQ ID NO: 375474 - DNA, 351 bp, Homo Sapiens
tggatccagccatcatcacccagtatacaagatggtggtctaatgcaagcctctgtacccggtccttcagaagaaccagtagtttataatccaacaacagctgccttcatctgtgactcacttgtgaatgaaaaaaccataggcagtcctcctaatgagttttactgttctgaaaacacttctgtccctaacgaatctaacaagattcttgttaataaagatgtacctcagaaaccaggaggtgaaaccacaccttcagtaactgacttactaaattattttttggctccagagattcttactggtgataaccaatattattgtgaaaactgtgcctctctgcaaaatgct

SEQ ID NO: 375475 - DNA, 569 bp, Homo Sapiens
  misc_feature (12)..(12): n is a, c, g, or t
  misc_feature (30)..(30): n is a, c, g, or t
  misc_feature (120)..(120): n is a, c, g, or t
  misc_feature (126)..(126): n is a, c, g, or t
aggtgtgtaccnagaccatccctggtgggncctaagcatgaaaaccgtggtatctgccctaattgcctttgtcatccccatcatcatccaacaggtcccatgcacctcctaggagcaaanccaggnactctgaggaaaggaggaaataaaacacagccctggtcattgagacccactcatggacttgccttattttaaagctcaaaaagtatctctaaactcaaggacctgatgagggcaaacaaaacgataaaccaaaatcaggtgacagtctgcatataacccaacactgcagggccaaaataaaatctttaataaacaatccttgctggctgctaccagctgaatactcaagcaaaaagagatgccaaagggtgagaattagctgctcttgattgcattgtgctactcagggatctgaagccggggctgttcatgccaccatgtgtaagcagagctgtgggcctctgtatgccactgactgaggcttaaaaagtacctttgtgtagctctgtccaaagactgtgtgaaaactctctgatgtcaacctcatgcaattcttaatactt

SEQ ID NO: 375476 - DNA, 314 bp, Homo Sapiens
tgcactagctgttccatctttcagggctctctccccaccccccggtaccagcatggattgaacctcacttcctgcagggttctgaaggggagagtcctttttccattgccccagccctcgctgtctccctttccttgcttcatttgtcccacagcagtgatcagcatttgaccttttgtgtatttgttgatgtctgtcttcctccagtggaatgaaagttctgggacagcgaggtcttggtctattgtatgttctgctctattcccaggactgggaacagtgcctggcatatagtagaaccttaataaataatt

SEQ ID NO: 375477 - DNA, 580 bp, Homo Sapiens
  misc_feature (501)..(501): n is a, c, g, or t
  misc_feature (510)..(510): n is a, c, g, or t
caaagatttgaattcagaaagtctagggttgggctcaggaatctgagagacagagagagttgagggaaactgagaagccaaccaaggctgaacttccaagttctcttgactgttagagactataggaaaaggaaaaggaacatacctcggtgaatacaattgggaacttattccatttgaagtgcctaaggaatatctgagtggcaatcagctatgtgggcctatggttctaatactcaacacacagagagagagagtatggatggctgctgcctgttaatcttaggaccatctcacatcaggatgttccagtaaaaacctttctgataaagtgtgtctaataatgaatcaatacaaatgtgaaaatgatcttttattttggtcttgtggcttaattccaaataatttgcttcatgctccatcttcacaaaagggtttagtctaaatacttggagaattattcgtaacagctctagtttcaggctcctctgtttggcactngttggtggncagttccttccatctgaccaagatgtacagcctactccaaaaactatgccagggagtgtctggccataat

SEQ ID NO: 375478 - DNA, 536 bp, Homo Sapiens
  misc_feature (176)..(176): n is a, c, g, or t
tgccaggtccttataagaaatgtattcgatcacccagtttctcactactcctttagaaatggcaaattgaactacttactagtaggtttcacactaaaggaattatgtgcatatcaaatgtagtgaattaaaagggtatttttattgtcattcctggctgcaaaatggcaatcaanaacaccctcatgaaaaatttggagaagatatcagagttagtggttaacaggaaagatacttaaatttttcgtgaatttacttcccaacagaataactacaaaacaaaatttgaagaggagtccaaggcattttctggttccatacttttttcattctcctgttggataccatttctcctgtctgatccaatgctgagctcagtggtaatgaagtgccacattgtgaaagggtaagagaactggtacaaagcgtaccagggaacaaatgaattagtacacctgtcacgtctcactcttgaaggatggcaccttctttgttaattgaaaagaaatgtaaaatgggagaaatagcaaaaaaaa

SEQ ID NO: 375479 - DNA, 388 bp, Homo Sapiens
caaaaaagtaaataaagatgtgatatcagtttatacctccacctttgttatatgagtgaaatgctgtttgtaacttgtagaaatagtagagatgggcgcctgagagatgagccaacatagtaaatgtctttatggatcagaactgtcatcacttgactttcttcatgagacagtgctaataaactggtattgggataaatgtagtttgacattggaaatactttccggtgttttccaatttgtgtgcattgaaaatttattaattttgaaattaggaagggcaattaggataatgttagggaaaaaacacaactaccatgtttttgtacacatgtaaggtaacatacatattttggactatggtgtatttaaccctgttttcaaaata

SEQ ID NO: 375480 - DNA, 424 bp, Homo Sapiens
  misc_feature (58)..(58): n is a, c, g, or t
  misc_feature (161)..(161): n is a, c, g, or t
  misc_feature (304)..(304): n is a, c, g, or t
ccctctgcttcaagcctctcaagtagcctgggaactaataggccgcgcacccctgcancccaggctaatgtggtagcctactgagttaccttggataacgggtattgataagtaacaatcctagtctttgtgaactcagtggttccctttgtgttttccanggataagaggcaggaaggatggcattttagagtatgagtttcaaacgtgatgtaatgcagttgtagtggataccaggacaaaatggggatgaaaactttaccaacttcatagggttattaatcttaattttggctgggcatgngtgctcacgcccgtaatcctagcagtttgggaggctgaggtgggtggactgctttaagcccaggagttcaagactggcctgggcaacagagtgaaagaaactctctctatacaaaaaaaa

SEQ ID NO: 375481 - DNA, 341 bp, Homo Sapiens
tcccaaaatatgtggaagaaaacttacggtacatgtttattgcatgaaattaccccttgtaatatctttatcaacactggtattgtttccttaattattaaaggtgaaggagtttatgaatttaacataacaataatcttaggagctgcatcttgagtgaaaatccagatgataatcaaactaaatggtgaaagagaaattgggtttttatttctctataaagatgttggaatgacaagaggtaaatggaggttgaaagccacagaatatgaaatcaattatctcaaagagaattttcaaaactgtacatactcaaagactcctttctatgctaaaattgc

SEQ ID NO: 375482 - DNA, 482 bp, Homo Sapiens
  misc_feature (26)..(26): n is a, c, g, or t
  misc_feature (48)..(48): n is a, c, g, or t
  misc_feature (100)..(100): n is a, c, g, or t
  misc_feature (258)..(258): n is a, c, g, or t
caaaaccgaattaaaaaaattaaagnccccgggcaacacactaaaaancccatacacttccagttgtgaaccccagtggccatatttaattggttaggtntccgttaacatttaattaattacagatgttccagttgacccaagtagttccagtgttttcctttccctttttttggaaattttagtttgagtttgtgactgcagtgttcaagaactcagcatccttgttttctacaaatactgattaaaataaaatgnctgtaaaatgtgatgtaaaacattatcatgatcttcccatgcctttgttgtacttgtgccgaagtgttttgatattcctttgtctggaagaaaatgtttgctttcattttgatcattttgttcaccttggaatcaacaggttttgatattttctcttggaagattttatatctttttgggaatatgtaatataagatctctaataaaagataatcttatcatgt

SEQ ID NO: 375483 - DNA, 388 bp, Homo Sapiens
  misc_feature (195)..(195): n is a, c, g, or t
  misc_feature (217)..(258): n is a, c, g, or t
  misc_feature (289)..(297): n is a, c, g, or t
cacagacagggtctctgtgtcatgcaggctgagtgcagtgcgcaatcacagcttactgcagcctcgacctcccgggttcaagtgatcttcccacctcagcctcccaagtagctgcaactataggcacgttaacacacctggctaatttttgtaaaattttttgtagcgatggagtctcactattgttgcccaggntgggtcttgaactcctgggacnnnnnnnnnnnnnnnnnnnnnnnnnnnnnnnnnnnnnnnnnnagagggcatggagccaccctgcctgccttannnnnnnnnaggagaaattgtcttgctctgttggcccaggtgggaatgttgtgggcatgatcacagctttacttgcagccttaaaattccggggttcaag

SEQ ID NO: 375484 - DNA, 456 bp, Homo Sapiens
  misc_feature (19)..(19): n is a, c, g, or t
  misc_feature (32)..(32): n is a, c, g, or t
agtttaaccagttcccaanggttttccatagnaaacaaagttaatttaaacttgccctaccttagggcaacctcagaaatgaattgaactaaattcccagtctacttcctgcctctgctcttgaaatcttttagaatcgctgaagaggctgacctatttggctctcttgagaatcaaatggatgtctcttgtacatggaagggatacagaagtaaaccacttgacctctcatgaccagttgcttaagcttctgccgttgcattaaagctgatagagcccagaaaaaaaactgtagctgtggtgaaggttatttaaaattaatgcaaagataggacacaaaggaaacacctgcttcgttaacatgcctagaaacaactataccttttctcactgttatagttctggtgatgcaataataaaatatttgaaatgttgataaagcttcgaaaaaccagt

SEQ ID NO: 375485 - DNA, 369 bp, Homo Sapiens
  misc_feature (11)..(11): n is a, c, g, or t
gaaatttatantactggcaaatttcatttttggcagtctatttctgtatcatgtaccgcttttcttaaaacttaaattgcttattttgttgtgtaatgtcattgcttttgatttgctttgtgaaaggagataaacgtttcagtaattgtcagagcattttgttgcctcaggctgtgttacctcaatttcagagtaagtagtggttgattagtaatgtagtatacactggcagacatctagaatagtatgatgctttacatttaaatgaggttattcttttaaggacttttatttgtatgttttctgtaaggaataataaaataattgtaattaaggaatataccatactatattaaacacattcttcct

SEQ ID NO: 375486 - DNA, 492 bp, Homo Sapiens
  misc_feature (12)..(12): n is a, c, g, or t
  misc_feature (435)..(435): n is a, c, g, or t
  misc_feature (440)..(440): n is a, c, g, or t
ccgggcttgggngctggccaatggggagctggattgagcagaacccagaccctgagtccttgggccagctcttggctaagaccaggaggctgcaagtctcctagaagccctctgagctccagaggggtgcgcagagctgaccccctgctgccatctccaggccccttacctgcagggatcatagctgactcagatatcgtgttctgaaggatgctccactgttgagtgtaacttgtgtgtgcagaggatgggctggaggactctggatgttggggagaaggacctcttggttcaggttaggatgaaaacaatcatgacctttgcccattctgtcaggctggacgggagggaatgcccccacctgcaggcatgggattaatgctgggcttgaaccccttgcttactcacagtgtagttcctgggcaattcggcttngcctncaacttttgggagtttttggaaaatggcactttttggcccttgccccgtttt

SEQ ID NO: 375487 - DNA, 323 bp, Homo Sapiens
  misc_feature (15)..(15): n is a, c, g, or t
  misc_feature (27)..(27): n is a, c, g, or t
gctgttcctggtgtnaggtggggcccncgaggcaggcaggtggactctggcaaaggggcccttggtttctgggggcagggggttggggaactcttggtcgccagtttacctgccataggtcccttttcagccctgcctcccccaagttccatcaacacaaactcccagggggtcctccatgcctggcctggccctctccttggtgctgatgagacacaactctggccccggcggctggcctctgaggggccatggtgcttgcggggcttcccctatcccccaggtctgcccaaggggactctcaataaactctagctgaaggc

SEQ ID NO: 375488 - DNA, 479 bp, Homo Sapiens
  misc_feature (353)..(353): n is a, c, g, or t
  misc_feature (357)..(357): n is a, c, g, or t
  misc_feature (366)..(366): n is a, c, g, or t
  misc_feature (409)..(409): n is a, c, g, or t
  misc_feature (418)..(418): n is a, c, g, or t
  misc_feature (438)..(438): n is a, c, g, or t
  misc_feature (446)..(446): n is a, c, g, or t
  misc_feature (451)..(451): n is a, c, g, or t
caacattgggtcatctaccgtctaaataaatacggatttcatggtggcatttgaagcacattttgcaaacattatgatgttctattgtcttgctgaattctttattataacactacctcaagacaaatgatagactgttggtaaggtaaattggggtttcaatgtcaggaacaaataaaattttgcaaatagaagtcatcaaataattcaacaggaagaccatactggacacagatgttgtcagttacttctggacaatgtggtaacatggatatttcagtcactggtaacaatgtcagggttaacacccaatgaattatttgagacagtttgggttgcaaaatttgagattnattngtctatttngagattgattttctacgtgggccaattttatgtccattacctnaggccacantctcccgctctaaggagttnaaaggatngaaancacccagctgctacactgggaatggcca

SEQ ID NO: 375489 - DNA, 514 bp, Homo Sapiens
  misc_feature (13)..(13): n is a, c, g, or t
  misc_feature (23)..(23): n is a, c, g, or t
  misc_feature (148)..(148): n is a, c, g, or t
  misc_feature (468)..(468): n is a, c, g, or t
gattcaataaaancaggccattnttaacctgaaaagggtttttacagagtcactgttacgcacctcattattaacccctcctgaccccctggagagaagcagccgtgctagcacatattgtgagcttactgccccataaaatatttanaagtagagagaggggatggaaagaagtgaattcacgaaagagctatgtgccaactgagaaaacgaaaatattatggccagtaaagacccactggtatttttctttcattccatgacaacacaaaaatcatccatggagaatacttgtgtctcgcttgtatattgactatgaaacgccaaaggcaactgtactttctgaatttttctctaaaaaaatttgggaatgctaaaaacaagtttcaaaagattcgccaccaactggaggcccatcatcccctcaaacgaaagacagcatgccccaccacgagaccttctattacnaaggaagacacccccaacccacacaggtttgcctgtctccctcatg

SEQ ID NO: 375490 - DNA, 445 bp, Homo Sapiens
  misc_feature (295)..(295): n is a, c, g, or t
gtggcaaactggtgcctgggtcaaaaacccaaagccatgcgtgcctgtcgtgggtgcagaagcttagctttggggtagaagggaacagttgggccaggggccttcccctcaagaagctcccagcctcactgaaagccccaagcagaacccctgaaggactatatctctgtgtgccgagatgctcccctccatgagctccaccttcattgtgcataggacgctgattcttagtacacagcagcaacagagcttcagcagatgccttcttgggaccgcgcttgactctagttccttnctccccgggagggagaaagggaaggagcctttgaaatttcccctttcgctatgtttcactggtttttaaacaaatagggctaaatagagaccaagaagttaaccatgtaccttaacgtgcggctttaggcaaaatgttattcaaaaaaaa

SEQ ID NO: 375491 - DNA, 541 bp, Homo Sapiens
  misc_feature (94)..(94): n is a, c, g, or t
cctaaacatggtacccatgtttggacgaaaaaatgcccaagaatcaaaagggaattttgaagaaaataaagccccaaattccaaaggctggctncaagccctcccacggggcctccccagggaaaggaattcctttaatgttccttggaagcccttttcctagaaaagcccattcccattcatacctttgtagagcagtgggctgggtgtggagggcagcgcggagggtatctgcaagagcctgtattttccgcctcccttgcccccactccttttatccttttaaaagtcctatcagccctgccttcgtcccttccgccctaagccctaagagtgggggaggtttaatacggccaatggatcttgtataaagtctacgtaagttttaatttaccagagctataagatggttaaggtagactagtggggactgctacagataaaatgagatacaaagaacatttgcaaataaatgccataaaattacagtagcttggaattttagtgaatcatggcccttgtgttatctagaatgctaatt

SEQ ID NO: 375492 - DNA, 345 bp, Homo Sapiens
gccaaccctgtgtcacttagtgaggacctgacacaatccctacagggtgtctgtcagtgggcctcatggtaagagtcacaatttgcaaatttaggaccgtgggtcatgcagcgaaggggctggatggtaggaagggatgtgcccgcctctccacgcactcagctatacctcattcacagctccttgtgagtgtgtgcacaggaaataagccgagggtattatttttttatgttcatgagtcttgtaattaaaccgtgattcttgaaaggtgtaggtttgattactaggagataccaccgacatttttcaataaagtactgcaaaatgcttttgtgtctaccttgt

SEQ ID NO: 375493 - DNA, 917 bp, Homo Sapiens
  misc_feature (786)..(786): n is a, c, g, or t
  misc_feature (825)..(825): n is a, c, g, or t
  misc_feature (883)..(883): n is a, c, g, or t
  misc_feature (892)..(892): n is a, c, g, or t
  misc_feature (903)..(903): n is a, c, g, or t
cgctaaggtcattgggaacacgagacatacacccagctgtttgggattcagtgaactgggaattgtccactacttactttactatggcaactctacagcaagattatgctccgttatctagaaaagctcaggagcagattgagaaagaagtcagtgaggccatgatgaagtccctaaaatactgcgatgtggattcagtgtctgctcgacagcccctttgtcagtatcgagctgcaaccatccatcacaggctggcctccatgtaccacagctgtctgaggaatcaggttggtgatgaacaccttaggaaacaacaccgggtgctggcagatcttcattacagcaaggccgcaaagctgtttcagctgctgaaagatgctccctgcgaactgcttagagtacagctagagagagtagcatttgctgaatttcagatgaccagtcagaatagcaatgttggaaagttgaaaacactatctggggctcttgatataatggtgagaactgagcacgcattccagcttatccagaaggagcttatagaagaatttggccagcctaagagtggtgacgccgctgcagctgctgatgcttctcctagtctcaatcgagaagaagtgatgaaactcctcagtatatttgagtctcggttgtcatttcttctccttcagtccattaaactgctatcttcaactaaaaagaaaacaaggcaataacatcgaagggaaccacaattcttcaaaaccaacaaggcacattttactcccagctttttgaggaggcaantgcaaataaaaccgcgattttctgggaaaggattcaacntttttcgtccacctgctggggcccgcttgccgccgcgttgcagcgaggagcaatgccntttcgtgantgcacggagcntgttcccggcggtt

SEQ ID NO: 375494 - DNA, 382 bp, Homo Sapiens
  misc_feature (224)..(269): n is a, c, g, or t
ggataagaaaagtacaaaaaaattccttaacattgggaagccattacaaagcaatcctcctcaatgagagaaaaactcccaaactagcagttataaaagtgtacatttagagcccaggtacagtggcctgtgccctataatcctgtcctacttgggagaatgaggcaggatcacatgagcccagttcaagtccagcctgggcaatacaggaagatcccacctcnnnnnnnnnnnnnnnnnnnnnnnnnnnnnnnnnnnnnnnnnnnnnncaccacatttaatttacataagacagattattaaatccaaattgtgcacaggtctagaaaagagatcaataactggaatcaattgcttttaaacagttaaaaatccttctcta

SEQ ID NO: 375495 - DNA, 545 bp, Homo Sapiens
tctcctttttcctcttgtgtctggcctgtgaatacagctgactgtatacagggttactgttggggttattgtggggcagtgtaaggtgatgaaagatcccactgacctagtgttgatggcctgagtttgaagccccggtattaccactcgtttgttgaataatcctaggtaaataaactggcattgctaagcccccagaaaaatgtatttagtggaacagatgaaatatgattcagtggttaggaagttaacttctgaagacagacaaacctaagtttgaatcatggttcaccccttagtggctttgtggccttgggcaagtttctttaattttcttatctatactgtgaacagtacttacatcataggtttggtctgaagattctgtgagataatgcatatcaagtggttagcactttgccaggcacattgttaagtgcccaataaatgtgggccaaatgtgatagctcacccctgtaatgccagagctttgggaggatcctttgagatcaccctgggcaatatagcaaaatcccatctctagc

SEQ ID NO: 375496 - DNA, 450 bp, Homo Sapiens
  misc_feature (239)..(239): n is a, c, g, or t
gaactagtgctgtccgggatgactctgaggggtagcagccagatgccaaagcagccatcggtggcccaggctccacgtgcttactgaggacatcagggccacctctgggccccttggcaggccacagagggctctcgtgtggggtggtgtccagccagctcttgctaagcaatcacgtgcacacaggcagcattaatggagtgcctactgcatgccagcaacagggcttggccctgggngaattgggaggaaccaagccctcttcatctgttcatgtgcccagcatttattaagcacctgctgtatgcaaggttcccatgttacggcagtgaatgaggcataattgttccctccatcagcgattgattcagtcatcaagcagttactgatcagattaagaatcagggcactagtgatacacattcatttttaaaattcattcaaggattt

SEQ ID NO: 375497 - DNA, 510 bp, Homo Sapiens
ctcttctgtcactcattgtagtccaggatcttctagtttggtgtcagatttatcctgcaaactctaaagaaaaacttttaagataaaagtaaattttaaaaatacatgtttgttgaaatccaagtataagacaggaacaaagataatgtcaattgaagcttgtaattcctagttaaacatagattgcatacgtcaagattctcaagaaattttagatatatttgtcttcattaatggtttcattagaatacaatatacaccctctttagaaatcatttaagtaatagtcatgttcctcaacatttccaagcttccaatagtatttacagtttcctgaatttggggaacacaaactgtgggaaaaaattaaaagggaaccaaataggagagtctatgtgtcattgtcctcttaattactatttcatatggcttaaaatctgtccaaggaggggaaaacagggaactgtggtgactcgtatccctcaaactttgctgtgtgctcacagttat

SEQ ID NO: 375498 - DNA, 544 bp, Homo Sapiens
caggatcttaatttctcactatgctgcctgagagagagagaaactgaccaaaaacactgggggcatgttcaccttctttataagcaaggacgtaaatctctgatccagggttgcaaccatttccatttagagtaacgtgcttattttgttctgaaatgatgataattaggacccagcggatcacaggcacttgaaggcagattcccagatgaagcttaaaacattttccctaacaatatcacctagaaatgaaagaatcattgcaaacggcttagtgattaaaagctctgcccttcgctggctgtgtgaccttgaagaaattacttaacatctctgtggctcaatttcctcatctcttaatgaggagagtaaaaggactcttagagtcattgtaaggattaagaaagttgatacatgggaaatacttaaaaggtggctcatagtaagttacaacaaacatctgctcctgtcttcgtcatcatttctctactgcactgaatgtggcagctagattatgtgacaggaatgttacagggaaaaagta

SEQ ID NO: 375499 - DNA, 303 bp, Homo Sapiens
  misc_feature (30)..(30): n is a, c, g, or t
  misc_feature (40)..(40): n is a, c, g, or t
  misc_feature (89)..(89): n is a, c, g, or t
  misc_feature (128)..(128): n is a, c, g, or t
  misc_feature (146)..(146): n is a, c, g, or t
  misc_feature (236)..(236): n is a, c, g, or t
  misc_feature (255)..(255): n is a, c, g, or t
  misc_feature (258)..(258): n is a, c, g, or t
  misc_feature (278)..(278): n is a, c, g, or t
  misc_feature (291)..(291): n is a, c, g, or t
cccaggcatcagtcaaatgaagaagcaganagtagatggnttctaaggacctctcagctgagagtttctttccacgtctttgcctaaanccaaaccttgctgcctccaaaaatcctcttgaccccaantccttctctggggtttcnccatctcctctgctgctcttcatcacctgccccagaaccaagcatcataggaaggcatctaggtgtttccgcttccaaagctactccctntttggcccaaggcttgggnaancaccgtgtctcttgccagcncctggacgactancccatctctacc

SEQ ID NO: 375500 - DNA, 512 bp, Homo Sapiens
  misc_feature (30)..(30): n is a, c, g, or t
  misc_feature (39)..(39): n is a, c, g, or t
  misc_feature (47)..(47): n is a, c, g, or t
  misc_feature (53)..(53): n is a, c, g, or t
  misc_feature (466)..(466): n is a, c, g, or t
agcctggacgggaaacggacccccaaagantggaagtancttttatnacctgnacaatgttttccacactccttttccaagttgtccttgcactcccaaatgcccatagttgccatacttttaagcatctattccatctttaaagcttaaggaacatacaaaagaatgtgcggggagggcagcttttgttaggatgtaagaaccactaataatgcagttttccccaactgaaacatcaggccccaatctggaatactccacaactgagccaggtgccacagaacatcttgaatccagtatgctttgaatgatacaggatgttttgccagagcattctggtatatctggaaagatactaaaagttatggactgtaagccgagctctgactttaaactgttatctgaggtaaagtaaaacaaatattcttcggttgttccaatgtgataaaatttggagttattaagnacaacaacatttagtgatgttcctttaagaagatgaaatattctct

SEQ ID NO: 375501 - DNA, 540 bp, Homo Sapiens
  misc_feature (113)..(113): n is a, c, g, or t
  misc_feature (177)..(177): n is a, c, g, or t
acggcagttcagatttccaggcatgacccctaattccatatttagttgaagatccaaggcggtaagaagaatccatcctgtcaatagtagaccaataacagatacagtaatanttggaaaacataagataaaggccaaggaacaggttgccttattacattttacgaagtatcattntccccagtagtcaaggtagtgtaggctgtatttctttagcaggtcacatgcctgaacaggggttgcagatgccaaagacaatgaccaactcctcactaagaaaaaggtatttaggacatggtcacttattaccacagatgacaattctgcttgacagagatggcttcttggatgtttttaatccacagtgaagaaaaaggatttcaaagtgctgctcctatttgaaagtgaatgagttgactgaagaaactgttgcaaaagaaaaacaaaaatcttctctagatagctggctgatggctggaaaagtcataaatctccaggagcattggattccaggaaagttaagtccattctcaaaatccc

SEQ ID NO: 375502 - DNA, 531 bp, Homo Sapiens
  misc_feature (28)..(28): n is a, c, g, or t
  misc_feature (54)..(54): n is a, c, g, or t
ctccaatgggggggaaagaaagaatccncccctgtaaatagttagcccccaatnacccggataccagtaaatggtggggaaaaaaccattaagattaagggccccagggaaacaggttgcccctaattaacattttaaccgaaagtatccattttccccccaagtagtcaaggtagtgtagggctgtatttcctttaagcagggtccacatgccctgaaacaggggttgcagatgcccaaagacaatgacccaactccctcacctaagaaaaaggtatttaggacatggtcacttattacccacagatgacaattctgcttgacagagatggcttcttggatgtttttaatccacagtgaagaaaaaggatttcaaagtgctgctcctatttgaaagtgaatgagttgactgaagaaactgttgcaaaagaaaaacaaaaatcttctctagatagctggctgatggctgggaaagtcataaatctccaggagcattggattccaggaaagttaagtccattctcaaaatcc

SEQ ID NO: 375503 - DNA, 533 bp, Homo Sapiens
  misc_feature (20)..(20): n is a, c, g, or t
  misc_feature (468)..(468): n is a, c, g, or t
  misc_feature (496)..(496): n is a, c, g, or t
  misc_feature (509)..(509): n is a, c, g, or t
gtgaatgatgaatacctgtnaggataggaaattagttctgagatctagtccctctctgattcacttagtaatctatcctcttttcagtattacatgtgcttaatctcagatgaaccatttcaccatggcagtgttatctcatctctgggcttttctgggaattgaagtatctctccttaaccccaattgtcaagggtagtagctgtatactaccactttgaattattgaaacgggtcaatttacgaagtctgcattggctatggagatatggtttatagtacagcctagagaatgaaactcaccgtccagataaccatgcatgcacccagattttttccaccttggatacctgtcactagggaataataaaggccttattttttgtcttattccaactaagtagatccattatctctttccttttttatgttaatgaggagaatttaggcctccactcaacaatgttncaatttcaggcaagggttttcatatccntgctgtggggtcntgggataagggagcctatttcagg

SEQ ID NO: 375504 - DNA, 329 bp, Homo Sapiens
  misc_feature (146)..(146): n is a, c, g, or t
tttagggagagaattgtggctatgttacaaacaatctaccagagacttagagacggcagctgtctattccccatttgacttcatcatttatgagcagacgtttgttgagcacatattgggtagcaaaacatctataatattagctnttaattttttaaaaaacttttatttccagaaagcttagctttatctacaagtacagttggtccttgaacaatgtagattagggggtgctgaccctctgtgaagctgaaaaaccatgtataatttttgactccctgaaaacgtaacaatgaatagcctgttgttcactggaagcattgctgatg

SEQ ID NO: 375505 - DNA, 299 bp, Homo Sapiens
cgtctggttgcaaatcagaaatatttaaaagttttaattcagaggcttccttcaccaaatgaatctaagaatctggtatgtgttgtaaaactgcatattgtgttgggcattcaggaaaaaaattctctgtacatttgaacttacactttgggaaattgctaaaggtagttttagtcattcacattccaaaccaagcacgaccaaaaacaagcttttaaaagttcaagcatatttgtgtattgggaaaagttaggaatgtaatatttagtgggtgggcatttttaaataatgtacttgtc

SEQ ID NO: 375506 - DNA, 573 bp, Homo Sapiens
acttgtcatgcactaaaacttcccattgatcattagagtgtctacgattaagtggaaaaggtggtcaaccaatttggatgttggacttccacaacatcaagcattggccattggccgtatctgggcattggtatggaataaacaggatactcagtgaaaacatcccaaactattgactggattttcccccatggggcatctgtcctaagagtcacagatctgagaaatagaaggacccaggtccgtgtggatgctccctagtgcgttcaaataacccttgaattcacccaggtctcattgcatttatttaaagatggagcccattgtcccccctcctcctcagctcacccatggaactagaaattcacaaacctgaagctgaaccacaggacaagaaattaaacagcaacagccacatggcctcttttttcacaggttttgcattgaatgttttagaactttattcccccgccccctcacccatgtataccaaaactggttttattttcattttcctaaattattttctgatacaataaactgttaactgtttatttatacttttaaaaaaaa

SEQ ID NO: 375507 - DNA, 369 bp, Homo Sapiens
  misc_feature (258)..(258): n is a, c, g, or t
caaagtgccaaggaatgattcggcagtgtgttcaacgcttatcttagaccagtctctgaatgacagctatgaacaccatagcaacccttccttgccagttttaaaatacatggtgtgggctccttttctctgagtaggttctggaaagatgaattaagggattcaccatgcaaaaatgtagactggaggcaggaggaacttttttgcatcagctggacaaacccagaatttgtccttttcttctctggagcaggcttnctgtctctggagtttaaactcacaagttaagtctgcacataatttatgggagtaagataagtgcatctgtgaggttattcagatcaatgaatgttttgcagtatttgggtg

SEQ ID NO: 375508 - DNA, 422 bp, Homo Sapiens
  misc_feature (311)..(311): n is a, c, g, or t
ccttctgaaatcaaaatgtccctttcctgaatctcccagcaaaaagccagcagggccccctgtgccgttgttacctgtttccgtttcccaagccagccctgaagagctgagcctcccatatgtgggatctggagatgtaaacggatgcatggaaaagtccaaagcaaacacaagccatgtctgggagcagggccagagggggcccgtgggaatgctgtttagctctcagagcctgagatgggttggaactgcagtcagagttctttttccatccttcggaacccaccactccctaccccacctctcacagnctctggccaccctgcagagggcccagcttcctgctcaactcctgccctgaccgagagggccaactcttccagttctattcaaatccacccatgtttcatttattcaccagg

SEQ ID NO: 375509 - DNA, 469 bp, Homo Sapiens
  misc_feature (430)..(430): n is a, c, g, or t
  misc_feature (435)..(435): n is a, c, g, or t
gttgtttcagaaaaatctggatccagatgtattcaaccagatcgttaaaattctgcatgacttttacattgagaaagaaaagccattactcatctttgaaatcttacaaagactttctgaactaaaaaggtttgatatggcagtgatgtttatgtcagaaacagagaaaaagattgcacgtgcattatttaatcacatagacaagtcaggattgaaggatagttctgtcgaagaactcaagaaaagatacggtggttgatttccatttttgctgaaataattgtttttgactttcatatgtaaattttttctactgaaagtgttttgctttttaagaaaatgaaattatatagccagggaaaggactatctttggaacataagttaattaactataagggtggaattgtggattttaaccaggtgggganttgtnattccaaggtggaactctgtttttcccggaaaat

SEQ ID NO: 375510 - DNA, 488 bp, Homo Sapiens
  misc_feature (435)..(435): n is a, c, g, or t
  misc_feature (469)..(469): n is a, c, g, or t
gttgaccaatagtaactaacatcttgaacttgggagtttgttcacctatagagttaaatcatatatttttgtgtgtagtctattctgagtaaacagaatgtagagaaattagaagtagtaaggaaagaaacaagggctctaaaataaatactaagcaaatatcaattccatgtggaacaacagggcaccaattccaatcagcttcaagagataagaagaagttggagatgggaaaggagatagtcatcttccaggagcaggaaaagaccagtgtaatagagaaaatgggaatgattgtccacaggacgttatagacttgacttagggaaactgatttagcaagaatatggaagccagcaccatcctgaactctggctgaagtatccagtccatctctgtctgactcctacatactaggggtttcttaggggggcntacaaattggattgtattccagcgagcttagagngaatgggttagatgtttct

SEQ ID NO: 375511 - DNA, 689 bp, Homo Sapiens
gatgctgcaggagctggctggcccctgctgcttgcttgacctcagcaagtggaactcctagctctctgttctgggcacactagccttttctgaaccaggtgtttctcatgtgtcactgtatccaagaggacatcacagacaacactgtctaaaacagaggagaacccccttttccattacaggctttgtttttcttcacaacattttaacactccatggaatattagatgctgttttgttcactatctgtttccttctagtagagggaaaacgactctctagtttccctcttataatctccatgaaaacaagaattttgtcctgctgtagttatttctgtatgccataggtgctcaaatagtcactgaataaaatagtgaaatgatgaatataagccttgctccacttaatctaatacctctctttacctcaaaaaatactgagcatgctaatttgaaaaagagttaagactcagtagatgggagttggatgcgtgttgatttaaaaccagccttaggtaagaaaggtgctagttggtggaattagtcagtgatgagacaatatattcatttctctctactcaatggttttagcaacttaatatttcaataattagctcatagcataaaatttgtctcagcaattagaataatattttctgagagttggccaaggctttgcattttctt

SEQ ID NO: 375512 - DNA, 418 bp, Homo Sapiens
  misc_feature (117)..(117): n is a, c, g, or t
  misc_feature (164)..(173): n is a, c, g, or t
gaatcgccctgaaccccgggaggcagaggttggccagtgagcccgataatccccggcccactgcactcccagccccggggaacagaatgagacctctgtcctcaaaaataaataatnaaaatggataacccaatttttatattccatttgccagaaccccattnnnnnnnnnncttttagtcttgggttacaggtaccatataatggttgacacatttaaacaaatcaataaatattcacaccatctcagtcatccacagtaggaaagaacatgagatgtttttgaagggggtggcacttgcgaaacatttattattttaagctaaaagatgacaggtaatgaaatgtacacaatgctgtagactatactctgtgttccctaacaaatgtaaaatatacacatctaaagattaaaaaa

SEQ ID NO: 375513 - DNA, 570 bp, Homo Sapiens
  misc_feature (58)..(58): n is a, c, g, or t
  misc_feature (545)..(546): n is a, c, g, or t
ggtcaaacctttgcaattggctggttaactccggaaatactggtaggtcaagctgtangcaattaaggaaaatagctggttagaataaggattgtctgcaagacttgtcaaataaatttaaaatacatgaagggttattttgttagataagtgaccttggtacaacagtacctatgcctcaggaccacgatgaggactgactgagctaacaaaatgcaaaaggttcaaactcacttatctgctttttgcagatggccagctttcacttctgccatctcccaggccaaaggcataaagtcagtgcttggtacactggaacaaacagcttggggctcaattttgatacccctcccttctcaagcgggaagcggtggattagagacctccttgcccatctctaaactttaggacccacactaaaaatttttaagtcaatttcagaatgcacttgtttagaaagcaaacctccccattccctcattcttaactagagatatatacaattattcacagttacatagctgtatgtatgttccctattaagnncctgccaagatttcaagtaataaa

SEQ ID NO: 375514 - DNA, 504 bp, Homo Sapiens
  misc_feature (56)..(56): n is a, c, g, or t
  misc_feature (152)..(152): n is a, c, g, or t
ctaggggattcccttccccatatctgctgggggtggaagccccttgtgtgcggcanctcaatccccactggaaaccctaatgctgccagtccagaagccaatcccctggctggggccagtaggggaaattcccacccaattttgctatgagncctaaaaccctctttaaaaacggttcagttaacctaaaaattaaaatcaagtctttaggagagtagaaaacacaattaactaaaaagcagggacatctgaaagagacgtattaagttaacatttttaaaaatccaaatgaaagtaaatggaataaatgtatcaggtaaaggacgagttgtaagcttggatttttaggtctagcaatacactgtttacaagagcatcacctaaaatgtgacaaaagatgttgaaaggatgaaaaaaggtatagtagacatacactaaccaaaaatgtagctctttgaatctcagaaaaaagtagattttaataaagtgtgaaagttgtcaatc

SEQ ID NO: 375515 - DNA, 453 bp, Homo Sapiens
  misc_feature (123)..(174): n is a, c, g, or t
  misc_feature (194)..(362): n is a, c, g, or t
  misc_feature (377)..(377): n is a, c, g, or t
caagaatttcccccaaaagaatcctttaaccaaaaagttgtggtttcttgccttgctaactgtaccatagttattcctgcaggtgaatatataggctttatctgggttatttatttatttaannnnnnnnnnnnnnnnnnnnnnnnnnnnnnnnnnnnnnnnnnnnnnnnnnnncgcctcctaagctcaagccnnnnnnnnnnnnnnnnnnnnnnnnnnnnnnnnnnnnnnnnnnnnnnnnnnnnnnnnnnnnnnnnnnnnnnnnnnnnnnnnnnnnnnnnnnnnnnnnnnnnnnnnnnnnnnnnnnnnnnnnnnnnnnnnnnnnnnnnnnnnnnnnnnnnnnnnnnnnnnnnnnnnnnnnngggattacagacgtngaggccacattgcttgggcctatctgggatttttttaaggacagggattaatgtttttcccagtataggccaggcc

SEQ ID NO: 375516 - DNA, 226 bp, Homo Sapiens
caattcctagctcagaaaagcagaaggtaaataatgtcaggtcaatgaatatcagatatattttttgactgtacattacagtgaagtgtaatctttttacacctgcaagtccatcttatttattcttgtaaatgttccctgacaatgtttgtaatatggctgtgttaaaaaatctatacaataaagctgtgaccctgagattcatgttttcctaagataaaaaaaa

SEQ ID NO: 375517 - DNA, 608 bp, Homo Sapiens
aggcatttagttctcacaagagcagctcatcataaaggtgagcttagcttgccttgcggtctcttctgcatgtacttcttggccctctccccttctgtcatgaaagccttcaccagatggtcaagcagatgctggtgccatgcccttgaacctcacaccaccatcccccacctagccactatatgggttgttagatattttgaccacctcctcttcactcactccactattcaactcactgcatcatcaatgtacttattacaaacctgtcacaagccaggtcttatgctaggtgctcctctcaacaggttcttgagctggcaggggagagagagacattcaaacaccaaggattaatataccattacaggtttaaagacagaggcctataagggtcccctggcagtgccatggaggtagggcatggtcggctgtacctgtagaggtgtctaaagggaggcttgcaagctgccccttgaaggacgagcagaaaattgtacatgaggacaagtaggaaaggaattccaggaggagggatcagcatgtgcaaaggcatggaggttgtccatagaatgtagagagaaaatattaaaacctatatttatact

SEQ ID NO: 375518 - DNA, 341 bp, Homo Sapiens
gtttaagatggaaacccactgctgctttgcctactattcccccaagaagaaaacaaaaggataactgagaagctatcacagttagtatttctagaatctagagtcatatttgcagaatgtaatgctgtttactttaactctgttttggagcccagagctcaccctggtgagtgtggatgaactctgggcacgtcatttcaaactgacagagctttgtgtacataactcagttccacatttattcctggtattctctccctgtaatcaattcctctgtgagggatttcagggtgagtagtgttatcaggaaaaaaaggaaaaagttgtttcaaaacaacaac

SEQ ID NO: 375519 - DNA, 510 bp, Homo Sapiens
tagaacaaagctaaaataatttaaagggatctattgtcatcatagcttcgcaaccttccagtaatcctcctgtattagcttctcttctttataaatcatcacattcactcatgtaaaaggggccatgcctagttaagggaatccctacaatctggtaatgaaattatagaggaaggtgtcaccctcaaatgccaatgaaatttaatttgaaaattacattttcagaactgcaaactggagactctttcctcaaatctatatcaaaagcattaattatgaaaagcgtcatatgttctaaaatttttacttttttaaaaaagataatgtaatgagcttcataaacatttataaacatttatttaatacaaagaattatactttattttgagaatctggcttttctatcatttgtaatgaaacaaaaattcatgatagtggatggtagctatacttcagcaaaacaaatgtcaactcaatgttgatgttttctccagcattccccctcaaacc

SEQ ID NO: 375520 - DNA, 424 bp, Homo Sapiens
tgtcctcctggggaaaaagtccagctggcccatgtgttccagacagcccctgtgaaaaggttcaccctggcaggaactgcaggcatccttgcccaacagcccatgtgggtgaacagagcatccctcccagccccgttaaccttcagatgactgcagccatgccccatagcttgaccatagtctcctgagagacgctgagccagaccaccagcccaactactcttgtattcctgacttacccatcatacatagttgttgtttgaagctgccaagttttgatgtaatttgttatgcagcaatagataactaatatactgtctaaagattatatttgtatgagggatagacagtaagcaaataaatgacataattgaggaaagtagtgagtgttgtgaagaaaacaaagcagcgtatggtaaaggtg

SEQ ID NO: 375521 - DNA, 436 bp, Homo Sapiens
gtacaggtggcatttatgctccccacaaaagaaaaagccttaagctgtcctctgaggagatgaagtcttcatgaagaggaggccaaaacctttctgctgttcctctctctcccctctgtgtcatagatcccagctggcaaggaatatgctgctgtccttgtgatccaggcttctggtcagacttgaggacagtgagcactcagtgactttgttgaatgaatatatgagtggatgagctgtcaatgaatgggatgtgaaatagatgttatatatattaatataaagaacctaagaaagatcaaatctggaagtgggagatgcaagattattgaggaactcacaaaatgtcagaggcagcaggtgggatttctgtaaaactacatatcttagtcctcctttaaaagccaggattctggattcctttctagggggaggg

SEQ ID NO: 375522 - DNA, 355 bp, Homo Sapiens
  misc_feature (14)..(14): n is a, c, g, or t
  misc_feature (43)..(69): n is a, c, g, or t
gccactgcactccnaccctgggcaagagtgagactctgtcctnnnnnnnnnnnnnnnnnnnnnnnnnnnaacagtgatcagtgaagccttacgttaaactgtacccaggaattttcctcctgttgaggaaggaatggatgtagtctagaggccttcctatattctttgtacagcagtcccctctcacctgaggggggtacgttcgaagacccgcagtggatacctgaaaccacagatagtacgtttttttcctgtacatatatacgatactatatactacattttttcctgtacatacatatctaaagtttaatttataaattaggcacagtaagagattaccaacagtaactaa

SEQ ID NO: 375523 - DNA, 387 bp, Homo Sapiens
  misc_feature (43)..(43): n is a, c, g, or t
  misc_feature (50)..(50): n is a, c, g, or t
  misc_feature (56)..(56): n is a, c, g, or t
  misc_feature (65)..(65): n is a, c, g, or t
aaaaaaaattcaatttttaagggggaaaaaaccctttcgggcncgtcctnaaacangaaggcccncccaatgggcaaataaggtaagtgaaaatgtattcaatgtcattgctcctcaaggaactgtagagtaaaaccacaatgtgctgtcactctagacagtcaccaggatgattaaatttaaatcacaataacaaggctgatttcagatgtctcaccacaaagaaggaggataagggagcgaggtgatggatatgttaattagcttgatttaatccttccacattgtatacatgtatcagaacatcacattgtactccatcaatataatacaattattatttgtcaatcaaatattaataaaatcaaagatgagcaggaaaaaaaa

SEQ ID NO: 375524 - DNA, 304 bp, Homo Sapiens
  misc_feature (45)..(45): n is a, c, g, or t
  misc_feature (64)..(64): n is a, c, g, or t
  misc_feature (67)..(67): n is a, c, g, or t
  misc_feature (248)..(248): n is a, c, g, or t
ggactggactgttgctgagcctgtgtcctgcagaacccagatgtntgttaggctggctggctgntgngaggggaggggggtggcctttcatttggggtgccctttcactcccaggccaagccctggagcaatcttcttcaggcagctgtctccacctccaggatgtccagcaggctgaaaggagaaggatgccagccacccatcctcccccagttcccagcctttcccctgttggtcacagccgcttntgtctttttccggtctactgtccccagtgtagagggctttgcttgtccctgagact

SEQ ID NO: 375525 - DNA, 150 bp, Homo Sapiens
cattttacaacatgccattagattgccttaaagtctcctaaatatcccaatattagttacatatctgttccttgctactcctgcagatatttaaccctctgcctatcaattcaggtgaaagatctattacagattattataaaaagaaaa

SEQ ID NO: 375526 - DNA, 513 bp, Homo Sapiens
  misc_feature (478)..(478): n is a, c, g, or t
  misc_feature (487)..(487): n is a, c, g, or t
aggaaatgtaccaggataagggggtaaaataaccaattaagtgtcaaaggaaagctgctgggttccttaatctcactgaagtcaagtcttctgactgggcttctttccatgtgttgtctgaaaaaactaaagtaccttgaaaggttacacattcagcaaaccatgaagataatagctattctttattaaacactgtgtgccaagcaatagactaggcaatttttagatacgttacctgcaacctgtacaacatttctacactttatggatgggaaacggagacatgggaagtgtggctgagttgttcatggatgtagaaatagtaaacggcaaagtaggaaagtgaaaccgcctatctctgacctgggaggtctggcctgtattctttcccactccaccacactggcacgtggggtgttcccgaaaaccaccttccccagatttcctgattctccgttatttttatttttggggccanctggcttgngtggtccttcttttttttccagtgga

SEQ ID NO: 375527 - DNA, 345 bp, Homo Sapiens
gccctgttagaaaacatgtcaaaacacacaatccatgccaccgtgatagtgttattcaagaatgtgtcccagtttctagaacactgtgaacttcatggcagaaacatacctgctgttattgaacaacccctggaagaagaaagaatgcatgttggaaagaatacagtcacatatgagtctaggcagttaaaagctttgatttatgagattataggatggaatatatagtaatagctgatagtggcatttatcaaatggctttgttatgtaaatttgcatcgctttatttaccctttggcatctttatatttgttacatgttgaactttgtacacttatgcattat

SEQ ID NO: 375528 - DNA, 504 bp, Homo Sapiens
gctgtgtgggccaagggggctggtgtatctccacatgcaagcacgtagataccgaggaacctggccagccctgcagcctgactcgggatggctgcctctatgccctctgcgtctgactttctcctttgagataaaggtgttttggcccaagctgagtgcattgctgggcagcggccatgccaaaggtggtagctgaagggacccttgatcgaaagacgctctgccatgctttctgagtcctgtctcctccaagcttgtctcctagactgtttcccctgtctgttttcctgcgcccttgtgtttggccatttttgcattaggctgtgtctctgtacccaaggccacgtgacaaggtagttgggaacccccactcaagtgggtgagtgaagagcgttcgtggtaataaataaatagtagtaaacacaactttccaaatttcttcagtgggagagtgttcacgttcctggggggtattcaagatctgtggagggcctttccaaggcc

SEQ ID NO: 375529 - DNA, 536 bp, Homo Sapiens
cgaggaacctggccgccctgcagcctgactcgggatggctgcctctatgccctctgcgtctgactttctcctttgagataaaggtgttttggcccaagctgagtgcattgctgggcagcggccatgccgaaggtggtagctgaagggacccttgatcgaaagacgctctgccatgctttctgagtcctgtctcctccaagcttgtctcctagactgtttcccctgtctgttttcctgcgcccttgtgtttggccatttttgcattaggctgtgtctctgtacccaaggccacgtgacaaggtagttggaacccccactcaagtggtgagtgaagagcgtcgtggtaataataatagtagtaacacaacttccaaatttctcagtggagagtgtcacgtccggggggtatcaagatctgtgaggcctttccaagccctcaccattccctctttggtcccacgttgggtgggcagctgggaaggtcctagttgattttaatctccggtgctttccccagaactgctgctctgaataaa

SEQ ID NO: 375530 - DNA, 365 bp, Homo Sapiens
  misc_feature (15)..(15): n is a, c, g, or t
  misc_feature (60)..(60): n is a, c, g, or t
aaaaacccaaaagcngggatgcccttccctgtccccgtggcccctcaggactcccacaanatgctgtggacccaagatgagagatttcaggaatggggccactggccttccctaggttgggctctgggtcctttcaataaactgttcctttcctgaatcttactcccttctggtccttccactcccttccctctgcccaggtatggaaaaggtggctgggctcggtgtgcgctccaaccccggtagcattagctgagtcacgcggcgagcacacaacagatttgtagcagctcatctgccatataaaacgcttggctgatggagtcctcattgagttttttcattatcgtgtaaagtggaactca

SEQ ID NO: 375531 - DNA, 446 bp, Homo Sapiens
  misc_feature (37)..(37): n is a, c, g, or t
  misc_feature (49)..(49): n is a, c, g, or t
  misc_feature (167)..(167): n is a, c, g, or t
aaacccaaaaaacagggaagcccttccctgtcccccngtggccctcctncaggaactcccacaagatgcctgtggacccaaagatgaagaaaatttccaggaatggggccactggccttccctaggttgggctctgggtcctttcaataaactgttcctttcctgantcttactcccttctggtccttccactcccttccctctgcccaggtatggaaaaggtggctgggctcggtgtgcgctccaaccccggtagcattagctgagtcacgcggcgagcacacaacagatttgtagcagctcatctgccatataaaccgcttggctgatggagtcctcattgagttttttcattatcgtgtaaagtggaatcatgtcattcacctttactataaacaaggctgtgagaacataataaacagaacctgaacaagctgcaaaaaaaa

SEQ ID NO: 375532 - DNA, 184 bp, Homo Sapiens
aatgttcatcaatttgactattataggccagctttccatttagtcaataaaagcgtacatttttagttacttaccttgaacatattcgtgtgaaaaagaatacatcatttctcacagtcttaagttgatatttatagaaatgaatacctttgtgaacctagacttagaacaaatcctgcttttg

SEQ ID NO: 375533 - DNA, 351 bp, Homo Sapiens
aggacaagtagggtttgtgatccttagtggcccgggcactttctgggacagtggtgttcatggtacaatactccccagaagcctaagctctgtgagggacagtaccagttgtgctagactaccgctaccagcatctgctaagagggcaggcatattgtgactgtggcttgaaaagcttttcagcattcacagctgatgttatacacttcttatgaaagttcttgaattcaatggcagtgtacaaccaacctcaatcattttattttaaccccaaaggaaacggggagggaaaaatatgggacaggctccagctcctattagcacagccaagatgtaacacttgaatgtgga

SEQ ID NO: 375534 - DNA, 512 bp, Homo Sapiens
  misc_feature (460)..(460): n is a, c, g, or t
  misc_feature (472)..(472): n is a, c, g, or t
  misc_feature (479)..(479): n is a, c, g, or t
  misc_feature (496)..(496): n is a, c, g, or t
cataacacagatcataccaccatcattcattcattaaaacatttcttcatcacctactgtgtgcaagacttgggactaggagcagagaattcttaatccctgcacacggggaacctaagcctcatagaggaaataagcgtaacagtgaatcgttagtgagtgtctgctgtatgccaaggagcatacgtatgttaccttatttaattttatttcatcctcacagcaatcctatgatcatcctcattgtatgaatgagaagactcagatgcagagaagttgagtcagacttctagttaatgaggaagtcagtttaaatgaacaatatgtaagtctgggcacagtgggcatgtgtgtgtagcccccagctacttcccggaaggcttgagggcaagagggatccactttgagtttcagggagtttcaaggactgttattaggtggcaccattaattatggcccntggattaggccnttggcantcccagcccggggggcntcaggagccgagaccc

SEQ ID NO: 375535 - DNA, 449 bp, Homo Sapiens
  misc_feature (381)..(381): n is a, c, g, or t
  misc_feature (387)..(387): n is a, c, g, or t
  misc_feature (410)..(410): n is a, c, g, or t
atcttggcttggacttggtcctttaaaaggatgcatttaacattctgctaaaatgcttcttcatcaaggaacatttaaaagcactttatctgcatgggactgcacatgtcaatggtgtttttgcatttaggctaaagatctttagaggttgagcagtctgcgattcatttatgatctagatgctgcttctaatttataaagcaataaatgttcaaataatactaacttgttgattgaatgcatgggttcagatattctctgtctgtattatttgataatgtcattgacttaaaatagccagtgaggtaagaatttacttcttagggagtaagggctggttcctcttatgggtaatagggcagataggtgtcttgcaaagtnggatcngttgggactactcccttcagggnatttgccctccaggtgggctatttcaaatcccgggttcc

SEQ ID NO: 375536 - DNA, 605 bp, Homo Sapiens
  misc_feature (52)..(154): n is a, c, g, or t
cccagttttggcacgaggataaaggcaaagtggcatagagaaaataatacannnnnnnnnnnnnnnnnnnnnnnnnnnnnnnnnnnnnnnnnnnnnnnnnnnnnnnnnnnnnnnnnnnnnnnnnnnnnnnnnnnnnnnnnnnnnnnnnnnnnnnccaactttgtagggttattgtgagcattgaatgataccaagttataagtgcataggtattcaatcagtgttcattcccttctgtatcaaagacttataatggccttttcatggaattgtctctacctataattatgtgactgtgccttcagattatcaaaattatatgaattgtccatgtgcccttggttttgaatgttcaattctgtattgcaggaatgcctactcagttgcttgaatgggtgtttggagttaataaaatggctgtacaattgagtgggtgtaagtgttttataaagtttgctaaagtttaacaattcgtcattattcatggaaagaagttttctcaaaattcacaaattataagaaaacagttatattctacccaaagtgggattgagtgaaaataaaattcttccacaggaacattgaacaaatgtggtaataatgca

SEQ ID NO: 375537 - DNA, 464 bp, Homo Sapiens
  misc_feature (110)..(110): n is a, c, g, or t
  misc_feature (405)..(405): n is a, c, g, or t
agatgtggtgagaaaagtgaagagtcctaaggagaaagcagggcagccaagactctgctctttcccaacctccacagcatggtgagctcacaatattcctatgaagctangaaaaggaaaatgaagcctgctgccccaaaacaccagcccaggaagaaaccagggagttggcatgtgccccaacgtgaatagaaaagtcaattaaataaactccaaattgaatttacaactgtctccaactaaacttttttggctctcattccgtttatcatcagtggcacaatttcaagtgaagtttgtgcaaaaagactctcttcattcaacgatgtgcacagaagaggggaatcccaagagtctatttgctacctttatggcaggcttcgagatcagagtgtcctcccgcancaaaatggcctctttgtccaatgtccaccacactcctggcccagatccctgaagtcagt

SEQ ID NO: 375538 - DNA, 307 bp, Homo Sapiens
  misc_feature (223)..(223): n is a, c, g, or t
tttttcaagtaaaattttcaatgaaacgtccacatagtattgtgctgtaacttaggcgagcagaggaaaccccttcctgggcctgctgccctccacggagcagcagcaccctccagcaggcagcccagcatgccaggggtgtgtgcgcacctccccggccctggcccaccttctggagcgaactgcaccgtggtccagcagaggcgctgggtgggagggcacncgggcaagcctaggagagtaggaagagctgtggaggacacactctcagtttgtttttgactttggtttatttaaaaaacaagcc

SEQ ID NO: 375539 - DNA, 521 bp, Homo Sapiens
  misc_feature (25)..(25): n is a, c, g, or t
gcttcggaggtagaagaccccaagnacaggcgggcgatgcgaactgcaagactttccgagctccgcaatcctgcggtccgcggtacccgcatgttgctatggcgacgggaggcagcggccgtctctctccatggcaacgggagggaaaagtttctggcgaacaggaatggggggtcatttcaagagggcgcagggcgctcagttccgccgacccacctccttgcttcggtgaaacagcaccagagatcatgtatctttctgctaagcataacaagaaagacagaaagctcaacgggaggattgaggctagacttaaagtagagatcccctcagaaactgtggagtgaggcccagggaacagattcggctgagaggcttcgagctgcctcactcagcgctggaagtctgtgagccatggtcagggaggccgggggaccagcgccctgcaggggcctatctcgggagtctcttgatctacacctgtcggcggtggggccccttctgtgtggggctcgcctgaa

SEQ ID NO: 375540 - DNA, 500 bp, Homo Sapiens
  misc_feature (76)..(76): n is a, c, g, or t
  misc_feature (88)..(88): n is a, c, g, or t
  misc_feature (450)..(450): n is a, c, g, or t
gcttcggaggtagaagaccccaagacaggcgggcgatgcgaactgcaagactttccgagctccgcaatcctgcgtnccgcggtacccnattgttgctatggcgacgggaggcagcggccgtctctctccatggcaacgggagggaaaagtttctggcgaacaggaatggggggtcatttcaagagggcgcagggctccagttccgccgacccacctccttgcttcggtgaaacagcaccagagatcatgtatcttttctgctaagcataacaagaaagacagaaagctcaacgggagggattgaggctagacttaaagtaggagatcccctcagaaactgtggagtgaggcccagggaacagattcggcttgagaggctttcgagcttgccttcacttcaggcgctgggaagtcttgttgaggccatggttcaggggagggccgggggtnccagcggccttgcaggggccttattcttcgggagtttttttgattcttgt

SEQ ID NO: 375541 - DNA, 473 bp, Homo Sapiens
  misc_feature (24)..(24): n is a, c, g, or t
  misc_feature (43)..(43): n is a, c, g, or t
  misc_feature (63)..(63): n is a, c, g, or t
  misc_feature (78)..(78): n is a, c, g, or t
gccccatttactaacccatggcanaaccttgcctgtggcggtnactactgtggtgccccaaanggtgattctcctatntccctcaacccttcctacatttaatattggaaatcctccgtaaggaagagttgtccagttctggatttatatttttaactataataagatattccaggataagtatagatttagaacttaaagatgttaaatcatgttaaaattattccaaataccaatatcaaagaaaactaagttggtaatctatctcagaaaatatatgaacttaagaaggaaaatagtatttatgatttgtagaattggttcaacttttgacttaatactgactttggactgaattcaaagttttcttgaaatttcacatctggactttttaaagtgtctacatttatattactttggggatcattttgtcaaagtcttgaataaagttacccagtcctggcatgataaac

SEQ ID NO: 375542 - DNA, 395 bp, Homo Sapiens
  misc_feature (344)..(344): n is a, c, g, or t
gaacatgcagcagaaaagctgtgaaggaaggaaatttacgtgattgtaatggaggctaggggtggattgggaggtgagtggaggagagtctctgaccagctgcagagccaacccctatcattttattaacatggaacccacacagataggggagggattaagctaagaacttacagaatgcaaacacgagcacactctcttcgaacccaattgtgggtgtagcaatgaaagcaatatgatatgctgcagtgtgaagctccttctggggttatcgtatgtacaaagtttaccttataatggctcaaattgtatttaatttttttgttttgtttataaatgaaganaagctataagtataatgtaattattttataggtatactattaaattatagg

SEQ ID NO: 375543 - DNA, 507 bp, Homo Sapiens
acatttcttaatttaaatatttcttagtttatagcatctccatttttctattaattgacttaatctgccatttaagaaaactccgtaatcaataaaaaataaaatccacaatcaaactgcacatggttgatccactgtgtaggcttcaaaggaattaaactcaacttcctaggaaataattcatcttagtttattaaatgggacagaatatttcactgctaacgtattctaactcacttgtttttgaaattggccagatgatttttaagttataaagtcaatgaaaatgacttttgctattgtgtgaacaacttagaatgtatatattcccagaaggcttatttaatgattgacctatcaccactgattattaatgtctgcatgaatgataacaataagaccaagtcatcaataatgcaatgaaaattttttaagtgaaagcaagtttattaagaaagtaaaggaataaagaatgcctacttcataggcagagcagcctaaaaaaaa

SEQ ID NO: 375544 - DNA, 366 bp, Homo Sapiens
ttcagagcaggaaattgagaaactatatcacagatctgatgtccagggccagagaattaacatgttcatctccaagcctggtaccaagtcccttcacaaaaatacagatgccaccttcaggaagcctccacgagaaagtggaggcagccagggaagccttggcaagggaaaccacacagcggcgccgtccccagcgcaagtttgccttggttcaggagctcagtgggcaagccctgggggctggacttggggaaaggaagttgatgagcagctacggaggggcgtccagtctgcatgaggactcagagcttctcaggcagagagccatctgagccatcatgtgggccataacgtgactcactctgg

SEQ ID NO: 375545 - DNA, 400 bp, Homo Sapiens
  misc_feature (26)..(26): n is a, c, g, or t
  misc_feature (38)..(38): n is a, c, g, or t
atgggtacccccctaccctaatcccnaactctatgganctaagaccttttttaggaggaaccacttctttttaagattgaaatctgctggttactttatgttttctcaagttcagttgactagagctgaccacagggtgtcatcaattcagattcctaaataaccctttctctccacacccagtcctccagctggtgagccctgggccagattgtttgatcttcaggtattttaaattttagttacatcaattaatgtaaattaatccaaatgctaatttttgtggtgcaagaagtttcttatgtaaattcagggtatggataagctaattaagatatccatctttggtggctctaagtgtattatttgtttttaaataaagtgtacaaatatagataac

SEQ ID NO: 375546 - DNA, 542 bp, Homo Sapiens
  misc_feature (43)..(43): n is a, c, g, or t
  misc_feature (50)..(51): n is a, c, g, or t
  misc_feature (54)..(104): n is a, c, g, or t
  misc_feature (423)..(423): n is a, c, g, or t
  misc_feature (451)..(451): n is a, c, g, or t
  misc_feature (461)..(461): n is a, c, g, or t
  misc_feature (486)..(486): n is a, c, g, or t
  misc_feature (507)..(507): n is a, c, g, or t
  misc_feature (519)..(519): n is a, c, g, or t
  misc_feature (525)..(525): n is a, c, g, or t
gcaggaattctgtgtccatgtcctggatgtatttctgtatgtncctatanntcnnnnnnnnnnnnnnnnnnnnnnnnnnnnnnnnnnnnnnnnnnnnnnnnnnnaatgtgttcaatttgatctcaaagatctttccaaaatattaaatgccattaatcatggaatagaccaaattattatatcacaggaacttgaatccagccagagaaaaattccctgggacaattggataaacaaatgtgattgctaccttatggatacaacggacttttacatttctttttagcctttttagtcagttgagggtaactcaagcagagtatgtccaatcattaggcttcctttgatatttacattacagggtaaaaacgggcccaaaaatattattttaagggtctcttcccccaaataattgttttttanttttttaaaccatccatggttggttttnaaaataatcnggtacctgtttgagttcccgagggnttggggaccaatttaccaccntaaatttggggntacttnatttccggaaaggcttt

SEQ ID NO: 375547 - DNA, 612 bp, Homo Sapiens
  misc_feature (60)..(60): n is a, c, g, or t
  misc_feature (80)..(80): n is a, c, g, or t
ggatccctcggctgtgaaccccgggacctgggacctagagggggtcctaaagacaccttncaggtccctaaaaatccaanaattggaagggtcctaaggggtaaaaacccactttggctggcagaaacagtggcccactcaagagccaaagtttgtccgacctctgtccagtcccagagtaattccggtaccctgtcccatggacaagataaggagcttaaagcccaaaatgttaacccaactacatcagtaagtgcactgttcagtactgctgccatttgattttttgtagcaaggctttcgtggtgaaggaagcagtgtgttgatttacttcctggcataatcttcttatctcattgcagattgttagcaaatagttcctggatgagattctgaataatgctgatgtagaaaaaacattaaagttcagaggtgaatatgtgcttaatatctgaaaatttttagagaatgacagctggttgttcttgcctcacagaaaggaatagtatccagtaagtatttgtaaaaatacaaatgatgaaactatctttgggatctgtgatagactgcagtatttcttccagattatttacactctccctgcaagaaaat

SEQ ID NO: 375548 - DNA, 341 bp, Homo Sapiens
  misc_feature (123)..(123): n is a, c, g, or t
ctcagttaactgttcctctgccttccaaatgcaattgattctgtgggcgtaaccaacattctatgtctataacacttttcaagatgatcttgcctctctataagaacgggaagttacttaacncctgcctgggatgaaaataaaatttacaagtgtatcccctcttttttaggggtcagcaatgtctgagttacaaaaaagttccaatttaaaaattagtatatttttttccaactccatgccaggattccagaatacctgttacttttaaaataaggctcctaaattttttccaaaactggggcatttattttataccttctttaacagcattctatagc

SEQ ID NO: 375549 - DNA, 350 bp, Homo Sapiens
  misc_feature (234)..(234): n is a, c, g, or t
tatcactcccatagatcacagtgagttgtgtgttttaacgtaatttacaatgtgctgataccactaaggtaaagcagaagtagccctggcatttaaaaaaagaagtctcccaggagaacaacacataaaggacctggtggtgtatgtccaagttccatgaagtaactcaaaaccactgccagaatggacacactggatatctgatatcatagtcgaaacaatacaaacagatgnaaatactcaaaatacttcctttagaaacaatgcaattcacaaaaatggagctttacttttttcttttacatttccaaaaaacttgttaaaatgatataaaccagaccaagttgttt

SEQ ID NO: 375550 - DNA, 433 bp, Homo Sapiens
  misc_feature (390)..(390): n is a, c, g, or t
  misc_feature (414)..(414): n is a, c, g, or t
aaagagaatagcttacaaaccttgtactaaaaggaaagcataacacctctcaactcctgactcattcttggcttgacaggtatatctcccactgtgtccattatccacacttctgatttgaagtgtggccacactgtccacaaatgaaatatagacattatcatcttcatcaagaatctgatcatcctttagccaggttatagaaataggaggagaacctgccacggtactctgaaaggtggcagaacttttcaaaacagtagtggtattttctatcttcttaatgaatgatggtggttctgtgattaaataagagagtgtggaaaagaagaaacatattgtaactcctacccataatgataaggatttaaaagcgttacaggatttttntttggatagggctgcttcttagtnttacctgacctttccgggg

SEQ ID NO: 375551 - DNA, 535 bp, Homo Sapiens
tttaaaaacaggtcactgggcaaaactgctgtcttaagcgtcccccgccccggcccaccccaggcaagaaaatctagacaagcaagaaagtgaggagatgtagagaccagaccttttacaaagagagtggctttgctggttgctgtgccaacatcattgcttagttggcaaatgtaggttccagaatcggtagctttggctgcaaagagctctagactggtagaggtgtcatccttccaaactgagcgggctgctcctgagtgtaactctttgttatctttaaaccactttattgtcatgggtgcagtgccacccacaagagcctttaactgtacccttgtgttgggattgacatcttgtgactgtggcttttccacaaagtaagggggttctgaggtgaaagaaaaaacaagcaaaagaaaataggaagttttattttataacttagcaataaaggtgaaaatttagaaatgaaacaaaaatattttgtaagttcttgataagtggaaataaaatttgccaacctttgactgtc

SEQ ID NO: 375552 - DNA, 450 bp, Homo Sapiens
  misc_feature (19)..(19): n is a, c, g, or t
  misc_feature (59)..(59): n is a, c, g, or t
ccaacctttaccaaaaaantggcctttgccggttgctgtgccccaacaccattgccctnagttggcaaaatgtaggttccccagaaacggtaagccttggcctgccaaagagccccctagactggtagaggtgtccatcccttcccaaactgagcgggcctgcctccctgagtgtaacccctttgttacctttaaacccactttattgtccatgggtgcagtgcccacccacaagagcctttaactgtacccttgtgttgggattgacatcttgtgactgtggcttttccacaaagtaagggggttctgaggtgaaagaaaaaacaagcaaaagaaaataggaagttttattttataacttagcaataaaggtgaaaatttagaaatgaaacaaaaatattttgtaagttcttgataagtggaaataaaatttgccaacctttgactgtc

SEQ ID NO: 375553 - DNA, 571 bp, Homo Sapiens
  misc_feature (513)..(513): n is a, c, g, or t
  misc_feature (531)..(531): n is a, c, g, or t
  misc_feature (550)..(550): n is a, c, g, or t
agaaaagctgagcatgggagacatgccccaccttttaactcaaccattataagcctgctggctttctgtgcaagccctcttcatgttaataggctacatcaaaggagaccaggagagttaatggcgcccatcacatagtgaagtaatcccatggtgagctcttatggaggaatctgagtccagatttggtgtgatagggttactaatacaggattcaatggttatgtttggggacagtcctgactttttatatagaaatcacctctctgaagtatactagactcaccgctgcaaaaactgccttcatagtaaaacaaatagagcctaacccgaagatttagcagttgctcgtacacagctgaatctgtaactacagacatgtgtttgggcctgcctttactggcttcgctttttgggtagggttgcccaatggccccagttaagttctttggattttacaacattgtggaaggcaactaggttggggctctttaagtgggccactgtccaaanttccaggattcccaatcnttggaaaactactggaatnggaaggaggcacggcattggt

SEQ ID NO: 375554 - DNA, 468 bp, Homo Sapiens
  misc_feature (312)..(312): n is a, c, g, or t
  misc_feature (447)..(447): n is a, c, g, or t
gtaggttgttagagggacagggtaggttggccataggctacccccaacccccgatgtgccttctgcctcctgtggtgtcatcggccagtccttgggtccttcccacttcctataaatggaggtgagctcttgcagcgctgttaatgttgggcccagccacacgcaggtgctgtgagcttcacaccccatctccccaggaggcagaaactgtgctcgccaccgctgtgacaaaagctgcacacaggatccaggtggtgatggtgaatccttcctcttgaagctcctcaccggctggtcacccaggggcctctnctctggggtgggccctgcagacattgaggagtacactgaggctttgcaggcttgcattctggatggacttcctaatcctgggcattgcctttcgcagttgatggagcttgagattctttccattttcgaaggaantttcacagatcaattaaggtg

SEQ ID NO: 375555 - DNA, 379 bp, Homo Sapiens
atgtacccctcatgcgccccttttctggttgcctggccggcaaaagtccccagcatccacccgaagtcctcagggcgggtgggaggtagagcagcatgtggctgtgtgcccacatccctgggagacaaggattgtcaggcagcatcagggaaaatggtatgtggggagatgattctgttgtaaaaggcggttctataaaacaatcacaatttggattgttatcaaggagagaaaggagcctctggttgaaccagagaggtgggtctgactcagaagtgtttcccagcctgccttcacacacctgcggctgttcggggcccgtgatggaaccaggagcagggagcgtggatagcatccttaaaagtccgccagttgggag

SEQ ID NO: 375556 - DNA, 533 bp, Homo Sapiens
  misc_feature (55)..(55): n is a, c, g, or t
  misc_feature (95)..(95): n is a, c, g, or t
  misc_feature (209)..(209): n is a, c, g, or t
aggttgatttgaaaactggccctgcccgcagacctgccagagcatgaggagcgcnccccccgggggtggaccgcatccaccgcacctcccccccngtgcacccgccgcctgccggtgagccagggggttccaccagcctggaccccggaatccccccgagggggctctccccccagcctaaacctttggtggtttaaaattggttaacntttttatattaatgacctattgaaagtggtaataaaaatttatattataggcttcaatgttttcatgaatgttaccccaaaaagctgtgttttctttggtcagaggtcaaaatttatgaaaaacaaaatgctgtatgaatggaaatcattttgcaattgagtgacacttcattgtaattcacagtgtaaatttaatccaaactgaaattttgtttcaactgaatttgtaattaactctgaatttgtttttaatcattagtaatatttcagttgggtatctttttaagtaaaaacaacaaataaactctgtacatgtaaaacgtg

SEQ ID NO: 375557 - DNA, 971 bp, Homo Sapiens
  misc_feature (16)..(16): n is a, c, g, or t
  misc_feature (30)..(30): n is a, c, g, or t
  misc_feature (39)..(39): n is a, c, g, or t
  misc_feature (61)..(61): n is a, c, g, or t
  misc_feature (140)..(140): n is a, c, g, or t
  misc_feature (773)..(773): n is a, c, g, or t
  misc_feature (832)..(832): n is a, c, g, or t
  misc_feature (836)..(836): n is a, c, g, or t
  misc_feature (911)..(912): n is a, c, g, or t
aaagtaaaaaaccacnagattaagtgggcnaaaaaggtncctacctgcaattcctcctggnaaccctggccaaccccccagagtagttaaattgggcctacctagaggattaacacacagggctgaagccaggtcaaaanccagggctctgtcaggtaagggcccagtttttactactgagcaactcacaaacaccactggtaaagcaaagaggtctgagtgtgcatatagctcagggaaccctgagtttacccttagttaccactaaaaactaacaaatgagactccactgaggcttaacttcatatacaaaaatccaacacctttgccctctttggacagtggtaattattagcatgcccttccttaggtataaaagggataatggtatatctaggtttatgcacagttaagaatcaactataaatattcagacttgtattttaaaattacagattaaaagtgactcccaaaagaaaatcaatttcttcataaatgaaatatagtatataaaaagctggaatgataattaattcaaatacaaaagctagtatacaaaaaccctactttttcttccaaactacttaggttcatacggttcacactaccacacaactgttctacattacaattacaccactagagtaaaatactaataaaacacttcagttagcaaactgaggttctacttgttgacaactgcattaaaactgcagcatttaagcagagctgagaagcaccattcttaagcatggctttcttcttcctgttcntgtgttccacagtgattactaaaggaaggaatttggtctgtaaatgtctgggtcatccnctgncctattaggaatgccactgaaagctgattctcctcttaactccatgctctcaattagcccatttgaagagaagcnnctatggttcactgctgcatggattttctccgtaagcactaccatatgctgcctcataac

SEQ ID NO: 375558 - DNA, 500 bp, Homo Sapiens
  misc_feature (12)..(12): n is a, c, g, or t
  misc_feature (34)..(34): n is a, c, g, or t
  misc_feature (107)..(107): n is a, c, g, or t
  misc_feature (117)..(117): n is a, c, g, or t
ctggctcacttngaagtagttcctttgctatgcntcaagtcacagaactttttttgcagatcaaactgctgcaaaccacccagtacatttttcatggaaaatattgnattcccatcncataatttcaaattgggctttttatgtcactcttgatcaggttcatgctttcctctatcctcatatacatttacagcatatctgtaatagctgtttaatgtttttgttggcttattttattacttctgtcatgtctggatctgtttttactaagtgacttttctccttgttatgagtcatttttttcccatgcttggaatttataattggatttccagagaatgaaaactttacattgttgttgttgttgttttaaaatattattattcctagccaagtgcggtgtcgcatgcctgtaccctagccctttgggaggctgagacaggtggattgcttgagtccaaggagtttgagaccgacctgggcaacatggcaaaactcca

SEQ ID NO: 375559 - DNA, 323 bp, Homo Sapiens
  misc_feature (23)..(23): n is a, c, g, or t
  misc_feature (42)..(42): n is a, c, g, or t
ccctacccaacctaaccttcaantgttgtccacctatgccantccctcaatgaaaactagccttatttttcccatatagtaatgcagttagggttcctcagcactttcctttcttctaacctttttttaactcttcatattatgttcagatgatcatactgtcaaggtttgtgtacattactgaaaatttgtattgtataaagctttttgcattacgaggctgtacagggtcattttgacagtaactggtatattcctttgcatcttatgttgcattgccaatttctagtgtatccagtttgaaagtataatatactctaatt

SEQ ID NO: 375560 - DNA, 382 bp, Homo Sapiens
agtggctttgtccaatggcccctgcccactgggggcaggcacatgccggggcccagggcaggctgccagctggtgagcacgaataggtggctggtggagcgcatgcagtgggaagggcagatggctccattttgatttgttagcaggccacttcctcggaaggggctttcccttcagtcgggtctgcaaccgccagcctcagctgtcttggagcagatgtgtatagttagagatggggaccttttcactgtaaatactgctcacatgttcctaggctgactttactatgtgcagagcctcttctcaaatatccaaatcccctctgttgggtactacagaacagatgttaccctgcctcctattacattaatttacgaacttt

SEQ ID NO: 375561 - DNA, 580 bp, Homo Sapiens
  misc_feature (311)..(311): n is a, c, g, or t
  misc_feature (490)..(490): n is a, c, g, or t
  misc_feature (504)..(504): n is a, c, g, or t
  misc_feature (528)..(528): n is a, c, g, or t
attcgctcagctacgcccgcgatgagctcacccagtccttccaccgactctcggtctgtgtgtatggcaacaatctccatggcaacagtgaggtgaaccttcatggttgcagggacctggggggagattgggctccctttcctcatgacatcctgccctatcaggactctggagatagtgggagcgactaccttttcccagaagctagtgaagaatcagcaggcatcccgggaaagtcagaacttccctacgaagagctgtggctggaggaaggcaagcccagccatcagcctctcactcgctctctgagngagaagaacagatgtgatcagtttagaggttctgtccgatccaaatgtggcgacttctcctcttcccatccctgggactttggggagcagcagtgaagtcttcagataattgccttacctccacctccagtggcctcccaaatttgaagccttcagagaagaatgccggttctgaacgncccaactgtttcancccgaagtgcaaagctttgttcancagttcttcatccttcttggaaagtcaagcaggggaaaagattgttttccag

SEQ ID NO: 375562 - DNA, 461 bp, Homo Sapiens
  misc_feature (403)..(403): n is a, c, g, or t
  misc_feature (432)..(432): n is a, c, g, or t
tatgaaacaagactgaaagcataatcttcccacccttccttatccccctccctcatttaggctttgcaggcctaattttttcatcccctttactctgccaacttaaattccacatccttaggccgagtgtggcaaaggagtacccactgcacaaatgtcatcacctgaaggctttcatttatacagatcattgatcaatttaagaacttctgaagggtgctaaacacaactctatcctgctgggtaagctggccggaagttcaggggctctcacattacaacatgaattaggattaaactttaattttcccgataatggctgtgaggagactgcacatctcccagttctgtggccttaatttatttgactttcttgataggagtgaaggatagtatctcaccnttggaacgggggcacagagggcagtaggnggaccacggatccttgggcaataatttga

SEQ ID NO: 375563 - DNA, 381 bp, Homo Sapiens
  misc_feature (30)..(30): n is a, c, g, or t
  misc_feature (84)..(207): n is a, c, g, or t
ccaccattttaaaaagactggggtaataancccattaatgtaatatgtaatacccacatttccctttatcccatttatcctgtnnnnnnnnnnnnnnnnnnnnnnnnnnnnnnnnnnnnnnnnnnnnnnnnnnnnnnnnnnnnnnnnnnnnnnnnnnnnnnnnnnnnnnnnnnnnnnnnnnnnnnnnnnnnnnnnnnnnnnnnnnnngacttttggccctatggtagtaggacatcacagaagttggggtttgggaaagttagcttaagatcatacataagtaaatgtatttgaacttggattatttaaccttctgattgcaaagtcttaaatattctctatcaaaattaaattttattaaaattttaaattaaagaacat

SEQ ID NO: 375564 - DNA, 394 bp, Homo Sapiens
  misc_feature (172)..(172): n is a, c, g, or t
cttatcacactctttcaagtttccttaatgtatctggaaggaatagaagttggattcagaattgataactggcatggtgatgacaaacctgtgtagcaccaaggttctcacagctaacagctgtttcacaaacggcatcttccaaatgaacagtcacctctgctatgcaganaaacccccatcctgctgtgagcaagttaggctcttcaagaactggacaacttttgggtgaggtgttcaatatcaaactgcataatcattagccattttcatatatactattttataggatttaagtctctcaactatcaaaaagtagaggcgatttttagggaggaaaaaagtcgtgggggactgaggttcagggacaccctggaaactatggcggaccagt

SEQ ID NO: 375565 - DNA, 279 bp, Homo Sapiens
  misc_feature (49)..(49): n is a, c, g, or t
  misc_feature (52)..(84): n is a, c, g, or t
  misc_feature (86)..(86): n is a, c, g, or t
cacaccactgcactccagtctggatgacgggagtgaaaccctgtctcanggnnnnnnnnnnnnnnnnnnnnnnnnnnnnnnnnngnaaatctactcaaatgaagacctattttaaaagtttagaaacatgcctcaacaatttccaactctgttgacataaattgtggattcaattatcttgtcacaaatccacttgtaatttaaaattgcatctttataacactttaaatgttattaaatggcatataatgtataatgtaaataaccatacataatggt

SEQ ID NO: 375566 - DNA, 454 bp, Homo Sapiens
aacctgtggctctcactctgggctcaaacccctgcaaaccttccgggagccccgaacaagagcccagctgcctgccactgtcgcctccgtaagctcccaacttccagacccagaagtccctctgcttccctctgttggaaaaagcctaaaagaattagcttccagattcctctagcccctgctccattcccacccagtccttctgaagaggaatgagcaatacatctgagctggatttctctctagtcctttctccagacaaatccttcttaaagcaaaagtcctggctgagcacctgtccttggggaccgatctgccgtgtgaccaggggaagaaagttcccgaaagcctgttccaccaattctgcttctgtgttgtgaatccagtctgctttccattagaaaaccgcttcggcacttatggtcactttaataaatctagtatgtaaaaaaaa

SEQ ID NO: 375567 - DNA, 454 bp, Homo Sapiens
  misc_feature (35)..(35): n is a, c, g, or t
aacccctaaaggccttaaacggaataatggggggnccacacggtattcccctaagaggttaatttaaaagggccagaccccagcatggttttaaaaccccctttaagttaccacccttcagaaagtcccgaagtcccttcagtattagggtcagcctaagggaagatatatttttaaaaatagtgataagactatcactaatatcatactcatcctgtaatatgtaaacacagttctgttgttactggcagaaaaattggaatacccagcattaagtgagagaagtcagcctacttttatgatgaagctactgggatttatttgaactattatttttgttagatagtataaaaatgttctaagtgcctatttttctcattccccttttaaaaatgtaatgctaaaatttctagaagtgttgtaaacacggaatacaaaaaaactatgattgatt

SEQ ID NO: 375568 - DNA, 466 bp, Homo Sapiens
ttttttggcattaatgcagcaacataatactcactttaggtattactacatagttgaaggatttaactgaatgtatggatcaaatttatttatttgacatattcgaagctgtggtttaataggaatttgagaaaggtgtaagaaataggataaaaagaaggtcagcaccatgtaccaggaatagctttactttccatacatagaaatataaatttagtggtatcctatattactttagtgtcgtacgctttgtaagacttaaatattttattctattgattccacttctttggtatgttaagacatttctttaaagatgaccaacaatatccttattttaggtgccactagcagatgtaagcgtatacttagttgccgttagatgtgacagaatgagataatttatgtaaagcagtagagtacctggcacaaagcaaacaataaatattattgttattgttgttat

SEQ ID NO: 375569 - DNA, 475 bp, Homo Sapiens
  misc_feature (39)..(39): n is a, c, g, or t
  misc_feature (462)..(462): n is a, c, g, or t
tccacaaaaccccttgtaaaataactgcccactgtaaancccacctccagagacatactgcctccttgctctgctttgtaacgaatattccctgacagacccatggaagccctggggcaatggcctaatacaacttgggaagattatcacaatgatggaggagtaaggtggaaagaaggggtttagaaatacttcaaaaacaattaaaaggtcgtgtttgaaaatagctatgaatataaatgcgatgaaacactgaggacatagctgagaacagctgtataaaacgaaaaatggatgtattattaaggctgttactatattgcagatattttggccccttggttgttggaaaatggctgtcccaacagtctaacgtcctgcatgtgtattccaaatctcccacctgacaaaatggtgcgtaggagactatccaaagcagtcagagagctatcttctttcctncttgccaaggctt

SEQ ID NO: 375570 - DNA, 448 bp, Homo Sapiens
  misc_feature (17)..(17): n is a, c, g, or t
  misc_feature (29)..(29): n is a, c, g, or t
  misc_feature (45)..(45): n is a, c, g, or t
  misc_feature (91)..(91): n is a, c, g, or t
aacaatgggccttgtgntgaaaagcccancctttggaggggattngccttttggaaaacaaatgaaccagccttgcccttgaaacttgaantaattgatcctattgactgtccattaacaacaacttaaacattgtcttctgtgaaaattttccttgaagagtcctgttctatgtctttgccctttgacctttaacttgcaaactggcacaaactgaaggaaatctggtgttgcttctccattggattagttgttctctaaaacctagtaagcatgagctgtttccttagagtggagagagtggtgatggcagatctgcagatggacactttgctctttacatgcacactctgaaaatgccctataggtagaagtgaattttaatttcattttaatataatttcaagtctaaattcatcattttagtacaaattacaaaaactatagg

SEQ ID NO: 375571 - DNA, 346 bp, Homo Sapiens
  misc_feature (217)..(218): n is a, c, g, or t
tcagtggagcccacgttgatgacacttcccaagtccacgattccttcagcagactcctaagtcagaccttgctctaaatgttgaacatccagcaacaaatcagatgttccttgaaggggttctcagtgcagtggggggacctagacaagtgctgtcctttataacagcgtggaaagtgcccacaaggcttttgcacgtaggctgtcagggaacaggnnacgtgcaaggcacatgccttggcttgagaattcagggaaggctgtgaaagtgaaagtcctgctgaggaaaatctcaaaggatggacaagaactggaatgtggaaaaggagagaaaggaagtttcaggc

SEQ ID NO: 375572 - DNA, 531 bp, Homo Sapiens
  misc_feature (205)..(245): n is a, c, g, or t
  misc_feature (386)..(386): n is a, c, g, or t
  misc_feature (430)..(430): n is a, c, g, or t
agaaaccaaaccccaagtcctcactctttagtggtctgagatttggcaaaatcaggtatcctggtcaaagcatagattcaaatattgtgggtatctgtcctagacagtggacagtggctagctcaacgacactgctgttttgtgtgtctctgggaagacctttctaaggaagaaaacaagaaaacctgaactttttagattgcgnnnnnnnnnnnnnnnnnnnnnnnnnnnnnnnnnnnnnnnnngcttcaggcgaatctcaagaacacggcctgataggcttagcttaagactggctatcctccatgggtcctgcgcagggaggaactgggctgagtagttatttagctgcctcccattccatttggcagatcttagtgccaggntttctttagatggggaggcacctctcttgggaatggacttcttntcccacacatgtctcttttcattaacttccgagaccttatttccttgaccctaggctcaagttattttaacttctgcatcctttgccagaggtgtctcaag

SEQ ID NO: 375573 - DNA, 437 bp, Homo Sapiens
  misc_feature (266)..(266): n is a, c, g, or t
  misc_feature (326)..(326): n is a, c, g, or t
  misc_feature (350)..(350): n is a, c, g, or t
  misc_feature (375)..(375): n is a, c, g, or t
  misc_feature (381)..(381): n is a, c, g, or t
  misc_feature (392)..(392): n is a, c, g, or t
  misc_feature (409)..(409): n is a, c, g, or t
atgagccaccatcttcagccagatgatttttttattgagagagtgaaatgctattttgttccccaaatggcgctagtgaatcactaggagggtcccactgataggccatgtttagcactggttgccagggattctctttttgagagagggaaagcaaaatgaatggaagtacccagctggaggtttcagggcttctggaggatgctctcgcatagctcgaggtcctctgcccacctcttctcttccaagggaaaatgagggacttncccctttccccctgcagggattgggcccccagcctggcggcatgcacccctcctctttgnccaagtggggggagccacagaggncggagagggattccttttaccacanccacgngcccagtttgnttcacgagtgttcaacnttgttggacggttcaccattgtttcctt

SEQ ID NO: 375574 - DNA, 435 bp, Homo Sapiens
cctttatcatagcacacaatattagaattctcattcacttgactgtttcattcagaaaaccagagcttcctaactggtgtaccaggaacaggtgtatcacaagatagtaacagctggaaatattactcaaaatcatttttcaaccattaaaaaggttacaggaattgaaataataattgaccattctgtgtatgactatgcctttatcagctttcttagtttagtcattagttttttaaaaaataattttaataatcattattttaacacatacagtttttatgcccaaccaacactcatcaccacaggcatgttctgtgagggcctctccctggggctctctggcaaaccatccccaattataggtctggtataggttctttgttccaatggtggatatcatcgggggtggctcccccattttaaatgggttgg

SEQ ID NO: 375575 - DNA, 415 bp, Homo Sapiens
  misc_feature (336)..(336): n is a, c, g, or t
  misc_feature (362)..(362): n is a, c, g, or t
  misc_feature (368)..(368): n is a, c, g, or t
  misc_feature (376)..(376): n is a, c, g, or t
  misc_feature (395)..(395): n is a, c, g, or t
  misc_feature (401)..(401): n is a, c, g, or t
ggagccagggcggcagtggcctcggggctgggtggggcgcctggcctctggtctctggagtagtcaggggctctgcagatgctgagaggcctgctcatagtggactgggagatgctggagcagcctcagagccatggccggcccacggcgggagacggccctgctgctgcccctctgcctgtgcgtgtgcacctgtgggcacctgcgtgtgctggggcaggcagggctgtattgggaccaggtcccgtaacagcctgcctgcttaccgtctgctcccatccctgggggaaagcaagggagctcggggtcctaggactgacctcagcgttaaccccnaccagcaccacagtcagcaggatttntggatnaagtttancccacgagagccctggganttccangggaattaagaaag

SEQ ID NO: 375576 - DNA, 411 bp, Homo Sapiens
  misc_feature (385)..(385): n is a, c, g, or t
  misc_feature (400)..(400): n is a, c, g, or t
ctgagggtctctaactaaacatttcaggtatgatgggcaaaatgctggtttgttacagaaatgactgaagaagacctaggggccatagtgggccacaggaaagcctgcaatacagcctgaagtgtgggaaagaatgtatcagtcctgttgatggagtggtgtgtttgctgtctctataaatatgtcagggtttgaaagacagaaaacaaagcatctttgctgaccgccagactcccagggtatatgtgggctactgcaaattaggcgaggcttgtttatctgcttcaacttgactcaatttgcatttcttgagccactgtctattgtgggataatgatttcatcaacactttctcaggcatcagcagcccctccagagtattccntggattttcttaggntttgtgccaac

SEQ ID NO: 375577 - DNA, 437 bp, Homo Sapiens
  misc_feature (269)..(269): n is a, c, g, or t
  misc_feature (281)..(281): n is a, c, g, or t
  misc_feature (302)..(302): n is a, c, g, or t
  misc_feature (384)..(384): n is a, c, g, or t
  misc_feature (390)..(390): n is a, c, g, or t
  misc_feature (395)..(395): n is a, c, g, or t
  misc_feature (422)..(422): n is a, c, g, or t
tcctgatggtggaaatcattttattctcatacacaggttattacagcacaattaggaagagacaatcacaactcacacaatgctatattcaaattatgccaaagtcccaacatattcatttcatttgcaagttaattcctaaaagatcagagcagagtgatacacaagtttattaacacagactacaacgtcaatgaagcctcctggcattgtcggaaatagaaaacatgtataaaaatcttcgaaatgcaggttaaaatgcaaatccnagtggaaagggnaaaagcactactgtgaagccntaacagcaattttttcccgtcaaaaggagggtttgtgttccagctgggaggagaaggcctggtggacagaagacaaaagggngggcgnaattnccaaggggggaaattctaaaaaattgntggggggtggctggc

SEQ ID NO: 375578 - DNA, 401 bp, Homo Sapiens
  misc_feature (60)..(60): n is a, c, g, or t
  misc_feature (342)..(342): n is a, c, g, or t
tcctgaaaacaatggaggagaagcagatcccggatgtggaaacctttcaggaatcttctncccttgatgctcccagatcgacccctaggatcgaataacgataaagtgagctcagggtcggggtttattttaacctgtggatttatctttcaacatctctccaccctaatacaagcacagctagttggctttgtaacgcctcaaagaactccatcacagatgccctgattatccctgcaacaagtggctttgcccagttctggctctcccaaaccgtgctgcggcgagtaatcccgaatgtacggtggagtgagcagactgacccccaggaggcacaggagncgtagcccccaggacccacgacacttttagggttccagaaaaaagttttcattctacat

SEQ ID NO: 375579 - DNA, 579 bp, Homo Sapiens
  misc_feature (21)..(21): n is a, c, g, or t
  misc_feature (50)..(50): n is a, c, g, or t
  misc_feature (76)..(76): n is a, c, g, or t
  misc_feature (87)..(87): n is a, c, g, or t
  misc_feature (319)..(319): n is a, c, g, or t
  misc_feature (322)..(322): n is a, c, g, or t
aaaaaaacagggtcctcaaancccatgcctgcacaccccatgcctcacancgaccattaccccacaacagcccacnaggggggaaancaaacagtgtgtcccctccccacaaaacgggccattccccatggatccaaaatgtggccgtcctgccatacaagtggaatgtttatcccagcctttaaacaggagggggctccctgtcacagctacagcatggaggaaccctgaggacactatgctcagtgaagtaagccagtcacaaaggacaaatattgtatgaggtacttagagtagtgggactcagagacagaaagangcngccaggggcaggggagtccccgcttcatgggtgcagtgtttcagttttgcaacatgaagaattctggaggttggaaggtggcgatggctgtacaaaaatgtgaatatatttaatgtcactgaactgtacacttagaaaatggttaaagatggtaagagttatgtgtactgactacaattattttaaagaagagtgtatcatttttacatttctaaggtctcattaacaaaagaaggttaagtccatgactgatgctg

SEQ ID NO: 375580 - DNA, 529 bp, Homo Sapiens
ttttctaaaagtttgggaataaattagaaaaactgatattctaaataaggcgaggaggttggggtaatgtcaggcacatcaaaatcatcacacaacgaagtagatatggggccttaattttcataaatgtcacatagcaagtgtgtggggtatcacaacattgttctgatacagccctgtttgtatggtagttgagctgcttgggctaaatgtcccttgagaaactggacttgatcaacaggtctaaaaacactgatatttagggagtgatgaggtgatttcacggtcactcagaaccaactctgaaatcttctcactgccttttcccataacccctattttatgaggagaccagaaagggagagagcaaagctcagtgagaccatgtggtcttacattagtaacagctttgttactcactccatataccccggtaccctcacacacataccatgaactcaaagacagaattctacacataacacacatagcaaagacgattgtggggaggcattaaacagttaagagg

SEQ ID NO: 375581 - DNA, 414 bp, Homo Sapiens
  misc_feature (32)..(32): n is a, c, g, or t
  misc_feature (60)..(60): n is a, c, g, or t
  misc_feature (92)..(143): n is a, c, g, or t
ataacaaagattagcccaaatgtgggtggccncgtgcctgtggtccccagctaccctganaggctgaggtggaaggattgcctgaccccaannnnnnnnnnnnnnnnnnnnnnnnnnnnnnnnnnnnnnnnnnnnnnnnnnnntgataaagcgagaccctgtttgagaaaaaaaacagaaaacgaagatttggccacaaagacagacatacctagaaggcaatgtgcaaacagccacctgatgggggcaggattggggtgatgcgtctgccagctaagggatgcctgaggctaccagaagccagaagcaggtggaacagacccttccccagctccttcagagggagcatgctctgccacagcttgatttcagatttctggcctcaagaactatgagacaataaatttctggtct

SEQ ID NO: 375582 - DNA, 408 bp, Homo Sapiens
  misc_feature (76)..(76): n is a, c, g, or t
  misc_feature (170)..(207): n is a, c, g, or t
tttcccctatacagtagctaaagtaccctacatcattaatttgtatagtatatcctgtgtaaaaataagactttcngatatttttttcaagtggcaacatttatcagacttttttgatttctgacatacatactgaaaacaggcaacatacatgcaaagttttccactgnnnnnnnnnnnnnnnnnnnnnnnnnnnnnnnnnnnnnntgtctttctggtattaacaatttgataagttctgctactaaaagtactacaaagttgtttcctttgattatcccctataattgtctaattaatattttaatttagcagacattgttaaattctattccttaggagtgtaatgctaaggcaaggccttttgggaggttttgtagtacattaaaagaatatactatctcttcc

SEQ ID NO: 375583 - DNA, 207 bp, Homo Sapiens
ccaaacagtaatcataaaaatctattaccttaaaataaaatagcagattacatgtttgaatatctgtttctatgagagggacaatgtcctctgagggtatgcacaaaataaaacctattctaagagatgcctcaattcaaatctaagtggtaaaatgaatatataatatgagcatgctatgctctcaacctgttcccaaaacacact

SEQ ID NO: 375584 - DNA, 460 bp, Homo Sapiens
  misc_feature (114)..(114): n is a, c, g, or t
  misc_feature (428)..(428): n is a, c, g, or t
  misc_feature (440)..(440): n is a, c, g, or t
ggacaatagaaacctagaagtcagggcaagctgcatcccccaaggctcaggaaagctgcccagggaagatggaatcttatctgcatgtgccctacttgcactgcagcagagggnccgcagaaggcatcctgttcagggctttaaggaactaaagcattggaaggcatcccatttctacgggagattggaatagagccctggctgttctggccagtccctgtctcagatgttgcacttccagcacattctacagttattctagagagctacaagcaagaaagaggggagtctgtgttggtacaaggccacctggggagctgtccctcagagctatcccagtactcaggagaagttacaaatgtggataagtccagagtttgaatcaagatagacctccaagataatgtctttttgtgaggatttgaagntagtcttgaaancaaattagttctttttaaaa

SEQ ID NO: 375585 - DNA, 440 bp, Homo Sapiens
ctctattgaagcatggtgttagtctgtatattcaagataaagaaggcttgtcagctttggatcttgtaatgaaggatagaccaactcatgtagtattcaagaatactgatcctacagatgtttatacttggggcgataatacaaattttaccctgggtcatggaagccagaatagcaaacatcatccagagttggtggatctgttctccaggagtgggatttatatcaagcaggtggtgctttgtaaatttcactccgtgtttctgtctcagaaagggcaggtttatacctgtggtcatggtcctgggagggcgattagggacatgggagatgaacagacatgcttgggtccctcggcttgtgggaagggactgaatggtcataattgtttccccaagttggccagctgcttaagggatccatacctgtttgttatttaa

SEQ ID NO: 375586 - DNA, 407 bp, Homo Sapiens
  misc_feature (41)..(41): n is a, c, g, or t
gactccttcccctgccacataaatatattttggcagtgcantcctgatttttttcagaaattgtttcttttcagatggtaatacttcagaatttacagatatttaccagaaagatgaagattctgccagggtgccatctctttgtggtagagaaggttcatcctgacatgtttgaataccttttacaatttatatacacagatacttgtgactttttaactcatggcttcaaaccaagaatacacttaaacaaaaacccagaagaatatcagggaactctgaattctcatttgaataaagtgaatttccatgaagatgataaccagaagtctgcatttgaagtttacaaaagtaatcaagctcaaacagttagtgagaggcagaagagcaaacctaaatcttgtaaa

SEQ ID NO: 375587 - DNA, 129 bp, Homo Sapiens
ctgggcttataactttcttttctaaaaatttatttggcagcctgattagaaatgtggtaaaatctgaacaataaaatagaaaatagactagttgcatagaatgtttcaaaaacaggcattagattggcg

SEQ ID NO: 375588 - DNA, 354 bp, Homo Sapiens
  misc_feature (14)..(14): n is a, c, g, or t
  misc_feature (188)..(188): n is a, c, g, or t
tggaggtgcccggnatgaacatacatcacaatgtgaacagtggtcatctccagatagtagaatttcagatatgtttctttccatttttctgacagtttgaattttctgtaataattaattgacttttatacaatggaaacaacttttttgttttggaaaaaagaaagatgctgccgctaatcagtggntgaaagatgataatatggatacaaaatctattctagaagaacttcttctcaaaagatcacagcaaaagaagaaaatgtcaccaaataattacaaagaacggctttttgttttgaccaaaacaaacctttcctactatgaatatgacaaaatgaaaaggggcagcag

SEQ ID NO: 375589 - DNA, 312 bp, Homo Sapiens
  misc_feature (52)..(52): n is a, c, g, or t
  misc_feature (102)..(102): n is a, c, g, or t
gtacttggtagtatatttaattgttgtgacaatgacaatataaagaaaagantgaatatccaataagtaattttccagttctgctcagtctttacacatgancacagtctctatattgcagtctgaaaatgtgcttctgctataggctggaaagtgttatatcaggagcagcataaacaaaattactaatttgatctaaatttcaagggaatcttttgtttcctgccttgttcatttctaaataatagacaatacagagaacactattaaaaactagctaaattacattatgccttgctactttccttaaaa

SEQ ID NO: 375590 - DNA, 346 bp, Homo Sapiens
  misc_feature (43)..(57): n is a, c, g, or t
  misc_feature (75)..(115): n is a, c, g, or t
  misc_feature (137)..(185): n is a, c, g, or t
  misc_feature (294)..(294): n is a, c, g, or t
actctaggaaggtgaaaactatgatctcccattttagaaaccnnnnnnnnnnnnnnnctttgttaagttggctannnnnnnnnnnnnnnnnnnnnnnnnnnnnnnnnnnnnnnnnaccttttagctagaaaggtagnnnnnnnnnnnnnnnnnnnnnnnnnnnnnnnnnnnnnnnnnnnnnnnnncctttccttgcattcactccacacgattcctaagacatttaatgaactataatattacacttgtgttcagtattcagaaggcatctgaagttgtatggcacttaatatnaaaggctttaaagccctcttaaggagttaacagcaaaactcttaattttttc

SEQ ID NO: 375591 - DNA, 379 bp, Homo Sapiens
  misc_feature (296)..(296): n is a, c, g, or t
tggcattcagagtatctaaagtccatattttaacatggattctaaacatttttataattcttattttgtcacttagaaaatgagagactataatgcctgtgtgctcaggacaattggcattcatctgctgaggctcaggcccaccaatatgcctgaaattagtagcatgtaccagccaaattgattttcacagtaataatttgtttatgtaataagtgattctcgtataaatcaaagctcattaggtgcatcaacatgaccctagttacatatggatcaacttaaatcattggggnttatgtttacacctttgctccaagggttattttttaacagtattttcatgtgcttatagaccgtaaaaaggacggcattatta

SEQ ID NO: 375592 - DNA, 434 bp, Homo Sapiens
cctgcaaggactgccatgaatggaggaaaagtgcccggaaggaaagaagtgaatgcctccgccccagcaggttgcccgtgtcattcctttgtaatgaaagtaagtgacaccctgagaattgggtaagtgctccaaactactcctttacatatgttctccccaaaatgttttaataaagtaagcaattgataagtatgagaagacaatttatttgttgggcataaataatgcttatgaagtgctttaagttttaaactgaatatgtgatttaaaaaggagattttgtgttccctaggaaactcaacatgctgtctcttgtttatccatggaatgtaaaagttaataaaggatcctaatattctaggcctataaaaatccctccatttaaataaatcattaggccctgacaagctattcccaatgaagaaaaaaaa

SEQ ID NO: 375593 - DNA, 560 bp, Homo Sapiens
  misc_feature (98)..(98): n is a, c, g, or t
  misc_feature (473)..(473): n is a, c, g, or t
tatgtatatatgtatgtatatttaaggaagtccagaaatcatactgcatacatgctacaaaaaagtagcaaaaaagtacaaagttggcttagataacntgtaccattttaaatggagatcataattttatgttcacttgatggggaatgactagaatggggcaataacaaatcatttctaaacagttattttccattaaaagccatattaagtattttgcttgttaaattctagttttatgttttaaatctcttagtggttacattgccatttggtagcatcatgtatatatttatccttataagtttgcattatgactcctgtaaaatatgaaattataatgcaataaaagtgttatctttcttacaaaagttttgtacctaagtggatatagataactgcataaatgaataaattcagaattaaccccttcaatatttctagtagcacaactgataatattgatattttcnacaaatgttacttctaaaattacagacaaaattacttacacaattcagttaagatgctttgacactgaataaaatattgatttcatg

SEQ ID NO: 375594 - DNA, 370 bp, Homo Sapiens
ccatacaagctgttgttaatttgggggtaaagtgctgatttgcaaacttcatcaaattgttcccaagtggattctccttgtttgtctccccctaccaaccccaaagttaccatatttgatgtaagaatcaggcatgttagaatgttgtgtcacactaactgattctgctctttttgtcttgtcattcaagttccgttagcttctgtacgcggtgccctttgcagtctggtgtctcttccagaggcgagggggctgaggatggggtgctgcatctcactagctatactggcatcatcttggtaaactgaaaaccaaatgtggacatttgtaaaatcagtgcactgtttctagagagagattaaattcattt

SEQ ID NO: 375595 - DNA, 312 bp, Homo Sapiens
  misc_feature (11)..(11): n is a, c, g, or t
  misc_feature (27)..(27): n is a, c, g, or t
ccgcccaagcntcgtgccagtcatctntcaaacagatttgaattcatgatttctacgtaaacaaaaacatcataaatatctagaaataatcttttttaacaatgcactagatactatctaaaggctcagttttattgcacatatttggtttaggcttatttgatcaatacatgcagaaaaataaattacaaacgtgaatttttaaaaggaatcaggatgtcattttgtactacaaaaattagatgagggttgatacatttcacagcttaatcttcagaaaattttcttcagctattgcataaaatcactggt

SEQ ID NO: 375596 - DNA, 442 bp, Homo Sapiens
aggccccaggggatgagccccgaatctaggagcttcctcaccactcccaagctgcccctgtcccctccagcaccccttcctaatcttgagaaggtagggaggacagggccggcacgtctggggtctctgcactgcccgcctctgcccacctggccatctgaaactctggaaggaggcggtggccgaattgtgggttcagcttcatctgatattggacttgaggctccggctgcaacaggtctgagatgacacatccatcggaggtggccaccgagacacagtataaatcagagcattggattcaacctctgctaggattctccctgagtcatttcccttggacttctgtagaaaagggccaatacactccggatttcttttttgggaaaggagggaggcagcctttcagtgtggggaggctcctaacaggtggggcacctgc

SEQ ID NO: 375597 - DNA, 338 bp, Homo Sapiens
aaacagtaagtgttagagcaagaatttaaacccaagcaagtctgactctagagcccaggattcatcacaatattcatttcctatgagcaaatctcaaggtttttggatatctatagtaaaccatttatacttctagtcaagtaacacatatgaaaattcatgtccacaccatggtgaagagttgttcaaagaataaaatgaatgccttgaaattttggcagatgatactaccatgataataggtaaaaactggtgcatgttcttactacgtggacagagtagtccatggttaaccaatgaaatgaacatcctctcaaatataccattcaaagaggtca

SEQ ID NO: 375598 - DNA, 409 bp, Homo Sapiens
  misc_feature (29)..(29): n is a, c, g, or t
  misc_feature (33)..(33): n is a, c, g, or t
  misc_feature (372)..(372): n is a, c, g, or t
gtatgttgaccacccttccccctccaggngcgncgtctataaccccataagacctaagaacatcagaagataatgagcaataggattaattctgggaggaatcagggtagtaataggacaatcttagccccctgatgtgactttgcctaccacgagtcaaccctgaagaattcgactcaaaccctagaatcattagccaccagcacaggtcaggcattaaaagggaatacaagaatccctagactgtatgggcaaatataatccttgataacagactagtgttggattatttaacgagctgaacaaggtggagtctgtacggtctattaacaaaacctgctgcacctatgtttaccactttgggccataatnatttttacccttccaaagggtttttggggcagttccc

SEQ ID NO: 375599 - DNA, 504 bp, Homo Sapiens
agaaataattcatatctgtaattctaagtatgtgattaacagatataatgaaattaatattatgaattataaaatagatatgatatgaatataatttatattatgaatgtaaaataggtatcatatgaatatgatttacactatgaatgtaaaataggtatcatatgtccccaaattgcaaagctacaactcacaagtttgcatggccatcttagtatacattgctaaatcctcgaatatttggatgattgtgtatagatgtgataagatttgtgtaattccagtgagttcaaccatttactcatcctctcttgcaatatccaactgacaagtatgtgggatcacacttaggcaatttttttctgcttttcctgcatgataccacagttttctctgaataaatgtcttctttttttaggaaaatgcaaatgtattgattacagtttaaaagctaccatttttaaaagcatgtatcaataaatctaacatttaaatcaaaaaaaa

SEQ ID NO: 375600 - DNA, 435 bp, Homo Sapiens
cttgaatcccaccccaaacattgaactccacctccgggaaggaacctaaaaggttgaaggtcaagccttgcaaggtgggtcaagcccctgacccgtgggagcaacccttccgtaggaattctgcatgccaagctcccagaggggtttccccagttagcagtactctgtgcatgcgatcgcaggtttttgctgcgaggaatgagcccactctgcgtgacccactgggagagaactggaagttctacacccaggctcccagagatcctaccctaagcaccttttctttcttgttgctgattttaatcggtatcatttcgctataataaactgtgatggtgaggataccagctttgccacattctgtgagttcttctaacaaattgttgaacaaggtaatcttgcgaccctccccaattgcagagtgactattcaaaa

SEQ ID NO: 375601 - DNA, 488 bp, Homo Sapiens
  misc_feature (439)..(439): n is a, c, g, or t
  misc_feature (452)..(452): n is a, c, g, or t
gtaataatcagaaaaatacaacttaaaatgagattactataacacagattatcactgccagaaaggcttaaaatgggacttagaggataggaaggcctttaacaggcagacatggtgaggctgggcattctaaacatacaggaccaggtaagcagactcagaagcaggaacaaacatagtgagcatgcaggtgtgttgagtccaggttggctggaatataatctatctgaacgcaagagagaagcccgaactaagaagactgaagaggccagatcacagatctcgtaagccaaactaagaagtttggtctttactcaggacacaatggagaacgactaaaaatcaaagttgtgttttccagatgattaacctgggttttaattatttaggattttgccagaactttgggaaagcttgaaggagggaacatcagttatgntagttaggccacntaaaagtttgacaggtcttaaggaaagggaattgcc

SEQ ID NO: 375602 - DNA, 467 bp, Homo Sapiens
  misc_feature (31)..(31): n is a, c, g, or t
  misc_feature (37)..(37): n is a, c, g, or t
ccccggaaaaacttgcagaattaagtgaagnaaggangagccatatcgggaagcccagccttaagaagaggctcctaccctatggtatagcccctgagctggagggccccaattttgtccttaagctcccaaacattacatgaaaccagtttacacccacaacttgcctatgtacccatttactctaacataccaccaattagattatgtaccccataataagtagacaagtttttttaaaaataattttagcattctgattatgcccagggaactgtttcttaatgtccaacattttgtcttgctcaaatcactttatctttgagctgggcaaaggcactgttgttatagattgtatataatgaagaaaatgtttacttgcctattagaaacaagactgggaaagaatctaaacatacttcttttctaacaaaaattactttttgaaatgctgaaatgcttttagg

SEQ ID NO: 375603 - DNA, 694 bp, Homo Sapiens
  misc_feature (34)..(34): n is a, c, g, or t
  misc_feature (46)..(46): n is a, c, g, or t
  misc_feature (511)..(511): n is a, c, g, or t
  misc_feature (643)..(643): n is a, c, g, or t
  misc_feature (650)..(650): n is a, c, g, or t
  misc_feature (674)..(674): n is a, c, g, or t
gttgagcacccgggaggcagacattgggtatttnttcacaattttncacctgtaagaaaatgttcctttataactttcaaggattgccgtgagcgtctttggggccttttcattcatgtacaagtttcattcattactattcaacttggtagacttggtgaaaaatgtaaaagcattctgtatttggttcagtcttgggaactaaatttgtcgtgaattggggcctgtcacagattgcctccagtgtgcatcctccacgcagaccctccttgctcagtctccctctggcgcccatggggaagccgtgctgtggttggcagtgcggccatctgggctgccgcaacgtggcagggcaccgtccagcaagactgccccttagtgcagggctaagcaaggaaaagaagaagcccaaaaaggcgggttctttttgatacttgtaattcaggcgtcctccagagtgaaggccactctgcaggcccctggtgagaacctgtctggcttttccactgcnggcccctaaccagtaccctgcccttgtggcccatttgtgcctggggcagatgtttctggccagcagacactgaaggccttttttgctgtgacagtatttatgggcactggaaggaggattaaagaagcttgnagccctntttttctggattcccacttttatngggggcagagagagcttttt

SEQ ID NO: 375604 - DNA, 487 bp, Homo Sapiens
  misc_feature (11)..(11): n is a, c, g, or t
atcctgaacanttaaattttagacacctacttgaatggattaagacaacacacatagctggtcaaacacgaatttctgggcatatctatgaagggtgtttctggaagacactgagataaccatgacccaatgtggatgggcactgatatggtttggctgtgtccccacccagatctcatcttgaattgtagttcctgtaatacctacatgtcgtgggagggacccagtgggaggtgactgaatcatggtggtggttaccgccatgctgttctcatgacagtgagtgagttctcatgatctgatggttttataaggggcttttcccctttgggtcagcacttcttgttgctgccatgtgaagagggatagctttgcttccccttctgccatgattgtgaggcccctgcagccatgtggaactgtcagcccattaaacccctttgttctttataaattgctcagactcaggtatttcttcacagctgta

SEQ ID NO: 375605 - DNA, 412 bp, Homo Sapiens
  misc_feature (17)..(17): n is a, c, g, or t
  misc_feature (64)..(64): n is a, c, g, or t
  misc_feature (198)..(198): n is a, c, g, or t
gtgcccattgtggagtncccgcctgctcacacacgtgcccatgtggagtgcccgcctgcctcanacgtgcccatgtggagtgcctgcctgctcacacacgtgcccatgtggagtgcccgcctgctcacacaaagccctggcatggtggttctgtaggtttcctgtctgccggccgagtcagacgctgttaccgtacantctactcatggtggctttttaatacgtttttatgtcaaggatcccttttatatttctctgcacctcgagataacgtaggaatattagggatgagatggaagaggagagggtgtttttgtaaaattgaattcaggactgatttgttagcctggtgcttttcgtatcagaccttttaatgaattttcatggatgctgattaaaagacaaacctgtg

SEQ ID NO: 375606 - DNA, 625 bp, Homo Sapiens
  misc_feature (585)..(585): n is a, c, g, or t
aaaaagaacagacggcttgccttagagctgatgaagaaagcagcttccaagggattgcatcaggcagtcaatggcctgggatggtattaccacaaattcaagaaaaattacgccaaagcagcaaagtactggttaaaagcagaagaaatggggaacccagatgcgtcatacaatcttggagtcctgcatttggatggcatcttccctggagttcctggaaggaatcaaactttagctggtgaatatttccataaggctgcgcaaggtggacacatggaagggaccttgtggtgttctctctacgaaatcacaggcaacctggagacattccctagagatcctgagaaagctgttgtatgggcaaaacatgtagctgagaaaaatggctacttgggccatgtcatccgcaaaggcctcaatgcctacctggaaggttcatggcatgaagctttgctgtattatgttttagcagcagaaactggaattgaagtgtcacagacaaatttagcacacatctgtgaggagaggccagacctggccaggagatacttgggtgttaactgtgtttggagatactataatttntctgtttttcaaatcgatgctccttcctttgcatatttga

SEQ ID NO: 375607 - DNA, 325 bp, Homo Sapiens
  misc_feature (153)..(181): n is a, c, g, or t
  misc_feature (196)..(196): n is a, c, g, or t
ttacatttagaagattcttagtacttaactgtagtcttctccatgaattacacgttagaatagactggcagcaactgaatatgcagcaagtaagcctctagcttatagtttcatccctacccctcatgcctgcgtgagtctgtacagggatannnnnnnnnnnnnnnnnnnnnnnnnnnnntagagaggaagaggnagagcagaatgtctgtatactacatgctgctaaggtagtgaataaatcagtaatgcaatattgtgggtccaaactactctttgcactactttatttacagtagtaaataaaattatttttatacaattg

SEQ ID NO: 375608 - DNA, 670 bp, Homo Sapiens
  misc_feature (604)..(604): n is a, c, g, or t
  misc_feature (615)..(615): n is a, c, g, or t
aaacaaatgaagaataagccccatagctggccaatggttggccaaactggtcaggaaggaaacctgaataaagaaatgaaaatccctggggaaggccccttgaaccttcaactcttgtaggtaatttcccatcccccaagtggtgtgaaaagtgaatgtatgtgtcctgaaagtgaagaaggaaacctcctatgtgtggttgcccaaggctatgactctgggctgttgcatatggaaataccccagaaggcattcaggccagagaagcccaaaagctgtgcctttctataggggatggctgtgttctctctccaggatctcatctcacccattgctgtaccagtttctgaggctgttcccttagtggacaaatgtgcctaggaaaggatattccacaatgctcatgccactgagatgtatgcccttctaactaattacttttcattctaataacactcccagttgaaaggaaggggctgctagctactgagtgagtagtgttgggggtctctgattcctcaaaatctggttttagcagaaaacagggccatgttgatactggtactctctaccacgtgcatgggaggaggcagtgaatttgctnaaactagcccnccttgcattagattttttccagggaacagcctgcttgtcttggtattctcttggg

SEQ ID NO: 375609 - DNA, 434 bp, Homo Sapiens
  misc_feature (17)..(17): n is a, c, g, or t
  misc_feature (45)..(45): n is a, c, g, or t
  misc_feature (75)..(75): n is a, c, g, or t
  misc_feature (106)..(106): n is a, c, g, or t
ggcccccgaaaaaaaancaaaactggcccccaaaaagaatatcgnggccagcaaatccccaaaaaattcctgaanatgtcccttggcaaatggaaccccgggttgnaagatccctgaggcagctgtgccctactgttccccccacctcagaagcttccctgcccagagagcccagcagccttgggatactaatgaggatgcaactggcttattggtatgaaatagaaggtggctttgtaggggcaagcaggcaaagagtactatcccacatggcaggcaggtggctttgtgtctggaaagctttgcctagccagtacagctgtgagcagaggctggttataaatttgaactccctcagcccatttgcaactctgcctctgttctcttgcattctgtttggttgccctttagtttcctagtaaatgctccttttg

SEQ ID NO: 375610 - DNA, 331 bp, Homo Sapiens
  misc_feature (25)..(25): n is a, c, g, or t
  misc_feature (37)..(37): n is a, c, g, or t
  misc_feature (50)..(50): n is a, c, g, or t
aaataggagtgtatgtatcttaggntctttgtagaanagctatttttttntctcattaaaaaggcctctgaaaagccctctcaaaatggaccctcacaaaggcaaccagtgtgaatggatgggagctggggtgctgcatgcccaggctggtcatggtgtgtgcagcacccagagagttgcacccaccccttcttcaggtggacatccgacctttacactgtggtcttgcaaaaatcagcgagttagtttggccgccctgtgaagcttcagcattcaaggtcctcttctgttaaaacccaactcgtagccgggcgtggtggctcactcctat

SEQ ID NO: 375611 - DNA, 270 bp, Homo Sapiens
aatagtagcccatatgttattagtggagtacctttatatttgacattaaagtgaagaagaagagtagtaccttcacttttaggtttttagtagtgaaagataaaattggaaaaatagggaaagagcatagggaggaatagaatggaagtcaagtaaataaaaaactacaacctgacagttttttaaatcactttgaaaagtacattacttttatcaaagagtttctaattaaggcaaactatgcattatgccaaatattaagaacatttt

SEQ ID NO: 375612 - DNA, 477 bp, Homo Sapiens
gtggttaagtagtgactaactgtgcatgtccttcatggtaggtgagcaccagtctccatgatcaaaaatgccccagtttcctttgaaaaagccactagttctgtgaattgtccttttccctcctgcccctaacagtcctacccctctagcctacattagcatatttctcatgtaatgtattttgctggtaagctcatccattagctgcgtccttcagctattcctttagattggaggaagtggatatgaagatggattgattcagctcaccttccatgattgcttttgagggaaaagctacagtggccacatttcagatgttcacttttgcaatttgtggagggtggagagaggtagacttttgttgtgtgtttttataaaagtactctcagtaagggagtgttttggagttgaagagtcatctgattcgaggccactcatgttctttgtaaacttaaactttggaccaaggaaatt

SEQ ID NO: 375613 - DNA, 356 bp, Homo Sapiens
  misc_feature (248)..(248): n is a, c, g, or t
tgtcaatccttggtttgagcctcataggtaactgctgtgagctttaatgagaccccgggtgaattacatcttgtaagttaatcataggaaacagtcttgtcctaaataactgtgccctacattccaattccatccctgtcctctgagtgcaccaagtgtatgctccttgccgagatgttcgccctgctcgtgtgtgaataacttaggagtgaattcaaatgcatttaaatagcccacaacctttcagncaattgagggtgcactgtttgccttcccatggggaatgcccgtcagtcacattttaaagggtgcgtgctctggaacttcaggcattttacccctgaggtgtttgctgt

SEQ ID NO: 375614 - DNA, 646 bp, Homo Sapiens
  misc_feature (146)..(237): n is a, c, g, or t
cttacaaaggaaattcttttggaaatggttataacctaaactatgatcagctaataataacagtaataataataatatctattatctgttgggcggtgatgtgcatattatgtacattatctataatctgcagcaagactgcacannnnnnnnnnnnnnnnnnnnnnnnnnnnnnnnnnnnnnnnnnnnnnnnnnnnnnnnnnnnnnnnnnnnnnnnnnnnnnnnnnnnnnnnnnnnatgttcagttcaaagggaaacccacggcgggtcccagatcagacaaaatgaaatgccacaaccgccgattcttacaatacttacaggcaccatgtggctgttgtcttatttgttgaagggttcaaggccttgtgtcaacacctccacctgacagacgaggaagtaggcagtaagttcctggcctgcccaatggctcctagtgactctgagggacattcacaatgagaatagacagcctctcactttaggtgatgagcgctgttcactgagagctgtcacctgccaggatcagtggaaagttgctgctagatcaaatatttacacactcataagttgcttcctagtatagtgagttcctcataatacaaaagtacctaaaattctgggtttttaaattttaaagtcactt

SEQ ID NO: 375615 - DNA, 292 bp, Homo Sapiens
tgtaagccacggaacccagccccatcatgcctttaagtgttcaatgcacagaatagatagaggccaatagtccatttcaatcagattttaaaaaaagtaatgcaaaagatgggagaatttattgctgttacttattatgcaataatttactttaaaatacttcaaatataaactgtgtaatggatgtgtgctgtgtaatttaacttcaatcttgttctgggggtaagttagtatttgaagcacctcaatcaggtggctaggaagatgctttaaacacttatctaaatatacg

SEQ ID NO: 375616 - DNA, 354 bp, Homo Sapiens
  misc_feature (108)..(108): n is a, c, g, or t
ataataacataatgaaagccatatctccatgatatatatgtgcacatatatatacatacatgtgcatgtatgtatcatattaaggaccccatgggacctcttaaaacnactgtagaactctgtgacgcagtaaggaaggggcagatttgtacaaaaacttttctagattccatcagcaaaaaccaacacaggtttgtcacgctgcatgtctggccagctaatctcgggggaaaagctacaagttatttattttattttaagagaataaagtagggtaataatttaagggatcaaattcaaggaggaatgtgcaattttagagcaaagatttgtttaaggcaaatgagactttgg

SEQ ID NO: 375617 - DNA, 347 bp, Homo Sapiens
aatagagcatataaaatggttaagtattggttcctgaaatactgtttcagctaaatattctatttactgtgtatactgggtcacaatataaagtgtttcctgttatgaaatgcaatttaaaaaaagaaagcttgaaagactgctgcaggaggcaccggccatccagtgattgttggaagagtctggattgtgtggagcctgaccttagataaggagcagcagatccacaactcaggaagtctagagatgcttagcacttcttcttttgagtgagaagatgggaatcactcttggtttctaaaatatttttcttctctgctgtgtatcgggcaacctcacatggattc

SEQ ID NO: 375618 - DNA, 395 bp, Homo Sapiens
  misc_feature (29)..(29): n is a, c, g, or t
  misc_feature (56)..(56): n is a, c, g, or t
  misc_feature (123)..(123): n is a, c, g, or t
atccacccccccaagtcccttgaaagtanactttggaaataaaccctatgttaaanggcaaccctaatcaagctaggatttgtcggttaaaaatttggaatcttgtaatcctgtactgtcaanttttggccactctggctgttacagcaaacttttctccccactgtcataattggtctaaagtagtatttgttttcaggactatccaaaaagcaaggccagcacattgagaagatgcagaatcctactctattacaaacctcactcatgtttcttttattgaaacctttttctactttatatttcctcttttgtaaatttttccatgtcatttaaaaaattttttactttagaattacagattagttctttttttaaagcattatggcattttc

SEQ ID NO: 375619 - DNA, 479 bp, Homo Sapiens
  misc_feature (429)..(429): n is a, c, g, or t
gaagaacttcatccaagagctattgtaatgtctgtggctaaggatgaagaaccagagagtatggatttccctgctcagcctccacctccagagccagttccctttatgccatttcctgccggcaccaaggccccttccccctcacagatgccaggttctgattcatcaacactggagagcacattgagtgttactgtcactgaaactgaaactttagataaacccatctctgaaggagagattttatttagctgtggtcaaaaattggcccccaagattttagaagatataggactgtacctgacaaaccttaatgatagcttatccagcactctgcatgatgccgttgaaatggagggatgatcctcctagtgaagggcaagtgattagggatgtcccataaaaaaattttcatggcaggtgcaattnttttctttttggttaaaccaaaaccggggtcaggcagttttcccggcaag

SEQ ID NO: 375620 - DNA, 873 bp, Homo Sapiens
  misc_feature (20)..(20): n is a, c, g, or t
  misc_feature (76)..(76): n is a, c, g, or t
  misc_feature (247)..(247): n is a, c, g, or t
  misc_feature (332)..(367): n is a, c, g, or t
  misc_feature (668)..(684): n is a, c, g, or t
tatattcgcaggcataggcncgaatacccgggtacgcatgtgggctgatgagcttctcctttgtgcagtgggaaancgtgccactctccggcttcacagatgcccccctgccaagatgtcagtgatgctgccgtcagtgaaccctcgaggactgctctcagtctctgagtctcagcaccaatgccaggaggacatggaatcttcgggggcagataccttctgaaccgggaagaggacagcccagcancagtgtttatgccactggttttaaagtcattttaccttggcttaaaaccctctctcagactgtttggtttttgagcatattctgnnnnnnnnnnnnnnnnnnnnnnnnnnnnnnnnnnnngcataatttgggtatttaaagtttttaaataaaataagtataagtcattataagtctgattgtgagttgtttcttagaatcctgagatagcatagagtagtgaaagggcatggcttttgacatctaggcatttaatctataggtgtaattatctgtatgtatttataaaattatgtagccccaaggttattccattctaacatttttataacagccaaatagaaaaaatcaaatgtcctatcaataatagactggttttaaagtgatggtacatcagtacaatggaatactatgtattacnnnnnnnnnnnnnnnnngtttattgatatggaataatctttgagatgcactgttaaagtgaaaaaagccatgtgcaaaatagtgtgtgaactatgcagttgttgaaattatttaaaatggggtggggaggaattcaaatgtatggtatgtcacatattcttacatgtatttgcttgtaaatatattatataaacaagaaactgtct

SEQ ID NO: 375621 - DNA, 470 bp, Homo Sapiens
  misc_feature (439)..(439): n is a, c, g, or t
ccttgggctccatggtgaacacctgtcagaatccggaaatcttcaaggagatgaacaatgcctttgctcacctaccccaaggggtgatatggaagtgtcagtgttctcattggcccaaagatgtccacctggctgcaaatgtgaaaattgtggactggcttcctcagagtgacctcctggctcacccaagcatccgtctgtttgtcacccacggcgggcagaatagcataatggaggccatccagcatggtgtgcccatggtggggatccctctctttggagaccagcctgaaaacatggtccgagtagaagccaaaaagttttggtgtttctattcagttaaagaagctcaaggcagagacattggctctttaagatgaaacaaatcatgggaaggacaagagatacaagtccgcgggcagtggcttgccagtgttcntcctgcgttcccacccgttcaggccccacat

SEQ ID NO: 375622 - DNA, 688 bp, Homo Sapiens
  misc_feature (36)..(36): n is a, c, g, or t
actgaacatgtctccttacaatgctccctgcctccnaccctcagaaatgctcctatgaaaatacaatcaagaaaagcaatttatgtggaagagcacagaacaagtagaagattgctgggtcatagctaagaacctgtatttcacactcaaaacccacatattcagctgccaatatgcccacctatccagaaactcaacctgtttacaccaaaaaatcctcaagagacttgcaggcaacctcaggctttggagacgagaaacagaggtgcaacctcaggctttggagatgaggaacagaagtgggacctcgggctttggagacgaggaacagaggtgcatcctcaggctttggaaatgagaaacacaggtgcaacctcagattttggaaatgagaaacagaggtacattttcgagttttcagtaccaccaccttttagaacctcaatatcctcatttgtgagatggaaatgacacaaattattgaggaaattttttctgagaattattgataaaatataaactccttagcctgatggctggcccatggtatatcctaaatcaagaataactaatctcataaaatagttcagaaaatgtaaccacaggaaggcagcatcccttaaagtgttagtaatcagaattaaaagaaacacacaccaaaaagcagcgtatgattggcaaggaatta

SEQ ID NO: 375623 - DNA, 513 bp, Homo Sapiens
tcatgccctgtgtgcttattgtattcttgctactgatgcaaacattatctataattacattttcaagtgactgaaaattgcaggctttgtggaacaaaaatacagccaaagaatggaatgtatattcactccaccctcattataaggctttcagaaatcagactgtaaggcccaataccatggctctcaactacgtgatactaactccattctctgatgtttgaacactttgtcaaaatgctgggtttccaatgatgatcgtataatttgaggaaaatgctattacccttttagcgcttcatttgctccattgttgactcaatcacagtggcacctcctcacacaagtcctctatttccaccctgtgaaacaaacacaatttgatttagatcgaagcatgataggcaaagttgagaaagttggttgaggtgcatgccttcttggggcaggtgcgattgcatccctgggacattatatgtctttacatctcccagctccatatagggcttagcc

SEQ ID NO: 375624 - DNA, 575 bp, Homo Sapiens
gaagccattgaataccctattgaccataagaaaaaggcagggaaagttgttcaacggcaacccaggcactgaaggaaaaagaacatggagaatgacaaaagcccagagggaggagtaaaaggacacaaacaccattctcagggaccaggactgggcgctgttctcagggaccaggactgggcactaatcacagaactgtaacaggcgccccatgggaatgaccaactgttagatggggcctgcagggcagcacctccctcctgcctcccaccaacagcttcttaaagggaaatgccgactcttttcacaccagtcccctcactgcggctgtttgtgggctcagatgataggtcacaacaacctgattcagtcctcactgtggctgtgtgtggaggggtcagatgacaggccaccacaacctgattcagtccccactgcggctatgtgggtggggggcagatgacaggcctccacaacctgattcagtcctcactgcggctgagtgtgtgtgggtgcagatgacaggccaccacaacctgattcaggattcagttgggctaccagtcagtgccata

SEQ ID NO: 375625 - DNA, 495 bp, Homo Sapiens
  misc_feature (49)..(49): n is a, c, g, or t
  misc_feature (118)..(118): n is a, c, g, or t
tttcggggaaccatagaaccctactatgggcctatatcccccatcaaantccatataatgaaaacttaaattgatggtattatgaaaatggggccttttggaggtgattaggtcgtgnagggtggagcgctcatgaatgggattaagtgcccttataagggcctgaagataccagagctctccccttctaccatgtgaagacacagtgaaaggtgctttctattaaccaagaagcagaccttccctagaccctaaatatgttgacaccttgatcttggacttcccagcctccaaaactgtgagaagtaagtttctgttgcttataagctgctctgtttgtgatattaaagcccagaggcacaacctccgctgcagctactcagttctgacactggacacaaaggcagtcaaggacaacatgtaaatgagtaagtgtggctgagttccaataaaattttcttctgagaaacaggtggtgggccagagttggtccat

SEQ ID NO: 375626 - DNA, 348 bp, Homo Sapiens
  misc_feature (20)..(20): n is a, c, g, or t
  misc_feature (174)..(174): n is a, c, g, or t
tgaattcccagactctgccncctggtttcctttctcatttctttcctaactgtagctatcattactggctgtggatagcccatagctattttccttgcttttcttttttaaaggggtctgttctgcagtggagaagacattctggtgaccagacttttgcttaccttttcctantctgttgccaatttttgttttccccacattctatagccataaacctgaagatgagtaaaactggtgggtctttaataaaacaacaacaaaaacagcagtttgtgatatagcagaggtttaaatgtaccctccccttttatgcacttcaaataattaaatctctttaagaatgac

SEQ ID NO: 375627 - DNA, 276 bp, Homo Sapiens
  misc_feature (104)..(104): n is a, c, g, or t
gaaaaagtcaaacaaaccttttatggtttcagttcacagacattactgccaaccttgttttaatcaactggttgctcttgcttactggacatctatggtatttnttcaatgcaaaacaacgagcaagctcatctgccaagaactccccccaggaggccagtggaaaagaagccatacttgtaagaattctaaaggaaacaagaactttgtaagggtaaacggagttacttccgaatttccctaagggaatccttattgtgaccgcttcagctgcct

SEQ ID NO: 375628 - DNA, 162 bp, Homo Sapiens
ctgaaaacttaaagtgctaaaaacaatttgaataattcagagtctttgctcaaggaactcaggaatcagtatatatttattaaaagacctaaggtaacagtaattgagtgtggactagatacttgtaaactacttatccattttaatcttaatttcacacac

SEQ ID NO: 375629 - DNA, 428 bp, Homo Sapiens
  misc_feature (406)..(406): n is a, c, g, or t
gttcaagtgccctctcctggctatgtcaatgaagtcaacagctgcaagtaagatgaagacgacactgataaattaaaaggcaaatggagcagtgaagtcttggtgcagaaaaatgaccctcagaggcagggctcaaagaagactgagagcagcagcaggacagctgatccatgggagccctgctggcctcaccaagggccgctcccacagggggacgctggaggggaacaccatgcctgcggtgtcaacggcatcggccctgctgccactccacagcccactgggaattccagccccacccaggatgacaggggctcctggggccagtacttgcaaatactgttcccccaacttcaacccttcctgggaaggaggggggcaccagggaaacaggactgtgtgctgnttggccttcagaaagggaccca

SEQ ID NO: 375630 - DNA, 507 bp, Homo Sapiens
  misc_feature (363)..(363): n is a, c, g, or t
  misc_feature (377)..(377): n is a, c, g, or t
  misc_feature (419)..(419): n is a, c, g, or t
  misc_feature (443)..(443): n is a, c, g, or t
ccagccacccctgtgaaagcggcgcccgtagccagacgccaaggctgccgtcccgagccgagggtggcaccttgcccagcgcacgtgcattctcctgtgggaactcggagggcatgtggtgagcagtctcctgtcagttgaggtggaggctcccggcccatctttgctctcctcaggctgcccagctcctggcggcacatggtggcctggcaaagctgacttggcctcctcagttccccacccatccgcggatcatcgccttccctagccacctctctctataagccaccgacatcttgcggagttcacagactggttctgagctgtggtttacaaatttcaacccaacacagagtgaattcnaaatttgctttttnggaacagcctttaattctccaattaaagtgcaagtatatttnacactatgtgatatttaaaggganttttccaatgactggggaggtaattggaaccaagatgtttgttaaagaaacggtggggtgaggt

SEQ ID NO: 375631 - DNA, 511 bp, Homo Sapiens
  misc_feature (385)..(385): n is a, c, g, or t
  misc_feature (459)..(459): n is a, c, g, or t
  misc_feature (492)..(492): n is a, c, g, or t
gtttctgattagatagtagtagagacagtatcctgttacatgtatgtacatagcccgaattattttcttaggatatgcgtatagaagtggagttgaagggtcaggaaatatgtccatttttaagatacatatatctccaaattgccattcttaaaggttggagttatacaagtagtgaatgagaatgcctgcttctctacatcctgggaagaggcagcagtctctttccttttttttcctttctatgacttctagtgtgggaagtgccaacagaagtgttttaggaaggcagtgataatgaacactcataacacccatacctcattcctgacttctaaaaggaaggcattaaggtaaggtgttgagggttctgggtagggtgccnattatttaggggtaaaggaaattcccctttaattcctttgccttgccaagggggttttccttcatccaccaggnatttgaatttcctaaaaaggacctttaaatggnttcctttttagggaggggg

SEQ ID NO: 375632 - DNA, 449 bp, Homo Sapiens
  misc_feature (396)..(396): n is a, c, g, or t
  misc_feature (401)..(401): n is a, c, g, or t
  misc_feature (410)..(410): n is a, c, g, or t
  misc_feature (433)..(433): n is a, c, g, or t
gtttctgattagatagtagtagagacagtatcctgttacatgtatgtacatagcccgaattattttcttaggatatgcgtatagaagtggagttgaagggtcaggaaatatgtccatttttaagatacatatatctccaaattgccattcttaaaggttggagttatacaagtagtgaatgagaatgcctgcttctctacatcctggaagaggcagcagtctctttccttttttttcctttctatgacttctagtgtggaagtgccaacagaagtgttttagaagcagtgataatgaacactcataacacccatacctcattcctgacttctaaaagaagcattaagtaaggtgttggaggtttctggtaggtgcctattttttaggttaagaaantcccnttttattcntttgcttgcctaaggagtttttntttcatccaacaggta

SEQ ID NO: 375633 - DNA, 558 bp, Homo Sapiens
tggagtcttgattgtacgtgcccccacttgcaccacagcctgccttgggttatataccataggagccacataactcattgggcaaagctttaaagtacatcctccttccaggggaaagaggaacacaacctcgctgtctcaaaacagttcccctaaatcaagatgttaacattcccctaggagggacaacaacaaggcccaacctgtttccaggcagttccctcccatatcaggatattgcattccccagtgcattcctacagttattccttaagaactacaagcaaggaagaagggagaactgggtcagtccaaggccacctggagaactgtcttgtacatgggttagggtaaagttggctattctaaaactaagcatccacccaaaagaagtcttggaagatgtctttccctgttaaattcagatgatggtaattatagtttggaagtggaattggcttttagagttacttcctgtaatgaaattaacaagcaattcaggcctatttctgaaaatgaattcagtggttaattgttaaaaataaatgtctaactcct

SEQ ID NO: 375634 - DNA, 428 bp, Homo Sapiens
  misc_feature (56)..(56): n is a, c, g, or t
agtaaagggggtggaggattgggtgtcaaaatgaggaccagtccaccataaattgnccccaatttgaagccatgccccaagtgatttttgtccagccccctttgggtccataaaattttgggtatagctattgtgaaatatagtgtcataaatttgtcataagccattaatgaaggaagagaagcagaaatttatttctgtgggaatgcactcaaatatcaagcagatggtgttctacaacatttatttgggaaaatgtgtatctgttacataatctgaaatatgtctttttcacatttaaaaatatttgggtcatgatttagagtttttattggattgttttttaaactgagaggaagaagaaaggtaattgtattttaaaacatttgacatgttactaataaaattttatttctggtgaaaaaaaa

SEQ ID NO: 375635 - DNA, 387 bp, Homo Sapiens
  misc_feature (375)..(375): n is a, c, g, or t
tccaaaggctctggctaagtcattatgtcactttttcacaggaatgtaaatttgactgtcacctctgaatttgttcagtgtcccaccatggtctatgagaagtacactggaagcgtggggggaacacatgacatgatttgtgaatatcatcatctttgccagacaagtctccaggggatccctgtttcccaactgaaaggtgtgaacggacacacacacagcctgggatgacgccttggctgttctaaggggctgtaaggtgggctctgggccttccagctaggctcttcaagcacagcagaagcctcactgggcttgctatggtcttctgtaatttgttggcttttgttggtagcctccagaaggaagagcttntttttgggcaaa

SEQ ID NO: 375636 - DNA, 419 bp, Homo Sapiens
tgtgaaaatggcaaacaaataccctatgtgtcactggattattggttaaaaacagaatgagattcccttgtgtgaaaatagctattatacctgacacactcatcgtatgggctctgcaaagggatattcccccaacctgtccttcccgacaggaagcatagggcactgcagatggggaagcatgtcaccttggcagtgactcggtggcttcccaagcaggagtgtcaggggaaccatgagagagagtctaggagccaaacacatcaccaccctgagcagatacaggagtgaggagggggctgtaactcagtgagtggcttcccagggccccaggccctgctggatgtgggccaagccctacagcttccctaggcagtaagtaaaaacattctcctagcattaaaatggtttccataact

SEQ ID NO: 375637 - DNA, 417 bp, Homo Sapiens
ggaggctggaagtcaaagatcaaggtgctggcagattctatgtcttgggagggcccacttcctcatttgcagacagccatcttttcaccgtgtccttccatggtggaaggcgtgatccagctctcttgggcctgttttataaggaaactaatcctgttcatgagatctttaccctcatgacctaattatctcccaaaggccccatctccaaacaccattacattagggattaaacctgaataatatgaattttgggaggacacaaacattcagaccacagcagctcttcttttattaagtcctccccttggtagtgtcattccctgtaggggcttacaaaggaataatccaatctggggggacagtgtggaacattcaaaatcaatttgaggggacaacagtggggtttataggcca

SEQ ID NO: 375638 - DNA, 463 bp, Homo Sapiens
  misc_feature (424)..(424): n is a, c, g, or t
  misc_feature (432)..(432): n is a, c, g, or t
  misc_feature (447)..(447): n is a, c, g, or t
ttttttttaatagaatgttccacaatttgggtttgtctgagattccttatgattagtttcaggttttccatccctgactggcatatagcataactgatgttgtgttcttctcagggtatcacctcaggaagcacatgacgtccatctgtccctcaccagtgatgtaattttgatcacctagtcatgatgtgatctggatactccaattagtgcttactttgtttccccttgcagctaataagcaatcaatagagagatattttgagactatgcgaaaatcctgctcctcctcaaatttccccctctaggatttcaggcatccgttgatgattcttgccttaactcccatttcaccagaagggctggcaacttccctctattcagttcaggcgtttctcctgtaggagttccaggccctctcttnttcctccnttgatatatcccatnttttaaaaggatccat

SEQ ID NO: 375639 - DNA, 1043 bp, Homo Sapiens
  misc_feature (1021)..(1021): n is a, c, g, or t
  misc_feature (1032)..(1032): n is a, c, g, or t
ggattggtacattcactgctgccaggtacccagagatgtcatctctctccaggtagagcatcaccagctcctgtggccttgtagatgactctgtacctcagtgaagagtgcaggcaagtagagtgatggggtcagtgtccatccagtttacgctgagtcagtccatacagcaagacacctggcacttggcaggtactcctgggatgttgatgagcaaggaagagcaacggccctgtcagctggcagtggtcctcacagccttcatcccaggtctgcctacgtgggagatctcatcagaaacaggaacggggatctgtctgtgcttgcaggaaagtccatttgtttttctccaagttaggtctcatctacagctcttagcttctcagtaaagaggatactctcccaaccagccaaggaataaaagctgatctgtatgtagggcagaagtgtggcaaatgcatcaggaaccggttagaacagaacagagaaaccctgactgtctacagattccaactttaattagcaagcctgtggagttacacaaacctgttgttaaaacatgtaatttttatggatttcatctcccgttgtggatcaatttggaaaaaccaaaatatgtaattttaaaaaactaaaacacatcctgggtagtcccagtgatgtgtaaatgagagagaagaatagacaggcttccaaaccctgggaagaaagctgcttaattatgtgaacatcttataatgaagtctcttgcagctaaaattagattttgagtgcatgaatctgtgataatgtttgcatatcagaatgcattctccccttaaaagtagcagtagccacttggttcttagggggccccaagaggagaggagaagtgctgaggttgatgttacgactgcaagaattctttgggacacaggtttgttttctgctgacttgctcggaaacccattgggaggtatctgaaatgtggatggactccaaaggggtttcatttcactataggggagaaattgatttcgtnctgacttcccnatttattcacc

SEQ ID NO: 375640 - DNA, 452 bp, Homo Sapiens
cagtgtttaaaaagcaacttggaaatttacacattagcattgtactttctagccctaatttgtgaggttgcagctatcattatattctgcatgtatgtataacctgttgtgaacaatcatacttaacaaaactactgatggtttatgacaacgtagggtaactacagttcattctgttccaggttatataaaactgcatttcctgaatttggttaaaaactaaggatgatggattgcaaaacagttcttttaaattagtttatatgctttaggtgttttggaatttgccttcttgaacttcctgagtcacacagaaagcaactgtacacagtagaattctgtggcgcagaccatgctgtattaacacatcacttgctgtttcctactgagtgtaccactgccttcccttcttagcccagggaggaatgttttactcagtttagtgtcttgta

SEQ ID NO: 375641 - DNA, 410 bp, Homo Sapiens
  misc_feature (379)..(379): n is a, c, g, or t
cccggatgatggagagcagtcctgtctgggtggaaacgtttactgggttaacacatttttcctgccgcggtctttctgagggctgtaatattcctgcctgtctgtgtaggccccataccagcttggacactgtggggtcacttggaaagggagcctttcggcaggactcccctcccactgggaggatgcttcagtccctctgcactcagacgtgttggaagcacattccacacgcagagtgtgttctcttctcccggctgctcctgctgctggcctgggacagaggagcctgttccatggcagggggtcctgagtgctgccacttgtagtatcgtgggggaagctgctcgggttcccagcttcttcttcaatgcccaantgcccaatgggttgcaattgacaagatgttg

SEQ ID NO: 375642 - DNA, 505 bp, Homo Sapiens
atcggaaaaaattcctttgaaagaactttgctgggacgtttggccgacctgggttgtaaactccaggcaacagtcaactgcaggcatagtcagcaccagcgcagcagggacggggcggtcctcactgacgtcctcctactgcagatgcacactgaggctcttggccccagagcgtggcgtctgcagttcatgccaacggtgtgtgcacgtccccggagagtgacagaggagagtggctaaatgtcagtcatggggaatctagagcacaggtgggcacgcttctccgatgaagggtcaggcaggaaatattcttggcactgcagccatacagcctgtgcctcagcacccacgggggaccacagaaggttggggaccactgctttaaacaactagctctcccgtgaagagcaggtccccaccctgctgtgtagggcaacagcagatgtcaatggcatatgaatgaacgagcgtggctgtgccaataaaactttatttacaaaaaaaa

SEQ ID NO: 375643 - DNA, 344 bp, Homo Sapiens
ttgcttgttaacaactttctctggcaatgcatctgaaattcaatgttggctgatctacagtactcctcaaaaccatataagtattttttataagcacatttaacattgtatcctgcagctgaatttaagacagggattccaagatcttggtagacttgtttccaaacagctccactttcaatattatcaaatcctccaagtttgtgtacaagtctgaataacttaaagagattcaaatttcgatatccaagtacaggtcgtttgttaatagggtgtacctctattcttccataaatttgtacaattgctggaaggaaagttctccctttcttctggggaaaggg

SEQ ID NO: 375644 - DNA, 471 bp, Homo Sapiens
tatttcctcttctgtcgttccccaactgtaagatgtttctaagttgaggagtccgttttgtaaatatgagaataaagcacgcatttattgctgaataagttgatctttgctttctaaagactccagcaaacattctaagttagtggttttcctgttgagaatctctatgtgtaatgagagatttgctgttgagattgtgttatacatgtgtaagtatgaatgcagacaaaaggttgaaggattactagtgtagggaatgaaggacctgctccatctgtaatcttgttttgcttgctcttccttgcccttctctaccacggttgggtcattctcactgccaagggaacctggacaatgttactcttgcttgggcgttttaagccttgggtgtgtaagggcattacaggaccagggggaaggagtctttcatccatcctccagtggatggaaggatgaggggtggttaggggg

SEQ ID NO: 375645 - DNA, 348 bp, Homo Sapiens
  misc_feature (56)..(56): n is a, c, g, or t
  misc_feature (60)..(68): n is a, c, g, or t
  misc_feature (79)..(79): n is a, c, g, or t
gggggacccctgtgaggggggaaaggggaccaattttgaaaatcccccttttccangggnnnnnnnnngggtcctttanggctttggccatgagggcccacattccagctgcctatttaaacttaatatcttgaacctaaagaatgcctgacttttcctacatttcccagagttaggcagtattctacacttaaagactactactatttttataaaaggtaatctattcaaatttcttcacagatttcaagtctctcaaacatcaagacaacttcagcagtcggtacaagtcacatttcattttgattgaatacatgatcttgaacagctcctgtacttgctctttgt

SEQ ID NO: 375646 - DNA, 529 bp, Homo Sapiens
  misc_feature (22)..(22): n is a, c, g, or t
  misc_feature (28)..(28): n is a, c, g, or t
  misc_feature (34)..(34): n is a, c, g, or t
  misc_feature (52)..(52): n is a, c, g, or t
  misc_feature (72)..(72): n is a, c, g, or t
aaacaatttgaacccctgttanggaagnaaaacngcctagagcgttcctacnggaaaaagtgcctaataatnggtccctaataactattccacactgtgttaattactatgtgcctatcctagttcctagtttccacaagcagtagaataatttccctacctctaagatgcactgagcattgacaaacaggaaagaataacacagctgggaaaatgctgacctagaaatgctactgtttcatgacacatacaaaatcaatcctcattttttattctaagtatttcagcgactagtagactttcagaactggaatttactcatcaaatgttctatccatatatgccatattagctttagctgagcttaccagttttctgaaaatgctctactatggcatgaagctaagcattccagaagcaagagcagtgattagaatagttccagggccagaggataagtttgaagatgaaatataagatatttcatgaattgtgacatatataaaatgatatcctgggtgtatatatg

SEQ ID NO: 375647 - DNA, 731 bp, Homo Sapiens
  misc_feature (136)..(241): n is a, c, g, or t
  misc_feature (368)..(368): n is a, c, g, or t
  misc_feature (445)..(554): n is a, c, g, or t
  misc_feature (605)..(655): n is a, c, g, or t
cttccttttcgtggagaacagagtcttgctatgttgcccaaggcaggtctcaaactcctgggctcaagctatcctcccgcctctgcctccctgagagatgggattacaggcatgagccaccgtgcccagcctattnnnnnnnnnnnnnnnnnnnnnnnnnnnnnnnnnnnnnnnnnnnnnnnnnnnnnnnnnnnnnnnnnnnnnnnnnnnnnnnnnnnnnnnnnnnnnnnnnnnnnnnnnngtgtgagccaccactcctggccaatacttctcagttaggacaaaggacatttcaagtgctcaagagccacagtggctactagctgccatcctcaacagtaccaatatagggaggaaatggatgggtnctgctaattttttttccattttaaatcttgtcatattctttgacttctaaaactgcctgcatgtattactgtggtannnnnnnnnnnnnnnnnnnnnnnnnnnnnnnnnnnnnnnnnnnnnnnnnnnnnnnnnnnnnnnnnnnnnnnnnnnnnnnnnnnnnnnnnnnnnnnnnnnnnnnnnnnnnncatgctactactgcactccaacctgggtgacagagtaagaccctatccctnnnnnnnnnnnnnnnnnnnnnnnnnnnnnnnnnnnnnnnnnnnnnnnnnnnagtacaaagttattagatgcaatacaagtaaggcaaccaaacctagactcaagatggacatacaaaatcaaggctt

SEQ ID NO: 375648 - DNA, 366 bp, Homo Sapiens
  misc_feature (148)..(222): n is a, c, g, or t
tggtaactgttgaaggaatggccagcctagtagcccactgtggcctccttgagcacttgaaatgtccctttgtccctaactgagaagtattggcccaggagtggtggctcacacctgtaatccctagcagtttggaaggctgaggtgnnnnnnnnnnnnnnnnnnnnnnnnnnnnnnnnnnnnnnnnnnnnnnnnnnnnnnnnnnnnnnnnnnnnnnnnnnnaataggctgggcacggtggctcatgcctgtaatcccatctctcagggaggcagaggcgggaggatagcttgagcccaggagtttgagaacctgccttgggcaacatagcaagactctgttctccacgaaaaggaagaaaaaaaa

SEQ ID NO: 375649 - DNA, 523 bp, Homo Sapiens
gatctataaaacaactaaaggtaatttttagtcttagccaagaaaagctaaccaaacaagctgcaaaaaacacagatccccaaactttctttattaaagagatttggaatatttttgtcaatgtatgacttttcagccacaattacatgtccatcattttaggatggcacccaatacttgggacacgatgatttaggcacccccacccaggtaagcaaactcagcattaaggatgtagttataaaattagcgcataatggtaggtaatgcagtttgaaaccatttcactcaggtaaaatgcaacctgaccacattatttaaaaatcagcagaattttctaataactactctgagtgcaacaacaagtgaaaaaggagctcaaagagtgctcattaagagtaacaataatttctagggaccttgactttgcatttgaggaaaatcttgtgtaactttattccattatgctcctaatatgctttctaatcccaaattaaaactctaatacaaattcattttgtag

SEQ ID NO: 375650 - DNA, 441 bp, Homo Sapiens
  misc_feature (64)..(64): n is a, c, g, or t
  misc_feature (71)..(71): n is a, c, g, or t
  misc_feature (376)..(376): n is a, c, g, or t
  misc_feature (411)..(411): n is a, c, g, or t
caagtcttaacctattattatcatggtaaatcttgtgactattgggaaggagagcagccagagntgacggngctgttggagacacagaagccataaggcagcgtgtgaaggcagacatgccccacccagctctaactcagtgctgagtggagggggatggggtgccggatctcaggctctgcttccttttgttcggatggagcctgagagagaggggacagctggctccaggcggagatgctgaagcagcagagggtgctggctccactgaccactccaccccgtctgtggggaaggcgtggcctccctggtgtgtaccccacagtcagggcctgagcctggccacagcctgcctcaggcctttcacagggaagtngaaggggaaggaggaaaggaggggggatgtgtgtntaacaatgacctccctctgtcctgtcctgc

SEQ ID NO: 375651 - DNA, 489 bp, Homo Sapiens
  misc_feature (429)..(429): n is a, c, g, or t
  misc_feature (454)..(454): n is a, c, g, or t
  misc_feature (468)..(468): n is a, c, g, or t
  misc_feature (477)..(477): n is a, c, g, or t
gctaaaggtcaggggaccctgggtgatacggtccacataggcagcacactggagcaaaagaagaaaaaccagcacaattcatcttattaccacttagcagccattcacaaactttgcttagatgggagaaaaatattttgtccccggcacaggggaaacataaaatctcaccagcagccatattgtctgggggtgatagcaatttagtcccactccctcctgcaacttaaatcataatgtagccagtcccgggtaagtggaacacttcctgtaaagcacaactgctagtgcccccttctgtggctggtcatgaggcccagagtggtaactggcagtcttgttctcccaccacccattccattagcccctctactttctgggcagtcccttaggtgttgggagattttatctgggtgggattgacccaangtttcattccacagagggtttcaantttttagtggcctntttttcaantgagtttgccac

SEQ ID NO: 375652 - DNA, 335 bp, Homo Sapiens
  misc_feature (22)..(22): n is a, c, g, or t
ttcccccaaaccaataaataangggtggacccggaataaatgggttatgtttccttgcacctaaggatgtttaaaactccgctgtaagtgtagattttagttttactggcaggatgaatcacttgacacataggtagatacttgaggttcattttcttttctttttctacatgatgatgaatagttatgttttcttctctgatttgttcaaagtttgccaaaagaaaacacaaaaccagtacagtacttactgataaatcgtagtgactgtaatttgtttgtaaggcgaattaatgctctacaattaaagctggattactattgaggaaaaaaaa

SEQ ID NO: 375653 - DNA, 504 bp, Homo Sapiens
  misc_feature (359)..(359): n is a, c, g, or t
  misc_feature (364)..(364): n is a, c, g, or t
  misc_feature (385)..(385): n is a, c, g, or t
  misc_feature (409)..(409): n is a, c, g, or t
  misc_feature (415)..(415): n is a, c, g, or t
  misc_feature (428)..(462): n is a, c, g, or t
  misc_feature (472)..(472): n is a, c, g, or t
  misc_feature (494)..(494): n is a, c, g, or t
tcaatgtcctgagacagacgccacagagagtgcgcctgacactctacagagatgaggccccatacaaagaggaggaagtgtgtgacaccctcactattgagctgcagaagaagccgggaaaaggcctaggattaagtattgttggtaaaagaaacgatactggagtatttgtgtcagacattgtcaaaggaggaattgcagatgccgatggaagactgatgcagggagaccagatattaatggtgaatggggaagacgttcgtaatgccacccaagaagcggttgccgttttgctaaaagtgtttccctagggcacagttaaccttgggaagttgggaagaattcaaagctgggtcccnttccntttcaggaggagggagggccntttttcaaaggcagcccagggttnagtttnaaggggcagcctnnnnnnnnnnnnnnnnnnnnnnnnnnnnnnnnnnngggatccccntttacattttgagttccacttngggaagttag

SEQ ID NO: 375654 - DNA, 388 bp, Homo Sapiens
  misc_feature (317)..(317): n is a, c, g, or t
  misc_feature (345)..(345): n is a, c, g, or t
gaataattagggagctactgaagtcattcaagcaaaaactgatggtagcctggataagactgttcaaaagagaaggtgaaaagtcattagattcaggatatattctggatgttaaaccaaccagatttattggcagattggatgtaaagattgaggggaagaagagaatcatgaaaaacccctaggtttttggcctgaagagctgtggttctgtggttttggtagacagaatgatgctccccacacccccaagatgaccctgttctaatcccttgggacctgtcaatatattactttgcatgaccaaaaggattttncaggtgttgattaagtttaagagccttnagctgggggagattttgagccaaggattttcaagccggattcc

SEQ ID NO: 375655 - DNA, 680 bp, Homo Sapiens
  misc_feature (50)..(85): n is a, c, g, or t
  misc_feature (610)..(629): n is a, c, g, or t
  misc_feature (665)..(665): n is a, c, g, or t
tgctgggaatacgggcatgagccacctcacccagcctgcatttgtttacnnnnnnnnnnnnnnnnnnnnnnnnnnnnnnnnnnnngagatgaagtctcgctttgtccctattgatttttatgctaaaaacagaatcttacaaatgtgatagctatatatccaaatgaggtggtctagtacaagcatttctgaaaaaatttttgaatgacaaaattttatcctaagcgatatgttttccaagtgaatataattctagtttaacacaacattgcaagtcaggtgtgcacattttactaacaaacatatatcaatgtgatttcagggccttctccagaagcaaaaggagttggaaagtagtctcctgcctttagctgaaaatcaagaagagagttttggttcttcattttaaatgtagaaaatcaaatccttcacatttgatttgtgtcttccaaattataaaatgtgctcactggctcaactgtatttttcaaatagcctagatttacttatttttttaaatgctcattaaaaacttgtatactatgtagtaaaatgctgtacttgttctatacaataaaacagatacttcttttgtaaaagcttagtagtnnnnnnnnnnnnnnnnnnnnccggttcttctgctctgtcaccacctgggtattgangccctataaaaacac

SEQ ID NO: 375656 - DNA, 513 bp, Homo Sapiens
  misc_feature (66)..(66): n is a, c, g, or t
ccagacaagattgactacataatcattaggcccagaacacagtgaaaatgcagcatcccttgttcnaaaaaaattattaagaatttcaagacacggcagcagagcattaaacccaagagtggggtccttctgaacatggggccctatgtgatggcacaggtcacaaaaccatggagccaaccagctctgtgcccagaccttctccagcaccttccagataaaagcttaactaagagctacatactttccaaaggcaccattgcttcttcactgggtgacatttgcaaaataattgcccataatgccaccatctaggacaatgagatcctttcagaattttctccaagcttgtatgtgtatatggatgtgtgtttgtgtatgtgtctctttgacacaggtggattgttcttaacaattgttgtactattgtgtcacttaaaattatagcaggagtatttctctgtattaataaatagtatttaagaataaaatttaaatatttacataaaaaaa

SEQ ID NO: 375657 - DNA, 451 bp, Homo Sapiens
  misc_feature (22)..(22): n is a, c, g, or t
  misc_feature (50)..(50): n is a, c, g, or t
  misc_feature (60)..(60): n is a, c, g, or t
gggcaagcagagccattaaaancccaaggagtgggggccccttccggaancatggggggnccctatggtggatgggcacagggtccacaaaaacccatgggaggcccaacccaggctctgtgccccagacccttcctcccagcacccttcccagataaaagccttaacctaagagcctacatactttcccaaaggcacccattgccttccttcactgggtgacatttgcaaaataattgcccataatgcccaccatctaggacaatgagatcctttcagaattttctccaagcttgtatgtgtatatggatgtgtgtttgtgtatgtgtctctttgacacaggtggattgttcttaacaattgttgtactattgtgtcacttaaaattatagcaggagtatttctctgtattaataaatagtatttaagaataaaatttaaatatttacat

SEQ ID NO: 375658 - DNA, 464 bp, Homo Sapiens
  misc_feature (35)..(35): n is a, c, g, or t
  misc_feature (59)..(59): n is a, c, g, or t
  misc_feature (140)..(140): n is a, c, g, or t
  misc_feature (146)..(146): n is a, c, g, or t
  misc_feature (182)..(182): n is a, c, g, or t
  misc_feature (188)..(188): n is a, c, g, or t
  misc_feature (213)..(213): n is a, c, g, or t
  misc_feature (215)..(215): n is a, c, g, or t
  misc_feature (229)..(229): n is a, c, g, or t
ctggaatggcttcctaacaggacgggcctggcccnccaatatattgcctttcccccatnaacccccaaatatgaaagcacccccttcatatatgaacgtttacctattaacaatgtggcctacattttaccccaattaanggtcanagagggatagggcactttccagaaagcctatcctgnaatgcnaaatgtttgaagaagaactgttctnanatatttagagcagnagagattagctggaaatgcagggcagccatcacaacatctgtaagtatctcatgaaagagcaaactaaagagacaatgtcacagggaacaccctacagacaaatataaataaatgctaaagaataaagtttttagttgaagacacattctttaaattttaaaaattatgttacttaataacttggtacaaagtgcttgaccatgttgacattaccatgaaaatatctcatagctg

SEQ ID NO: 375659 - DNA, 462 bp, Homo Sapiens
  misc_feature (292)..(315): n is a, c, g, or t
  misc_feature (345)..(345): n is a, c, g, or t
  misc_feature (378)..(378): n is a, c, g, or t
  misc_feature (393)..(393): n is a, c, g, or t
  misc_feature (409)..(409): n is a, c, g, or t
  misc_feature (428)..(428): n is a, c, g, or t
  misc_feature (442)..(442): n is a, c, g, or t
actggatatataatttggaaatcccttccaaaactagtgtacttaaaaattgacactttattcttaactgaaaagccatataaccatgttctatttctaactttacattcatttaatcaaaattatcaatattatggttacaaattaaaccatagtgttttaaatatataaatttacttagaagccttaaaaataaagcaacattaatcattactatttgcaactccgtattttcaaaactaaactaggtctgtgactagttatagggttctctaattcatacctactctgnnnnnnnnnnnnnnnnnnnnnnnngttattatttagggacctccgggcttaccnggtctccaaaggtgacccgggctccaagggtgnaaaaggggacatccngggtttaattgggccnggattgggtcctcccgggnggaaccaggggggnaaaagggtggaccccggggc

SEQ ID NO: 375660 - DNA, 433 bp, Homo Sapiens
aaaaaaactgtccatggaaatccaatacccccaaaaattgatccaagtcccctatgttgatgtccatggatcaatgacctttggtgatcagaatccagaagttcggatttgaagttggtccctgtttgttttccttggcctaagattaagacaaagaacatatcaaatcaacagaaaatataccttggtgcccaccaacccattttgtgccacatgcaagttttgaataaggatggtatagaaaacaacgctgcatatacaggtaccatttaggaaataccgatgcctttgtgggggcagaatcacatggcaaaagctttgaaaatcataaagatataagttggtgtggctaagatggaaacagggctgattcttgattcccaattctcaactctccttttcctatttgaatttctttggtgctgtagaacac

SEQ ID NO: 375661 - DNA, 344 bp, Homo Sapiens
tccctttaaaatgtttaatattttataaataggcagtatatgcacattatacaaaactaaaaaattatgacaattcagtgtgaagtaagttctcatccaacatttctcctggccatccattctccatctttaaaggcaatcaccattgccagtttcttctgtatccttctggaaatacaatatattacataaatgacagcattctatattctctcttctatatcttacctatttctgtgaataatttattttggacagcattttatgtatgaatattcacaaatgtgcttccttatttcagaggctgaactaataaaaattttgtttatttttgtgttgaggca

SEQ ID NO: 375662 - DNA, 466 bp, Homo Sapiens
taaattctggagagtgctggagtaactcactcttaggttcattttcacacatatattttacacaaaatatacagccatcacttcacatgattctcagtcacctctgaatctcatctttcatcccaggggttagtgccttctcatgctttgattgctattgctctatacaggctattacataagaaaatattttgcagttttcttcaactaattgcctaagaaggtgtcaatgctaccaaaatcaatacagcctatctacataatatattcatagaaatgtgctgagaggcacccacttacagaactgctcattgtgacactggaagttaccctgaaggcaaacttataaattttaatgtataccatttttaattgtcaacactactaaacccagaaattattagaaactgaggtaataccatttttttaagagatagaaatatttgaaaatacaccaaaggtactt

SEQ ID NO: 375663 - DNA, 592 bp, Homo Sapiens
  misc_feature (19)..(19): n is a, c, g, or t
  misc_feature (484)..(484): n is a, c, g, or t
tgtagttcaacaaaaaacnacatgtttatatacatttggaaactgcaatgataggaaacatttggaagaaagggattttgccctagaataacacataaggaaagcagagaattagagtatattgttactgaatgttccagagacttctagtgattttaacacttattaagtatagcatgttgatggggagatttgtttctctaaagatcactttgttttattaaatcctaatagaaaatacccttgaaaatcctatctcatttattcctgtaacaaatttattgagcacctacctactatatgccaagaaatgtattagccatcaggcaggagagctgttcaaatggtagatatgatctgtgctcctgtgaaacttctagtggggagagccaaacaataaacaatattcctttttaactctagggttaatgcaggaaatgggataaagcccatgttgcttttggggagagggtgagttgtgtcntctggaatcacatggcatttcatagggggggaaaaatgccccaaatacttagggagtaggctctttagcctatgtccggtcggcctcagcttaaggttgtttttccct

SEQ ID NO: 375664 - DNA, 578 bp, Homo Sapiens
  misc_feature (15)..(15): n is a, c, g, or t
  misc_feature (32)..(32): n is a, c, g, or t
gattccctaagcctntgagggacttaagtgtnctgaatttccacacattgaggatttcaaagaaatggaataatttgggaggctcagagcacatacagattgcctttaaattagccatctgctccctcggcaccttgtaaggtgacttccccagataccctcagttttcaaaagagcaagcagggcgtgcaggggctggcatccctgacctgtggctggtgcggcacaggcacacacatcctaatgaaagatgacagggcacgctgtccacccgggacagcacgctcggcagcagcctcaggacccagtgaccttctctgcataatccaactgtgggggtaggaaagcctgaggccacctctaaggaaagcccctaatttcagatcctggtgagtccatactatgcgagaaaagcaaatctcccgtgggctgaaagtgtgacaaatcttagcatttattttagagcttgcaatcaggaggttttctcttttaaaacacagaaaatcccctgaatattttacttctctctctccagctcctttcatagaattaaaaataaattaaccattcaatgtgat

SEQ ID NO: 375665 - DNA, 493 bp, Homo Sapiens
  misc_feature (17)..(17): n is a, c, g, or t
  misc_feature (34)..(34): n is a, c, g, or t
  misc_feature (39)..(39): n is a, c, g, or t
  misc_feature (52)..(52): n is a, c, g, or t
  misc_feature (57)..(57): n is a, c, g, or t
  misc_feature (63)..(63): n is a, c, g, or t
aaagccctccgccaaangtataacccccagggancttanccctatgatggtnccctntacaangggttgttgaaggaattgggagaatagtttgtataaccataaaaccataaccaaataccagtagaaagccatatgggtagtgggattgaaagaaaccccgagaggttatttatccccaaacacccacctgatgttacagtgccttattgagtgattgatactgtgtccctacgtagagggggcacataaacaattcacatgtaatttttctgtattacattgacagatatatataaaatgatctctgcatctaaaattcaagcagtccagcctggaatactatcaccaaaaagtgaaaactgattttagaaacgaataatattttgttgtgaacaactctgaaaacatactggtcgatgaggtttatagctagagtctaaaatgccacatttatatgggtgaaacattttcagcttcaggagaaaataaa

SEQ ID NO: 375666 - DNA, 476 bp, Homo Sapiens
catggtggtccactgttatcctatgccaggggtgctaagaattgcatgatattcatcttccctgctctatttaaatttacatctataagagtcatcttgacattaacactgaaatgtgatcctaggtcccttaacccaaaattgctgggcaacttgtaataaatttagacagaaattttatgagtacccacaaagccttggtgttaccacatcaccagaaggatttcttaggaaatgtcttgccgagagagctggctctttgcatatagatgtctttgtcagaaaaccaacccttgctctcacttacacagtagtaagcactgaaagtggttcagttcatgagaggacagagaattattttgagattatatttgaatgtaatcttgcagagccaaatatggtatgtcattaagttggaaccttgtaaatagctgttccatgttataaaatgagaaactttgtaactggaaaaaaaa

SEQ ID NO: 375667 - DNA, 454 bp, Homo Sapiens
  misc_feature (352)..(352): n is a, c, g, or t
  misc_feature (370)..(370): n is a, c, g, or t
  misc_feature (376)..(376): n is a, c, g, or t
  misc_feature (390)..(390): n is a, c, g, or t
  misc_feature (405)..(405): n is a, c, g, or t
atttctgcctcattctcagctgagattgttacttatatttttatccacttgaatcttgaagttaaggtaagctgaatatatctaattgtctttcatacacattactttgttctacagaagaaatttattaatggagtaaggtgaatatgataaactcaaagcagattttcttcttatgtctgcccctgaatccaaaattgggggtgcctgctataaaatcaagtatgtttatggaaaaccttccctctcctattaattgctgggagtattcattcagaggctctcacttggctatataaatttctaacccaaacactttccaggggggatgtaccaaccaggggaggtacanggggccaacacttccaanttcaangtccctaggagggngggggattttacccnctcctttagggcttaccaggcttccatccactgggaacggtttcaggga

SEQ ID NO: 375668 - DNA, 248 bp, Homo Sapiens
  misc_feature (18)..(18): n is a, c, g, or t
  misc_feature (37)..(37): n is a, c, g, or t
  misc_feature (57)..(57): n is a, c, g, or t
  misc_feature (162)..(162): n is a, c, g, or t
tccccattatgaaaagcnattacaaacatatatgganttatataaaggttgatgacnatatgcctttttatattagaaaatcatgtgaaaacaaaattaatctgatgaatgctgttaattattttaacttttttattaggtataaaatgttcataaaattantctctctataacttaccaagatttattagcttgtgtaatttttataatcagaggagtctggttttctaattaaagttttgtcaaag

SEQ ID NO: 375669 - DNA, 427 bp, Homo Sapiens
  misc_feature (289)..(289): n is a, c, g, or t
  misc_feature (317)..(317): n is a, c, g, or t
  misc_feature (358)..(358): n is a, c, g, or t
  misc_feature (375)..(375): n is a, c, g, or t
gacgtcaggagaagacgcaggaggatgcaggaggacggaggcggggaaccctggggctcgattaggcctccatcccagccgcgttcccagagcatccagggcgctaagttgatccagctgaaactcccacacttcttaaagcgcctgggccacctcttggctgtgtgaccttgagagagtcttaacccccctctgagccaagttttcccttgtgtcaagtgggagaactcactctcatctcagaattgctgcaggcattaaatgtacagggcttgggatccgaatgganatgatgtattaacgatattttgagggtnggagctattaatttagcccctactgtctgccaggcacggtntttgggctcctcgggtncctctctgtccctcagttttccatttctgtcaaaaagggggtaagtcctgcc

SEQ ID NO: 375670 - DNA, 289 bp, Homo Sapiens
  misc_feature (56)..(56): n is a, c, g, or t
  misc_feature (177)..(177): n is a, c, g, or t
aaaagagaatgtgaagcagatcaaggaaacttctgttgagctaggctcagggtganctttggctggggttgcccttgtgtagtacagggaagtctgacacagcctctccagcctataaacagccggggggctgtggcacaggttggggcaatgttcccttgttggtgggcccccaanctggcaaggcctcttggctgaaggccagggactctgcccctggagtcctggagttaagggatgaaggcaaggctgcaggtctggcccaggggaattaaaagccagccactcc

SEQ ID NO: 375671 - DNA, 369 bp, Homo Sapiens
gaggaatctgtccctatgacccaaatatctcccagcaggccccacctccagcactggagatcaacatgaaatttggggggaacaaatatccagcctctatgattggtttggagcaatgagatcaattacaccaacaagccaagcatttctcttagtatcctatggtcattgctaatgcatatggtcattttgacagctgtggtttctccttcatattcatttgggactcttcatagggtctcgagagacatgacaatactgttcaaaacgtctccaaggcaaaattaattttattccgttgactggaaatatatcacaaagaattgagggtttttccagtcccacccacaagacagtcctctgaaaagt

SEQ ID NO: 375672 - DNA, 458 bp, Homo Sapiens
agggccccaaaaaaaagggggcccccaaaattaacccagaaggttggtccattttggtgggtttaagaagactggtcctggtaattggctgtgttccagacatgattgtggaggggtcttatttttgtcttgccctattgtagtcataaagtgaactataactgatgttgatgttttgtgggactgtttatatttgacaaaacaatgagaactgagaatgcccaggacagctgccagtaccacaaatgcctagctaatagtgccagtccagctcctggctgtccggagttggtttccactgcaactccaccctctctgccccccaactagcaaagccatcagctgctacaactgtctctataattctaatttatgactcttattcataattctgtatctttaacatttacaacattagtattattatttagcgtactgagttccaaaactcattacag

SEQ ID NO: 375673 - DNA, 425 bp, Homo Sapiens
gcaaagtgcgtgcaccacatcctagaaaatgacaggatcaaaacctgaaaggtcaaatctctcgccaagtcaacgggggtaaggatgaggacaaaatggtagctttctccctcaccctctgctctgaaaagggcaggggcttctcaattttattcatcacagtcatgggaaagccacctggttgaatggcacaggagggtataaccagactccctggacttgtctgtgagcctcctaataatgcccaaagagaaaggatagcgcttctcaattttcacctctcttcctcatccacacttccactgccttagttcagtcagactggtctccatgctgctactctatattgcccagttcatcttctgtatagctaacagagttctttctcaatacacattttttaaggtctaggaaatgacaaaaaa

SEQ ID NO: 375674 - DNA, 349 bp, Homo Sapiens
  misc_feature (17)..(17): n is a, c, g, or t
  misc_feature (318)..(318): n is a, c, g, or t
aagaccagctgtgctancatgcagaagatgctgtttgaggaacgaaatcattttgccgagatagagacagagttacaagctgagctggtcagaatggagcaacagcaccaagagaaggtgctgtaccttctcagccagctgcagcaaagccaaatggcagagaagcagttagaggaatcagtcagtgaaaaggaacagcagctgctgagcacactgaagtgtcaggatgaagaacttgagaaaatgcgagaagtgtgtgagcaaaatcagcagcttctccgagagaatgaaatcatcaagcagaaactgaccctcctncaggtagccagcagacagaaacatcttccta

SEQ ID NO: 375675 - DNA, 445 bp, Homo Sapiens
  misc_feature (17)..(17): n is a, c, g, or t
cccccggccaaccctgnccctaacctgggccccctcaaattccttgtcctccctcctacaccctttgaatagtctcacacccacatcccttatcacacgtgttgttttccccagtgttccatagtctctttaggagtaaaatatgtctattctgtttgtctaataataatctggcagaaacctcactacaggttatgccagattattatgggttatgctaagtgttatgctaagtgaaaggaaccagacataaaagatgtctacatgaataattctacttatatgaaatgttcagaaaaggacaatgtataaagacagaaagcagtttagtagttacctggggctagggtaggaaaggagattagaatggggattaactgtgaataagcaggaagaacttgggcacttggataatagaaatggccaaaattaaattgtggtgata

SEQ ID NO: 375676 - DNA, 511 bp, Homo Sapiens
  misc_feature (21)..(21): n is a, c, g, or t
  misc_feature (35)..(35): n is a, c, g, or t
  misc_feature (87)..(87): n is a, c, g, or t
acaccgccattaaaacataangggccaaagtgccncctagaacaacctgtattacctttgaaaacccactgtggacccaagggacantttgaaaagtcacactgagattggagatacagtgtttttagagaaatgccacgactgatttaagaatgccttgttccagatgaagaaacagacttaggtggccatgatgaggtcattccaagtcgtaaaaatttaaaaattctttctgcaggagaagacaaggcttctggcagattttctgagtctatattcaagatccaccccactaactgagaatggctgccttgctgatttgactgttactgtagaactgaagataaagcgaattttggagttgtttgtgtgatctactagttactagaaaaatcacaggtttataatgcagctaatgggataaacagactttgattttagggcagtgaagactctctgcatgatggataatgatactatatatataaataaatgtatatatatataaaag

SEQ ID NO: 375677 - DNA, 391 bp, Homo Sapiens
  misc_feature (260)..(260): n is a, c, g, or t
gatctctgctaactttggtaaatggaaccctaaaagtggtgagctttggataatgccattttggggataccaaaaccatcgccttcatcactttctagaatgaaaggctgggggcattgctcaccttttgcgtgaagaaaagacctgtcccttagagccagtttttgcttaaggggaggacagaccgtcgtcacccagtggaccacgtgaatgaatggatgcagtgcatgctttagaagcaccgcatacctccttttacnaggtacagagtaagtggtctggctactgagggaaagagtcatgatttgaatccgagtcttctgtaagacaatgacttcatgaaggtgaaaaatcagttttatggttattaaagtaaaaatttaccttgggt

SEQ ID NO: 375678 - DNA, 916 bp, Homo Sapiens
  misc_feature (17)..(17): n is a, c, g, or t
  misc_feature (881)..(881): n is a, c, g, or t
acacacacacatcctgnccctacccctggctggtaaaaaatttgttacatcctgatgggataaacatcccgctggccaaatttcattttcccatcctagtgtctgtctcccagcaatggttgacggtcttgttatcatgaactgtagatagcatgtgacttgcttgtaaccacaaccatggaggtaatgcattcgtgctttgaaacccatggggacggacgcaggctggtccacgggttcagaaaaaggtttcactgccatttcccagtatgagagtttacaaaggtgttcatcaggtcacctagctggggatctaatgctccattgttggactgtagcattgctctgatgcttcaaccagctcctcagcatcccacctgtcattctgttcccatgcatttaaaataagaaggacaatctaaatagtatattccccagcacaacaaaaaaaatttttcaataattttgtttttgcttccttttatttaagaccttgaaaaatttatagttatagcactctgtgtaagacagtgcaaggaagtaaattttaaaatacctcatcttctgcacatgtattgcacagtcattatgacagggttcaaagcaagaaaaattaaaaactcgtctggcttttgtctcaaaaatttatctggcttgattgaagaaggccaaattgtggagggaaaaaaatggcagaagcactggccaaaaactctgataaaaacttgagtgtatttatttggccagagttactagctcaaaatttatgttcttcttaattccttcgtataggagtcaattaaaatggcccaatccaattctatgttgaaagaagagccatagctttgtggaaagttgagaatttaggatgttttcatgcngattttcattgtcctctcatgtttaaaatgacaga

SEQ ID NO: 375679 - DNA, 324 bp, Homo Sapiens
  misc_feature (303)..(303): n is a, c, g, or t
gtgtgcacccggtggggctggggtggggactgggtacggtcatctccataaagcatttagttcaaggcctggcctggtaggcagcactcaacagctgcagggacggacttccaggactcaattttctcatctgtgccatgctctgtgcatgtcgttggggagacagttccatcttatcccgccagtgtgtctcctcagtctcttagaagccaccctaggcaggggcaggggcaggggccggggaggtgaggtctggcttcttattctgcctgggaggccagggctgtgcttgtggactttgtncctgtagttgtgccaagtcct

SEQ ID NO: 375680 - DNA, 490 bp, Homo Sapiens
  misc_feature (139)..(139): n is a, c, g, or t
cggaaccagatgagacatagttctatttggggacaatactgctgttcccgtttctctcctgtgccctagttttagaaacggagtgggtttggttaccagttggccatttgcagcgagctcccccctccgcccaactccnaccccataccttaaaagctgtgggcatcgcgggcaaaaataggactcagtgcctcccactgggagtggctccctggctctgcccctgggttctctgggtagggagttggcagctggactctctgttatccaccggtgatatctgggccttgtgatgggtgctgggaaccctgaggatgtacttgggacatagcttatattctgggggagccagagagactccagtcatttccctatggcacgatggggtaggggccatatgaactatggcaacccagcacaatgccaggagagcttcccggaggaggtgatacctggcctggatcttaaaggatgagcaggagctcatgag

SEQ ID NO: 375681 - DNA, 319 bp, Homo Sapiens
  misc_feature (34)..(34): n is a, c, g, or t
tatgaaaccatgctcaaaatgctgactaattganctgaaaaaagctgggcccccaacccaacccagggctgccctgatcttttgcataaggataaactggggttcaggcgcttttctgtggcctaggcagaaactgggctggaatacaggcccccagactcctttgtggagggagggaagggaaggaagaggacagatcactctacccttccctaccactgcaccatgagaccctgggtctccatctcccctgtcagtgtgcccagggtcctcacagattaaaatcaagaataagcggcggggccgggcactgtgctca

SEQ ID NO: 375682 - DNA, 460 bp, Homo Sapiens
  misc_feature (25)..(25): n is a, c, g, or t
  misc_feature (31)..(31): n is a, c, g, or t
  misc_feature (59)..(59): n is a, c, g, or t
  misc_feature (65)..(65): n is a, c, g, or t
aaagttccaaaactgccttcatctnaaacgntacctatcacccaccacccacgtgggangcccanaatacctgtgtctcttgagcattgcttcaaaacgcctctcttgctgtcactaaagcctttaacaaccctgtatcctgttgtgagggaaaaagaagagtttcctgccactgctggactgcaatggaggaatgtgtttggctagatttctagaagtcaaaagtataactccacacaaaaagatgttaattagtccataatgaggctgaaacactcatactattaatggcactacagaacccatctgtaattcatattacattgttgcagatagttaattcacaaacgcagtcataaattgtagattgacggtactagaaaatagctttaaaaatgtcaggacggattagcgtatggacttcaaagaaaattggtttattatttgtttatttgattaa

SEQ ID NO: 375683 - DNA, 372 bp, Homo Sapiens
  misc_feature (22)..(22): n is a, c, g, or t
acatactaacttttttaaatgntaggcataattttaggtaaactttctccttaatctttccttctcctcccaaccttttaccccatcctccttcctttcccctcaaccctgttgttatttgagaatgagggagaaacagtattttacatttatgtaattaggcttttccgttagttctcaaggatcctcttttggctcttgggaaagaattgtacctgtacaaggcaattatagaatgcgaactgctttgcctcattccatactgatcatcccagctgaacaatttgaaaactgttctgcctttttgttacatgaatctgtcagaaatatatttttaatttaatataaatgaaattcaataaaatatgaaac

SEQ ID NO: 375684 - DNA, 314 bp, Homo Sapiens
  misc_feature (157)..(157): n is a, c, g, or t
caatcagccacaagctttcatatcactttctgttgacttgttaacagtttaagtaatcacaggccattctggatcatgaaggttcttaaaaggaaaccagtgagtggataatacagggaaatgaatatttggtattcgaagctactgtctctttgtncttgatgacttagatacctggttgtattgctaaggttaagcaatattgccttctgtagatactgcttagctccagattggtgtgatgagttagtctagacttgtggaatattctcagaagctggccctggactaacaggagctggagataatgcaag

SEQ ID NO: 375685 - DNA, 401 bp, Homo Sapiens
  misc_feature (336)..(336): n is a, c, g, or t
caccagtcctcgcaggaagtctggccgcttctctttacccacctggaataagccagacctaagcactgaaggtatgaaaaataagactatatcacagctgaattgtaacaggaatgcttctctgtcaaaacaaaagtctttagagaatgatctatcactgacgttgaatttggatcagagactctctctgggttcagatgacgaagcagatcttgtcaaggaacttcagagcatgtgctccagcaagtctgagtctgatatcagcaagattgctgattccagggatgatttaaggatgtttgatagttctggaaacaaccctgtactttcagccanctattaataatctgaggaatgccagtgtcacaaagggggtcagtcctcttcggcagccttcaact

SEQ ID NO: 375686 - DNA, 436 bp, Homo Sapiens
  misc_feature (396)..(396): n is a, c, g, or t
gtaatggctttactgagatataattcatataccatacaatttacaagcaatttttacaacaagataaaataagagaactaacatttcaggggaccctatattatgtgtcaggcactttattatcctcatactggctttacaaaatacacatcattagccttattttacaggtgaggaaattaaagctaccggagttaggtaaccttcccaagatcacccaggcgatgagtggtaatgcgctgggctgtgctctggtttttctggggccgttacccatgtactttactttattccgtgccacactgagattccacactaaccactaatgaattgtttccaagaagagatcctttagggggttttgcttttaataaatcgatccagtctttctcagtntgggcattttggataaaagttttcgttaggcttgggcagt

SEQ ID NO: 375687 - DNA, 370 bp, Homo Sapiens
gttggatctctggattgtgttatgtcagtgttggtaggttaggaactagatttcccagaatccattccatttgtgattccatgatacaattgaccagtaacctatcttacatgagattcggaagtaagttaagaaggcattagtcatggtttggaagcaccatacagggagacagctgtgtgaatacaggctgtatggacacttgcttccatgccattttcctgcttctttgggttgccaatcaagagtatcctcaaaacgacttgactttaattttctcggaggtgataggcttccacacaggtctccagaaggcctgcattgaatatccatccacactttggttttccttcagacattattatgtctg

SEQ ID NO: 375688 - DNA, 432 bp, Homo Sapiens
  misc_feature (363)..(363): n is a, c, g, or t
  misc_feature (374)..(374): n is a, c, g, or t
  misc_feature (384)..(384): n is a, c, g, or t
  misc_feature (414)..(414): n is a, c, g, or t
ttggatctctggattgtgttatgtcagtgttggtaggttaggaactagatttcccagaatccattccatttgtgattccatgatacaattcaccagtaacctatcttacatgagattcggaagtaagttaagaaggcattagtcatggtttggaagcaccatacagggagacagctgtgtgaatacaggctgtatgggacacttgcttccatcccattttcctgcttctttggggtttgccaatcaagagtatcctcaaaacgacttgactttaattttctcgggaggtgatagggctttcacacagggtctccaggaaggccctgcatttgaatatcccatcccacactttggggttttccnttcaggacatnattatggtcntgtactaggggggaacttaattcaggactntccgggggttggggggat

SEQ ID NO: 375689 - DNA, 550 bp, Homo Sapiens
cttttaggtgttgatgctgctgaaagtgtatattaaggaaaagcttacttaccttactttttgtggaggtgctagaactacttctgtcttgtgtctagatttcaagaaacctttgcatgggcattatgtggttgcacaaatgtacttcgttttgacctgaaaatgcaaaaacttcctttcttcccactttctgagactctgcaaccttaaaggaagagtggggttctttaaaggaaaggtggtggtggttgggtcatgggtaacaatgtctactgtgtacttcctttcccaaaacaagtccctgtctaccgtcagcatttccaaaatttgaaggtcaagtgtggtgttaactcatgaactaatgactagactttgagcggttgtggaagcaaaatctcagtgagtgcctggatgttctaattctgttaagtcagtgagtgcatattctgtacaatactctcttagcccagtggcaggtttaaggagtgggagagagatttctatgtttcggaaatcagatacacaaagaataaaaatttttaatcccatg

SEQ ID NO: 375690 - DNA, 388 bp, Homo Sapiens
  misc_feature (19)..(19): n is a, c, g, or t
  misc_feature (361)..(361): n is a, c, g, or t
gagagagaactgtccagantggaatggacaaggcatagcagaaagtacggtggtacactcaaggcactgtgaacagcagtttattattatttttcccttcatgctgtcttttggggtccttaggaaatggactctgttgtccttcacaagcccagctaggccctggaacaaatggcctttagagagttcaacagtatgaaactcctactacgagtaaatcaatgttaggtgttgtggggtatgtggaaaagtgaaaaaataatagtccctgccttaaaggacaagaaatgattttccctttatcaaatgtccagggaaggaaactgtgggatgacactgtggcagtgaagtctcacatctngataaaaggcagtgggctctgggcagc

SEQ ID NO: 375691 - DNA, 637 bp, Homo Sapiens
  misc_feature (435)..(435): n is a, c, g, or t
  misc_feature (453)..(453): n is a, c, g, or t
  misc_feature (537)..(537): n is a, c, g, or t
  misc_feature (572)..(572): n is a, c, g, or t
  misc_feature (605)..(605): n is a, c, g, or t
ctgggtaaatactatggaaccttcagagcccattctgttttagtgaaatcatgtttatattgaagtcgaatctgagttctggagtgtcatttccaacaacatgaacctctgtccatggtgaaaatattctgaacaaaactgaaattgttacataactcatgccttttgtctttaacccaaatttcttattcccactatatagaaaatcaatatgaatttgtttcagaagagtgattatatcttttcatgagtatacctgtatttctagattaaagagattgtgtggctttgttctacagaaggtttgattttgtctcacctttcagtgaggaaagagaaaagaaagacacttcagattttaccctaagggaaatatactgttgggcgctccattcatctaatacctttatgaggggcctactgtggggtaggganctctctctctgcagggcntagggagggaaagttgttgccacctgccaccgtgggccgcctgaggggtttctgataggtcatgtgtaaggttttgaatgggcnggaccaaggctggattcaggcacacatctttgccnaggccatcccccgtgtgcaatgtgtatggtgtngggtaccctgtaaaaatgcaccccaaaggggg

SEQ ID NO: 375692 - DNA, 366 bp, Homo Sapiens
ctcccccagtaccttaagaagccacctcaagtccttctccatggctaagggcctgaatgcccaggatgatgcgaggcctctcctactccctcaccaccagctccactcacaagagcagcctctgcaaagtggagatcgtctgcccaccccagagcccacccaaaaactgcaccagaaacagctgcaaaatttcttaaggaaggcaccaaaaggaaacaagctggaatcgctccaggaaaaactctggttacacctggaagatggaagtcgcattgtagattcaagaaattagttttcagtttctcacgggaaccatgctgcttgggaatgtgtgtgatgccttctgtcaataaaaacacattacac

SEQ ID NO: 375693 - DNA, 390 bp, Homo Sapiens
tctataaaatcgttgctctaccactgctaaatacttttaagtacaatatatagggactcaactaagccgagcctttagcgtcttaagtactcacaacctgaggcattacactttcattttcccacattgtaaatattgaaacattaacttgatcaatgtgaccactctgcagggtttatgtaaaaggtgacctaaaacccccagcaccagtaaagaagatatagaatcatactggggagagacaaaaacacagaaatatagaaccttaagtctgagttggtaattgcacagatggtatgcagtgtggaccataatcaggattttagaactatattcttttattacggggggaaaaaaacccaaaaagcttaataatttaaatttaattac

SEQ ID NO: 375694 - DNA, 565 bp, Homo Sapiens
  misc_feature (446)..(446): n is a, c, g, or t
ttggaaagttgattattcaaagcatctctgatggctactgcttgaatgtccttactgcaggggctccagtcttttgggggctgcatctgcactgcagagggctggctcggacatctgtggatttcagtcaacagaggagagattggaagaagcatgtttctttcagagtagatagtggattcactgaatccccccgccactagtaaatctcttctagtaagccatttgcatccttttttgttggtttttaatccttgcggagttctcagcgatgctacgagcaatgtgcttgcacttaaggtgatggactgtaaatgcctgaaaaaggaagaagcagttgtcaaagcaaattaattatttaatgtttatagttttcctgtctttaaggggtttttcagaatctccagttgttccagtgtttgaagcctgtaatgtctcccactgtnaattactcagtggaatggggagggcagtgtgattgtcacccacaagcatcccccaccagggatggatgagtcgtggaccctttggagagggcaagtgggagcttttaccctgaggagcc

SEQ ID NO: 375695 - DNA, 332 bp, Homo Sapiens
acagcatgtaaatggacatatttaaagccttgtgaacattaatctccattcacatctttcagtaaaattctgtgataaagaagaactactgagtttttaatatggctacttttattgttttcctgtgtgttgccaaatcactctcctgaatgttagaaaatcaggtttcattccttgtttacataacgtgttctttctaaataaacatttgcagttgattttcagtcaacaaattgcttttattactttaatgtctatgaaataagaccattccagtatccttaccttacagaaatgacagcaacaacagcaaatatgagtaaagaaaaaaa

SEQ ID NO: 375696 - DNA, 380 bp, Homo Sapiens
ggtttgacaccacatgggaacatgaataaatctgtctcatgatttgaaaagtacaccttgcaaagttttaaaaataaagtttttaggcaaatgcgataagaaaccgtcatttccagtcacagtaggcgatctttcgtaatttcataaaagcagttcgtttgcagtatggcttttgtgtagttaggggttttttaagtgtgaagaaaggtatgtgggctttaaaagtgattctaaatcttgaatagaaaacacatgaattggctttaataaaaatgtcacctttttattattgacattaagtaatggtaccatatattttttaaaatacatattgacttgaattgtgagggcaataagataccttctatatgtaatgatca

SEQ ID NO: 375697 - DNA, 456 bp, Homo Sapiens
  misc_feature (15)..(15): n is a, c, g, or t
  misc_feature (32)..(32): n is a, c, g, or t
  misc_feature (37)..(37): n is a, c, g, or t
  misc_feature (92)..(92): n is a, c, g, or t
  misc_feature (112)..(112): n is a, c, g, or t
gcccctacacaattnccccggggtaggaaaangctcngttttaaccaatttggaaaaaccatggtggcaaatcaaggccctcagcagaaganaaacccaatcctataattanttttatattaagtatagaatcttttaaaagaatgctataaatttaaaatagtgtgaattaacagagaatacatttaacccactattttcatgaaattgtcaaacctaactaaatcatatgtacaggtatccttcatacaatgccagcaaaacgtaagcagatatagattcatccagtttctctgaaagtacttgacaggaaaaaagtggcaattacaagaaacacttaaagaatatttctttaggattaccttataggtattatagagtggttttctagacaaaattacatcaaaacacaagaaaatagtaatcagaaatgaaacattactaaaaacaaccaaa

SEQ ID NO: 375698 - DNA, 610 bp, Homo Sapiens
  misc_feature (34)..(34): n is a, c, g, or t
  misc_feature (74)..(74): n is a, c, g, or t
  misc_feature (99)..(124): n is a, c, g, or t
  misc_feature (146)..(146): n is a, c, g, or t
ttacatagaaattgctacgggccaattggcaaanagcctaaaaaagtttgcctgccaattgcaaccctgaggangtagaaaattaataagcaggctttnnnnnnnnnnnnnnnnnnnnnnnnnncctagcctaaatgtattcccancccaataaaagtgaaatttgtctagcagcagggtgtggcccagagtaaatagaccgtaaggaaaacactcacgaaggagtgggaatggtatttctgaaaccccacgggacaacaataattattaacaatttatctcaagcttgctcctctcttagtggcatttttttaagtcgtttccttcctagaagtctttgagcctagaaaagccaagttttgtgtttatttctttcacatacattaatgtcttgagtcagatatcactaatttgaaaatgggtttcatcctttttggtgaaaataatttggagttcaaccaggttggtacctgggtacctggtactgtcccctcaggtgtcatatgactaatcatgaaagtcctttggttcacggttcacaaccttttcatagacagatattatgtagcaagttaaccttaaggacacataccttaaaggactgttgagc

SEQ ID NO: 375699 - DNA, 480 bp, Homo Sapiens
  misc_feature (15)..(15): n is a, c, g, or t
  misc_feature (26)..(26): n is a, c, g, or t
  misc_feature (77)..(77): n is a, c, g, or t
  misc_feature (138)..(283): n is a, c, g, or t
aatgccttccctganggaaaacctgnaaaactagtttggtctgtggtaaataaaaatccactggctctccctgcccnggaaaagaccctaagagttcctcctactgtaaatgctcagcctaactagaacatagcaatnnnnnnnnnnnnnnnnnnnnnnnnnnnnnnnnnnnnnnnnnnnnnnnnnnnnnnnnnnnnnnnnnnnnnnnnnnnnnnnnnnnnnnnnnnnnnnnnnnnnnnnnnnnnnnnnnnnnnnnnnnnnnnnnnnnnnnnnnnnnnnnnnntattttcaactaaaatttgatgggtttcatgcaatgaatgaacaaatagaaaatcagaaagtctgttcctggtctttccttctatatgactgttctatatgccaatcttcgtcactgaatctctctctgtcttcaaatgctcatgttaataatgtactaatgcattattatcccaggtttttttccccaaaaaaaga

SEQ ID NO: 375700 - DNA, 518 bp, Homo Sapiens
  misc_feature (20)..(20): n is a, c, g, or t
  misc_feature (28)..(28): n is a, c, g, or t
  misc_feature (48)..(48): n is a, c, g, or t
  misc_feature (75)..(75): n is a, c, g, or t
  misc_feature (133)..(133): n is a, c, g, or t
ttaattggggccccaaaaanaattgggntccccacaaaaaacgggggnataacccctaaaccctgccccagaaangaaagcctagaagatggtgtttgccaaagacaaagttaacctatgtgagcccaatttnaaagtttagggaaaaaaaatatttggaggacccagagaagacatcagttttgtctttcaagaagctgggaacccaagacggtggaacagaatatgtagtaaaaggatagcttagtgcaggggcagagaaactgactgaggacagactctttggtgggagagaaggaagggaaaggatcagcattatccactgggaaaactgacctcagctaagccagatcaccagcagtagccctctataaccatcacagtccttctgattagggatttttttggggaaagggagtatatatctaagaactgtactatgcattgagacaggagaatgatggagggcaggagggagtaaatcctgaaaaagatgctaaaacatttttcactccagg

SEQ ID NO: 375701 - DNA, 235 bp, Homo Sapiens
agtgtgagccaccatgcacagccctcatatttttaaaagataaaattattctcaggaggtctgagttaccactttaagatagcagaaaaacatttttaaaatggttaattttatctaaagaaagcaagctgtgaaaaataccatagttttaccaaataaatgtttctaaaatccaaatgtattgatatacagtaacacacttcaatatgtgacagttatgtacaagctactatgc

SEQ ID NO: 375702 - DNA, 452 bp, Homo Sapiens
  misc_feature (14)..(14): n is a, c, g, or t
  misc_feature (28)..(28): n is a, c, g, or t
  misc_feature (68)..(68): n is a, c, g, or t
acccccatatcctntcctgagttagaanccagcatagccctcccctgtcgcccttaaatgtaaaaaanccctattttgaataaaacccccagccctaagagttaatagcaatacgagagactgaatctatttttgtttcgggtctttacctcatagtatgaaattagtaagacactgcatagattttgccctgaatactggtgtgcccaggtatgccgtgctctctctctgtttccagtggtggtaattttaaggcctaaagaaagctggggttaatcctgaagctaaaagtaaatgtttcttgaattgattttgttctgtggtacaaataacatctatgaatatcatatctgtatatatctgaaccaagttgtgtgcagagaggttgatataactatatttacagaaaatgatttttacaattaaagttcacattttaacatgaaaaaaaa

SEQ ID NO: 375703 - DNA, 525 bp, Homo Sapiens
  misc_feature (11)..(11): n is a, c, g, or t
agcaggcaagntctggattcaggaaatagttgggagcagaaagttaatatgaaggagttgcaacttgttaacagcctagagttgagacctagaagaattattacctttttaaatttgtgatgaaagcttaaatccagcatttgggaagttactctattggctgaactattttggagtttgtaagctttgtattagatattcctgatttaactgaaactaatttgcccacatagctttaatttcatcccagttttacttgttttactgtcctcaaaaactcaagacatctgaactcaaaggatctaagcagtataaattaaagcacatgttgaatcactgtagctttcgtaggacatctgattataatgcttttctttgtttctttgtccatactgaacttgtctagtttatctttgagaaacatttgctagtatcaaaaatcttctgtaaagatttgaacaatcttgaattctccttgtcactagccatctcttcccctaaagtataataaaactgtcaggtact

SEQ ID NO: 375704 - DNA, 486 bp, Homo Sapiens
  misc_feature (407)..(407): n is a, c, g, or t
  misc_feature (421)..(421): n is a, c, g, or t
aggcatttaaggaaggaatagggttctaaggcatcctatgcttccttctacttaaagacctttctcctccccccttctataaacaccccaagatctggctttaccccttactactagttcttattacaggcttctacagatccctgtcactccccattattcctggagatcttaggtcctgacttactgctgctttctccagtactactcctgtcatcattcctgatgtgtttaatattgatgtagagaatccttccagttgcatggcatcttaattccttgacttccttcctgtcttccaatgaccttgtcccacacacaatctcagccacttacccgacagtcattctctgggacctcatcattcctaacaaccctccatactctcaatttcaaatattccactntgggaaaggcagantccattggcctcctatggattctttcattcccaaccggggcaggcagtccattatttttaaggcc

SEQ ID NO: 375705 - DNA, 552 bp, Homo Sapiens
  misc_feature (32)..(32): n is a, c, g, or t
  misc_feature (40)..(40): n is a, c, g, or t
  misc_feature (46)..(46): n is a, c, g, or t
  misc_feature (51)..(51): n is a, c, g, or t
  misc_feature (70)..(70): n is a, c, g, or t
  misc_feature (85)..(85): n is a, c, g, or t
  misc_feature (268)..(268): n is a, c, g, or t
tagctgaaaaggtgggggaaagaaaataaacnattggaangtctgntttanagttaaagatgggaaaccnaaaaagggctaaagnagtaccagtaaactaatgcaacccccagtgcaatcccctctccccgtttcctaaagagaggtatttcaacgctttctggtttcccctggaaatcaacaaatcctcccaaatcccttactcccagctaatgaatgccctttctccttatttcatggagaaaatagacacaatcagaagagaaantctgtatgttctcatagccacatctaccctcccacctgcatttgtgtccatatgccctgccttccctcctgttactcctgtttgcttcctggacttgtccttgcttctacctaaattaattccccacaattgtgcagtagatgccatcccctcttgcctacttcaggatatttccctagcaattggtccctctctttcatgcataattaaattttccctctctactgaattatcctcgtcagcattcaagtgtgctgtaatttcttacatctcaacaaaaaaaa

SEQ ID NO: 375706 - DNA, 332 bp, Homo Sapiens
  misc_feature (213)..(213): n is a, c, g, or t
ggaagtagaaaggtgatgaagtttactaatacagtgtttcacacattctatttaacacaattccaaatgcaaatgtttaagatgatttttgaagagaaacatctacaatgttaagcttgtctatgctaaacaaatgtaactttaatttacatgtatcatcctaatgtcaacaatatttagacattcatgattaagccactgaattcgaaaggnttctcaataactacatgtaatctgcatctgtggcattagaaagtaatcaaatcactgtccgttttctgatgcaatggaacatcctacaaattcatgacagatatactaagctaaaaagc

SEQ ID NO: 375707 - DNA, 174 bp, Homo Sapiens
acgaacccaggcagtctaactcactgctttacactgcccttctgtacatatgcatatatactgccttcttcaaaatctaacgtcaggttaagtatacggcatcctgttacaatgtgaaataagagggctgataaactgtgagaaataaggaaagtgggcatagtacatgatgaa

SEQ ID NO: 375708 - DNA, 407 bp, Homo Sapiens
caaaaactggacctcccccaataaaaaggcctaatgaagatagggaagaaggaaagaggccagatttcccagcccaaaaaggccctaagggacccacatcccagactgaactagagatggttccctaaggtaacccaatctccttggggctggggcttgactagaagataaaactatataggaatgaaggcactgaactcttctttataatcctcacactgagatttcttttctatctatataattaatgttgtgtgtatacgtcaaaatactgcaatctctcacattttaatcacacattttaattattctctagctctggatggaacacatctagcactttaaaagtatgtattaaatactgatactgttatagtgtgatttttataaaatatatctaaatacat

SEQ ID NO: 375709 - DNA, 472 bp, Homo Sapiens
  misc_feature (87)..(87): n is a, c, g, or t
  misc_feature (397)..(397): n is a, c, g, or t
gtccgatatcacagcactctaagaagtagctatggcaagagacataaggtcacacaaactgagaagtgaaatggcaaaattataaantcttgttataaacacactgtcatacgaagtgagaaattgcagttgcattaagctgatggataatctggcaacaagcaaacagatacttattttctcttcaatctaaactgtgcaactgtcccttcctgacttacatgccaatcttttcaaatacttcatctttaaattactattattagtaaagtacaagagagcagccagtatcatttctcctgaggctacctctggaagaaaactgctaaataaaaagaagatctaaatgtttttcacttggcatttttattgaccatccaaagggtatatcactagnagatgcgtatatacagccctagtggaacccacaactcaaaatgcacagtaaagatttcagaaagcaacaagacag

SEQ ID NO: 375710 - DNA, 279 bp, Homo Sapiens
gtgctcatcagtcagcagcagtcagctgtgatgtctccaaactgtagaggctttggactttttggcccactttcttcatagaacgatagagatttaggatcttactgccctagtttaatcttggtttgcagatgagaggccgaggccccggggtcctgagccacgtgagctgggcttccaccctggactccatgccgcgcctcctcgccagatagacgccagatagacgccagatagacgtggccagtcgtgctgtttcaaggtcttattccagtcagg

SEQ ID NO: 375711 - DNA, 502 bp, Homo Sapiens
  misc_feature (24)..(24): n is a, c, g, or t
aatttaaggcaaattatggccacngggaacattccacaccccaaatatttttgtatgcaccccttaaaaagaaagacacattggctgcatgaccgtgcctaacataccctaacaataataacattaatcccccaatatcacctgaaaactaatcctatagtcaaatttttcaataatccccaaaaatattattatttatagctgttttattcaaatcaggatacatctaaggatgccatgcatttgcttggcaagtctcttaaatctcttttaatctagaacactgagtttgcatgaatgtgggtaggagccaaattttaaccagcaacagttaccattataaattattcctcatcccaggcaaagcagtgcattctgaagggaaaacttattatctatccctccttgtagacgttttacacgttatccaaacaagaaagtctattcatgttgaatatttaaaaaacaatattgtaaccacaaagcagaaaactaaaccacc

SEQ ID NO: 375712 - DNA, 352 bp, Homo Sapiens
  misc_feature (124)..(124): n is a, c, g, or t
  misc_feature (162)..(162): n is a, c, g, or t
  misc_feature (202)..(202): n is a, c, g, or t
tctgaagccgggtgaaaaaaaaccggcctgccaaaatcgcggctggccctttcaaaactacgggcctgccctgtgaaaatgcccgtgttacctaaatcccatttgggcactgagttcccaggantgggggcaagaattccgatgacggggctttatccggtncgcatccagctcagagtggttcctgagaccagccaccatnggcagcccaggatgtgctcatccttgaggctttccgaggcatcaaggagatggttggataaagaatttagcacagagcttgactgatggcaggcacccacaacatgagacacattaataatgtgtgtggaggccaggtgtagtggttcat

SEQ ID NO: 375713 - DNA, 457 bp, Homo Sapiens
tgccaatgggaaaacctgggtggggatttcccactcaattcctcagtatatacctttgggcgctagaggacagttagctttcctactttgataagcagtaacctttccaatacgttttatccttttaaaatcagaaaacaaaagcttctaagtgttcactggtcaattccccctaaaacaatcagcaatatttactaagcagagaaaagagactggagtgttggatccatataaagatttgaagaattattaaatcctattttggatatctcattctctaagtaactgatctggttttgcctgaatttagtatcaagacaataattatataatggtaaatgtttaataccaaatgcactaattttttctgtaagttggcacagctgtggaattttgacaatacaaattattttctgataattcaattcatgtaagaaaattctaatgtttaacttct

SEQ ID NO: 375714 - DNA, 441 bp, Homo Sapiens
  misc_feature (15)..(15): n is a, c, g, or t
  misc_feature (42)..(42): n is a, c, g, or t
  misc_feature (128)..(228): n is a, c, g, or t
ttttcctgaaccacnggttaaatttgtggttacccctggtantgtgggcccagaaccctgaaaaattccctgacattttccttgtaagaagggaaagagggaactaaaatcaactgaaaggccctggnnnnnnnnnnnnnnnnnnnnnnnnnnnnnnnnnnnnnnnnnnnnnnnnnnnnnnnnnnnnnnnnnnnnnnnnnnnnnnnnnnnnnnnnnnnnnnnnnnnnnggaaggagagaactagtgtgtctagggttgatgttacttactcaaggtcatgctctagaaaggagaggagtttgttttcgagacctttatcagctcacagtctccttttggagtgagagacctgggtttgagacctagctttgctgatgagatgtacatcttaatgtaatttggttatctctctgagccttggtaaactgcacataataaaca

SEQ ID NO: 375715 - DNA, 408 bp, Homo Sapiens
  misc_feature (27)..(27): n is a, c, g, or t
aaattaattcgggaaccagcaggaaantctttaaaagcagcaaaagttaaaaagcctccctctttcctacatccatttacaaagtagaaatgcccacataaaagttaaaattcccactgcaattctttctgcacatcctaggaaccaactctggcagtaaaatataaaaggaaggaaggagtacagaaagggaaatatactttataaggaaaaaaagaggaggaggactattagaaactggagtgtatcccttaacaagaaggaattcctttcttgcttaccatggacgaagatcaacaaatgctctatgaaacaaaactaatctttgcttgaccaccatctgtttatattaagactttagttttagaggaatcaacaaacagaatctgtaagcctcaaagttctagc

SEQ ID NO: 375716 - DNA, 223 bp, Homo Sapiens
agaatgagctaccatgctcagtctttaaatcttgttttaattcattcgagaatatcaactattttttaatcaggcaacagatccagaagggttatgtccacaagttctgaccagctttctctttttcatctttattttaatatcatttgcattttcaaactcttctgagcactattcagatatatcctgtatgttgtgtcacacaatagccagtctggaatct

SEQ ID NO: 375717 - DNA, 502 bp, Homo Sapiens
  misc_feature (468)..(468): n is a, c, g, or t
ggagatgacaagcaactgagatattgtgatatataatcatgctcttagcttcagctaaattcagctaaattcttgtacactgaaccaatgtcataatcaggcttatttagaaaacactttgaactatgctataaaagattatatcagaattcatattatacatgtgttcacatcagcgctacctgtgatgttttcatgtatttatgtatgtgttataaatacttgatttgtacatatacaaatgcacatacgtagtgtgtttgtgtgtttatgtataaatttataggcacacaataatagaggtaattataagtaggatgcggtatggaataatttgcttaaaatatgctaaataacccaaaactgtttaacgtcatgttcctgttagtgcttcccatactccacgtggggtagggactacaatcacacttttccaactctgtggcagtactgcatggggtgggaggncattttaaggttatgtgcttccccaacaccggat

SEQ ID NO: 375718 - DNA, 590 bp, Homo Sapiens
  misc_feature (57)..(57): n is a, c, g, or t
  misc_feature (66)..(66): n is a, c, g, or t
  misc_feature (424)..(424): n is a, c, g, or t
  misc_feature (510)..(510): n is a, c, g, or t
  misc_feature (544)..(544): n is a, c, g, or t
  misc_feature (568)..(568): n is a, c, g, or t
  misc_feature (577)..(577): n is a, c, g, or t
tttagaatctgcaatttgacagccaatcagcattcagatgttatctgtcaatcagancctgacganagctttccaagctctggatcagtatcattatacgaggtagaaagatgtcaacagctatctgctacaatacttacagatcatcagtatttggagaggacaccactatgtgccattttgaaacaaaaagctcctcaacaataccgcatccgagcaaaattgaggtcatataagcccagaagactatttcagtctgttaaacttcattgccctaaatgtcatttgctgcaagaagttccacatgagggcgatttggatataatttttcaggatggtgcaactaaaaccccagatgtcaagctacaaaatacatcattatatgattcaaaaatctggaccactaaaaatcaaaaaggacganaagtaggcagttcattttgtgaaaaataatggtattctcccgctttcaaatggatgtctacttttggataggagggggtacactcngtggaaatttggcaaacttttcggaccaagtttnattgtgttatttcccgtgaggtcntgggcccanggaggacctgggg

SEQ ID NO: 375719 - DNA, 678 bp, Homo Sapiens
  misc_feature (12)..(12): n is a, c, g, or t
  misc_feature (52)..(52): n is a, c, g, or t
  misc_feature (593)..(593): n is a, c, g, or t
  misc_feature (603)..(603): n is a, c, g, or t
gaacagctgctncagagctacagtgaggaccctgagccactgctgctggcantggggctgtgcgtaccccaggctcaggctgtacccgtacggcctgaccactgccccgtctgtgtgagccccctggggtgtgacgacgacctgccctctctctgctgcatgcactattgctgtaagtcttgctggaatgagtacctgacaactcggatcgagcagaaccttgttttgaattgcacctgccccattgccgactgccccgcccagcccaccggagccttcattcgtgccatcgtctcctcgccagagtcatctccaagtatgagaaggcgctcctgcgtggctatgtggagagctgctccaacctgacctggtgcaccaacccccagggctgcgaccgcatcctgtgccgccagggcctgggctgtgggaccacctgctccaagtgtggctgggcctcttgcttcaactgtagcttccctgaggcacactaccctgctaagctgtggccatatgtctcagtgggtcgacgacggtggctactatgacggcatgagcgtggaggcgcagagcaaggcacctgggccaagttcatnttccaagcgntgttcccagttgttcaaggttcccttcgagaagaacgaggggtgcctgcaaatgaacttttgccaaatgttaacc

SEQ ID NO: 375720 - DNA, 522 bp, Homo Sapiens
  misc_feature (29)..(29): n is a, c, g, or t
  misc_feature (43)..(43): n is a, c, g, or t
  misc_feature (48)..(48): n is a, c, g, or t
  misc_feature (69)..(69): n is a, c, g, or t
  misc_feature (75)..(75): n is a, c, g, or t
  misc_feature (81)..(81): n is a, c, g, or t
  misc_feature (93)..(93): n is a, c, g, or t
aatacctcgaacccaataaaaattagccnaaaaatccctggtnaaggntgccccactcgaattgaatgncgcagntgaaancagtgaattggnaaatggctgcgtttctgccctcgaatgggccacagggactcgctgaagtgctcctatcgtggccgaaggggttgaagatgatctcagccccgttgatgctgtaacataagccagttgagggggtggtgccgcccgtagcaaatgttcaccgcgatccttccgaactgcgtctggaacacggggtggccccaggtttccctccatgtagtaagttgactcgttgaaatcacccactctggggatgtggtttttcctggtctttcccaggactgctccggaattggagatcaccacggctgtattccacaaaacatccccatgctcgctgtctcgttccaggatgggagacaccaccaccatgtcatggttcttcgccagcttctgacagaatctggtggtgggcccatcctctgctgactcagcaaattc

SEQ ID NO: 375721 - DNA, 415 bp, Homo Sapiens
agggctgaatccagagaccctgaaccctacagcaaggctgtggtgggtcggatggtctttggatgtgtcagcttagctaggccacagtcaccagtaattcaatcagacactaatctaggtatttctgtgaaggtattttgtagatgtgacagaagtccattcccaattgactaagtaagtgagattatctcagataatctgggtcagcctgacctgattagtcagaaggcctaaagaacagagctaagggtttccctgaggaagaaattctgcctgaggacagcagcccagtgcttggcgagagttcctgacagtctgcccttctgatagcctgcctcacagagtttagacatgactagccagctcctacaatcactgaagtcaattccttgcaataaatctcaatatatcccct

SEQ ID NO: 375722 - DNA, 366 bp, Homo Sapiens
  misc_feature (149)..(149): n is a, c, g, or t
ccccagccccccgccccagttgtgacaatagtctctaaacattgtcaaatggtccaaggaaaggggaaaattgccccggttgagaagagcactgctgtaaagtaatgagcctcggctctcctgtctgcacctgtccggttactacttgnccaccacgcagccttggctcctacagcccaaaagggagaatggagggaggccccaggctttgctggaggggcctgggtgagttctgtttgctccttgtaccaccatccaaatggtgttatcaaatctcttagattccaaagaggttgaataattaatgttcaaaggcaagagggcaaggcattttttaacactttttaaaataaaaatttataccac

SEQ ID NO: 375723 - DNA, 296 bp, Homo Sapiens
aaagaaagtacagaacaaaacataccaacataatgtgtggtgtattagcataatttaaaaacaaatgcagagaggtgatctttaaatttaatatcaaaatatgctgaccattagaactgcattataattttgaagaaatgattgacaacctttgtcaccaattgtgtttgcttcatagaaaaaacaagacttgctaatgttttcatatacacaatctgaagaagttatgttgttcataagaaagtgatatttaattctaagcacagagtattcacaaaaacaagtttcagtaaaaa

SEQ ID NO: 375724 - DNA, 543 bp, Homo Sapiens
tagggatttccccctccaaattattcagaccaatggcttgccaaatggcctctcccaaaattctgtacagttttgctcaggtcacgccaacagggaaacctcaagtgtaggtctaattagtgtttctgggatccaaagttagaggaaaatttagattttattgcctggatctgctttaaagacaattggtgtttacaccctcttgtcagcaaaacagctagttaggtaaggacatatagttccaagtaggtaaagtcacttgattacaaatgttcttaactatcgtctctgtaattcctttatacaggacagtacaaaattgtgggacatgctctggtaacacacagatatgggttgcatatgatccagaattacagctgatattatggatgacaactgctaaggtccataaaatgaagactgtattgtattgagggatagaaattgatcatttaatgggtaacaactgctgagctcaaagatttgtgattgttaaaacttctctggcatttaatcattaataaacatctgtattgtgacagc

SEQ ID NO: 375725 - DNA, 422 bp, Homo Sapiens
  misc_feature (297)..(297): n is a, c, g, or t
gagacttggcctgtaaccatcatggcagttggagctctcatatagaggtgaccagtttgccatgtggatataatttagtagatatttgacagtttgtgtaggtatttgagggaaaaaactcaatgtttggcttttttattatggccactcgagtcaggatgctctatttataaagataaatgtaatatataaagggtgaggactggctgtgcatcctgccctgtcccgggtttgcgcgctgctacagagcttcacgctctccgctccaccccttagcctgggaacccaccgcagtgnaggttctgtgagtcactgctaagagacagagcacattttcaggccagcaactatccttgccagggttttttcattatattttgaattatttattttacaaaatgggcgaagatattgtctttagg

SEQ ID NO: 375726 - DNA, 501 bp, Homo Sapiens
  misc_feature (34)..(34): n is a, c, g, or t
  misc_feature (44)..(44): n is a, c, g, or t
  misc_feature (69)..(69): n is a, c, g, or t
  misc_feature (85)..(85): n is a, c, g, or t
tccctcgcctcaaaaagtcacctgaaaaaacctnacccggggcnggaaaagggcctacggtacgccccnaaggtggccccatcgntcaactctgggaagacagatagacatcgtcagtcctctttttacaagtccaagacagtaaaatcaaagtaatagtttccctggcaggaagaaagagaattgctggagcgttggagagcccatctcttaacctctggggtgactcaaaggaagagttgcctggtctgagaactttagaccaaagaatttaaatcatgtgaactgaaaatgcatgtgtatccatatatacatgtacatatatgtttatatacccaatatagaaaggttaccagagacaaagaaatagcaacaatagttgttttggggaagggaaaggaagggctgtggggtgaggaagcatactttcactgaatatcctctgtactgtgtgcatttttgccacatgcatgaactaaacctacaagaaaataaacaaat

SEQ ID NO: 375727 - DNA, 478 bp, Homo Sapiens
  misc_feature (119)..(340): n is a, c, g, or t
  misc_feature (462)..(462): n is a, c, g, or t
gtttacatctaggtagcttctgagcggtaaaaattagcttagttccttggggaatataaggaaagtcttcccagataagaaagttggcctgctgtcttttgttttgtttggagatgggnnnnnnnnnnnnnnnnnnnnnnnnnnnnnnnnnnnnnnnnnnnnnnnnnnnnnnnnnnnnnnnnnnnnnnnnnnnnnnnnnnnnnnnnnnnnnnnnnnnnnnnnnnnnnnnnnnnnnnnnnnnnnnnnnnnnnnnnnnnnnnnnnnnnnnnnnnnnnnnnnnnnnnnnnnnnnnnnnnnnnnnnnnnnnnnnnnnnnnnnnnnnnnnnnnnnnnnnnnnnnncggcccccctgccgccttcgggcttcccaaagttgttgagatttacagggcgtgaaccacttgcgcccagccagccttgccgtatttttgaaagttgaacagggatttgccaagaagataantacaggataagatatt

SEQ ID NO: 375728 - DNA, 612 bp, Homo Sapiens
  misc_feature (209)..(209): n is a, c, g, or t
ttgcctctgtgtgtaacaggggctggaggccacagctgatctccaacacatgctcatggtgagtttcctagttttggtcctaagttagcggagacaagctgccccactccccactgccaagtcatcattccgtatcaggtgtttggatcccattcctgcaagcgggaagaatgtgtgcaaagagctggacaccccatagggcctggganaccttcacggacacctgccatggagaaagtttgcatgggccaagggggcaggctcttgggaagcacacactccctccctgagtgctggcaggagcaggcttccagtctgtttgggcagcaatgaaagggacactgtttatttggcaattcaagcacaggaatgcacatgtgtgggcccactcactgctggctggacagctgcagagagggcatcacgatggagaccttatgccccctcccacgagggacatgaaaatatggcatcaagagaaatgacagcaaaaccacggaagtggattaaacaggaggacaaagcctttaaccaggccacagtagacaaaagtcccataagaagcttgtaacagtattttgccaacaactcttagaagaaaacgcatttggc

SEQ ID NO: 375729 - DNA, 399 bp, Homo Sapiens
  misc_feature (24)..(24): n is a, c, g, or t
  misc_feature (56)..(56): n is a, c, g, or t
atgggttagtgtgccacacacggnaacagaaaatttgcaaagagtgaaagagtaantataattagaatttccagacccacctaatcccaaggcctgtgtcctattttgtacactgctgtatctcggcacacaagatagcatctggccccatacagcccactcaataaaaaattgttgagtgaattaacacagaatcttctttcagatgcaatctttcagcagctgtagggtttagttactcctgaactcataggaaacatgactggctggatcagacactgttgtaatggactgttcaatgctgagattctactacaactttggaaaatcagtttaaataaaggtgacacaataaagagctctctaggggaaaagacaaatacacttacctaaaaggac

SEQ ID NO: 375730 - DNA, 470 bp, Homo Sapiens
  misc_feature (54)..(54): n is a, c, g, or t
  misc_feature (80)..(80): n is a, c, g, or t
  misc_feature (128)..(128): n is a, c, g, or t
aaaaataaccccccttgccaattcaaacctcacatcctcgccacaaaaggaatnaccaagatgggatttaataatagccngattcctctgaaagaatcccctgaagaactttgtaatggattcctttnagtaatagcagtggctttccgatgtgcccaagtcctacctccctccccatactgggacactcaagcaacacagatgtacacgggaattttgggtattcctatactgagaatactgcacacatatcgttagtcatccttaatgttgtaacttaccaaactcttaaggtttgcaaatgtgattttgttggcatctagaaccagtgtattttttatttatgtctgaaaaataatcattgtggggttttaaaatgaaaaatcatgtagctaatgcctatccatagatgaaattgttatgttgggaaaatgtgtacttaatctttgctttagtaaaatgattattat

SEQ ID NO: 375731 - DNA, 372 bp, Homo Sapiens
gagccagagagacatgacgtcttgatatgaggaccttgagtcagttgcaactacatgtttgtctcattctgcccacctggccaggataagtcagtttttgaatcacaattgtcaatcccagagtaagagattaaggaaaaaacagtgaaggataagaaaaaggaaggggaaaaaagactaggtaaaagctatgtcaggattggggagaaaggcaaagggaaaaggggaaaaaatatcaagcaaaataaagaaatatgctagaagtgataaagacaaagaagcataaagtaagagcatggcaggaaggagaaggcaaacagggacaggaaggacgatgcagcacattccacaggttaaaaggcaggaatgtcc

SEQ ID NO: 375732 - DNA, 395 bp, Homo Sapiens
  misc_feature (12)..(12): n is a, c, g, or t
  misc_feature (42)..(42): n is a, c, g, or t
aaactaccaatntagtcagtggaatactgttcatttaaaaanggactgctgatacatgcaacaacctgtatgaatctcaaaaacattaagttgagcaaaacaaaccaaacataacatactatctaattacttttatattaaagccacttccaggcaaaactaatatttgatgatagataccagaacagtggctgcttagagtgagggcagggaattcaaattgaatggaaaaggggcctgaggaaattttctggggtgattgaaatgttttgtattttgatctggatgatggttatgtagctgcatatatttgtcaacattcctcatgctgtatgtttagatttgtgattttactatatgtaaattaattccttaataaaatactattataaaat

SEQ ID NO: 375733 - DNA, 359 bp, Homo Sapiens
tgctgtgtaccagctatctgaaggacagaaattaaggaaaattgttagggaataagggaaatgaaccacctagcatgtgggaggcagaaaatggttccatattttcttcctggtatgcaatgtagtacacattaaagttttcaaacactcaaatacttagtcttttgttttcgctgtattactaagtaaccgggaagggtgtgggcctgtttgagcctacaggaaaaaagaattaaatttggaaaataagtacagaaaggcctctgtattacagataaagaagataacctataagaaacaaaacaactttgcaattattttttccaacacagaaacaattattatcacttgtcctacat

SEQ ID NO: 375734 - DNA, 144 bp, Homo Sapiens
gccaaaccctctttgagacactggggatgtaacgattcattagcttacattctgatgagaaatggtgaagtgagtggtctgtttaaataaacagccaaggccaagtaattgtcaggaataatatttcagaaggtaaatacagtc

SEQ ID NO: 375735 - DNA, 264 bp, Homo Sapiens
ttttttttagcatatactacttctacttattaaaaacagttgactgtaaaacatcctcaggcaggtccttcaggagggatccagaagaaggcattgttatcataggagatgacagctctgtgtgttactgcctttgaagaccttccactgggacaaaatgtgaaggtggaagactctgatacagatgatcctgaccctgtgtaggcctaggctaatgtgtgcatttgtgtctttggttttagcaaaaaagtttaaaaagtaagg

SEQ ID NO: 375736 - DNA, 521 bp, Homo Sapiens
attatacagtttgctctggatacctgcttcccttaacgcacagtatttctgtgagttggaatgaggaaggccagagaggtttatctttctcaaactagtgaggaagggaatcagccatcagtccctgatctgtcaaactctaaaaaccacaactttgtgttagatcaggctgtgtcaaggcagagttccagtggacattttaaagctgaaggtgctagaattgccctggggcattggctctttcaccagccctctccctgattgcggcttcccggagcttgcaccattgtttcatcccaccccggagttcaatggaacttttctgaacaataggaggaaagtattccctatcacagaaatagatctgtgttcctgcagctcctgggattgttatgcctcagggcatcatcaataaactaaaaatcataagtcaatcatttctatattgtgaaaccatatttgagtgcttttatcaggggataagaaaagtgctttttaaataaacattaattttgtacatg

SEQ ID NO: 375737 - DNA, 639 bp, Homo Sapiens
  misc_feature (13)..(13): n is a, c, g, or t
  misc_feature (23)..(23): n is a, c, g, or t
  misc_feature (48)..(48): n is a, c, g, or t
  misc_feature (621)..(621): n is a, c, g, or t
cttaattaggctnaaagaacaancccggagcccctaaaaaaaactgancttgtaaccccaggctatgtcccctttttagcctccgtaatcctttggcaaggccattggattccttcagctgtacaattaggagactcgatcaggtgattgcctttctcagctgtcagttctctaatttcaggcttggtagcttgtaggaactgaaattgcaattaaaacctttataaactcaaactaaatcatgaattacagaaaaagtccattcttccaaaacttgatgttaccacacttacaagtttaaaatatgaagtcgactgtttaaaggattctgcatatattctagtgtgcacattcagaaacatttttcttggaaaaagtacccaacattttactgcacatattaatttattgccagaataaattgattgcatgctaaataaagtcagataattcaaatccatttgcttttatgtagtttttcttctaaatgtcaacattttggaattaaaatgtttatggttttatatgagggtaggaaatcttaactgctttggggggtattgtttataggctttttgttatggggccggtagttttttaatagggggattgcccatttcnaccgtttgggggcccggg

SEQ ID NO: 375738 - DNA, 474 bp, Homo Sapiens
  misc_feature (439)..(439): n is a, c, g, or t
cctctcctccttggccagaaaccttcagaaggaaacagaaggatgagaaagcctcccttgccaggcccatctcacctcccacaccacacagttacacattcataaacagccaagcctgctcacaggcctgggcatatgtggctggggagagactgttgccctatgagatggtggaagacagaaaactcttgaatgaaacatctgtaacaagactcccactccctaatcctggagaccccttcaaaaggagaggactctgctcagcgctgggtcagaaaggaagtgcttgccaaccccagtaatgcgctgtcctggagtaagaggactgagatgccagctgtggggcccgtcaggagtcacgtctcaagagaggggtgacccagatttttgcaaagctgtggaagagacctctaattccatgacctaaagtttcacacancctttatgcaaatccttcgccatttgtctatcctg

SEQ ID NO: 375739 - DNA, 1426 bp, Homo Sapiens
gaggaagagatcatgatcataagacattccatgagtgagaaaacagggtgatacaatagaataggtcaattctccatacggaccagcatcaaaatccagagcatttatagagcatatggtagaggaaataggcagattttctggaacaatacagctgaagcttgagaacataaactgaggtgcatggtcgttatcatccaggacactgacaaacacaactgcaaaagaaaaatgtttcttttctgcatctgaagcttggacagttaaggtgaattttgtcattttttcataatccagaggtttaatcaaataaagaactccagtgttttcttcttaagtaaaaatgtcccttctcatttccagagatgatgttgtaggatgatttctgcatgtgaccctgtgtcacggtcatttgctgagaccacagtgatgtgactccctagaggggtgctttccttgacatgggtgtgatagctcaggctgctgaagtttgggggattgtcattgacatcaagtacttgtattgatatgacagctgtggaactcaatggagggcagccactgtcagatgccagaatgacaagctcatggctagcacttgcttctctgtccagactgtgaagcaacacaagataaccgacttgcttataaggatattctgaatgaaagaacttagtttccacatgaaaattgttctgtgaattaccactgatgatggaatattcaacatatgtgttttcacgggtccagtcatggtcgatgtttgaaaatgtaacaagcgtgcttccaaccagagcatcctcacttaggctaagattataggatttgactgtgaattcaggggcataattgttcatatcttctattcctatctccactaaagtaagagctctcaggtcaggatttccaccatcactggcttccacaagaaattgagttgttgatattgtatccagaagtaatacgggactgatagtaaatattgtgcctgaaaaataagacatagtatttcaacactgtgaggtgcagttttgatgatccatttaatcggcagttgactatccaatgtctactaatatgtgtttaattctttgttagatctgttaagtcacaatgaacaatgactccaaatagaaatacaaattattgtatttatatgtttataacatgtaagatacagaaataatattcatgacattcactctgtgaaatatgtgtgctgcttgaggttgctgttgccacaaattcctctgaattttgtttttgtatagtaagttgttccactattcttaaaaaatatttttgtttgtaaaatttataccccattctactacccacaaacacatgtataaagatattctggcataaagatacttattctggaaatacttgttgatattcaagccaaatgaaagcagtaaaaatg

SEQ ID NO: 375740 - DNA, 369 bp, Homo Sapiens
tgcaagtgaaataatattgatttctgccctcagcttcaaataaagtaaattgaaatgggaacaatatcaatatggtgtcttgatatatttataaatatgtgattatcatttatttttaaaataatttatcaaaaaacaagtctttagtgttcaaatacttcaaatcatatcctcagatatatttttagcccatggttttatataatctttaagaactaattttaccactgttataggttcaccattaaatataattggctaataaaaattttaaggttgactaaattaaggaggaaattatttaacatttttaatgtgccataaaaggggtaaatggataaatatttaaatgcccactatggggttcct

SEQ ID NO: 375741 - DNA, 329 bp, Homo Sapiens
  misc_feature (248)..(248): n is a, c, g, or t
  misc_feature (252)..(252): n is a, c, g, or t
gaaattttatgtataaccccaatacataaagcctgaaaactcaattttatcaatataaatgtattttgggttcacatttatgcttattcattttggctcattactaagcataataagattctgagttatttctgaataacacaaatgtggagttatacatagttgatgaaaccagcagccaatttatagctatgccctgttttatttgtatactatcaagaaaattttgattcacacaaatgtaagcnaaantaataggttttaaacatacatctcaggaaattctttaattagagatagctaaagttattcaaggtctatacaaaaat

SEQ ID NO: 375742 - DNA, 374 bp, Homo Sapiens
gaagaatgaaaggcgtggctcacaaaggtcctactttcaaggagcttggagtctcacagagctgccctagaacctttccacagttcaccctttcctagcttttagtagcgaaatgttactagtttggaatgttctcaaagagcttgagtcattctcatacaaatattacacaatgtgaaggctctgttatttgcttggtgactatggtgtgccatgcatcagaagaggacatgtcttttactctcgaataataaaattgtgcctccaattcaaaacaacatggcatgcacgcttatgtttccgccaataaggcagaaacagaagagaaacaaaagcaagctgtgtgtagcctacacaaaatagttaagctgata

SEQ ID NO: 375743 - DNA, 504 bp, Homo Sapiens
  misc_feature (413)..(413): n is a, c, g, or t
  misc_feature (437)..(437): n is a, c, g, or t
  misc_feature (448)..(448): n is a, c, g, or t
  misc_feature (469)..(469): n is a, c, g, or t
aagtacacatccctagacagctttcagactcacctaaaaactcatctcgacactgtgcttccaaaattgacctgtcctcagtgcaacaaggaattccccaaccaagaatccttgctgaagcatgttaccattcactttatgatcacttcaacgtattacatctgtgagagttgtgacaagcaattcacatcagtggatgaccttcagaaacacctgctggacatgcacacctttgtcttctttcgctgcaccctctgccagggaagtttttgactcaaaagtctccattcagctccacttgggctgtgaagcacagtaacgaaaagaaagtctataggtgcacatcttggcaactggggactttccgcaacggaaactggacttggcaggttccatgtggaaacacaaccacngggggaaaaccaaggggaaagtgncttaagtggcnttttttgcggtgagtcccttnggcacccggtgggagttgcattgccacatcaccaa

SEQ ID NO: 375744 - DNA, 325 bp, Homo Sapiens
  misc_feature (53)..(53): n is a, c, g, or t
ctagaaggagtcctaaatgtggaaacaaaatcttgatatacaccaaaatagancctccttaaagcataaatctcacaggacctacaaaacaatatcacaatgcaaaataaaccaaagtattaaggcaacaatacagaatggcagaatggataaaaaaatccaccaaccaagtatctgctgtcttcaagagactcacgtaacacataaggactcataaacttaaggtaaagggaaagggaaagatattctacccaaatggaaaccaaaactgagcaagagtagctattcttatatcagacaaaggagactctgatgcaacaatagt

SEQ ID NO: 375745 - DNA, 221 bp, Homo Sapiens
ttttctaggtagaccttgttctgtagctgctgtgaagaagctgcagccctgaactcaggtcatactcaggaacagcagcaggggtgtgggtggggtttgagggaaggtactctgaattcaccttcatgtttaacctgttccatctgacttgggtttcttcattatattgttccctcccactcaccttcacttctgtattacaacaatatagactttactct

SEQ ID NO: 375746 - DNA, 505 bp, Homo Sapiens
  misc_feature (38)..(38): n is a, c, g, or t
  misc_feature (482)..(482): n is a, c, g, or t
  misc_feature (492)..(492): n is a, c, g, or t
agaataagagagaaaatttacccagagtgtgccatgcntaggcttttctgggaatggcaaggtgccaggatttgtttttggttcgcttgcaggggtggaaacttggaactaggttccaagatggtccccgcagcaccccacaagaagaaggaggaagcccacagagaaaacggggcatgccagttcaaatccacttccttttaaagagcttcctcagcagcccaataacttttgccttcatctcattggccagaactgtgtcattggctactgctatctgcaagattgtctgagaaatgtagtttttgtagctggatatataactgcctttgacaaaaatccagtttctcttgatgaagaagaagatggtggtggatcttgggaggacaactaacattttatgccctggctacagaatacagttgcagaggagcataaagtttcaaaaagatccaaaactcttagttcccttcaccaacttntcaaaagctnccaggcagcactg

SEQ ID NO: 375747 - DNA, 465 bp, Homo Sapiens
tgtggtagaaccagctgggagaggtgtgggtcagtcatgggcttggtatcccctggtcttcactattctagcttgccattgaatttgtctcccagaggaaaagaaagaatggtatttggaattaaattccaagatgttaacttgacatctatatattgcacataatcctgtatagtgaatggatgacctcctgggaatagttcctgtgactgattttagtgataattgatcatgaagaaatggcagtactgctccacttcaccttcctagtgactattatgtgttcctagtcagagtgactcagcagagattattttgttctcttgtgcaatttattctgtgtcattttatttttgtaatattgtggcagctaaatgattattctgtgtatgtttttcaaaatattaggtggcttatattttttaaaaggctatgaaataaaaataaactatacgtaacacagtt

SEQ ID NO: 375748 - DNA, 365 bp, Homo Sapiens
ccataggtcctagacaactgtggcccctacctcaattcccacgtcagtagtatgcccttcgttttaaatttaaatttttgtcccaaatatttttttaactaggaagaaattcctatttcaccttagtcccaattgtggtatttgtagctagcactgtaattcatgctctctgcatagtaaacatatcataatgtttcatcactgcacagaaatcacttgatctgaatcaatctattgtccctgaatagaatagcgatgtgtttgtgtgtgatactagaaatgacacatggccctgacgtgcatgctgcgatacaacaagaaagtgaagtattatctcaccatatcaataaagttgtgcttaatgg

SEQ ID NO: 375749 - DNA, 534 bp, Homo Sapiens
ctgaaaagtgacgtccacagcctgtataccagggacaaggaggagaggaaatgttcctgactctcccttcccatgtatcagctttttccccactacacaaaaagggtccaatgttgacctcctggggtcctagacttcctgagaggtccagaggtgagcatgtgcctcaaggggcccactcatcaaacaagtatgaattgggcttcagctgctatcaggcactatgctaggtaaggcagaaagcaagagagatcctacctagtcctagggacacacaacctcagagacaaatgcagaaggcagttaccaagcaattacggtccaacatgtctggtccaaccttttcctttactggtgaagaaactgaaactttagagggaatgagcttgtttacatgcaagaagtgaatttgagatcaagttgggactcaaatcctatttcacaattagaattctgtcctaacattcaacccaattcaataaacatttgttgaaaaatctatgatgtgcattaaaaattttcagtgctttaaac

SEQ ID NO: 375750 - DNA, 465 bp, Homo Sapiens
  misc_feature (19)..(19): n is a, c, g, or t
  misc_feature (37)..(37): n is a, c, g, or t
  misc_feature (109)..(109): n is a, c, g, or t
agaaggtgtgaaaaggaanagggctaacagcccaaantgaggtttccccagacccttgttaactctgccccccacccttgttacccacagatgatccacagcagttttnatggcaggcctccctacagaatcacccacagagaagtgacaatctggaaaatcacaggcaaattgtagctatggactgtggaatttaacacgtcatctctttcccagcggggctgagcaacagcaaggaagaggttaaagccttctcacttgagcagcctttgttctcggggcagctgcctgcactgagctctgaggcctttgaagtggaccagagagttcaggccaggctccccaggaccccctacctgtccacacactcaggctccagaaacttgacaacttttggcagtgactgaatactttcatgaagaggcatttttagtttttttactaacacaagaaattttacctatc

SEQ ID NO: 375751 - DNA, 508 bp, Homo Sapiens
  misc_feature (400)..(400): n is a, c, g, or t
  misc_feature (478)..(478): n is a, c, g, or t
  misc_feature (487)..(487): n is a, c, g, or t
aaaactctgtatttactgagttactagatattaaacaaaacaataacaaactgaagacaattcacctggttaagcagtatgcattatttacttagatcaggaatagcctatgaaatgttactgaattggttcccatgaacaaagcatagcaaggtgggggtaaagtgagtcaggaaggacctgaccaagataggatgtgtggttaggactttcagagagtttacagtgggtggatttgttagtttcctgggtctttcaaaagaggttaagtgtgtattggtgaagccatttttattcaaaattttatgagaatagttttcattgtccttttttatgtttctttttagcgatttaaatgaaagattacatttttattaaagttgttccaaggaattagccntaatgcatggtcacctcgtaggccttgtgctttttttgttttctattgacttgtatacgctctgagggtgaatgaccngatggtaanaaatatgtgggtaccccgtgt

SEQ ID NO: 375752 - DNA, 480 bp, Homo Sapiens
  misc_feature (417)..(417): n is a, c, g, or t
  misc_feature (424)..(424): n is a, c, g, or t
  misc_feature (430)..(430): n is a, c, g, or t
  misc_feature (438)..(438): n is a, c, g, or t
  misc_feature (449)..(449): n is a, c, g, or t
  misc_feature (465)..(465): n is a, c, g, or t
atgttatggctaatacagttagtgggtaacttagatttatattagctagcatctaatttgcacaactagaacacatcccagaacaattactgaaaagctgaaatttaatgggtggtgatgtagcccaatgagggcgaatgacattccagcttgacctctccagaacactaatatcctaaaatacagaacatgctgggttaagtgcattagtgcttcaagcagaaaatgctgaaaacaacgtgtaaagtactgaatctgagtaggctgaccctgagaagggacaattaaagagacaaccaagggaacacattgagactacaaaaatatgaataatctcaattatattcatcacactttttttcatacccttttcaaggaaacaactaggacagtaggtaaccacatggatttttttanttttctnccgttntaccttgngggaggcaaanttgtaggggaggccanttttttccccttaaa

SEQ ID NO: 375753 - DNA, 339 bp, Homo Sapiens
gacagaggaaggaagggatgggcagaggcagacatgggcagaatggagccaggcaagcccagctggagtgggatgactccaccctcccctactagtgaccaggggtctgctgcccggcccacatgtcccttttgtaaaccctgacccagtgtatgcccatgtctatcatacctcacctctgatgtctgtgacatgtctgggaaggccttctccagcttcctgggagcccaccctttaagccttgggcacttccctgtgtttcatccatgggggaagttccaagaagcccagcatgggccatcagtggaggatttcagggtaggatttgttcctgttagc

SEQ ID NO: 375754 - DNA, 462 bp, Homo Sapiens
  misc_feature (48)..(48): n is a, c, g, or t
ccattaaatataaaagatggtccagttttgaaagagcaaagggtgccngaaatgacctgtaccggttgggctggtgcctttcctccaaatggattgcccatagttccattacctagtaaagaaaaggaaaatgtgatttacgttgtcatttttccctattaaaaaaaacccttaagaatggggcacttgagctgtccctgcaatgttttcatatctagtagtcattttagggaaagtgataatctgtagaatgaatagttatgttttgatatgactgatactttctttgttaaaaggttgtattaagtcttcaatttcaagtctagcttaaaagtgtaaacattatgtgattcatttgaatacaagaatgcctatgaaatacccactataacagcattccttttgtgtttagaactatagaagaaaatgtcttcaaataaagtagttttcagtcaaaaaaaa

SEQ ID NO: 375755 - DNA, 468 bp, Homo Sapiens
  misc_feature (59)..(59): n is a, c, g, or t
ggaaaaccctaaaacccaactccaatcccaaactttaacaggttgtccatttgggtagnacacaaatgtgaaacttcctccctgcaataaaaacctatgttgacttagtttaaaagcagcatataaaggatgttgccccataatcccctaaccaaacaaggcatctattttctcttttctctgtccttgtaatagacatcctaataggtatacatagttttgatgtaatttacatctatcttttactttcttatgttaaaattttctgtttattatcatttcaggaaacgtttcaggatagtaatagagattaacagcaacagtgaagcattttaccctagagaagggtaaaagttggaaatgttgctattgattcacctaggttatgccactttaatgtcagtgtgcctcagtttccccctttacaatacagggattcaggtcttgaaaaagatatttaaattgaat

SEQ ID NO: 375756 - DNA, 541 bp, Homo Sapiens
  misc_feature (417)..(417): n is a, c, g, or t
  misc_feature (461)..(461): n is a, c, g, or t
  misc_feature (474)..(474): n is a, c, g, or t
  misc_feature (483)..(483): n is a, c, g, or t
  misc_feature (509)..(509): n is a, c, g, or t
gcaatctggaggccatgaggaacccctgatggtaaagagtcaatgagaggaagatgttgaggtagagggatgggcagagtgtgagtctgttcttagtgacctcagacctcactttctggacttattatatgcacaggtaaacgtctccaaagctgaagctaccataaatcagattttccatcacttgaagccaaaagcattcctaaccaacacagatagagaccccaggccgccaaagccatacttgttcatagcatcttgctgccttttactgtcaggttagagcctctctatttagatcaaagtgaaggagacagactaactccagccccttcttaccaaggcctggggaggtgaggaacccggcactgagacccagccttatttcaaggcctgggccaaagtcttgccaccaantccttctgtggagtttgggggaaattctaggatttcctggggcntcatttctccacngttaaagtnggaggtttgatcttggtccatgggtnggtgtaactgtagggcattttcttgggttctt

SEQ ID NO: 375757 - DNA, 370 bp, Homo Sapiens
  misc_feature (265)..(300): n is a, c, g, or t
aataaagccctgttctggatcccccatcccctccagaataagagcatgttctgcatgtattaatcttttatgctgtttatgaaacaggcaagataagtctgtttttccttctggaaccataagggtaaccagattttcatctacagacaagtggtagtcatttgtgtttatcatgcaacttacttacaaacaccaagatattaattgctgcaacttgatgtcaaatcacattactgggtaatttttaagactatgtacccacacnnnnnnnnnnnnnnnnnnnnnnnnnnnnnnnnnnnnaacctgtgtgccaagtgacagctatttttttatatactgggtaattcctttaaattggccttaggtattt

SEQ ID NO: 375758 - DNA, 491 bp, Homo Sapiens
  misc_feature (392)..(392): n is a, c, g, or t
gtgcaatcttgagaatggcatttctggataccacaggctgcttaataccacctgcgtatgaaccctggagagagcacaatgttcctgaagaaaaagacgaaaaggagaaattgaaaaaacggcggcctgtctcagtatccccctcctcttctcaggaaattagtgaaaaccagtatgcagtgatatgttctgaaaagcaagcaaaagtaatctcactgccaacccagaactgtgcttataagcaaaatattacagagacctcgtttgtgcttcgtggagatattgtagcattgagtaacagtatctgccttgcctgtttctgtgccaatggacatataatgacttttagttttgccaagtttaagaactctgttgggtgttgtatttacttnggccccttaccaatatggcgggtaggccaggaacgttcttgcttttacccaacaatgggacaagctttttaccctgttttcacctacagaattccagag

SEQ ID NO: 375759 - DNA, 312 bp, Homo Sapiens
ataataaaatacacctgtcacatcagtcatggtgtctgacaacacaccctcagccttctaagaaaaacagaattgcacaaaattcttaatacatagccatagaaaataatgttttatttcatatggcaccaaatcaaaggacaaccataggttaagccataatcttatgacagaatctgaagtgagaagctctagtcaaaaaacagtaatctgaaccaaggagactgtttggctcccaggaaatttgaattgcagaacaaaggaatcacataaatatcagcaaaaactgaagctgaaagatttcccaaaata

SEQ ID NO: 375760 - DNA, 381 bp, Homo Sapiens
tttagtaagtccaaaaaagctccatatagacacagccctaaattaaaataattggattcagtaaaaacctactgttgagattattcccctgtctcccacactgcccagaaacttaccacttttgcaacatttctgacctcaatttattcaagagtcactagtggctcaagagttaaaaataaagcatcctgggtgtctttaggaaagacatagtaagtgtaaaactatgaattctatgaactgctttgcacgtgtaagaaaatgcaagctcactaaaataaacatctaaccagcatctttcccccattatagggcaaaacggtttaatgccctctctttttatatttacattggacaaattaagagcatccaacaaatgga

SEQ ID NO: 375761 - DNA, 435 bp, Homo Sapiens
  misc_feature (34)..(34): n is a, c, g, or t
  misc_feature (47)..(47): n is a, c, g, or t
aaacccaggaagtccaggagccaacccagtggcnaaaaacacagatnaaggagccatgccacctcccacccccaggcctgcacctccccaccccactgtgcaagctgggatctgtcaagggatactcctcagagaggcaatcatgggtttcttcctctccctcccacacaggtttggaataaattgcctcatccaatttgaagacttcgccaatgccaatgccttccgcctgctcaacaaataccgtaacaagtactgcatgttcaatgatgacatccaaggtaggtttccaccccacctgatgaagctacaggggactaacttatattctcaacctcactgggatgccaaaggggtgaggaaaggctgtcaccccatagttggttttctgccagcagctgttgaaaaaagaatattaaacttagattcaactcc

SEQ ID NO: 375762 - DNA, 673 bp, Homo Sapiens
  misc_feature (155)..(182): n is a, c, g, or t
  misc_feature (258)..(270): n is a, c, g, or t
  misc_feature (644)..(644): n is a, c, g, or t
  misc_feature (657)..(657): n is a, c, g, or t
tttaaatcagcctgggtgtggtggtatgcaactgtactccctagctatgcaggaagctgaagtgggagaatagcttgatcccgggaattcgaggcttcagtgagctaagattgtgccaccactgctgcctgggtgacagagagactttgtctttnnnnnnnnnnnnnnnnnnnnnnnnnnnntgttggaggagggcttaaatgtcttgattgattggaaagtagaacttaatgatggtgttaagaccaaagatggtcnnnnnnnnnnnnngacaaaaattaattctattactaccctccatgacacttctcaccaaagacaaacatcagaaatctccccttcggactattttgttaaggatgttatgcaatgggtgttattattgtgacaggatattgcacagtatgttatcacgttgagagatgttttaactttgaaaacattttcaacatttccttccatttgggacaggttgtagcctacactgtggtgtccagctggaactttatgaagtcaatacactttcctatatttttggcaggccagtacaccttcttagttcagctctgtgcattgcgaaccctaagggatttacaacttaaacctggggaaaagtcccagtggcaaagtcccttgtggggccntcctgtggaatgnggaggattaaatgttg

SEQ ID NO: 375763 - DNA, 301 bp, Homo Sapiens
  misc_feature (28)..(28): n is a, c, g, or t
ttttaggggttttaaaaaaatatgttgntttttgtaaatcttaaatatgatacatcagctcttacctcttgccatttctgggaactttattatacatttgatagtgtttttagtgcatttttagatgctgggttattattatcttaaatactctctctaatcagtgagtttatagtttcataaaatatcacttattgcttttcacattgtaaaacccccatactgtgaataatttcattttatttatgcatagcagcacaagattttttaagaataaatgaaaagatttttaagaccctat

SEQ ID NO: 375764 - DNA, 522 bp, Homo Sapiens
  misc_feature (455)..(455): n is a, c, g, or t
gtacattatgtatctccagtagcaatgttgccatattatttatttcccaaacttagtggacaatggagtcatttctacctagagtaccagtaaacatctcccagtgtgctatagtagaaaatgtctactcctcactgctgacatgttaaacttactcttggtttagagcatgtgtagaaacacctaaggtagctctatgctaaataatgaagagtagcacaagaatgaatgtatttgctgatacgttgctcacattctcaagcaaaaattcaactgcattaaccgatctgagagttttcctttaacctggactgtgtttctcaagcacattttttctttgttcactgcccaaggactagaactgtatttttaaggttgttttcccctaaaaggacctttagtaagcaaatttattattaaatgtgcacatcttattcacccaagggaataaaagnctacttcgtaatgttgttactaaattttatcttgaaaataaataacagtgtttgaggacaaaaaaaa

SEQ ID NO: 375765 - DNA, 501 bp, Homo Sapiens
agtgctaatttatagtttatggaaacctgctgctactgactagtacctcgctaaaggtagaagccgacacacagaatagtaaagctcaggtttgatggtgatctgtaaggagtcacggttcttgctaatcgatgagaaaccatgataactggcagactgcagaagcttttctcttgtcaccggaaccagcagaggctcatgaacgacatttgcaaggctattagtactgcggagaagttactagatggaataatactggtcctgactgaggaaatgaaaaggaacatgcaagttcacgaggttaaatgaggaatggctgattcaaaaaaattagaaagaaataacgtgatcaacaatattggtttgaaggaatgggagaggttgtctttatgttaagtcttgttgctagaggatctctattttatgttactgttttttgcatactagagtcttctacagatccttgtatgaatgttgtcagtcattctggaaataagcata

SEQ ID NO: 375766 - DNA, 539 bp, Homo Sapiens
  misc_feature (372)..(426): n is a, c, g, or t
acctgagtactccccaaacccacagcaacacagcatgggctgcaagagatactgttgctcacacccttgcaccacagcccccagtagaagttcttgctcctaaaacagcgctgggagttcaagatgatctcatccaatatcacctcataacagatggggaaaggcaggcataagaaaggtcatgtgtttgcactttgttagtaccagggatatatatatatgttagttttcatgcagtcaactttgtaggaggtactaagaatactataatcatagtttaaagcaggaaggaactttaaagtttagctactctggcacttttcaacctccacactagggtgtcaagatgtgatgtaagctctcttgcaaatnnnnnnnnnnnnnnnnnnnnnnnnnnnnnnnnnnnnnnnnnnnnnnnnnnnnnnnagggacataagtcagataccacccctgccctcaggacttcatgcagtaatgaggaagggtgacagtaataatcacaagcctaatagtagagtcttattgttgcaagtgaattg

SEQ ID NO: 375767 - DNA, 361 bp, Homo Sapiens
  misc_feature (15)..(15): n is a, c, g, or t
  misc_feature (21)..(21): n is a, c, g, or t
  misc_feature (38)..(38): n is a, c, g, or t
  misc_feature (45)..(45): n is a, c, g, or t
  misc_feature (95)..(95): n is a, c, g, or t
cccgtcttgtcgggnagatgnaataaatgcattttaanagaaaanggagccaaaatccttaaggattattttccaaatcattaatcactactatngctttaactataatttatcagtagctgatggtattaaaaacagttttaaccctggaggcattcccatgtctaaaatttagttagtttagttgccttagaattgaaaagtcaaccccaagaccttttgccttttattactgtccaaatgcatcttatagtgtgaagtaaaatattctgcgtctttgtataactatgaaaatatttgaaatgctaacatttttatttaaggttaaagaatgagagctacttgtaaaatattaacatgc

SEQ ID NO: 375768 - DNA, 426 bp, Homo Sapiens
  misc_feature (37)..(37): n is a, c, g, or t
  misc_feature (75)..(75): n is a, c, g, or t
  misc_feature (82)..(82): n is a, c, g, or t
  misc_feature (93)..(93): n is a, c, g, or t
  misc_feature (177)..(177): n is a, c, g, or t
ccttaacccgggatcaaaaattaacctaattgcctangccttcaaactcccaagaagaagggaacctgccatatnatgaaanagaagtggtgncgtgggaatggctgcccccgaggaagacaacaaagaagccagtgcccctgggagtggaaaatattggaggcatcttcattgttnctggctgccggactggtcctttctgtatttgtagctattggagaattcatatacaaatcacggaagaataatgatattgaacaggctttttgtttcttttatggactgcaatgtaagcaaacccatccaaccaactccacttctggaactactttatctacggatttagaatgtggtaaatcaattcgagaggagagagggattcgaaaacagtcctcagttcatactgtgtaatcagtttaaaaaaaa

SEQ ID NO: 375769 - DNA, 488 bp, Homo Sapiens
  misc_feature (343)..(343): n is a, c, g, or t
  misc_feature (410)..(410): n is a, c, g, or t
  misc_feature (451)..(451): n is a, c, g, or t
  misc_feature (470)..(470): n is a, c, g, or t
cagggcctgaggctacctcagaaatatctcctgtgtttctggtggtggcgtaaaggggagagccggtgagaaacactgcacctgcacctacggggtcggtacatgtgactttgggcaagtgacttgatgttgtagtttttttcctaattttgtcttgacgtccttctcaggagagagtggctgtaaactctagccctgccctgacggggatcctggggatgtggtcgtgggtgtttcccatgtgcctttcatgggatccttctttgacctcacagacggcctgattcctgagtgtccaacctgtgggccaggtgtccctcttcgcaggaagcttgtttatccnggcacatgaccttgtgggcttttcatctggacctgtgtccagtttattcctacttgaggacagccantttcccgggagagccctggaccggggaaagaagtttagggngggggtagagggaggcaantcatcagaacccaaggaa

SEQ ID NO: 375770 - DNA, 150 bp, Homo Sapiens
ctttcgaggtactgtaaattgttaactagggatgccaagcaggcttggttcaatggctaaacctcttattgtattacagtgtaatgctgatctcagcctggtctcaatgccagagcacacagagacttgaataaaactgttataacgatt

SEQ ID NO: 375771 - DNA, 464 bp, Homo Sapiens
  misc_feature (171)..(302): n is a, c, g, or t
  misc_feature (389)..(389): n is a, c, g, or t
  misc_feature (399)..(399): n is a, c, g, or t
  misc_feature (409)..(409): n is a, c, g, or t
  misc_feature (452)..(452): n is a, c, g, or t
ggcattctgaagcaagtcttaacagagctaaaaatcacccttacccaattctctgcactgacatatgtacacaaagtaatattttattattctccttcataaatggtttctttaattgaacctttgagccttatactatttttaaatttccctttaaaaattgaattacannnnnnnnnnnnnnnnnnnnnnnnnnnnnnnnnnnnnnnnnnnnnnnnnnnnnnnnnnnnnnnnnnnnnnnnnnnnnnnnnnnnnnnnnnnnnnnnnnnnnnnnnnnnnnnnnnnnnnnnnnnnnnnnnnnnactttaatttaggaaaataccctgaattaggaagtgcttcattcctcatttgtgtacagctgttcctctatatacggagggggattnggtacccggnccactgcatncccaattaccaccccatacttcaagtcttcacaggctttcccnggccggaatccc

SEQ ID NO: 375772 - DNA, 423 bp, Homo Sapiens
gatacaaccggctacatttaaagcatctcagcctaataagaacacactccaggaagaaatactgttaatttcctccccattctcattcggcacacagtcgttagaaattaattactgttggttgtccagtacatgaccggtcataacttttaattattaataatgtctagcttcacaagttgtcaactccagtatgtaatccacatcacttactttcttagttatctcgaaacatgacttgtctcctcctatctgtctttcatgtcaaagattctacaaagtacattttgtttatagcctttttaataacatctgaaacacataataacactgctaattacctactttcagtaatggtagcaaattgcataatatcactgacttgttcagaatgtttaaaatgcaaaggaagtcacctactgg

SEQ ID NO: 375773 - DNA, 532 bp, Homo Sapiens
ttctaagcatgaatggagtgtgagggttataatgtattaaatagcattgtgcttattaagtctctgtttagtatattaggttggcaggggaatctatttttctttgattggaagcagctagcatggcacatggggtgtgtatgtataataagtgtatgtgtttttcctgctatattttatttgaggcagctgttttaatagctttcagctttaaagttatagctaagtgtgtatttgtttgatagaaggctcgagaacctcttttactgccagtacacgtaaagcttggctaagcagacgcatcaggagcaaaccatttgtgttcaccaatctgtctcggcaagtcccagggccactatcttgctagaagccactgtgtgcttttgaaagcatgaaattagttttatactgagcacatggtttctcgtttagcagctctttttatggtaatggtcaatttatggttcactgccaggatttcggtgtactgtcaaagccgatagcttctgctaaggcgtctctatgaagattt

SEQ ID NO: 375774 - DNA, 154 bp, Homo Sapiens
aaaaagtgaaacttcaaatacagcggaggtggcttctttcctatgaggctggctgatgggtgccagataccaaggcccatgtgttactgaggagacagcctgctgggctggggtcaggagctagcggagggaaacggttagatctcaggaaaat

SEQ ID NO: 375775 - DNA, 145 bp, Homo Sapiens
aaaaaaaagagggactgtttaccattcttccactgtgctgttataaagttgtatttgaaaggtaatgttgtttttattaatcttttgtcttaaaataatttaaagtgctttgaattttaaaacattaaacaaatccttaaataac

SEQ ID NO: 375776 - DNA, 362 bp, Homo Sapiens
  misc_feature (252)..(252): n is a, c, g, or t
agagagatgtaatctacagaaaatttaattgccaaatggaaaattcccagaggatttttagaccaactttgccctgttgcattcccagtttggtcccaatataggccttctgcaagaagagatcaatgccgaaccgaactgtgaaagcatgaacaatcccggcccagattaattatttggctttgtccgtgagcacacagtaggtacattagacaacagatgtgtcatatcaccccgactgcaaggaccagnttttgaggtacaccatagacatctggggatgttcaaaccgatgtgccaaaggagaaaacatttcagaagtgtcgacacatttgagggaacagacaagtcaaacttcaagg

SEQ ID NO: 375777 - DNA, 432 bp, Homo Sapiens
  misc_feature (16)..(16): n is a, c, g, or t
caaccccctcagaagnaaaaataataagagaatccctaaagaccccgcctgagtagtagacccaagtaagatcatcacaaacttcatgctgtcaaatacattacccttgaaggaaaattatgcagacagcttttctgaacaactccatttatgccacatgcttattattctttgaggtggaggaggtggcagggaacataatttctgtttgaaagttcttttgttttctgctacctttacttaaatgttaccgggtactatttttatatcctataaagtgctttgaaaaaatgttaagtgaatagtgctacataaaatagaggagaattttcacattctctgggttgtaagaagcaaagtgaataatacttgagtcttaaaagaggaatgataatatgctgaaaaagttaacaagtagctaataatccccct

SEQ ID NO: 375778 - DNA, 649 bp, Homo Sapiens
cttatacataattcaaaatttcaatccatggtatattttatggtacattttgaaaagaaaatttgtaatgctccttagttacaaaaattagaaggaagctacataaaattcaggtgtcctaattaaattcaatttgattcaacacacgtattaggcataactcatacctaacactatttgataagggagacaggctccctgccatccaagaactcaacctagggagcagtgacaacagaaaccgggttgggttaaggcaaagagccatggataatgctgcaacatgagtggcacagaggggagtacacagagagagcaattaatttggtgtggggaaggtggtgatccgaatacagccagccagtttgaaagtgttccgtttttaaataaacagtatgcttattttgatttgtgacctaggtgtagaaaaaagcctgccatagtgttacatatttatagtagttctttgtaaaaatgttaagtggatgagctattatgaaagtaaaagtttcattttttctcattaaaattagtactaaattactatggatcagatgataatattaaatagtactctgtagaaaaaaggtttcaagttgaattaatttatgtactgattattaatacagaataaatgttatattgactc

SEQ ID NO: 375779 - DNA, 456 bp, Homo Sapiens
gtccaaaagaaaagataaccccaaagattatgttttattgtcaccagtttgtttgttcattgaaatctaacctagccatcttactctagttctttttgggttttacgcatatatgtgtgtacaaacacacacacacccctaattcctcaaatgctcttggcataagttttatctcttactggtctcctcaaggcgtaaaataaatctttgaccttgatcattttaattttaaaaaaggtaaaagtcgtgagaaaaaggagtgttttatatgaaaagaataaagggacatataattaaggcaatacacaaacctgactggatcctgggttcaaaaaggaacagcttgatacaactgagggaaattaggaacatgctctggggtatcaggatgctactatgggaattccccattcattctcctgggggtgtgggtaacagtccatgggttatgtaggg

SEQ ID NO: 375780 - DNA, 365 bp, Homo Sapiens
  misc_feature (130)..(130): n is a, c, g, or t
cacacaagactgaaggtctagctgtgacaggagaccacaatgagaagtcctgaccgtgccgaagctcccatgggatgccaggatgccagccactgctccacgaccccatgctgcattgtacttcaccctnacgagcataggcaatgtgagcactacctctgcagaggatactgaggctcagagagacaaagacatgggcttaagtccacacgactgactgtaaatgacagaaccaaggtacacattccggctttctaatcccaaagccagagtcttcccaacccaccccaaccccatgtttacaggcctgagacccctctcaccccagtactgtgaaaggccccagtaaagacctgtaaaaggac

SEQ ID NO: 375781 - DNA, 371 bp, Homo Sapiens
cagtcctcagtttcctcacttatccttttaaacatgtttacatcgcatttcactgtttaaaaatcagtacaaatagctttctcatcaagaacttaaagcatttctccttttcatcttcaattatctctaatgcagaaaatgccaaaaattgggagactgaaaaaaatgcatatgtgtatgtatcaaggtgagtttctcctgtgagttaccagatagaacacaatagagatagatctgcgctattttattttaacatagagtaaggaatcatttagaatatttacatgtttttgcttatcacaataatttcataaatttgggaatagttcttcgtatcactcaaaaagcataaattagagactacatcattt

SEQ ID NO: 375782 - DNA, 339 bp, Homo Sapiens
  misc_feature (148)..(148): n is a, c, g, or t
taacaggttagccaagctaccgatctattgcctgaaaataaatgagaataattttggagctaaaaaaatttagtatctaaatttttgtaaaggatctagctggaattctaaatataaaatgtgttaacagtcaacaaagaataacacnacaaatatcaaattttctctggtaggaaagtagataacttgaaaatcatcatcacatctctgtggaatttaggtaagttatggtacagaatctttgagtccaataagctgagctattttaaacctaattgtgcacaactatgtaaatgtttgaaaacctgctcccagtcaacagcaagaaacactgtccag

SEQ ID NO: 375783 - DNA, 428 bp, Homo Sapiens
gcaaccgaaagcctttaattaaaaagatggattaggatattttaaacaaaattaagaaaaaactatgccgtttgtcctgcctttaccttactgtagcttttaaaacactggttcagcaaggggtaggataaccatgaagcttcctccaagaaacgcaggtcctgagtatctgcattattaagctgacgtttggtattgctgaagcatcttaccaataagcagccaaaataaaaggaattatcaaggaatgacttgtgatgaatttaatgattgcccttcaggaattaagagtcttatgataaacaaactgagtcaagaaatgtgaataattaagtggtgaagagtgcaaaaaggatgagaacactaaaaattaaacccaatcatgtttcaaaagtttaataccgttttttataaaattgaacttgcag

SEQ ID NO: 375784 - DNA, 569 bp, Homo Sapiens
  misc_feature (19)..(19): n is a, c, g, or t
  misc_feature (25)..(25): n is a, c, g, or t
  misc_feature (35)..(35): n is a, c, g, or t
  misc_feature (54)..(54): n is a, c, g, or t
  misc_feature (59)..(59): n is a, c, g, or t
  misc_feature (80)..(80): n is a, c, g, or t
aacctccatggatgttggntcccanggagctgcantgaccgccctcccaactanagggncctttagccaaacgctgcccnggatggcttcaactcgggactcccagccctgccctccctacatcctacactggagctcctagcacaggcaaaaccctaactgggaacaagcctcagtgcaggcccccggatcctcctgggaagaaatgtaatgggcctcagaaagtcctgtgatagaacagcactggatatgtgaaggagaggaaaacagtctggagccccatttgggggaaagggaaccaaagcccaaaaataacctgtcacagcctcaaagataactgcacagaagacctggatcttaaaactcctcatgattctcatcccagtcattccacttctgggattctgttttagaaaataatctaaaagtaatcaagcgtaggcacaattattcatcaccatattatttagaactgaaaacagcctgaatgtggaagttagtaaattatagtgcaacttgataaaaactatgatgaaaatatttataaagcatcttaaagagaaaaaaaa

SEQ ID NO: 375785 - DNA, 231 bp, Homo Sapiens
aaaatttactctactttaagatgccttagcatttccttttcgtatcttcactcatctcagctatattttgagggtattctttacataattaaaattaacaagaaggtattataatatataaaaacttagtttcccctgagagttattctactttttaaaataaaaacttgtgttcacttccaacataaatatgttctcatgtaatttacaattataagacatgttccattc

SEQ ID NO: 375786 - DNA, 733 bp, Homo Sapiens
  misc_feature (16)..(16): n is a, c, g, or t
  misc_feature (46)..(46): n is a, c, g, or t
tgtcggtttgtttttncattcatgttgaagtgctttgcaaggcttnaggaaacagagttgtgaggagaaagaagaaaatggctgcccatttcagtaccctttcaaaggtatctctgcctaggaacattcttcagaaatgcaacttcttctatttagaaggtgacctcctgacagcgttcactctcaatatggaggaaaagaccacaacaactgtcctttctcaattacacaaatgctgttaaaatgtgatcaaaccatggcatcactttgctgaaatgtttctgcacagtcctgcctcttagattacagtcagccagaaaaacatacttataaatcatcccttttctgatttttgtagtttggcaattgagagagcaatattgaggttggccggttataaggagtcccacaatagaatacccaacaaagtggctgccaggccttctcagacagccatttgctttgggttttgcttccagacgttgttccatatttttgccccaaatgtttcatggcttataccccattggtttattttatatccatgggacctttctttctctgctttcttgacttaaaggttgcagcagtacatctcgtcacctagggaataggattattcagggccttgccaactagttatggcaggggatgggcacttaaaaatgggatgtggcatcttcttttccacatttaactacttaacccattagggaggttggttttgaggccc

SEQ ID NO: 375787 - DNA, 346 bp, Homo Sapiens
  misc_feature (46)..(46): n is a, c, g, or t
caataaaatctcatacctcattagtgagtcttatttactgtgaggnacttgataagctaacccttctccacatctaggatagttacagattctcttacaaattcatggcaacctcaagaaaggatggtgaaaaagcactaatgtacagtctcaggcatgatagatgttttttacatcatggggaatatgccaacaattatgagagttatgccattaatattccttacctgaaaatgccttgtatgtatgtgggtacccctttgaaataattaaacaagttatacatcagctagttgccttcagatagtcaacatctcagaacatgtcacttctcatggtaccaagt

SEQ ID NO: 375788 - DNA, 433 bp, Homo Sapiens
  misc_feature (45)..(45): n is a, c, g, or t
  misc_feature (51)..(51): n is a, c, g, or t
accatggaataaaatgccaaaaccatcccccggtaaaaagcccanacctanggatggaatcctgtctgtccccttggtgcctaaacatatatttggcacaaactgcaagggcttggatgttgaatgagagttcggtccctcatatttgttacttgagaactgcaaaaaacaatcctaacttattgttggcaggaaacaaatttgattgattcccaaataaaatagtccttgtaagataccattgattatatactgaacaatcacaagggctggggtcagattttaaaattttgtcttttaaagttggaagaaaaagtgcaatagaaagacttaaatagttccaagacgttttccaatggtaacatttggttatcaacttatataatttggaataggatcagaacaaataattcttctgtatttcctcgtgcca

SEQ ID NO: 375789 - DNA, 337 bp, Homo Sapiens
catacaaggaaccaacagtgggagagagtctgagcagcaaaacgtggggtccccatctgccttgcctgcaggcgggggacgatcaaatgaacgtgtgcgcttcctgcactctgtggtgcacagtatcattattaactctgggatctgaaaaactcgttcaggccaatacaacttagacccgaagaagacagagaggttgatacgctggcaacagcagcacagagcttgggaggacaccggagctagagcgaagagcgcgatgggaaaaacactactctggcttaagtgagggggaagaatacagtaagtttgcaaattaaaatttctctatttttct

SEQ ID NO: 375790 - DNA, 151 bp, Homo Sapiens
cgcaaaaacagtttggtgcagactacttaatacttatgcaactttgtaattagtgttaacaaacataattaataatcaaaataagagtactagtgtacagaaagcatctctaatttccaatatacaatagtaactatagaacaatgcaaaa

SEQ ID NO: 375791 - DNA, 403 bp, Homo Sapiens
cctccttccatcacatcacccctgaggtccccagaactcaggcccagatacctagtcccagttattcctataaccttaaatagatgttgtggccctagttttggagattcactacccacttaatacatttttccctaagaattttaaaaagttcaaatcaatctattaacaaatgaacttttggcatatgatctgcttctaattagcaatgattagacctgtaaaatgtagttattattcctgtccgttaccacaataaaaaattggttctacgatatcaaaatgtctttatgtcacagaagaaaaaacaaataaaaactaatacatttaaatctcccacatggttttcaggcaacaattctcaattgaaaataaaacatcttacctttaaaatcaaaaaaaa

SEQ ID NO: 375792 - DNA, 463 bp, Homo Sapiens
  misc_feature (166)..(175): n is a, c, g, or t
ctgctaactattgatgctgacagtgtttcactcctatgagtgacccaaacatattataaatatgtggtaaagggaatggagcctgtggggttgagcagaatgttgtactagctgtgcctggactgagtataacagctttatgattatgagaaaacaaattctttannnnnnnnnnctgttccaaagattcatcctatggggtggccataaagtctagaattagatactaatattttgtcattcattataacatatcaataaaccatttgttaaaagatttgcctggtttccagacttgggtgggccaccttggaataattcttgctgtcttctgggggagggatgatggaaatttattcctgctgccttaaaaatatgtatcccttcttcacccatcatgactgtccccagtgagtgtcctttactattcttgggggagtgacccccgtcttaacttttcaaa

SEQ ID NO: 375793 - DNA, 552 bp, Homo Sapiens
cctaaggatgaaaggaggcccagtgccttccctgcaagatgaaaaattgccagcgtgtaacacatttgaaccccattcggaggcaaggaggtcactgccagctgtgcccaaagctgtggggtgctgcttcccaagagcctgatggccagatgggcatgaaggctcatggacatggatgcagagccctctgtttcaagggtccagtatgtggccagcaatcactgccctgatgctgtacagcacagggtcaaaagaggcaggtttgttttttacatcagaagcccatggatgactaatggccaccacaatgcaaaccagatacttcggaggcatgggaagaggttctaaagcatctactgtgtgttctctgatggaattcataggagcgcctgttaatttaaattcggatggattccagacttgttggaggaggcttcattcaaggtgggtcagctttcaagtgacagcatcagcgagattaagtaaaatttgtaagtaagaaatatgtagtcacctgaaccccaagtaaagaattaaagggctgggcacatg

SEQ ID NO: 375794 - DNA, 315 bp, Homo Sapiens
  misc_feature (219)..(219): n is a, c, g, or t
atttgtttctttattgcttattttgaaggaatgaaatgagaatgttgtcataattaatatgctagtttgcatttcctttggagcatccagagcattagttgaaacagtacaagcatgctgactgggaaactgaattggatttcctgcttaatgtaactgtctctgttaaacactaacaaattataggggattgaaagtaacaggatctcatcccatttnccatctcctgacctccctccttctctctaaccaaccttttcccctccccttggctgagatacagaaaaagaaaatgaccagctctgtttccagata

SEQ ID NO: 375795 - DNA, 504 bp, Homo Sapiens
atgaggaaaagtttgattttatatgtaaatactaataagttctatgtgaaaatgcaaataaaatgagatctttttaagagtgcagcatttcgtatgtttggcagtaaaatatttttaatcctcaaaatatttccttaagtggtatctctattttacagaagagatcgaggtctaagcaggttgtcatttgctcaagctcatacagttggtatgtggtagaaccatagtctgacttcagaatctaggatgaacctaattcaatcaaaatatccttctgttttggcattgcattactaaattgtatagctggaaggcagctatactagtgttttactgtatatctctattccagtaatttcatctctacttaattgttatcatctgttaagtgggattgtttatctgcacttgatagtaaaatacggtctacttaggcttggatgaaaaaatctttagtgaactttacctatcatctataggatcatgttgttctgctaaaaaaaa

SEQ ID NO: 375796 - DNA, 506 bp, Homo Sapiens
  misc_feature (12)..(12): n is a, c, g, or t
  misc_feature (27)..(27): n is a, c, g, or t
tgccaagtcaancctgttgtgaaaaanagactgccattggggtcccagaacctgagtgcctagttctgggtcccacccctacagtgtggccagttaataacctcgaccttccttttttcctggaagtgtgaacaggagagtaacagcagtgcccacctgtctcatggatgctgtaagaaacctcacggagcagcatctgtgggtacacgttgaacatcagagtgcagcgtctggctaagggattattttcagaacagttaattgttacatgatgggggaataagttctaacggaaattcttttttgtctttggcgttatcaagaaatccagacacagccttatgggtggacacagttcccctttccaaaggtgaaaaagggaacttaatacaatgtttttttaaaataagattgtaacaatctattgttttgaaagccagtgacatgttcattgaggaaatttggcaaagaaggaaaataaaatcatataacagagataaaaaaaa

SEQ ID NO: 375797 - DNA, 326 bp, Homo Sapiens
tgaacccctgggctcaagtgatcctcccacctcagcctccatagctgggacattcaggtgcatgccaccgcaccagcttaccagttttaatgaggttctagataggttaatagataggttaaacagcccataacagtaattcttaaacattttcaatagggtaattgcaattttgtttatggtttggaaagagcaatcataaaattgtattaagttcttgagataattataaaatctatgattgctccattcaatccttcaaacacaatgatggttttcttagaataagcaattctggtcattatgaaataaagatccagatccaa

SEQ ID NO: 375798 - DNA, 344 bp, Homo Sapiens
  misc_feature (190)..(257): n is a, c, g, or t
accctaaagcttgggtctgctctttgaagacatgctgctgaatcaaaattaaggatgcttggagggccgggcgtgatgctcacgcctgtaatcccagcacgctaggagagagggcggaagaattgcttaagcctaggagtttgaaaccagcctgggcagtatagcaagccctgtctatacttaaacaaannnnnnnnnnnnnnnnnnnnnnnnnnnnnnnnnnnnnnnnnnnnnnnnnnnnnnnnnnnnnnnnnnnnctcgagcccagaagctcaaggcgtgcagtgagccatgatcacacgactgtacctccagattgggcaactgagtgggagacctgtctc

SEQ ID NO: 375799 - DNA, 449 bp, Homo Sapiens
  misc_feature (26)..(26): n is a, c, g, or t
  misc_feature (398)..(398): n is a, c, g, or t
  misc_feature (418)..(418): n is a, c, g, or t
  misc_feature (423)..(423): n is a, c, g, or t
ctctgaaaatggggcccgtgcaggcngtgtggcttactggttcagtcttctttacagtggtaggttttgagtgcccagatgcccagtgcctcttacccggaacaggacaggaccaggctgtcccctggaagaatcccatgcacacttggctattcagggagtttccacccagccgagctcgcctctgtggctaccctggtcttgctgctcatatctgccaggaaaggcctggacttggagagaaacctgggatttggattcagtccttgccagcctggctggttcatatccttacctctgtctgtggaagcctatgttcctgagcagcgagtcagagggggcatctgaacgcagagcaggggagcttcagatgggaagaagtcagaggaaccagaatntatcagacgatgtggagttngggtncctgagctcaaagcaagcttggcctt

SEQ ID NO: 375800 - DNA, 304 bp, Homo Sapiens
  misc_feature (36)..(36): n is a, c, g, or t
  misc_feature (42)..(42): n is a, c, g, or t
  misc_feature (65)..(65): n is a, c, g, or t
  misc_feature (150)..(150): n is a, c, g, or t
  misc_feature (263)..(263): n is a, c, g, or t
tcctggagatgatattagaagcttttctcaccaaanatttanttgcctggggtgcaacttctgcntcaatctctctttgactccagctgtctttttggactgaagtgcaggttgctcacagcatcctacaaagtaactgtcttcccaaanctcacttacctctgagtttctgctgtaatcctgtctttctctctctttttttgaactggaatctattactttggatgatgcatgctggcgttttctaaagttttctgattgantgtgtctttaaaaaataatctgataatattttagcttcttg

SEQ ID NO: 375801 - DNA, 388 bp, Homo Sapiens
  misc_feature (21)..(21): n is a, c, g, or t
  misc_feature (26)..(26): n is a, c, g, or t
tgtagccgagagcccccaatnccccngccctgaaactgtataagaacccctgtgattaagttccacagtttattgtttggcctgtttagtattttagaaatataccagcactactaattaactaatgtcttttatttattatattatgataaagtaaaaatttcacttgcattaagtctaaactgagaaggtaattactgggaggagaatgagcagctttgactttgacaggcggtttgtgcaggaaagcacagtgccgtgttgtttacagcttttctagagcagctgtgcgaccagggtagagagtgttgaaattcaataccaaatacagtaaaaacaaatgtaaataaaagaaaacacatcatcaataaaactgttattatgcgtg

SEQ ID NO: 375802 - DNA, 302 bp, Homo Sapiens
  misc_feature (184)..(184): n is a, c, g, or t
  misc_feature (211)..(211): n is a, c, g, or t
tctgtgattcgccttatgcatttgttggtacatttcctgttaccctggtctcaggctctgttcatttttttcagtctttttctccctctatttctcaggttgtgtaacgttgatttttcctcaagctcaccgatgcgtctgccatctcaaatctacttgcattgttttgtttcgtaagttgaanttttcagcgcccaggtttccatttggntctttcataactttgtacctctttattgagattctttgttcattggattattataagttttctttaatataataaacagacttccattttg

SEQ ID NO: 375803 - DNA, 339 bp, Homo Sapiens
  misc_feature (139)..(290): n is a, c, g, or t
tagtaaaattcaaggtgagatttgcgtggagacatagaacaaaaccgtatcgggctcctcatcaccagtgatcttctcagctgctctcaaaccctccagtctttagaccttgtctacttacagctcagatcagcaagtnnnnnnnnnnnnnnnnnnnnnnnnnnnnnnnnnnnnnnnnnnnnnnnnnnnnnnnnnnnnnnnnnnnnnnnnnnnnnnnnnnnnnnnnnnnnnnnnnnnnnnnnnnnnnnnnnnnnnnnnnnnnnnnnnnnnnnnnnnnnnnnnnnnnnnnnatgcccagccctcattttcaacagttttagaaataattactatctgaaa

SEQ ID NO: 375804 - DNA, 342 bp, Homo Sapiens
  misc_feature (109)..(109): n is a, c, g, or t
  misc_feature (206)..(206): n is a, c, g, or t
  misc_feature (265)..(265): n is a, c, g, or t
tgagatagattacggatataaaaaaccataatgattaaattaatagcataatgtttttataatcttatgctaaagaaggatttatcaataaaggacgaaacccaggacncacaaagattcatgtattttgtattttaaaaatggaagctttggtacaccagcaaaagtcactataaacacattcaaaagacaaatgataaaaaagnaaaaatttgcaacacctaaaacataagaatggttaatattcataaagtataaaaacatnaaaatcaatataaaaaagacagcctatctgatagaaaaaaagaacggggatatgtataggcaatttacaaacaaata

SEQ ID NO: 375805 - DNA, 282 bp, Homo Sapiens
aaactgaaggccaaataattcccgttcctcttcttcatctgtgccttcactgggaggaagtgatactttcaatttcagtgggttgtctctgaagttgacaaacctagaagttcatcaaaaaacagtatttttataggtgtcatggaagtgtacatttatttccctggagaaaggtcaaatgataatatactaaattactcgtttttaactggtttcaataactgaacgacttggtgagatgtgatatatctcaaggaatcttatgtttttttcctaaggagg

SEQ ID NO: 375806 - DNA, 346 bp, Homo Sapiens
  misc_feature (23)..(23): n is a, c, g, or t
  misc_feature (35)..(35): n is a, c, g, or t
  misc_feature (105)..(105): n is a, c, g, or t
aatcagaacgtggcacagctggncgtatatgtggnaggctatggcagcaccaaaggggggtgttctgggtcaaggtaggttgggggatccagaaaaggcttccanaaaataggagttccttttaggattatggtggtgagcccatgcaaacagggagcatttgggttcaagtcatttgtgatttcaggatcttcaactgaaaagctcaacctattcccaaagtcatcaactaaggttgggacagaaatgggctatgaaattacaggccctttccccatggcaagcaggctctgggagtgttcagatgcacctcatggtaactatggcttcattaaaatcaaagctg

SEQ ID NO: 375807 - DNA, 347 bp, Homo Sapiens
ccctcagtcatacagctccaaggaaatgaattctgccaatgacctgaataagtgtggaagcagatttcttcataattgagcctctacataatacagcctggccaatagctttattgcagccttatgagatcctaagcaaaggactcaactacactgtgcccaaactcctgatgcacggaaactgtgagataataaatgcatgttattttaagccactaaattgtggtaatttgtacacacaataaaaaatgaatatagacaccttctgccaggtctaaaattttatctgaggaaagcatctatagatattctaacaggcaccagccactgtaatatctctcttaaat

SEQ ID NO: 375808 - DNA, 381 bp, Homo Sapiens
  misc_feature (23)..(23): n is a, c, g, or t
  misc_feature (32)..(32): n is a, c, g, or t
cagctgtagcccagaaaatatanggctacaancgtacaattcaacatcagctgccaaggcccacctggactgcacctgcaaaaaccagctgtggtttctttgctctcacaattcatgtcagtgtttttcagccaatgcatcactggtttcgaattttatactgtccctctctcagtcctccacccctctagtttctaaatgatagagaataattaggtgaggtttaaactctcaggattattcagggtttgtggagagtaggaaggtttcttccaggttacagcacaatttaaggagcctggcaagaagcatccaatattagcaagtagaaaagcagcataagtatgaggttggaacttcccacgatacttagtacatgga

SEQ ID NO: 375809 - DNA, 483 bp, Homo Sapiens
  misc_feature (53)..(53): n is a, c, g, or t
  misc_feature (117)..(217): n is a, c, g, or t
agcaaacaccctgccaatggtgacaagttctgcagaagttaaaaagcctttcnacaaataataatactgatgatgatgaatataataacgatgactaacattcagtgagtatgtatnnnnnnnnnnnnnnnnnnnnnnnnnnnnnnnnnnnnnnnnnnnnnnnnnnnnnnnnnnnnnnnnnnnnnnnnnnnnnnnnnnnnnnnnnnnnnnnnnnnnnatttttactgagacacgcatgtatatatgaacagaaaaatgatcagcaataaataatgaactgataaagactatcctttgggatatggtcaaagggtacatttgcctttttgtaatgtttgcatcttttataaggaaaatatattcacacattacttctgcaattaaaagatatgatacaaagatgtgcttagggagaatgtccagcagggacttgtattttggcatgtattatggcaaaatatctagaggagactacgatatccc

SEQ ID NO: 375810 - DNA, 457 bp, Homo Sapiens
acatgcgtgtctcagtaaaaattataaaatgggggataattataatacctacctcataatgctttgtgaggattaaatgaattaagatcgataaagtgcttagaattgtgcctgacatgataaatacatactcactgaatgttagtcatcgttattatattcatcatcatcagtattattatttgtagaaaggctttttaacttctgcagaacttagtcaccattaggcagggtgtttgactgaagaaagaccctttgaaggtaacaagttaagaaaatttcccatcgatcgatgtacttactattgaacatgaaataatcctaggtgttgggggggaaagtactgtgaataatgtgtgtgaaggactttattccgactaatactctttttgtcgcattttatacccagtaaaaaagaaaagagaacataagcaaaatattggtgcactaatgagga

SEQ ID NO: 375811 - DNA, 420 bp, Homo Sapiens
cccccggtggcctccccaggggtcccccggccctgtgttcaatttaaagccatttatatagcgacccatcgctctatgttgccctgggaagtggttggactactactcctcccaggttgccaatgaaataaagatccatttgccttaatcaataattaagaggggaggtagaggggacattcctttagtaaattgagtgggcaactcacactcctagtagcagtcacttcactaagactgagaggcagcctaagggcttcctttaggtaggcgcagtattctccgtggaaaaatgtttggaatcactctaattgagagatgatcaggcaagtatgatcccaaaataaaatagcattaaaaggtacgtgcctaacatagagattggattgataaaaggcatcagaaaaggttaataatctc

SEQ ID NO: 375812 - DNA, 458 bp, Homo Sapiens
  misc_feature (32)..(32): n is a, c, g, or t
  misc_feature (55)..(55): n is a, c, g, or t
  misc_feature (255)..(263): n is a, c, g, or t
tcaggggggcaccgctgcaggacacatgcatncccaaaaacccctgcaagatccngctgatcggaggccattgattccctcaaaagcacatggccctgaaattaatacctaaaaacgcaaattccccgggcccctacccccagacgcactgaaacagaagccgtgagggaggggcccgcagcttgtcagtcatcgcgaggtgattctgttgcactcttgactttcagaaccactcaggagattacacactttggnnnnnnnnngaattgtttttctgataggactttcttaaatagcagaccctatgagtctgtttacatttgaatttataaggattcaggttatatatatcacttcaaaaatatctattatggaaaaataggaattttttaaaaataaaattattctcaagaccagccgtggccaacatggtgaaacctcatctctataaaaatacg

SEQ ID NO: 375813 - DNA, 584 bp, Homo Sapiens
  misc_feature (396)..(404): n is a, c, g, or t
  misc_feature (468)..(468): n is a, c, g, or t
  misc_feature (490)..(490): n is a, c, g, or t
  misc_feature (521)..(521): n is a, c, g, or t
  misc_feature (560)..(560): n is a, c, g, or t
ggaagggagaagggtaagacacaaagcagagattgaataaataggatttagcatcttactggatgtgagagtttagggcaagaaagtcattaaaagttgtataatgaaggttttaatggagagaaacatgacagacatgttgattttgagacaatgagaaaaccacctcttttttaaaatcttcagacacatacctgtggccactcatttcctaactgccaaccctacttcactcaatattatgacttgtacttttaggggacgtataagaatcttgaaaaaagaagaaaggattcaaactagggtttgctaactccagcctttcccactgcaccaaggaaactaccatgtcacatcattatatatggatgtgtatatgggtattttgtttaggannnnnnnnngggataggggtcttgctttgctgcccgggctgggacttccaaactcccgggggctccaagtganccctcctgcctttaggcctccnggagttgctgggggttacagggcggccctgnctggcacccagcttatatggggatttttattcccaggantcttggtccacttacaaataacct

SEQ ID NO: 375814 - DNA, 434 bp, Homo Sapiens
  misc_feature (16)..(16): n is a, c, g, or t
  misc_feature (80)..(80): n is a, c, g, or t
  misc_feature (90)..(90): n is a, c, g, or t
  misc_feature (95)..(95): n is a, c, g, or t
  misc_feature (154)..(154): n is a, c, g, or t
aaacaaggggacttcnaaccagaaacttccaccctgaacccgccccaggcctaaccccagccaacacagtgtggaagaanccgcaagtgnacctnttccgctcccaggactgggcccagcctagtgggggtggcagaggtctctttgccttcantccagccctagctctgtagagaaatgcaaacctcgactctcaaggatgtgaggaacacaagttcatttctgttgttgcggagacactgcagactcccactgtgccgaggttgaactcttttttgttgctcaagttctaggagtccctttcctgaatatatacttgtttgtcatagtttccttttcaaagtagtaaacttttctatttttctacttgcccagtagagactctgattctggaaattctgacaaataatttaataatacacatgttgcttctt

SEQ ID NO: 375815 - DNA, 475 bp, Homo Sapiens
gaaataagaaagttcaattccaacagaatgacaaccatgcaaagacacagtcttgatgatatacagacctaacctccaccatataggctaagcccaaggagcccaggttatgaaattgtgtttcaggtattatggttccacacctcctaggtgcaaaagccatgagatgccgaactacgtgaccatgcagatacaacggacttgatttttaagcccagttaacactacactcagatctcagccatggaggaaagaaagcaatcaaagtagactgtcccgcagcattcctggccactgtaaggcatctggtgccacaggcaagcatccacagcccagcactgcttctcagacaggtcccagcactcttgctactctgagccctggaaccagagtacaaaatttcctagactgctctgctatgaaagccaacactgtgagctcttttaagcagaggtgcacaagaagggccgcagac

SEQ ID NO: 375816 - DNA, 371 bp, Homo Sapiens
  misc_feature (247)..(247): n is a, c, g, or t
  misc_feature (278)..(278): n is a, c, g, or t
  misc_feature (297)..(297): n is a, c, g, or t
  misc_feature (328)..(328): n is a, c, g, or t
  misc_feature (348)..(348): n is a, c, g, or t
  misc_feature (361)..(361): n is a, c, g, or t
ctttctgctggaatcccgggggaactttcccttataataaaagctgaaggatgtccagattatgctcttctcctccatctgcctgttaagtccttaatctcctacacctgggtgttctaatcctttatttgctttaagtaccaagtggttccaagtcggacaagttctgtgtccaatatgccaagtaagattcattgtgccatagaagggcatgctactccccaagatctcctgggagaataaagtngggttgctgtttcacaaatgggaccctgctnggttttaaatgcagccccngttaataaaatggggcattcacttcagcatnaccagcccagggtacttccnttgaattggccancagggaagct

SEQ ID NO: 375817 - DNA, 431 bp, Homo Sapiens
  misc_feature (391)..(391): n is a, c, g, or t
aaggataccagggtccttccattgcaggagagtattatgagtggaaaccatggtctggagcctagatgtacttgctgccactgaggtgttgttagtcctagttgctatcatctgacagcaaggaaatacgtgtgtataccagcctgtgtatatacatatatctataaatgtttctctatgaaaccatccatattcatattaaggtaaacatgagtttatgtcaccaatgatgagccgtcatcacgtgggagtattctaggctcctccagttatctcgaaccttccatttcaatcgtgagaaatataactcctaccatttcaccatccatttattttaatcggttcaattttcactaggacatggcatagttggtcaggatttatttaaccngtacccctgttggggaggcaggcttttattcaggcttggg

SEQ ID NO: 375818 - DNA, 543 bp, Homo Sapiens
tttttaattcttaagtttttttaaggttctctccttccataatataaaacaaagaggctgatgagaagttaattcaactgctgaggtaacagactttgaagggcagtaaactcccaatgtggggaggtcagcaagctgctttatgtagcagctacccacacttccagcatagccattgcccttgtgtagggtccgaacgttggttgcagacccaggactcctgcatctggtctgtaatgatttcctactctctagatgatctgaattgatttctgattactcctggactctaggctcccccacccctctctgccatcagctttgttccaggaagccccatttataccctaactttcacttcccactcctcttccaagaggaaccatgtccctattaggaaaagattttgtccttgcaccaggggttaagagaattgagagtaggagaggtgatgtctgtaccatgtcttttagttggtctcagtttttaaaaaggtctagtgaatgctcagttggattagactgtgtggtaagtgaaaaaaaa

SEQ ID NO: 375819 - DNA, 597 bp, Homo Sapiens
  misc_feature (34)..(34): n is a, c, g, or t
  misc_feature (49)..(49): n is a, c, g, or t
  misc_feature (66)..(66): n is a, c, g, or t
  misc_feature (89)..(199): n is a, c, g, or t
  misc_feature (503)..(503): n is a, c, g, or t
  misc_feature (533)..(533): n is a, c, g, or t
  misc_feature (545)..(545): n is a, c, g, or t
  misc_feature (552)..(552): n is a, c, g, or t
  misc_feature (557)..(557): n is a, c, g, or t
  misc_feature (562)..(562): n is a, c, g, or t
  misc_feature (571)..(571): n is a, c, g, or t
  misc_feature (584)..(584): n is a, c, g, or t
gctcactgtaatccccttctcccaggttcaagcnattctaatgcctcancctcctgagtagctggnattataagcatgtgccaccacannnnnnnnnnnnnnnnnnnnnnnnnnnnnnnnnnnnnnnnnnnnnnnnnnnnnnnnnnnnnnnnnnnnnnnnnnnnnnnnnnnnnnnnnnnnnnnnnnnnnnnnnnnnnnncgtcatgagccactgcacctagccttcatagagaggtttttgccatcaggccacactggcccgattccctctgtttcccagcttctcatgtttttccatatggcactttagctttctttcttgtgaggccagcggggtaagcacggacctgctctgtaagctcccccaaaaccttagagtgaggggagagcagtcatggctttcagctctttactcttaattaagagaggatcaaagggaggaggggccggaaaaagggccaaattaaaatataggcccctttaaatgtaggaattttgtccantttgaaggaaaaccattttctgttcaccantgttttaacttngagtttnagggnccctnctatgtttncctatggggtagnaattaggtcaggc

SEQ ID NO: 375820 - DNA, 363 bp, Homo Sapiens
  misc_feature (118)..(118): n is a, c, g, or t
  misc_feature (141)..(141): n is a, c, g, or t
tagttgggcctattctatgctgctacttcaagttactcaaatgtgttttgtctggtgttatttttttctccagtgttttggaccaagactagatttcctgagactttaaatacgcaanacaaatgcaaaaaaaatctgccnacatacccaggctgcttttaaggagtgaatcactgaagcgcatttggatttcctataacactactttcttttgggaatgtacagccctcccccagctccccatcccccatcataatgtaaaccattctaagagaaaatatggatgttttggctgggggtggtggcacatgcctgtagtcccagctacttgggaagctgaagcaggaggaccacttgagccca

SEQ ID NO: 375821 - DNA, 518 bp, Homo Sapiens
  misc_feature (20)..(20): n is a, c, g, or t
  misc_feature (29)..(29): n is a, c, g, or t
aagatggttcccacttgtgnctgtcaagnactcttttttgtttggcttaattgagccccactaaattgggaatcaatctctcttacagcttcctggctccaaacattaattgatttcagaattcccccaaactaaaaccttatctgtctgcattttgaatgcattttggtcaaaagtatacgttttaaagatttttaaagataaaaatgtggcacaactggtttttttagcttgctgaaaatgaccatatctctaaattaatctttctctccagagcaagacttcaccagtatttgtaactaggagaagctaacagtgaatgtttaattgtgaattttaatcattgcttgttagggaataatgactgtgatactagaatgggcttttgaaacctgcatgtcccagtgtgaaatttcagcacggcattttctgcatcctttcatgggccatccaaagggtttccgctggcaggaaattattggatgtggctaatttttggctgtcttgtggatgcaggc

SEQ ID NO: 375822 - DNA, 380 bp, Homo Sapiens
gctaatgctggatgaattagtcttgaagtggccactagtaggtctccttgtgggagggcttagagccagatggggagcccaggccctgccctcattttaaaatgagcccctgggaactcccagagagaggcattagcaggttacagaatgaagctattaaataataggtgtggcattaataataggtgtggcagtgtttcttgagtaatttcagagctactcacaggttgacagatgtaccctaaggtgctttctttaaaatatatacatagagagagaaaacaattttttaaatgaacttttgagttcctgagatccaagaagggttaaaagttaatgttattttgcccatatatactggtcttagggctttatttctg

SEQ ID NO: 375823 - DNA, 521 bp, Homo Sapiens
  misc_feature (17)..(17): n is a, c, g, or t
  misc_feature (24)..(24): n is a, c, g, or t
  misc_feature (55)..(55): n is a, c, g, or t
  misc_feature (70)..(70): n is a, c, g, or t
  misc_feature (75)..(75): n is a, c, g, or t
  misc_feature (93)..(93): n is a, c, g, or t
  misc_feature (113)..(113): n is a, c, g, or t
acctggggttaaacctnacccccntttccctccccaattaaaattggcccttggnaccaatttgattttnaagtnaagattgggaatagtccncctgtgttagcccaaacccnaaaagcccatatagtatgggggaaatgactcaacaataaggagcctgtgccctttgaacattaggtagagatagttggtgtaaagctaagagcaaggatttggaatgcggtgagtctaagcctaaaccccagttccactgtggtaaaccctggatgggttacttagagtcccaaaacttctgtatgtaaaatagaaaccatcactgacatgtggtggtgtgaggatttagtgagatgatgtgcccaaaacacctaaacagtccttagcacccagttggcatttaaagaggagaccaggaacttgtccaagaaggtccatttgcttgagatgttatatttgattcctttatcctaacaactacaaaattgttggtttgagaaagagacctcattttacaagaaaaaaaa

SEQ ID NO: 375824 - DNA, 489 bp, Homo Sapiens
  misc_feature (334)..(334): n is a, c, g, or t
  misc_feature (410)..(410): n is a, c, g, or t
  misc_feature (438)..(438): n is a, c, g, or t
  misc_feature (460)..(460): n is a, c, g, or t
  misc_feature (465)..(465): n is a, c, g, or t
ggcatcttccttctggtttgtacatctagtatttagtctatatactaagtaaacattaccatctctttctttggattcagatgaaccctcaaattatttatcagcttagcacctatttatgtttttgcaagggcacaaatacattgcattgccaacagctgagaagcaccagctaaaaccttcagagtgtgcagcagctcaacaggaaatacatccttttctggttgaaatatttttaccatgatgttttgacaaaacaacgagcaattacgatgatgacatatacttatatttcagctagaattacacacaaatctacaaaccaaaacagganttaaaaacaagtataaggtctggctgtacacagggcacaacaaaacatttggggctgtcttacttggaaaacaggntacttttattatatttaactctggcccnggcaatggttttactcacgggnctctntttccggctttctcatcggccagt

SEQ ID NO: 375825 - DNA, 274 bp, Homo Sapiens
gtaacctggttaacatagggtttctcaacctcagaactcttgacattttgggctggatgaatcattgctgtggagagctatgctgtgtattgtaggatgttttggctcatccctaacccctacctattagatgccattagcctcccctactcctgatgtcacatccaaaaatgtctcctgacattgccaaatgtcccttcctgggtaaaatctttcccaggtgagaaccactgggatacagcatgtccactagagctatagttttcctccttat

SEQ ID NO: 375826 - DNA, 355 bp, Homo Sapiens
  misc_feature (206)..(206): n is a, c, g, or t
ccaatttaccatgtggcagtgtgctttccagctgttttcccatcaagacacacatgggaaataacatttgcctagtacactggggtaaactgacaaggtgctcacggccacaggtgaccatccagggcctccaatcatcccaggctcagccctgccactcaaagggctaaggtgatcagtagctttagctatttgtggcacacagnatagagaagttcttccatacagcatatgctaaggaaaaaaacaatagtggtagaattctttggtgtaggttctcatttgtgcagcattgtttctcaaaaagacatttaaaggcattcaattgacttgcaatattaaatggcttttggaa

SEQ ID NO: 375827 - DNA, 495 bp, Homo Sapiens
  misc_feature (151)..(151): n is a, c, g, or t
aaaaccaaattggctaaaagcaaggcttttatgactgggaacgaatgtcagacttacaaagtggctgtattcacacccacagaaacaaatagtttcttattaacttttaatgacttggctgtcttcctaatgaattccacaaaggaactgnctgggaattacactcagatacacctaaagaaaggtgatagattattaaatttgggattgcttcaaccttttacctttagtggtttcagacactacccaaatcaccagggaaagagaattaagagaactaaagctaaataagacactccagggaagaagcttaacttaatgagacaagttgtttcaaccttccccaatggtaagcaggaggctcctgagccttttacaatactacacaattgttgctgcagtgatattaactcctaaaatatctgaactcctgtttcctctactccaaaatgtaagtttctttttaattcagaaatttttaataaagtgttttac

SEQ ID NO: 375828 - DNA, 400 bp, Homo Sapiens
  misc_feature (341)..(341): n is a, c, g, or t
  misc_feature (366)..(366): n is a, c, g, or t
  misc_feature (376)..(376): n is a, c, g, or t
gaaactcttgccatatatccatattcataatcattattcttcctgtgctaaaaagtacttctgaggatgaccttcattctcctatctaaattttagagtacttatgttgcaaccattctaagcccagtgatagtctgtggatgaaaggattaatattgcttagctttatgttggatttaagtgtaaatgtccatgattgtctctaacagagaagcaaatggaacccattttctcacatagaggtgcagggactgattgggtggctgcccttcagattataattgggctgaaagatgcagtatgttcagctaagaatacatcctgggtgccagggagttttntcccttaataatgttgctttgccanataagctttncctcccaggggagactctgaggat

SEQ ID NO: 375829 - DNA, 395 bp, Homo Sapiens
  misc_feature (300)..(300): n is a, c, g, or t
  misc_feature (339)..(339): n is a, c, g, or t
  misc_feature (380)..(380): n is a, c, g, or t
tggcacgagggcagcctgagtggagaggatggggcagggatcccaggtgaggtcgagtaaggaagtcgcagttctgacctgggaatctgccgggacaagcctgctctgtctcagcatcaaggcgtttggtacctagaggagcagggtgccagggtgtccagaccgggcaaaccaggagccctagatcccgtccctggaactaggtcctccgccagctttgcgggcctcctccgcaccaggctcaggtctcgcccatccccagcaggaggtctctctgccccccaccctccggagggggtntatatgatcttaaagcttccccagagggagggaaaggtnggaggcggggcggctgcttgaggcccaggatataagggctngaaggtgctgctttt

SEQ ID NO: 375830 - DNA, 485 bp, Homo Sapiens
gagacagaccacatgtttcctatcttggaaaatggtaccacttccttgtgcaagcctacccctgttccctcacccctcgttcagtccaacagcaaatctgtccagtcttctaactgtatctcaggttcaattagccccgcttccctcgtcccctgctcgtcttctgccggacaagtccgcccatcttgtgaccggactcgggaatagcgtcctacttcccggcggcctcccactcttgacccaaatgcaatgtgcagccatggcaatcttttataaacagaaatccgatcaagttactcctctgccgaaatccctctggtcagtggtttaactgtcgaggtgctcctggcagcactctgccctccccacatcattgctggtggacttgtctcccctactagactgtgccctgtgagggtggagactttgtgcagggttgtatccccagcatctgatgcagtgattcaataaacatctgtccaatt

SEQ ID NO: 375831 - DNA, 484 bp, Homo Sapiens
  misc_feature (16)..(16): n is a, c, g, or t
  misc_feature (52)..(52): n is a, c, g, or t
  misc_feature (107)..(107): n is a, c, g, or t
aacatcccactggtanccctcctcaaaaccccccagctgtagaataattggnaaaacaaaaagcaaaaacaacacgatccttaaaatgctcttggcaacttttaacnaaacccggtccccaggatcatttaagaacttctgcctgcgaggctcagagaaatagagctgaaaatagaccagttgcagcagattcagtggagcgacctgaaaatgttttctttagcagggagtttttagtgagcaacaaaacgccatgccgagaagattacattcttgggaaaagaaatttgtgtttgattttccttttccggtggactacctctctgaagtactttgcatcaagtctttaaacatgatacagtgaaagcttctcagcctcctatctgcagtgatgtttttgtcttatttaacccaaccttttcttcccctattggtgatgggttcttgggcaaagctaccttcatctaaaaggttccaagaaaaa

SEQ ID NO: 375832 - DNA, 531 bp, Homo Sapiens
caatgggtatgtcccttcacagctctggcttctgctcagtggcccttccatcatgattacaaccctcatgggtctccacaatttgctcctcttgtttctgtggcccaaggatggcgatggcttacccctgctgctagtttttgggagccagatcaccctctgtttatctctataatcctccccaggggtctgcagtagtcccttcattagactctcttcattcaaaccctcggaggcagattcagtttccagccaagaccccagtgtaaccagtttttaaaataaagataaaggtgtccctttcctggctaagaatgatgagcaaacacaaaagacctatacctatgaaaaatatgcatgagtaaaacaaacttccactagccttctcttttagcaaacttagtgtatttaatgtcaaacttaatggcaaaaaatgcaaattacagctaatattcctcttttctaacttctactcctggtttgaaatgagggggaaaaaatcatacccactcacactcaccataaaaaaaa

SEQ ID NO: 375833 - DNA, 443 bp, Homo Sapiens
  misc_feature (362)..(362): n is a, c, g, or t
  misc_feature (412)..(412): n is a, c, g, or t
ggccagagttgcatttttcacatgagcaaaagttacatgcagaaaaagaacagaagttcgttgattgtaggatatgtaaccttgagaactttatcttatagccaacggtcacacattctgaaatgtcttaagtgatctggtcagtgctaaaggtagtaagaaaatctggttgctgaaaatttacactatctaatttcagttattcccccacaacagagtaacaggcaagcacattctcagcagccgttccaggcagagtatacacagaaatacttgttgaatttaattgggttgaataaaaatttgtccttttgaggaacaaagttagcatctcaaatacaaggtctgcaaatgatgtaggntcttcttagttggctaatgaactcctgactagttacaggtggaaaggggnttaaaatgactttactgagcacttcactttt

SEQ ID NO: 375834 - DNA, 468 bp, Homo Sapiens
  misc_feature (32)..(32): n is a, c, g, or t
aactcactttagtctgtttccattacctgaanctagggaagtcctaaggacaattgggattcccttaaaaaaaactttcatcattgcacttccctgtttgatgagtaaacagcaaactcgttatggtctgcaaggtaccctattaaaaccccgtaacatcccctggaaggaagtaacttggagaaagtcaagaaatctttctgacaggacaccgcaactccaaacaatcaacaactcattgtcatagtgcgacaatcttagccctgttgcaactgggcaaatagtccatttgcagagagaagcatcatcggggtagacaggaatgctgttattaaccattataagtatgacgcgaaggtcgtacatcaggctattacaccttttcattatacgctaacccctcacggcagggaagccacgcttatgactgcattagacagacaaagccttcagctctttaaaaaaagg

SEQ ID NO: 375835 - DNA, 451 bp, Homo Sapiens
  misc_feature (387)..(387): n is a, c, g, or t
  misc_feature (404)..(404): n is a, c, g, or t
  misc_feature (437)..(437): n is a, c, g, or t
ctctggcatccacaggacgctgccttatccgtcatctcgctggggctgggggctagaggctgagcaggtcacactgaacaaaagaagtgtgtccccatcactaggctaacatctgagtttcttccacagtatttggtaacacagtcagaaacaagactgaagatgattctggaggcaactgggaaccccccagaacgattctgcaggcttctgggaagctgaaaaaccccaaggccagactggcttcagaatgcctgagtccttttgattccactggaaaagccatccatctgtgccaagtgtgtggagagcttcaagagccatacagccctggccaccatgagcacagccacgtgggggagtagtcctgaaagtgtcctgggtgtnggcaaaggcttttccantaagttggacctcagatgggcacaggaagaccntcctgggggatttt

SEQ ID NO: 375836 - DNA, 635 bp, Homo Sapiens
gctaagagtgccccattcttgggtatggctcctgctgtgcaagaagcgcacctgccttaccagtgtccgaagactttaaatcggagcctgtttcacctcaggatttttctttctccaagaatggtctgctaagtcgattgctaagacaaaatcaagatagttacctggcagatgattcagacaggagtcacagaaataatgaaatggcacttctagaatcaaagaatctttgcatggtccctaagaaaaggaagctttatactgagccattagaaaatccatttaaaaagatgaaaaacaacattgttgatgctgcaaacaatcacagtgccccaggaagtactgtatggggtccttgctttaaccagggaggagctggaaatttaggcagaaatgatcttggaattttaaatatcctgcgggtcatggctcagccagcgaaagtgaacacaggagttgggccagagagagcaaaagctttaatgttctgaaacagctgcttctctcagaaaactgtgtgcgagatttgtccccgcacagaagtaactctgtgggctgacagtaaaaaggaaaggacacaaaaataatgtggaccaacaggcaaacctggattttaggctttctttcttttaaat

SEQ ID NO: 375837 - DNA, 511 bp, Homo Sapiens
  misc_feature (25)..(25): n is a, c, g, or t
  misc_feature (32)..(32): n is a, c, g, or t
  misc_feature (421)..(429): n is a, c, g, or t
cccttttaaacccaatgagtatgancctgagncctgtataaataagagccatgatttgaaaaaaagccagggtataattgaaaccttttttccatttggaaaagtaggggttaccggtgatgttgaaatatgccatacctaatttttgcctaacattagatgtcatgaggaaactactgaactagcaattggttgtttaacacttctgtatgcgtcagataacaactgtgagtagcctatgaatgaaattcttttataaatattaggcataaattaaaatgtaaaactccattcatagtggattaatgcattttgctgcctttattagggtactttattttgcttttcagaagtcagcctacataacacatttttaaagtctaaactgttaaacaactctttaaaggataattatccaatnnnnnnnnncctagtgctgattcacagcttattatccaattcaaaaataaattagaaaaatatatgcttacatttttcacttttgctaaaa

SEQ ID NO: 375838 - DNA, 226 bp, Homo Sapiens
  misc_feature (21)..(21): n is a, c, g, or t
  misc_feature (44)..(44): n is a, c, g, or t
  misc_feature (226)..(226): n is a, c, g, or t
tcttggggaaaggagttgggnccccttaattaatttttagaaantctccctttcaaaaatgccacagacccttgggaggctcaacccttaaacacccaacccagatatcatccttaaattcagttaccagcttcaaagaaacaggacttggggagaggaaggagagaggttggaaagaagccacagagagaagtgggaaagtttaggctgggcacagtagctcagn

SEQ ID NO: 375839 - DNA, 566 bp, Homo Sapiens
  misc_feature (43)..(51): n is a, c, g, or t
  misc_feature (386)..(412): n is a, c, g, or t
gttttgaaacatttctatatgtccaaatacttggcaggatttnnnnnnnnntagtgaatttggtgtaaagttgctattttatggaaatgcctctaactttacattttcattccatctgtagatttttctatctttataaaatattggagttattttttaaggaaaaatagaaaagtagcttgtgaatagctcaaactaagcttacaaatcgcatgtaaaaaagcaaaaaagttatttgtgtctgtttatattgcttccttttttgtagcctttgtacctgtacagggtgacagtaagggccaagcaggagaggcgtaatccttgtataaaataggatccagcgacactcttgtatttatctgttctctttttagtcagtcacttcnnnnnnnnnnnnnnnnnnnnnnnnnnngctgtacattttaacataaaataaattatgatgagccatttttagcctcttgtgtcctgtcatattatgattgatagagaatgaccaatggaactgtatcatgtgtcacgcctcagaacacatacacattttgggaaaataaattatttagtgt

SEQ ID NO: 375840 - DNA, 378 bp, Homo Sapiens
ggtgtgagccactgtgccaggcctagatttgggggccaccattcagtcgctgctctcccacacctgcagcagccccagcccgcccgcaggaaccttccttgtggcagagacaacaggaaaaggaaaggaagaggaacccaggcctgggttcccggcagagctgtccgcagagcctgtgcggggctgcaaaggcccctctgttgtcacaacacccctgggccccgtttcagatgaaaccgggagaactttcaactgcaacaaacactcctgggaaaaggagaggccaatccccatggcttccacagagagcacagccagacccctttcattccagggcccacaggcaattgtttgttcgattttgtttctttccttttg

SEQ ID NO: 375841 - DNA, 557 bp, Homo Sapiens
taagttctgtctggcacaagcaggtaaccaggatggctaacaggctttgatagctgctcgtgaactaaaacagcagggtgtgtgcaggttcctcctctacggtcaggcagcaggctctgaaggctgatcctacaccgtcccagtgactccccttgacagagtgcccccaccccctaatagccaacagggttagcatggccagcacagatcgctgcttttattgatgcaaatcaagcctgctgcttctcctccctgcagacttagccaaggaactccaagatgcatgactgggacaagaaaaggtgagactccacatggaaatgccttgccctaaaccttgaatgactgtgagatgcgatctgggagtgcatctgtcaagtctttgtgttttcttcactaacctcagaatactgggctctattttatcaagcgctgcagtttatgcctctgtcccgtcaatgctcagcttctgcaacaggacaccaaacttgatgcagaaagccaaataggtcaattatgcaaatctcctggtgccatattaaatttcttgacgatgg

SEQ ID NO: 375842 - DNA, 595 bp, Homo Sapiens
  misc_feature (458)..(458): n is a, c, g, or t
  misc_feature (473)..(473): n is a, c, g, or t
  misc_feature (483)..(483): n is a, c, g, or t
  misc_feature (498)..(498): n is a, c, g, or t
  misc_feature (524)..(524): n is a, c, g, or t
  misc_feature (549)..(549): n is a, c, g, or t
  misc_feature (557)..(557): n is a, c, g, or t
  misc_feature (569)..(569): n is a, c, g, or t
agtttctaaaactctgtcatttcaataatgttataaattgaatcatacagtatgtaattttatgggattcgctttttttctgttgatctctttttttctgagtcatctcagctgttgtgtgtatcaatagttcatttccttttactgttttgtttggtttaactcattgacctattgaaggatatctgggctcattccagtctgtgaataatgctgctgtggacattcatgtgcaagtttttgtgtgaacattaagttttcatttctttaagataaatgcccaggagtgaaactgatgggttgtatgtagttacaaactgccaagctgttttccagagttggcggtaccattctaattttccatgacaattttttgaagagtccaagctagttgctttagagtgcctcacctacattttttaattgtctgactttttcccaatgacatcacttaattngttcctcaatctccnggaatttccnataggactggagggntagggtctgggtgggttgattagganttttttaaaaaaatatggacttcanccggtgangccggtggaccnttatggttgccataaacaaggaaccc

SEQ ID NO: 375843 - DNA, 424 bp, Homo Sapiens
  misc_feature (14)..(14): n is a, c, g, or t
  misc_feature (58)..(59): n is a, c, g, or t
  misc_feature (108)..(108): n is a, c, g, or t
  misc_feature (111)..(111): n is a, c, g, or t
  misc_feature (125)..(125): n is a, c, g, or t
  misc_feature (271)..(271): n is a, c, g, or t
  misc_feature (343)..(343): n is a, c, g, or t
  misc_feature (345)..(345): n is a, c, g, or t
  misc_feature (370)..(370): n is a, c, g, or t
  misc_feature (373)..(373): n is a, c, g, or t
ccaagttgcatgtncttgaaatagatttaattcttattccccacagtttaggtatttnncattagtacatcaatttgacacactgaatgcaagactattaaggaagancgnttaaatattatttnattttgtgaagagttggcagcagattacatctcaagaacttgcagagagaggaaggtagatggacaatcctaaattgtaagatgttacaaaaaacagtgaagtaagagtactcctgaagactaaaatagagaggctggggtttganccattttactgagtagcttagctggaacctgatatcagaagtagcctttaacaaaaagcctcttggcaattntntggtactaacaactagagtactgangtntaagttgaaaccaagttgcagtgggaaatcaaaaggtgaggtagcttattt

SEQ ID NO: 375844 - DNA, 331 bp, Homo Sapiens
  misc_feature (315)..(315): n is a, c, g, or t
aatgtaaagaaagagcttgttaaatattagttaactcatattactgcagatgtgtgaaacaaatgtccccaatccccttaatgtcttccctctaatgaaaaaaagttacaacaatttaatacatgtttgagggttttcaaagatcaagattatacaagacaaaaatcaggaacgcacacaaggcaaaacatttttagcagaggaaaaggaaatgagtacgtaagccaaaatagtcaaactcccaaattatttttaaaacgttgggctaaaacagcaatggaaggtaccactttaattaactaactgtttaaatcnggaaatatttaaaatt

SEQ ID NO: 375845 - DNA, 372 bp, Homo Sapiens
gggaagttgaacgagcatagtccaaaaagctcctggggcgtccaggccgcgccctttccccgacgcccacccaaccccaagccagcccggccgctccaccagcatcacctgcctgttaggagaagctgcatccagaggcaaacggaggcaaagctggctcaccttccgcacgcggattaatttgcatctgaaataggaaacaagtgaaagcatatgggttagatgttgccatgtgttttagatgggttctttgcaagcatgcttgtgaaaatgtgtttctcgggagtgtgtatgccaagagtgcacccatggtaccaatcatgaatctttgtttcaggttcagtattatgtagttgttcgttggttatacaa

SEQ ID NO: 375846 - DNA, 593 bp, Homo Sapiens
  misc_feature (87)..(87): n is a, c, g, or t
cttgtataacccaacgaacaactacataaatactgaaacctgaaaaacaaaagattccaggattggtacccatgggtgcaactcctnggcaataacaacactcccgaaaaacacattttcaacaagcatgcttgcaagaaaaccatctaaaacacatggcaacatctaacccatatgctttcacttgtttcctatttcagatgcaaattaaatcgcgtgcggaaggtgagccagctttgcctccgtttgcctctggatgcagcttctcctaacaggcaggtgatgctggtggagcggccgggctggcttggggttgggtgggcgtcggggaaagggcgcggcctggacgccccaggagctttttggactatgctcgttcaacttcccttctccaacatcatttctttttggattttgaaaaaaggaatcaataaataaatggcatttataaatcatgaatctttgtttatattttataaacacagaagaatcttttcatcctacgtaggaaaaccctggctctcagaacttgcttgttttctcagaatagataaaagtttctacctggggccagataaaacagtacatataaa

SEQ ID NO: 375847 - DNA, 311 bp, Homo Sapiens
ttgtaattatatgaaagaaagtcccagttcctcataaatattgatcacttaaaaaacttactctttccttgaaaaggtacacatgtaaaatttaggaaaataactaaagtaggggctggaaccataagaagaatgtttatcagcacgttcatttattattttggatttggaacttggctttgtttttcaatagtgacaagaatggttcagttctaggaatgttctggaagatgctgttaattttactttaaaatgagaatctggtgttactgtattttatcgttttcaataaaacttcttaagtgttttgg

SEQ ID NO: 375848 - DNA, 409 bp, Homo Sapiens
  misc_feature (23)..(23): n is a, c, g, or t
  misc_feature (51)..(51): n is a, c, g, or t
ttcacacccatgtgttttaagtnccatgtggttcatacttgctgttctgtncttaaatgcaggtcctaaatgtatttccccatagcatttaacaacattcccaacagcctaagtgccagtgattccttacacaatattttaagaacacaattttaaaaaagtaaaaaatgtacaatcctcatgctgtatatttacatatatcgtttatatattctatttttgtttgctagtcataaatttcaatctaaagcttttaatgtagttatataaaagaatacattcaacaattccagagcttgcaaaatatttttgcccctctaaaaacatcttcataatgagaattaagtgagtgttgggctcatgtgctatctgaaaatagggtgaaaaagggaatatttttaaactattt

SEQ ID NO: 375849 - DNA, 504 bp, Homo Sapiens
ggtacccagttcgacggagactctcacaattgtgtagcaacatgttattctcattataaactttatcattggaatactaaagccaaatcatcccccatctccttgatcaggatacccacttaatctaggcagctacacaattgtgagagcctttgtttttttctgctgaaacatccttaaaaagatacctcacaacccaagatttggcttttcttaaatacgatttttaatttttttcatttctatctagagatttaattggaaatggaaaatcatcaattttccaattaaatgtctgttccaatcaacattataccttttaggttgtcattgtcatttttaagtttaagcaactttaaggattttgaatctggctgcctgtaaattaaaggtgaaagtaatcattgtgttggattggtacattttgtcaattgagagtggtttccttgttcttagtgtatgaaaagtttatttttctaatgtagattaataaaggagataaag

SEQ ID NO: 375850 - DNA, 475 bp, Homo Sapiens
gcaaaattatgtgatatgctacaaataatgttacaaataatagaagtttgtacataaccatctctctatgggtttggggcaaaagagtcttcttcattatcaatccttaattactcatttgaataatttttgcttctggttcctacaaccttgggctggatgattttgaagaaactaatccctgagggaagaatgcttctatcaggggcatagtcatggttctgatcaactggcctaagagtacaccctatgtggggcttcacgtactgctacactcacaggcagaattgggattgtttttctggccagagtgattgatcctgattacaagaggacaaatggggtttcttctacataaagggagagttttgtcaagaacccagggagatttcgttgagacattttttagtacttccttgtctaatattctgctgttgggaaaactctggggaacccaacagagacaaggaaggaa

SEQ ID NO: 375851 - DNA, 498 bp, Homo Sapiens
  misc_feature (444)..(444): n is a, c, g, or t
gcaaaattatgtgatatgctacaaataatgttacaaataatagaagtttgtacataaccatctctctatgggtttggggcaaaagagtcttcttcattatcaatccttaattactcatttgaataatttttgcttctggttcctacaaccttgggctggatgattttgaagaaactaatccctgagggaagaatgcttctatcaggggcatagtcatggttctgatcaactggcctaagagtacaccctatgtggggcttcacgtactgctacactcacaggcagaattggggattgtttttctggccagagtgattgatcccggattacaagagggacaaatggggtttcttcctacataaaggggagagtttttgttcaaggaccccggggggaattcgtttgaggacatttttttaggtacttcccttgtcttaatattcntgctgtttgggaaaaccctgggggacccccaccaaaggacaagggaggggaggg

SEQ ID NO: 375852 - DNA, 492 bp, Homo Sapiens
cgtgagggaatatgattgaatcaagatcactcccatgatgaatacacattctgaaagggacttcatgtgtccccttgtgttgggaggcacaacacttttcaatgtggatgaaaagctaatagaggatgttgaaaggggaaaaggtgtggcctgtaccaatggaactgcctgggccattggcctccagttgcttccagccagtgagaccctcagcaggagttgggagggaagaaaacaaaatcaggacatgtatacccctggctcttcccaggaggaggttgccttgtgctgctgatgtttcacaaccaaaggtcactgctgatctcatagcaataactacagaacacttcccttctaggttccagcaaatgctggctaccctcaccctgcctggcctacatgtggttacagatttcccacaattactatttgtaggatcctgactccctatacttctcatctgttttaaataaaccctctttaaattactct

SEQ ID NO: 375853 - DNA, 391 bp, Homo Sapiens
  misc_feature (363)..(363): n is a, c, g, or t
attgcatcgagggtaagactgtgtccacaggtttaaaattctctctcctgagtaatagtgttcatgtgctcccattctcgaccctgttgttgaaattcaaacttaaatagcctgacttcttgttgggtaacttgccctgcctccagaggtatttgaacttcattatcttcagcacaggaattgttaatcttctcacttcacctgttcttgcattagctcaattgatgtcatcactgatttcctaaactagaaactatggaagcatctttgacttttccttttctctgttgggattaggcttaatcaccaagtcctgtcaacttctggaaatggaatctcaaattttcttccccttctctatcnggttgcccctgattttggccttaaggtt

SEQ ID NO: 375854 - DNA, 328 bp, Homo Sapiens
ggagttaatgatctttaatgatttctcccatttatactgtgtttttaacaagcataataaaggaaaatataccagaggtttattaagtatgacaaactgtactttaaataaatgttgctattgactttaggacttcttgcacaaagtttatagattagcaatactaataccttaaaaatgctttttgaaggataattcttacacgagctaagtaagcccttacagtctacagattaatgatggacgttatgaacaatactatgataacgtaaattgtccacatgcccttaggaaccttatctgatttaaaaacttcccatctatatag

SEQ ID NO: 375855 - DNA, 195 bp, Homo Sapiens
aacagaggcccatcagaaatctcgcctcctccaggaagccttctgcactcaaaaccaggcaatccccctttctggaactcccatagcacataatgtctgaggaacctcaggcccagggccacttgggtatttatattctgtctctctgaggctggacttaactctgggtcgatggcatttatagtttttgaaaac

SEQ ID NO: 375856 - DNA, 277 bp, Homo Sapiens
  misc_feature (105)..(105): n is a, c, g, or t
  misc_feature (143)..(143): n is a, c, g, or t
tccagttccatctacattctaccagactgcatatcctattcctgtaacgattaggtatttcccgaactgaggattagtgtttttaagtacaggctataaagctgnttcaaagaatagttagaacattgaatgtagagttaagnctttgcagcagccaattgcaaaaataaggaatccagttcttttgaaaagaaacactactgcttgttctcataccttttataaatgtattttaaaaagaatgaactaattaataaaacatatcaaaggcttttaa

SEQ ID NO: 375857 - DNA, 261 bp, Homo Sapiens
ttaagagttacattggaggaatggagaattaaatcacatggtacttttccactaatactgtgatggtacataattgtgtagtcggtaatcaaagaaactacattagagaagccacattaagtaacatccgaattaaaaagtcccctgggataagagccctcaagcagcgacccctcaaggtggatattaaaactgaaagcagtgcttaactcttcctggagtatctacatgaaaaaaacaacattctgaaaatttcacatt

SEQ ID NO: 375858 - DNA, 529 bp, Homo Sapiens
  misc_feature (25)..(25): n is a, c, g, or t
  misc_feature (67)..(67): n is a, c, g, or t
  misc_feature (122)..(122): n is a, c, g, or t
  misc_feature (143)..(143): n is a, c, g, or t
  misc_feature (181)..(181): n is a, c, g, or t
  misc_feature (203)..(203): n is a, c, g, or t
  misc_feature (208)..(208): n is a, c, g, or t
  misc_feature (221)..(221): n is a, c, g, or t
  misc_feature (235)..(235): n is a, c, g, or t
agactcctgaaaccctccccaggtnttccaagtacaggattgaagctttagtgaaattaaccaaggnccatgggtcagtgcccagggctttaaaaagaatgaacgagcaaaaggtatccccnccgtgacccctgcagatagcnccggtctttgatccgcagcaggggccagaccctgcccncaagtcccagcgcggctgcttntgccnctgctgggctccncttggctcctctcncttcccagggggtcgcctgtcctgcctgtgggtttccatggcttcccagagctccctctgccccagccagcgcctcccaggcccagctgaggagctgtgagaagcagcagaggggactccccatcccgggcacaccctgtcctcccacccctgcccccttgcccttccagccctttcagctgcagctgggagctggcccgtcaagtgctgcccctgcctgtgtctgggtttctgttggctgtttttcttttcttgagtggtgatttttctctaaataaaagaagtcaagcactg

SEQ ID NO: 375859 - DNA, 564 bp, Homo Sapiens
  misc_feature (513)..(513): n is a, c, g, or t
  misc_feature (528)..(528): n is a, c, g, or t
  misc_feature (543)..(543): n is a, c, g, or t
ctcatgaccaagctccgggcatccaccacgtctgagaccattcagtacaggaaggctgtgaaagccactctggtgctgctgcccctcctgggcatcacctacatgctgttcttcgtcaatcccggggaggatgaggtctcccgggtcgtcttcatctacttcaactccttcctggaatccttccagggcttctttgtgtctgtgttctactgtttcctcaatagtgaggtccgttctgccatccggaagaggtggcaccggtggcaggacaagcactcgatccgtgcccgagtggcccgtgccatgtccatccccacctccccaacccgtgtcagctttcacagcatcaagcagtccacagcagtctgagctggcaggtcatggagcagcccccaaagagctgtggctggggggatgacggccagggttccctgaccaccctgcctgtgggaggtgacctgttaggtctcatggcccactcccccagggagcagctgggcaattgacagcctngggggggccgttttnccccttgcagccttncaaggattttaggtcatgagt

SEQ ID NO: 375860 - DNA, 190 bp, Homo Sapiens
aaatgaagccattcaatttaaaggaagtgttttctcccctcctgaaattctttgatccaaatttaagaagtgttcaagatagatttggcccaatagccaccatcgtgcagctctgcaaacctaaattcccagtatctatgataggtcatatacgtatcatatgattgtagaatttgtgatttgcaaaaac

SEQ ID NO: 375861 - DNA, 479 bp, Homo Sapiens
atgggattttattcactatagcctcctatatacatggcctgaaaaataggatggaattgtcgttatcttcatggtagttgtgaatactggtacctgtgttcagttatctggtttgagcaaaataaatgcaagtattaaagtctgagacaaaaaggtccctattaatctgtggaaggtagtaacttcaaaaagagggggaaaagggggaatcagtataatgcccactggatcagttctcattgagagacaattctccagcaagtatttactttctaccccttcttcaaataattactcaccaaagcaatatcaatgggaaactcaacaaaataagcagcaaagagctttcaaaaaccccatgaggcagaaaaaaaacattagattcttttatactgttatttattttctcctataatagaaataatggccatagcactgagtattctcatttgtttggctgcataatcaagcaaaaaaaa

SEQ ID NO: 375862 - DNA, 442 bp, Homo Sapiens
  misc_feature (25)..(25): n is a, c, g, or t
  misc_feature (71)..(71): n is a, c, g, or t
aactttcgaactccttttaaggacnggacccttcctatgatgtgggcactgaaactaaggccaaatagtgnaaagaaggatttgtattatacagaaacatttttaagagaaatgagaaggcaaaaattcagacagaaattacgatgtatttcctgtaaagttacattgagtgtacctgcctctccctgcctccgcttccacctcttctgcttctattagccttgagatagcaagaccaactctccttttcctccttctcctcaaccttttcaatgtgaagacgatgaggatgaagacctttatgatgatccacctccatttaatgaatactaaatatattttctcttccatttgatattctaaataacattttcttttctgtagctattttgtttgttataagaatacagtatataataaatataagatgcaaaattgtgtt

SEQ ID NO: 375863 - DNA, 279 bp, Homo Sapiens
  misc_feature (153)..(153): n is a, c, g, or t
gcagtgagctcaggtaatgccaccccataccaggatgagcaacaagagcgaaactatctcaaaaataccataattttggggttcataggtcaacctgaaagggtggcagttttcatcacaatctctggtgcttctgagagcaacatgaaattnttctctacttcacaagggatggtgcattatgtttcagtgctgttgagggtaccttcacaggttgtgaggttatagtggaaatgataagtttttcagaattactgcattttaaaagggcttctacta

SEQ ID NO: 375864 - DNA, 405 bp, Homo Sapiens
cttcccaaagcaaatacgaagctcctagcaagaagaccctcaatcccctttttaatgaggcacaaacagcaaaagaatagacaaaacataaccaccatgattaacagacttcaggggatttcatatctagggtttcatgatgttttatgtacagtattattccttaatacggtattattcctactgagttcccaggaaataattttcatcatcaataatatggtttaaaagttcataccattcacaatatccatgtcaaaagactttcagtcttctttttatatatacaaatagaactgtagacagtcacatctctccaggctcatgcccaactgaaacttccattacaatgaagagacagaacaggaaagggacttctggtaccatttatttccctgtgacaat

SEQ ID NO: 375865 - DNA, 457 bp, Homo Sapiens
  misc_feature (96)..(96): n is a, c, g, or t
aagactggaagtcgtttgacaaggatattgtgaatggtatgaacttttaaaccatattattgatgatgaaaattatttcctgggaactccgtaggnattataccctattaaggaataatactgtacataaaacatcatgaaaccctagatatgaaagcccctgaagtctgtaatcatggtggttatgttttgtctattcttttgctgtttgtgcctcataaaaagagaatgaggtcttctgctagagcttcgtattgctttggaagttcatctgtgttttatttctccctgaagccctatctttatggcttacttgtaacatgaaagtagtagatgctgccagaaaatagtgtcctcaatattttaaaacaaatgttgacatgttttgttcaagtcagcaagctctatgtgagtctcaggaagtgaattaaatttggaccattatgttttactcttg

SEQ ID NO: 375866 - DNA, 399 bp, Homo Sapiens
  misc_feature (15)..(15): n is a, c, g, or t
  misc_feature (21)..(21): n is a, c, g, or t
  misc_feature (46)..(46): n is a, c, g, or t
  misc_feature (76)..(76): n is a, c, g, or t
ggtccaaccttggcnacgaanagccaactccttttaaaaagtcctncgattggagctaactctggcatgaggtttnacagatatgtttgtatacaacctatcaaccagtatttttggcctatatattaaattgttcagtccatcgatgtactgacgctccttggaataccttagtaatttataccgtcctaaaaactggacttcacctctatggtgatgaggaattgacttgtattttcctaagtctccctctggtctggttacattatatccagcatagtgaactctgttccaaaggtcatcatcttctcctccccatccccagaaggcattaggaaaaccattgatctttctaaattgttccactgtcagcccacttacaccaccaaaaaattcttt

SEQ ID NO: 375867 - DNA, 382 bp, Homo Sapiens
aacagatttccactgacaacagcttacaaggactgttgcttcccctgtggtcccaagagtacttccatgctgggtcattcttaagcccaaccttacagggctgatacgaagatcaaataggctacgtgcatctaaagggctgtgcggacacctactgagctctgtgtaactggcattaaagattcagtgacattccttctcaatttcctgaaactgccaaattgggacagaagtaatagcaatgttttacaatagcaataatgttataagagctcatatttcttgagactctcaagtgctctgcaggttattatctcattaaatcttcacaacaacactgaggtaggtactgtgattacctccatttaaagataaggaaact

SEQ ID NO: 375868 - DNA, 321 bp, Homo Sapiens
  misc_feature (203)..(203): n is a, c, g, or t
  misc_feature (234)..(234): n is a, c, g, or t
  misc_feature (242)..(242): n is a, c, g, or t
aactttaaaacactatgctaagtgaaagaagccagtcacgaaataccacatactatatgatttcatttatgtagaacgtccagaaggccaatctacagagacagtcgattcgtggttgcagagggcttggggtggccgatgggttggggagtgttggctgatgggtccaggatttctctttggggtgataaactttctaaaantgatctagtgataatggttgcacaactctgnatataccnaaagtcatcaaattgtacactttaaatggatacaaattgtatgtgaacttaatctcaataaagccgtgacaaaagtttc

SEQ ID NO: 375869 - DNA, 481 bp, Homo Sapiens
  misc_feature (59)..(59): n is a, c, g, or t
  misc_feature (67)..(67): n is a, c, g, or t
  misc_feature (81)..(81): n is a, c, g, or t
  misc_feature (121)..(206): n is a, c, g, or t
tttaacacaaccctctggacagttaacaaacccacgttccccatggtacccttaaaaantttaggantcaaaccccaaggnttgtcccatgactgaaaataagaccttaattaataagtannnnnnnnnnnnnnnnnnnnnnnnnnnnnnnnnnnnnnnnnnnnnnnnnnnnnnnnnnnnnnnnnnnnnnnnnnnnnnnnnnnnnntgtgcttatccttagataaacttcacttttaagactactactggagcctgaaagaggaaacagatgtagggtggtcaaaggtgtgacctagaggagcctgaagagcagaagtgccctgacttgaccaactcacagcagttcaagtaagatcctgttgagttaggtgtgctatgatatctgccccttcacagccatactgcacatgcaggctgtaagtgtcacttcctaaagaggcgcccactgtgcttgcttctctaccctgcagtcctcccttt

SEQ ID NO: 375870 - DNA, 324 bp, Homo Sapiens
gacaaaacactcttcagctttggggtaatcatttttggtttggtaaaaagagtgactgaaacttgcctaaagattaatttttagaggactctgaggaaaccagattggcagtgaatatacagtgatgaagtgagaaacacttcagcaaagggtggaacaaattagtaactgacttactacacatcctggcaaaaacagcaacttagctaagagtctaaactctcctttcaaatctagaatatcttggtgggaaggtgggagatgagcagcttataaatagcaaaatcaactgggattttgagtttacttgtccctgttataccc

SEQ ID NO: 375871 - DNA, 509 bp, Homo Sapiens
tccacaattgaagtgttgattaaaaactgccttgaagggtttcccagttatttggggtgggtttcgtccagggaaggaatggcaaatgggttgcacttcaggaagacgtgctaacaatgagctctaatgaggattctgagtctggattccagctggaaagaagcgctgtgactgaattagtgatgtctggcacaagctggaggtgggtagggggacggttggggtcaatgtcacttactctaggtctaggtcaagagcatgtgtaggaatgggccaatttcagcctgtgccctcccctccacaaattcttccctgttataaccagcactgcactgatgcacaattgggactgtataaatgcttagggactcgatgccttaccgtaagcccccacccagccttgtagttaatgcctggagagaggcactatcaggcagaacatcacacctgcatgtctaccttcactccgcaggcttccagacacatcctaggatcctgtctgagaaaac

SEQ ID NO: 375872 - DNA, 468 bp, Homo Sapiens
  misc_feature (292)..(292): n is a, c, g, or t
  misc_feature (316)..(316): n is a, c, g, or t
  misc_feature (326)..(326): n is a, c, g, or t
  misc_feature (338)..(338): n is a, c, g, or t
  misc_feature (395)..(395): n is a, c, g, or t
  misc_feature (450)..(450): n is a, c, g, or t
ggtcaagaatagacccttaacaaaaattaatagtgtaaagctgaattctctgccatctgaatatgagagtgggtcagcatgccctgctcagactgtgcactacagaccaatcaacttgagcagttcagagaacaaaatagtcaatgttagcctggcagatcttagaggtggaaatcgccccaatacagggcccttatacacagaggccgatcgagtcatacagagaacaaattcaatgcagcagttggaacagtggattaaaatccagaaggggaggggtcatgaagaaganaccaggggagtaatttcttaccanacattaccangaaatatgccangtcacagagcccagattatggcccgctaccctgaaggttatagagcactcccaaganacagcaagacaaggccttgaaagtatctgcagtgttaaccccttccactcttggncaaggacatttggggccc

SEQ ID NO: 375873 - DNA, 293 bp, Homo Sapiens
  misc_feature (104)..(104): n is a, c, g, or t
  misc_feature (129)..(129): n is a, c, g, or t
  misc_feature (133)..(133): n is a, c, g, or t
  misc_feature (174)..(174): n is a, c, g, or t
attatcaccatggttcacacaatgattgagaactcggcgctaagaccccaactgtaccagcaagtaaggtcttggacagtcaatgatactgctttatcatctgnaaaatccctcagtgacagttttganttantctcagatttactcatgacatcagtgtttttcttattttantttttgtttatgtttatttggaaaaccacaattcatccatgcttttcaagatgctgcagtattcttagcaatgcttcgctgaacattttgctgttgaatattaaatgtgccattttcct

SEQ ID NO: 375874 - DNA, 453 bp, Homo Sapiens
  misc_feature (53)..(53): n is a, c, g, or t
  misc_feature (62)..(62): n is a, c, g, or t
cagtttccccctgaaaaaccctccctggttccccaaaagtaacctacccccangaacctggnaaggtccaatggtaagaaagagaaacacgggtccacatgaaacactgagtccactgaggatcgggtccgtgtggtccctgcccacctgcttgcaccttaagcctaagtgggtgaacctttctcacatctttccccttgaaagtactggatattttcagctgattcaataaaacttgcgatatgagtgacttaagttggtctgagagcctttctgttccacaacctctaggctggcttgcccagtagcataattggagactaccattgtatcaaagaaattgctcatacaatgtcagagaaaagacaagcactgtgcaggaaacagtaagaaatagatgtgaaaagaaggaagggtgagagaaaactaaaagaggaaaggagcacctttctc

SEQ ID NO: 375875 - DNA, 475 bp, Homo Sapiens
  misc_feature (128)..(128): n is a, c, g, or t
  misc_feature (437)..(437): n is a, c, g, or t
  misc_feature (442)..(442): n is a, c, g, or t
caggatctgtgagaatgggcctgactgtgcaggctgcaatgtggagtaccagtcttgcaacaccaacccgtgtcctgagctgaagaagaccacgccctggacaccctggacacctgtcaacatctctnacaacggcggccactatgagcaacgattccgatacacatgcaaagcccgcctggctgatccgaatttgctggaagtgggaagacagagaatcgaaatgcggtactgttctagcgacggcaccagtggctgctccacagatgggctttctggggatttcctgcgtgctgggagatactctgcccacacggtcaacggggcttggtcagcctgggacgtcgtggtcacagtgcagccgtgactgcagcaggggcattcggaaccggaagcgtgttttgcaacaaccccgaacccaagtatgggggaatgcnttgcnttggcccatctctgggattaccaggattgcaac

SEQ ID NO: 375876 - DNA, 430 bp, Homo Sapiens
taaaactgtgaggcacccccaccttgctcctggatgccagtttcctgtgcccattgctggtgcctggtggaggcagcggagcagaggctcaggcacaatgaagcgtggatgtgtttctgcaggttgctgcaaaactcaccttattctgacttttggatttcatggcattcccaggaagccccttgccatgctgttggcctggaagtcccacctgtctggtccatagtgacgtcctgaagagccagtctgtaaaataaccaaccacttacttagcgtttggatagactccatgccttctctctccctgcaaagaaaaatcttgaacatttatgatgtcaattagtgaaagtattgaaaatactaaattataactaaaagcaactttttatgttattgaaaatattgaaagaactgatattaataaaaaaaa

SEQ ID NO: 375877 - DNA, 529 bp, Homo Sapiens
ggacaggtgctgtgcccatcatactcagcagcggtgaggcagtacatcatgaagtggcccaggtcatgtttggggatgatccttgagggtcattgtccatccagggtcactgagtaggccctaagattctcatatgtcttgaaactttatcagggagaattctttgagagctgatatgaataaagctttgtcccaggtaggatctacattttccttcctatcaagtgtttgagacttccaacattctgggaccagtgggaccacttaaattcttggattctcatgtacaaaaacccacatgaaggttggctcagttctcaaggaagacctttttttcagtccagtaagtggcaaggtttaacttttgtatgggatgccaggagggcagatttgctattagttcacagagggtgtcaccctttggggccccagctttacggagagttctattagggccctcattttgcaaaggttttggtttgtcttgagcccaggcatcgagaaccccaaaaaacaatgttgcagttca

SEQ ID NO: 375878 - DNA, 486 bp, Homo Sapiens
  misc_feature (383)..(383): n is a, c, g, or t
  misc_feature (388)..(388): n is a, c, g, or t
  misc_feature (405)..(405): n is a, c, g, or t
  misc_feature (415)..(415): n is a, c, g, or t
  misc_feature (422)..(422): n is a, c, g, or t
  misc_feature (453)..(453): n is a, c, g, or t
  misc_feature (473)..(473): n is a, c, g, or t
ctgatgtgaaaatccctgcgttcatcaacataacccagttagggtcgcactcatcacggggcccccattgcctctgggcaccccacgactgacatctgcggggccttcgcgctaggcttcgagtttcagcttccgcaccaggcctgcctttctgcaggggccagggtgggggtcgtgtgctgattgggccctctgaaccgccaccgctgcagaggggctgttccttccgtcacatcccttgtgcccgaatccaccctgtgtcttctcttttctcagcaggacattttaaaagcccagaccccctccttacagagcaaatgtccaggcttcggaggtcactgtcacatcccaagaaccccctttcaccagggtgccactctttnaggantgggattgaaggccccngggagaggtntagcttnggtggggttctgttaggtttaggggaatttngaggtttcattgccttaggnagggaaggccttt

SEQ ID NO: 375879 - DNA, 493 bp, Homo Sapiens
  misc_feature (389)..(423): n is a, c, g, or t
  misc_feature (454)..(454): n is a, c, g, or t
ttcattccggactcaccctcaaagaagtttcattataaatagctgttcattagcaattttaaatatttacatttatgcatgtcatcaacaaaaggctctgaaacacaagaaaatgaatttaccgattgaatacgtgattccttcaagtcctactttatctttgttacggtgttggtgaataagtaataactgggcaagtacataaataatgtagggaagatagcatgatttagtttttgcactgagggggcttctgtttggatggagcatgaaccttgtggaatactgtgcatgagtagtcctggggctgcaacgaggtaaagagaaatcttttagggattcagccgcctgaaagatcagttccagaagccaggcacagtgcttatgcnnnnnnnnnnnnnnnnnnnnnnnnnnnnnnnnnnngaatttcttgagcccaggagtttgagaccancctgggcagcacagcacaacccgatctctgcaaaaaaaa

SEQ ID NO: 375880 - DNA, 493 bp, Homo Sapiens
  misc_feature (14)..(14): n is a, c, g, or t
  misc_feature (23)..(23): n is a, c, g, or t
  misc_feature (33)..(33): n is a, c, g, or t
  misc_feature (80)..(80): n is a, c, g, or t
  misc_feature (106)..(106): n is a, c, g, or t
  misc_feature (110)..(110): n is a, c, g, or t
gagtccatggtcanccaacccangagctctggnaatgcaatcccttttaaaaatgcactgccttccacagtcatccatgnaaaaacgcgtctgtccttcccatggnaccntttcggcagggcagagtttgcccacctttctgacacagctatgtcttaactgtagtggcatcccagggctgctgaaaactttgggtaaatttaacaaaatgttttggttatcagttacgccaccaaaaatatgtgaaaataatgacactcccctatttaggtggaaggtattgttaccatttatcatgtgtactaaaccttttgagtcactgccacataaattatggaatgaggccccaaaccatctctgagatggccacacatcagctagtgaatccacatggaaaattgaccagagcaaataccctaaacattacaaagtcaaagcccttctctaaatggtcaaattgtcattaaatagcttgagctcctctgaagaaaag

SEQ ID NO: 375881 - DNA, 450 bp, Homo Sapiens
  misc_feature (62)..(70): n is a, c, g, or t
  misc_feature (205)..(228): n is a, c, g, or t
  misc_feature (251)..(292): n is a, c, g, or t
  misc_feature (404)..(404): n is a, c, g, or t
ctggaagaatgtgagtatctttctgagcattttttaaaaagcttttacactcgctatctgcnnnnnnnnnatttcttgtcatagtataaatttcctgtcgaaaattgtttagaaatcagcttgactgagaacaggattacagtttaagttcccatatgtcttacttagtttcttcttaataataggtaatgtgtacagctcctcnnnnnnnnnnnnnnnnnnnnnnnnagacagggttcttactccgtagnnnnnnnnnnnnnnnnnnnnnnnnnnnnnnnnnnnnnnnnnngcctcaaactcctagggctcaggtgatcctcctgcctcaggcctttcccagtaggctggggattacagggcacataccattcatgccgggggttgattttttaaaatttccntttctgtagggatggggggtcttcactatgttggcccaggggtggg

SEQ ID NO: 375882 - DNA, 378 bp, Homo Sapiens
ctcatgtaatttaattgaaatactgtactgaaggtgaaaacccagaatggttgtatggatatgcgaagtatggtttcctactgaatgtgtattgctttccccatcatcataaaatttttaaaaatcctaagttgaatcattgttagtccgggaccttcagtactgccaagtcccagagaaaacgcttttactctggggagaacccactgatggctcattagatctgtcccttccccgaggtccgtgtgtgactttgagcaaaaagtgacttctttttgtgaatgtaaaatttgtgaaacttgagtttttccaatgtgctgtaaagtgttttattgtaaattgctcatctcaataaaatttacttcaggtttgtggaaa

SEQ ID NO: 375883 - DNA, 731 bp, Homo Sapiens
  misc_feature (42)..(42): n is a, c, g, or t
  misc_feature (689)..(689): n is a, c, g, or t
  misc_feature (708)..(708): n is a, c, g, or t
aagaaatcttgtgtcaaattagtaactcagtcttatactttntccttttttaccaacgaaatcctaagcagctgagacctttcagacccccgctggcattagggaattccgctggcattagggaattccgctggcattagggaattccgctggcattagggaattccgctggcattagggaattccgctggcattagggaattccgctggcattagcattgctgggatctcaacttctctattgaggagggggttcctcccgctggggttcatatggcctcactcaggccatccctgttagaaggtggtacctgatggtctgttctgacgggtgagggacagaggcatctggatgaaaatctcgacgctttctgggaacagcttccaatggcatgggagttctgtatttaaaagcatgaactgtgtataaaatggggaaatggaggcaggagactttgaggtaacatggtctggtggtggcatgagtcctcagaaggtatttgtaataaggttccacacccagctctctcagctgtttttaaatgaatgtgtgtgaggaacagatgggaaagttgggagatctgtctacagagaagcaaagttgtggttctcttgctaacttcaaggtgagggatattggggcaccctaagtttggggaacttggttggataaatacgtatatggtccnttccataaatcagtggttnagtgactgggccggggttctaga

SEQ ID NO: 375884 - DNA, 604 bp, Homo Sapiens
ggtttttccatggtgaagtttggaaaactgagggtctgagtccctcatttggtggtattagaatttaactgagtaggaggagagaagaaaacagtaacaaatgtcaaaatttcaagcaaccatgtggtatggctgtggtagagatgtatcaggcaattgaaagttttctaggtggtgccatcttgctaaaataataaaaagtacaggtttataaatcaaaaacaagtgcaatctatgtagggaaggattgtctatggatatacaagtggccagtgcaggaagtgaagtaacatttatctttatcttaatttctatgctcatgtcccccattccccttctgaagccaggcctgggaccttagatagcagcttagagggtctggccctgatacatttactcctttaattttggaatttccttctagtctctcaagagtgtttgtggcatatatttttcattttataaatataaaattgtacaaagtaatgtacattttgttttagagaagtcttttaaatgtttgcagacagcccagatcgtcccatccctatttagggcagtgggtctccaaacgttttatgttttatttcacccccatttaggt

SEQ ID NO: 375885 - DNA, 490 bp, Homo Sapiens
atttcatatccattagttatcatttacacatcaaatacatatagcattaagaccaaatatacagaatttccacatttatatacagtagtcaacatagtgcacaattcaaatctatcttacaatcaagtgtacaagtttaaatatggctttataaactactaataactctgctaaagtaactcatagatccagaaataaacactggaaatgccatcttcacattggggtcatcattcagcaagatgctaatcattgtgattgcaaaacagagggtgcaggtaagtgtttccagggtggtgtccgcccattagccccgaaatgtgggttcaaattatgccaacattggcccttcctatctcaggatacctaaaaataagtctggcacatcttccacacatttgaagacacaagattataaacaaatagaaaaaaagacatgtaatcagtgagatgatgaattatcaggcattatcaaaacatgtttttcaga

SEQ ID NO: 375886 - DNA, 450 bp, Homo Sapiens
  misc_feature (386)..(386): n is a, c, g, or t
  misc_feature (412)..(412): n is a, c, g, or t
  misc_feature (417)..(417): n is a, c, g, or t
gttataaatgtaaggagatggatatttgctgcttaacttcggaactgtcttaataagcataaacataagacttatattatacctcagaaaaccacttgaggcaccaaagaatagtttattgcttccctgtactaaatgtccttaatataaagagcaaattcaccttatggaaaggcaactatcttcccaaggagtcccttagttgtttgtaaggtaatgctgaagctatcaacccgtgcgttgagtttaaatgcctatcctaaatagaccatgtctgacttagtcatgtatggaggcaccatccatcagtagttgaaggcagttgaaaaaggagtggttgggggattcttctagtggggtgaacaaggtccatttgggcatccagnaggtctggcacagaggggggtgctgnagttnggacctgggagtgggtccagaccagccttctgg

SEQ ID NO: 375887 - DNA, 484 bp, Homo Sapiens
tcctaaacttgcttctgaaaaaatccatttagaacttcttagcttcaaactttctgagaccactttttgtttcatatcatattatcagttcagtgccttgctcaaaggacttcttctgccctggaatgtcttccttccctactctctagactttcctttcttaactcaatccaagtcctacctgctccaggaagccagctctcattctggtcctcagggtggccttgtctctccaaagtcctatgggtctcactatctttgctcatggaaccagcccatggcatgcctcctcaggctgcctggaagactctacacagatatggagaatccttgactcaggctgaggggcagtctagtaccaggctcttaatcttcagagatggaagaccaagaagggaattttagtccaagtctgggaaaagaagaaggtatattgagatttcagagggtaggatttagggaaggggctaagaagagggaaagc

SEQ ID NO: 375888 - DNA, 199 bp, Homo Sapiens
gaaaaaatcaggcacgtcatgtcatttaattatttccaaggagtggacgttggcatgtagttttgattgatacttggaaaagaaccaacaaaaccctacacgaaacaaacaaacaaaaaattatactatatggcaacgcactgagagaagccaggtggaaactggttaggtcacaggatcagagccgcttcaagagggg

SEQ ID NO: 375889 - DNA, 311 bp, Homo Sapiens
caattataattgagactatctctactaaggtctaatatctctaatagaaataaggtcatgcctaaagaggttagaagatgcaaattcagtagccatactgttaacataattgctctaattctgtatccatgttttattaaagcattgtttttgtcaaaaaagaaaagcaagaaaagttgtctagttctagttttcagaaaggagaaagtgaaagcataacttgaattaaaattctaatgttggctactaaatagggaatatagaataatgtactggacagtttctttgtaaaatgcagacgcatgcttcag

SEQ ID NO: 375890 - DNA, 240 bp, Homo Sapiens
  misc_feature (181)..(181): n is a, c, g, or t
agatttccattgttgccacatagtgttgccacatagtaactgctgaatatgattttgctgagtacatgaaagaagagaaaggatggcattaaactaaatgattaaatatctctaaagtaacattttttgctgatgcttactgacacattacttacaagtaaacatcatttaaaaattaccnattactattagttgagatgtgtgaacatctctctacttgtttaatgagtcaaatgtaaa

SEQ ID NO: 375891 - DNA, 483 bp, Homo Sapiens
  misc_feature (28)..(28): n is a, c, g, or t
  misc_feature (51)..(51): n is a, c, g, or t
  misc_feature (59)..(59): n is a, c, g, or t
  misc_feature (66)..(66): n is a, c, g, or t
  misc_feature (137)..(137): n is a, c, g, or t
ccctaagtcccgtggtccctggaacccnaccggggccaagtcctaccgtantaaacaangatcctnaaaccgtgaactccacgtgtgcaattaaaaaacctgaagaccttaactgggacctagcctccagggaacanggccctccccagagccccttttggctgaagttccaaggctttttcctgtttattttccccctcagaagtgatgagaaacatctggtcaccatctttcatgcagtatacattttcatggaattaaagataatgatttaggtgcctctaagctgtctcttcttcaagcttaataactgaagtttgtgtgatctctttcttcatagagaagatgatcttttagcctttcatcctttattgcctttggtctctgtttcctagataagtttttaaaaaacgtcatttctgaaatgggcagaatactcttatcagagtgtggttgctactaaataagcaaaataacttaacc

SEQ ID NO: 375892 - DNA, 349 bp, Homo Sapiens
gacaatattaatactgtttatagctagaagtttgatttctgaattctttgagattttagcaaaacagtttattatacactgtacatttttttcacagcaattggaaaaaaacaaccacttgcaatcattcaataaccctgaagaatttggttcctgagtgtacaaactcagagcccggaagccaagaagggtccttggcctgcacggtctgtagttgactccaagtctctgtgagcagtgacttgaaccaaacacaccagggataatccattctttggggcctctttccaactcgaggttgttttctttcaagatactctaatcagccatagaatttagtgtaaatatt

SEQ ID NO: 375893 - DNA, 561 bp, Homo Sapiens
  misc_feature (533)..(533): n is a, c, g, or t
ctggccatcactggcttcaacacatgcttgggcatagccttttccacaggctctactgtctttaatgtcctcagaggagttttggaggtggtaattggtgtggcaactggatctgttcttggatttttcattcagtactttccaagccgtgaccaggacaaacttgtgtgtaagagaacattccttgtgttggggttgtctgtgctagctgtgttcagcagtgtgcattttggtttccctggatcaggaggactgtgcacgttggtcatggctttccttgcaggcatgggatggaccagcgaaaaggcagaggttgaaaagataattgcagttgcctggggacatttttcagccccttctttttgggactaattgggagcagaggtatctatttgcatctctcagaccagaaactgtaggcctttgtgttgccaccgtaggcattgcagtattgatacgaatttttgactacatttctgatgggtgtgttttgctggttttaacttaaaagaaaagatattaattctttgcangcttccaaggcacattcagtatgatggg

SEQ ID NO: 375894 - DNA, 398 bp, Homo Sapiens
  misc_feature (56)..(56): n is a, c, g, or t
  misc_feature (85)..(85): n is a, c, g, or t
gatcagttgagcctgacccagagtccttgtatgtaatggagaaaagatttattganaaaacaactcagaaagcactttattgatncccctagattattagttggtattaattattcaaaactcactgaacttcccggcaaatgtctcaatcacttaaccgaaaatttgtgcattctaataaacgtgataaataaagctattatagataggtgcttgaatttgttgaccatgcatttgttagaatatctatgattgctaattaagttagaactgtatagattatgatttgttgcaaatgtgatgtatctttggttgtatattttcagactaattacatcaaacaacatttaactgttttgccccagattattttataattaaatattccaatttctgtt

SEQ ID NO: 375895 - DNA, 945 bp, Homo Sapiens
  misc_feature (18)..(18): n is a, c, g, or t
  misc_feature (23)..(23): n is a, c, g, or t
  misc_feature (43)..(43): n is a, c, g, or t
  misc_feature (53)..(53): n is a, c, g, or t
  misc_feature (69)..(69): n is a, c, g, or t
  misc_feature (79)..(79): n is a, c, g, or t
  misc_feature (84)..(84): n is a, c, g, or t
  misc_feature (102)..(102): n is a, c, g, or t
  misc_feature (127)..(127): n is a, c, g, or t
  misc_feature (871)..(879): n is a, c, g, or t
gcccagggtaattggccncaatnggtgccggtggggaaatggnaccggagggnatttaaccccctgggnccaagggtanggggncctcccttaggttacctntccacctgggaaaacaaccttagtncccctagcccaaataaatttgtttccagccagaagtacttgaagagggccccgggggatgttagtatatggaatgcccacctttaaattccaggttgagttccttgctgacattggtgaacatctgcttcaaatagcaataaaatgaaagctatataatctatacagctgcattctttaacataataaaaaagaacttcaaatgagacaagcaaaaacaagacataagcattgtcaaataaggcacatgtaaaaatctacacacattatccagtgaaagacaatatatatatatttggaggtagaaataattacaaaaatactgacatttctaaagcattagcatatttgttacaaacaatcaccaactaatccccattcagaaaactgctttgtaaaatgattattcaacatcttcagaactacatatttgtgacttcttttttgaaatttcacgtgtgagtatttggagaattcagttagtggcaaaaagttgtccatactatgagaaatgtaatatggaaattataaaaagttataaatgttcataaaccccatggtcatcataatgtaaatgtccttgagtgcaccaagttgatatttcctcatcaattgagagttcacagttcttatttcacaggcccattgatgtttttagtaatgtggctatatctgctggcatactcccttcatcacctgtaggtcagaaagtagcattaaaagctttataaaaatattttacttnnnnnnnnnttgtctcaattattttttttctttggtgaattcttactcatctttcaagggctagtttgcttcagt

SEQ ID NO: 375896 - DNA, 439 bp, Homo Sapiens
  misc_feature (16)..(16): n is a, c, g, or t
  misc_feature (389)..(389): n is a, c, g, or t
ccccaagttgtggtgncccttggaggaaaataccctccctcgtaccctcagtttccctcatctgcaaaatgaggataaatagtaccctatccccataaggtgtcatgaagcacataaagtggctacaatattgccctagtatgtagttaacagttaattattaaattctgctaaccaaaataattttgtttacagcataagaatgattatatgataactgtggatgttgttatcaatccagtatctctgccaacctgtaatttggaaaactgtaaatttcaggttgagcaagttattagcagctttctggggcatactggagaagtcatatgttatcaaaatatatgagtctaaacacaagtaatctcaagtttgaattgttcactcanggttgagaattcctatcatagagccagggagcagagatcattcaaaaaac

SEQ ID NO: 375897 - DNA, 402 bp, Homo Sapiens
ggtatataaataaataaatacactatttcccccatgtttccaatttttaagacattgtatagtgaatttattgtatctttcctcagattaacaatttcacacagtgcttgaaatttagaggtatttcaccctgaaaagatgtctagagattgaaagaaaacatgctgggcatatgatttgaaaatataaataacatgctatttaaaaataagtttaccctatgttttctatcttttctggcacctagatataccatttaataagtaatagcaaggataatcatttttttaagccctggaaaatcttgattaaagaggacatttcagtattgcaaataaatgcatggtatttgtgtaacattgtggaaactaataaacacaaattgtattatagcaaaaaaaa

SEQ ID NO: 375898 - DNA, 564 bp, Homo Sapiens
  misc_feature (18)..(18): n is a, c, g, or t
  misc_feature (32)..(32): n is a, c, g, or t
  misc_feature (38)..(38): n is a, c, g, or t
  misc_feature (72)..(72): n is a, c, g, or t
  misc_feature (81)..(81): n is a, c, g, or t
  misc_feature (119)..(119): n is a, c, g, or t
aaaatttggaacccaatncccctttaaaacangcccgnaaggaaacctgaaaatgaaatttttgcctcaatngccaacagncccccctcaaccttcctgtgggccttccgcaacaacanaattccccctttaactcccaatccttgcctctttgaatgctggtgtttgaaaagttttgtttgtgtctttaaccctttctgtaaaccaagtgtagtatggattattaaaaactacttaatacatggataaaaataggtttcacctcatgggtcaatttgtggctgagtaacagcatctgaggtcatgtcattgagaaaaaatgtcctgattgatccataagaggtgtcagggcatgtaacaggtagaagtggcctgcccttccaacctggtgacctacaggcttgggagcagcttgggactggctgtggaaatatttattaccttgttagagaaggtgggtggggcacatgcttggggggcttcctgtgctctcggggcatctttctgatgaggctggtggctatgagggagtgaggagcactgaaatggcccacaaaacatttt

SEQ ID NO: 375899 - DNA, 640 bp, Homo Sapiens
  misc_feature (497)..(497): n is a, c, g, or t
  misc_feature (550)..(550): n is a, c, g, or t
  misc_feature (569)..(569): n is a, c, g, or t
  misc_feature (576)..(576): n is a, c, g, or t
  misc_feature (601)..(601): n is a, c, g, or t
  misc_feature (623)..(623): n is a, c, g, or t
cttccgtggcttcgggcggggaggtcacaatcacattgagccaaaacgcatccagtgttttctccagttacaaataaaacgaatatgcccatgctgctaccacatcctcaccagcatttcctaaaaggccttttaagagcacctttccgatgttaccacttcatctttcactcaagtactcatctcggatcaggaatcccatgtgctcagccgtttaattctcttggactccattgtacaaagtggatgctgctgtcagatggcttaaagagaaaattatgtgtacaaacaaccttaaaggaccacacagaaggactttctgataaagagcaaagatttgtgggataaactttatactggtttaatccaagggcaaagggcctgtttagcagaggccataactcttgtaggattcaactcacaggcagggaaaaaggggttaggcccagggtgctttcttcaggaaagtatttacttttaccacagggaacaaggancattcaaataaaggggaaaccattggctttcgagtagggttgtctggggcccncgggtgctgggaaattcanctttttnggtttttttgggaaatggtttcttnggggggggcccattttctgtgntagctttgggccctttt

SEQ ID NO: 375900 - DNA, 392 bp, Homo Sapiens
  misc_feature (16)..(16): n is a, c, g, or t
tttgcccaaatgtatnattaaatacaagatacccccaaactcccctagaagatatgaatgtataggttaataatcctttacccctcccaagatcttatttttaaaaagtaaaaataagcccatcctatctggataactgttatacaggtggtatattatacatgcccagaggagaactgtaaacattaggatgatctgtgtaaatgatgctttggcacaacacctattttaagtacatttcatatgtctactgtgttcatcaagaaaattaatgtagttgggtgccttttgaaaatgcaaatatgttttatttcattgttttatatccttagcatatagttacatgtgatgaagacactgaaatgaaaaccctaataaattctttcttgtgg

SEQ ID NO: 375901 - DNA, 463 bp, Homo Sapiens
acataattcttattgaaaccgttggtgagtgtgatattctatttcataacaatgtactattttatgaatgctatataaagatgagtgacaacttatttttgttcattcagcagatatttgctaaatgtataattaaatacaagatatcccatactccctagaagatatgaatgtataggttataatctttaccctccaagatcttattttaaaaagtaaaaataagccatctatctggataactgttatacaggtggtatattatacatgccagaggagaactgtaaacattaggatgatctgtgtaaatgatgctttggcacaacacctattttaagtacatttcatatgtctactgtgttcatcaagaaaattaatgtagttgggtgccttttgaaaatgcaaatatgttttatttcattgttttatatccttagcatatagttacatgtgatgaagacac

SEQ ID NO: 375902 - DNA, 419 bp, Homo Sapiens
  misc_feature (382)..(382): n is a, c, g, or t
  misc_feature (398)..(398): n is a, c, g, or t
cgagtacctgttgctattaaagtgctggatgtcaatgacaacgcccctgaattcgcatccgaatatgaggcatttttatgtgaaaatggaaaacccggccaagtcattcaaactgttagcgccatggacaaagatgatcccaaaaacggacattatttcttatacagtctccttccagaaatggtcaacaatccgaatttcaccatcaagaaaaatgaagataattccctcagtattttggcaaagcataatggattcaaccgccagaagcaagaagtctatcttttaccaatcataatcagtgatagtgggaaatcctccactgaggcagcactaggcaccttgacaatcagggtctgtgggctggcagccatggacggtntcgttccagtgtttgncaatgtcggaggtttattggt

SEQ ID NO: 375903 - DNA, 341 bp, Homo Sapiens
aactcgcctatttactggaggtctggcgcgtgcgttgcccttaacgcacggtctggttttaagggtctgaagtgtgcctgtctttccggatgaacagatgcaggagatgttcccctctctgggatacgtagtttcagagccgactgtggaggacttttaaagtttggttacacaataaagattttcttctgtaggtatagtaaggagaggaacacccttaactcgacacagacagcggtcatatgcagagggaccagactcccgttttggggtcctggaaagaattgcccttttatttggccacgtggagcactttggtattttgacagtcagatagatct

SEQ ID NO: 375904 - DNA, 386 bp, Homo Sapiens
  misc_feature (156)..(220): n is a, c, g, or t
tagggacagagctcccgtctaaggtgggcctgtggtgaggtctccccagtggtacactttaatcccacagcagggcttgcaggccgccctgctcccatcccccaccaacactgggcaggatctagcctccaaacctttgccagtctaatagtatannnnnnnnnnnnnnnnnnnnnnnnnnnnnnnnnnnnnnnnnnnnnnnnnnnnnnnnnnnnnnnnngttcaaaagtcctttgggagttcgagaccagactgggccaccaggagttcaagaccagcccgggcaattcagtgagatgttcatctctacaaaaaataagaaagataaaaaattagccaggcatgtttgtgtgtgcctgtggtcccagctcctcaggaggctgagg

SEQ ID NO: 375905 - DNA, 437 bp, Homo Sapiens
  misc_feature (64)..(64): n is a, c, g, or t
  misc_feature (73)..(73): n is a, c, g, or t
  misc_feature (84)..(84): n is a, c, g, or t
tatggaagccctttacacccaggtagggaaaccgcaatatagccctaaccaacaccccgcctcntaatgattnggaaggtaacngaaattaatttatagcctaggaaaatcctttcccttagaaacctaactctaaaagtaccttaaatatgtacaattaaagaaaaaatgatacgggctgtgtgactcaaaactaatgcacacacaattactttttaagtaatatgggtaatttattgaacaataaaaatattttgggatatatgttatttataactaacaacagaagatttataatagcaactgataacagaataacaaccattcttatttaaagaaattgccatgcaggttacataaactacgtatttggaatgatgactaaaaattttcaggctaagaagattgtttattattcattaagaaagtaaaaaaaa

SEQ ID NO: 375906 - DNA, 366 bp, Homo Sapiens
  misc_feature (290)..(290): n is a, c, g, or t
  misc_feature (348)..(348): n is a, c, g, or t
ccaaacccccgctttactgcgttgaaagcttctgaatttcaagcagaaagtagaaggagctccaaaggcagtgagcgtctttccttgggctgcgtgtgccgagcgtagacaatgaaaatcttcatccccctcccccattctactaggctacaagattcttgttttcgttccttctcaccggtggaagatgtgtaaaatcaaagatgtaggaggtgtgtagtgattttttttaaaagccaacttaaccaccgcacggacttgcggacgcgggatttacccgaggcgcacgnccggctggggggcattttgggggtcttttgcggcaagaccagcttttcagctcttttntccttttcctcgggattt

SEQ ID NO: 375907 - DNA, 464 bp, Homo Sapiens
  misc_feature (13)..(13): n is a, c, g, or t
  misc_feature (34)..(34): n is a, c, g, or t
  misc_feature (52)..(52): n is a, c, g, or t
  misc_feature (350)..(350): n is a, c, g, or t
cacccggaaaaanaatgcacgttcactgaaacgnacagggtgcgccttcccnatgccttcatgtgaaaaccttcaggcacgtgctggcaggaagcatcttcccaacgcaccctcctgcggcacaggaggccctcctgaagggcctctgtatgtaagcttgggacagctagtgcaggggagagagaggtgtttgtgaagggcagacaccctcttcctcaaataggccatctgctttatcatagcacatacctttcagtggtcactggctcagaagtgcttcctttctactttggaaaaaaaatggtagcattccccagagttgagtgaagctgctttatccaggagtgccnctctttcagctaactttggtgggtgatgccaagatcctctgagctctgcctgcttcatcaggaagacggagatcaaaacttaaggaaatgaaaaaggatctgggtagaaacgtg

SEQ ID NO: 375908 - DNA, 338 bp, Homo Sapiens
agccaagttggaaagtttctaactaaagaaagtcccagagatcatatatcttgaatagaaaagggatcagatcttagaatgctgagaaaaactgggaaccattaattttggctcatttcctaaactctctggatttcatagagccacaattcttctcaacctgggggcactgcttctgtctctggagagatagaagtgcagcttccgtaattctcagggtatgagctgcctgggatcaggggaccttcatggaaacggccactacatggggaacccccttcagctttctgagacttctctggggaacaggaaccacacaatccccagggttcctgaga

SEQ ID NO: 375909 - DNA, 520 bp, Homo Sapiens
  misc_feature (15)..(15): n is a, c, g, or t
  misc_feature (408)..(408): n is a, c, g, or t
tattcaaatggggcncagggttcagctttggggtttgggaactgcacgctgaaactctgccgccggtgaaatggaaggtcatctggtcgctgtgttcaacagattcctcttcagttcccaacaaaacgccagcctgttgtcctctggcctgattttcctcatctgctacacagcggaggagtctgggcccaagctgcccccatgtaaagtgccgcgtgcccgggctgcgctggggtcagctgtgggcagcgtgggctcagaaaacgggagcctgcaggcagccccgcctgagaagagcttgtgtcaccaggaaatagctggtggcttgcgggtccagcaggaaaacactgctcctgtcacccacaataggttttgtaccaaagagaagaacactcaaaaggaaatganccaatctcacaataagctcccaactgaacgggtaaaggcggagcatcatcgcagtgtatgactcgcaggaactcacttaaaatacacacatttgcttcccccatgatccaat

SEQ ID NO: 375910 - DNA, 461 bp, Homo Sapiens
  misc_feature (439)..(439): n is a, c, g, or t
gcccaaaatttcagatcctcccaccctgtccaactttcctccaaaacacaaaaataactccctttctctcccctcaccccacacagtagagttccaattgattaaacttatcaaattattttaaatattcatctgaaatcagtgagactagaaacttcacattttagggtaattatgaggtacaaaagcaagataaattgtcttatcgatgatacttttgatagaagatttttaaacaataaggcataaagttgatgtataattttaaaaagaaaatatttcttgggatatgtgtttctagattaaggtaccatgggccctgaataacgaatctcagtttttcttaaggtcctcctcctctgagctacactgtgggtcgaaaagggcaggattatcataaatggaaagaagctagagacattttagttaaataaaaagnacatctggaaaaagacatcttc

SEQ ID NO: 375911 - DNA, 456 bp, Homo Sapiens
  misc_feature (14)..(14): n is a, c, g, or t
  misc_feature (75)..(75): n is a, c, g, or t
tcccttcccaatgnaaccgggaatcccctctctcgaaccccaggcgccatgaaaacggatggtttcttccccagnactctgcccttcactgggacgcaacacatggaagacagtggactgggacagagttcacctgtcaactgagtctcctgtatactcgaccctgctccagcccttcaaggccagctgccttttgatgggaacagggagttagcatgtgtggtgacctgagctagaacaaccaaaggacgcagctttcagattgatcttttcttcctctctccattttgtcctcttaggttacatatagtagacataatggaaaggccgtattactttggcatcaggaggcctgcgttccaattctggctctgctacttacgggctatgtgtcctccagcaatgcagtaatgtcctctgaacctgtttccttatctgtaaaatggggatagtaac

SEQ ID NO: 375912 - DNA, 755 bp, Homo Sapiens
caaaggtttccatactcttgaaagtttcacgtcataaggagtaaactcctagttagctcctaaatgaaaatcactgtgactagggttaatctccttaaagcgaaaagccctgaggtcagcagggcctcaccccttacatacatgctggacttcccaagaaagcccagggtcattttgcctgagcaaagaggctggcatttaatcccaaggcttctaaactttatatctgtaccctgaattagtttgcacagtgacccaaggtaatggaacagtttgggttaacaatccagccccggtttgcctccttaacaaaaatggtaagtaacatacattcctttaaaaggtttacctgagtcatactagacatgttcacaaataccctgaaatcccatgatataaatacaggtagtaatatgcccacatggtgaatgagagttcacctcctgagatcacaattcaacttgggttgtgtctggtcttaaaattttagtttgtttgtcttcttaaaatgaacataaacatcaaaagacttcattcttgcttggaaaagcctgaagataacatgcttgtttggcagtttatattctttctaacaattttatactatggatggttaccacccaccaattctcaccaccccaggaataagtcattcctggaagaaaatgggaaagtgccttctgctaatgttctttctcctttctttcaatccaatctaccaaactaagaattaaaatgtaaaattgttaaaaagc

SEQ ID NO: 375913 - DNA, 526 bp, Homo Sapiens
aaatggtgtatggaaagaaaaccaaaacaaaacaggaaatcctcttgtaaaatattccaggtcaaagttgtctcctctccaaaccttgcagaagcacctttcttctcttcagcgcactgttttgggactgtttatgcagcagatgtaagtagacaacatggactccatgtgacatgcctctaatagtaaagataaagtattactgaggttaaaaaataaaaattgaagtagtattaatttaaagtgccacccatcaggacaacaaaccatttaagctgaaaaaacgctattttatttcttgagtttgccagttgcttccaccttgagttaaggacgtgtctcatcttcacctactgcgcattctcccttctctaactgtgtaatatgtcaggtcaaggacattgaatgttatgaattgagaacctaattgatgcgcatagttttcatctatgcaattttacttgcttctgtcactttacgatctgttcatatttggcatcaattaaagatactttttaaggatctt

SEQ ID NO: 375914 - DNA, 378 bp, Homo Sapiens
ttggtgaaaggagcaccaactatgcttcaatcctcgtaaacacctggtctccatgctttggtacagtttaccaactgtacaatccctggacctgggatgcagacaaagacaagagccttggaaatccctagctcagtgattactgagcatttgccacattctaacattaaaagggaaagaggaccaggacaggcatcagagcagaacctgtacttgtcttctgcggcaagcaaatacatttttaaaaaatcaccctacttgaatgcctaccctaacatgccttaaaatcttgccttcaaaaaaagtacctttgaataacctgctagtaacctttcatcagagtctttatagctgtcatatgatcttttccaaaagcac

SEQ ID NO: 375915 - DNA, 499 bp, Homo Sapiens
  misc_feature (481)..(481): n is a, c, g, or t
cttaaatttgtgcaagatcgagtgggctcaggactgttatatagcagatggcaagcctcagcaggacaggtgtcagacacaaacaaggtatctcaacctcctggcacaacatcattttctttgcctgatgactgggacaacagaacctcatatttgcactcccccttctcaactggacgaagttgtatccccctccatggtgttagtccagaagtgaatgaactattgatggaagcccagctgctccaggtatcccttcctgaaattcaggaactttaccagactttacttgcaaagccaagccctgcttcagcagactgaccgaagctcaccagtgagacccagcagtgagaagaatgactgttgccgagggaagcgagatgggaattaacagtttttgagagaaaactgaaggaggacgcctgggaaaggaggaggggccttttccagttgaggcggtggggaacgagtttaaggaaantgcggacccccaaaaaag

SEQ ID NO: 375916 - DNA, 484 bp, Homo Sapiens
  misc_feature (29)..(29): n is a, c, g, or t
  misc_feature (51)..(51): n is a, c, g, or t
  misc_feature (103)..(103): n is a, c, g, or t
  misc_feature (127)..(127): n is a, c, g, or t
taagtcagcattcaaaaagggtcaccctnaagtctaatcgcccaagtcctnacaccaagctgtctgggttatgtttcggaggagtaaaataaagcataccccnaccccaagactggtgccttgcccnagaagcctctcagacactcaccttctcactgctgggtctcactggtgagcttcggtcagtctgctgagcagggcttggctttgcaagtaaagtctggtaaagttcctgaatttcaggaagggatacctggagcagctgggcttccatcaatagttcattcacttctggactaacacctgtaaaagaccagaccaaatcaaaatgataacaacaaagggtgtttcacactcacatttgggtttatgagacaaatagaaggactgcccctaataccactactaccctctccttcttaaattacaaattaccttcagttgaagtgaggtttaatgtgcctaaagccacaatataataaac

SEQ ID NO: 375917 - DNA, 325 bp, Homo Sapiens
ctgttctaaaatcaatcaattaatgaaatgttatctggtttttaaaagctggtttcatgtgctttatgtgtataaaactatatctgcctgtgtggctttgcatttcaaatgtgtggcgcacaagcgttttgttggtgctttgttctcagtacagtaactctgtgtacaaacattttaatgtggttttgttgttttccaacaagatgtctctgtaaaaatgatattggctgagctggtgcgttggtttctctcatagaggcattaactatactgccaatgcattgaattatttaaaaatgcaaaataaaatttttatgaaaatctc

SEQ ID NO: 375918 - DNA, 988 bp, Homo Sapiens
  misc_feature (21)..(21): n is a, c, g, or t
  misc_feature (126)..(126): n is a, c, g, or t
tcacatagcaatccagaagtngcttcatttcacaaggtattcaagggatataggagtcatctaccttgttagttctcttaatacccaagggtattgttctttccatggtcaaagctggctcaaganttcctagcctgtgaaaaaagaagaaggtggagcaagccatttcctttttaggaaattacagccatcacttctgcccaccgtccattcatgaatacttactatatagctatacctagcttcaagaaagcctgggacgtgtctctaactagatggacatgtgccctactaaaactccagggaaagggttctattactaaagctaaaaagaggggaatgaatactagagttaaagacaaaaatgatagcagccaatggcccatgccgtgataatctgctgagcaggcatgatggagatcccttgcccagcagaaagtgttccttggtgaaatcatgaatctgctatctaggagaaactcccttgtccattgtcttctgtggccactagtttgacctctaggaaagtcttgctcgtcagcttctgtggccccgtctgaaacttttgagggacatcgcagcttttgcagcccctgcttgctggtgcagacttttagacctagattgccttagagactgaaaaatatacgcttttataggccggggttttagttcatttgactgtaataaagacttcaatgccgtttttaatgtttgactgctgacatctttcaagactcacctttcccttctcccttatgctgcacatctgggcaagctgatggaagcatgggtgcctcctcctttggccccagcaggaagttcaaatcacgcaagccctggcatgcatgccaggaagcttcaccccagcctcacactctaagacggataaaagccaaaccaattaagccgtttctcgaccctcctgggagcctgccctatctccctggaaagtctcagtatgtgagtaataaacctttttataccc

SEQ ID NO: 375919 - DNA, 729 bp, Homo Sapiens
  misc_feature (603)..(603): n is a, c, g, or t
gtcctagtgaagaggaaggcctgtgtagcagaaaggctttgggcctgagaggttaaggccacagcctgtttgacacctgttttggtcctgcgaccctttactggtctccgctggctttgaatcttcctctgggctctactctggagaacataagggctgctgtggttgagtctggctagcactgtctgtggttggcagtgtgtacacccctccgttcagttccttgggggtatttttcagaaatccaaaggcaacccttcgtgcagtgctcacttttttaagtacagttgattacccttgcctgctggggggcctagccatgggccagagatggaggagccccagtggctgacagggcagcctcactcaggcacgtacctgctgaccagtcagccactgccaacccatgggcccagccactgtgtgcattagcagggaggtttgttaggccatggaggaaattgaggagacaccacctagtggagacattgggggccctgctggggggatggtgtctatagctggctctgctggctccctcaggccctgcttaccaagctctggaggaggggagtgctgcattactgagcaccttccttgttntttcctcataggacactgatgttactgtcactttagttatgctaaagtggaggtttcagcctccagaaggacagcagagccttctagggtcaccttaagaataggttttagctaggctggggtttt

SEQ ID NO: 375920 - DNA, 456 bp, Homo Sapiens
  misc_feature (11)..(11): n is a, c, g, or t
  misc_feature (27)..(27): n is a, c, g, or t
  misc_feature (34)..(34): n is a, c, g, or t
  misc_feature (51)..(51): n is a, c, g, or t
  misc_feature (79)..(79): n is a, c, g, or t
  misc_feature (89)..(89): n is a, c, g, or t
  misc_feature (96)..(96): n is a, c, g, or t
  misc_feature (108)..(108): n is a, c, g, or t
ccagcgagaancaaggctgcagtgaanccatgancgtccgctactgcacanccaaccctgggccacagagcaagactgnctcaaagaanaaaaatnttttaaataagnttaattataaagtgaaggaccagttggaccacggaccccctagaaactcagccaaggagacctgactttatctgagacaggaaggcagtggttaaaagaattaaaaaaggacagtggtgcttgacagagcaggactgaagttttcattcctctacctgctggggccttggtcaagtcctaaaagcttcccaggtctgtaactggttttgtctgtaaaatggggaaaaggttaccttttctgccacatgaagtagctggctggtgaaatgatgtcatactacgatgtgtttcattaactgttggagattatcacattaaattgagcagatttggatcttttaaaaaaaa

SEQ ID NO: 375921 - DNA, 173 bp, Homo Sapiens
gtttcttatgaaatccattctaaatatttttgtagggttttcaaggcttctcaaatctgtaaagccttgatcaaccccaattttattcctcactatactgtaggaaataaaaccaaataaaactgaatctggactgttgtcttatgcatcactaagtacattatttctacatg

SEQ ID NO: 375922 - DNA, 451 bp, Homo Sapiens
tttcatatagtgaagaagtgtgtcgttgtgtcccttcatattggaaaagaccataagctaagattggtactgttttccagttccatcgattttcctattatggaaaactgtgttgcccacagtagaactgtctgtgaacagagagacccttgtgggtccatgctaacaaagacaaaagtctgtctttcctgaaccatgtggataactttacagaaatggactggagctcatctgcaaaaggcctcttgtaaagactggttttctgccaatgaccaaacagccaagattttcctcttgtgatttctttaaaagaatgactatataatttatttccactaaaaatattgtttctgcattcatttttatagcaacaacaattggtaaaactcactgtgatcaatatttttatatcatgcaaaatatgtttaaaataaaatgaaaattgtattat

SEQ ID NO: 375923 - DNA, 561 bp, Homo Sapiens
  misc_feature (46)..(46): n is a, c, g, or t
agggtgtgtgatctctcctgggtaaaagtgtgctgataaaccccanctcgattcaactgccagatctgttcctcatgatctctgacgggtggacattgacaataattttttgagcttagattataactccattttatatttttgttgtagatctgcagtacttgatttgctcaaaaatgcaattaccagttaagtgagggaaggtcgtagtctttgttccagtacgtaaccaagagttttctatcattttaaaaactgtcactagtggcaacattgctcatggcatttgagttccaggtcaaaactactgcagtagtctgcatttgtagtgggcacattaatggtaattatatgtacatgtgcaagcatctaatgattgtgtcatcaggagttttggccatctccagtttgaattacacattaccgtaagttgcttccttttatttgtctgttacattacagttagatattaaagatacctttaatcatgatagatgatttaaaaatatgcctcacgtaagttatattgtttgtgttttagaataataaaacatgtttaaa

SEQ ID NO: 375924 - DNA, 453 bp, Homo Sapiens
  misc_feature (12)..(12): n is a, c, g, or t
ccgcctacagantggcagttcctttccaagacaggggtcccttaagagccaccagaaagaagtctgccctcctatatcttcgcaagtcatatttgtcatgctgaactcccaaagggcaagttcaaccttgacactagggaactttgtgagtcaaattaaccaccccctacctgccaaacactaggtgggtgagctcttgggctgagtcttaaatatacatagagataacgaaatacctctttatttgattagtggctatgtctccagctagggcataaacttgtcttgtgtgccctgtaattgctgtgccccagcattaggcatagtgccttacacatagtaagtgcttaataaatgctgtcaaaagaacaagcacttgtctgactagtgccagtcattatagggttttacaagtattaaatctaaaatcaagagactgagcaattcttccag

SEQ ID NO: 375925 - DNA, 435 bp, Homo Sapiens
  misc_feature (15)..(15): n is a, c, g, or t
  misc_feature (22)..(22): n is a, c, g, or t
  misc_feature (40)..(40): n is a, c, g, or t
  misc_feature (156)..(156): n is a, c, g, or t
aaaggccctaggccnacctggnaaaaaccatctccctaanatctccctaaccccctttcctcctcaactcaactgtgctcccagcccaacacccagctccttcccttgaagctggcccaaagagcaacacctcgcccccaggaccctcgcatttgnctgttccccaggaatgtccttccccaaacggctccagaattaccatgtggaaccaaaagcaaagcccttgattcgcttgaaaaatttagcaggaaagtatctgtagttaattttgggttacacaatgtccttcactgtctgggcatagaaaagctagctagctcatctcatccagaaactctgccatgagtttaaaaaccaaagcacatactttgatattcactctgaaccaagataaagctttaggttgacataataaaagatggagttaacattcct

SEQ ID NO: 375926 - DNA, 509 bp, Homo Sapiens
gctcatctgtcaggagatgctatgactactgcttctgatatctctaaatgtcagtctgcttacaccattgctgattttgttcaagggaatctcttcgtgcacttgattccctctgttccctgcgtgatcgaacatgaaagcagtgttgtctgcagatgtgcttgcgctgccctagctgggtgcaaataagagtgtaacctattctgatgtctggtgaaaggacatccatagcatagtgcaagtatgccgtaaacgttgctttttaggcagtttaggaagtcagaccatgcaaattactcatgtgttaacatgcaatactcaaagggttttaatttaactctcttcttttgaattcttcatgatgatttactgtaaatgcttctcagtttggcatgccttgatccattgctggctagtgattttatgtggccagtaggaccccgaggttagtttacccattttaacttaaatagtaaaagccacttacaagtgactgccagggatttttt

SEQ ID NO: 375927 - DNA, 536 bp, Homo Sapiens
  misc_feature (436)..(436): n is a, c, g, or t
agttcttatcacctacaatgggtagaatgtgaacttgttacctttggcaagttttcatttttccttggtggattccttctgtgactccaggtatcttgataatgggagactggtttatttgttctttaattgcccagatttctttcaactggtaaaacatcatacttcttcagcaaaaggaattcttctagcagagccttcatggatgatatctgtcacacatgccagcacctgcagtttggaaggcagtggtgaatggatccatgcaatatgtctagaagacacaaggatgagccagccacctgatcttgtcatttataaacttttaagaattactctggtttacttttggtctgaaaatggaaaggcccaaattaatggaaattaatctttttcagattgggaattttacatgggccatgaaaatatttctttnctatttcagaagactgaaatagaggaagcttgagagactcctttcttttaaaagcggctctctgtatctgtttcatttaaaacatttgtgggattgaaaa

SEQ ID NO: 375928 - DNA, 392 bp, Homo Sapiens
aaacaagaaacagagtgttgtaaaaggacaccttcactgaagcaagtcggaaagtacaatgaaaataaatatttttggtatttatttatgaaatatttgaacattttttcaataattcctttttacttcctaggaagtctcaaaagaccatcttaaattattatatgtttggacaattagcaacaagtcagatagttagaatcgaagtttttcaaatccattgcttagctaactttttcattctgtcacttggcttcgatttttatattttcctattatatgaaatgtatcttttggttgtttgatttttctttctttctttgtaaatagttctgagttctgtcaaatgccgtgaaagtatttgctataataaagaaaattcttgtgacttt

SEQ ID NO: 375929 - DNA, 679 bp, Homo Sapiens
  misc_feature (16)..(16): n is a, c, g, or t
  misc_feature (553)..(610): n is a, c, g, or t
  misc_feature (625)..(625): n is a, c, g, or t
  misc_feature (657)..(657): n is a, c, g, or t
  misc_feature (662)..(662): n is a, c, g, or t
tcctgtaaaagttgcnaatttgggtttgggtttgttccttttcctttttcattaaccctctcctcaccctcacagatacccccctccccatggcaaataatataataacccagtgaattttcaggaatttaaaaattagcttttttcccacttaaaggagaaaaatatttgggactagcagcagaggcagtaagagatgtgaaccttggtgagctctgatacagtgagaagagattatactcatgaaagagaatgttagtgttacagagaagcagccgatagcaaatcaactgtagagacttggcggcggtggcattgccccaggtcgtcagcagtgtggtattatctatgagaacttgagcgacagagtatttcttgatgaatttatagatcatttgagatgttgagttacttttgttttcaaataggtagagactattaatttaaaaaaacaagaaaggaaaatgaaatgtgcgtgttgagagcaataatttgtttcttttaaagattctgaaagatctgagacctgtaggcattaattatttgagtgccnnnnnnnnnnnnnnnnnnnnnnnnnnnnnnnnnnnnnnnnnnnnnnnnnnnnnnnnnnttattcattgttttncttgggatagggtgttccaagtatttgggttngggtncgggcattttgacccca

SEQ ID NO: 375930 - DNA, 366 bp, Homo Sapiens
gggaaatgaaaccacagccagctgatgcatggcatatgctgtttcactaactgagaaccatggtggctctatacaggaggtcatcagctctaccaccctttagatgcactggaattccattcttctcctgaaacagcttgtgttttctggacctttattttcaaaatgcctgcatgaagcaatgctcatggtcctctgggcaacctgacagtgccagcagattctgcagcatcttgactcagttactgcccaagaaccctgacaactccacaagggttttattttcaaaagtctacttcttccctacaatatagaacttccagaaaaggagctgactcccatgaagggcaagcagagccaaaagca

SEQ ID NO: 375931 - DNA, 344 bp, Homo Sapiens
  misc_feature (208)..(208): n is a, c, g, or t
  misc_feature (254)..(254): n is a, c, g, or t
  misc_feature (260)..(260): n is a, c, g, or t
caactcatatggtttccctaagagaaggagatggcataaataaatctcagaaaaacaagacaaaagatgtggggacatctttgactattatctgcatcttcaatttagttatagatccccatggtgcctgatgattaacttctactccacatggtgctgtgctgggttggtactaagataactccctaatggcttcaagtaataattngggaatatgagacttaacagatttgaaataataatggggagatagnaagaangaaggatatgaaaatttagttagaggaaagtttcgagaagttaaaaataaaagagacatagcattgagaacagggagaatttag

SEQ ID NO: 375932 - DNA, 493 bp, Homo Sapiens
  misc_feature (41)..(41): n is a, c, g, or t
gcatgatggtatttctaatacaaatactaatatgctttggnaataatggcactcgcaggtctttcatcatattgtatcactgctttatcatattagggtaatacactgcgagagttggtagaacctctccatgccaaatcggatccacttctgttggcactcaacccattggactcacagattgataagctaatgtttagagaatttagatcggagagagtcggtacggcgcagactcaacatcaacctcttgcaagcaactaaaatggcctcgtccttgctgtttataacagaaaacagacttgtaaaaagcttagatcatcaagtgttttggattgggggcctcccaaagggattattaaggaggggcaggccactctttaaggaaggaatgcggagcttttcttacattgggggactagccattaagatccaaagcccaatccaaggatggggagccacagttaaccaggaaacttgcggttttcttgtt

SEQ ID NO: 375933 - DNA, 501 bp, Homo Sapiens
  misc_feature (22)..(22): n is a, c, g, or t
taaataagaattccccaaaaanaactgggtttgtgttttgaaaatgttgcaaggtctggtcaaaaagaattgtcaagcctgcaattgaaccggaaaggaaaggggaaggaaaacgaacgctctggggcaaaatgggactctggttttgtgtggaagtgaaggctcagtccaccttgcgggcggggctcctgtccctgccagctgccttcccacgctgaccctgagtcccatgggagggaagcactgggtcactccgcaggcgtgtgtcaatgccttgtgtacatttccatctaagattctaaacagtggggcccggtagtgcttcccaaggcaggcatggccgagagcattggtgtcacttctgcccctgttctgttaactagcaagatggaggagaagcagcagcacagaagtcctcaagggataagcaaaggaaacctttctaaactgaaaaacccacctaaaaataaagtccactttcacctggccagaacatctctt

SEQ ID NO: 375934 - DNA, 470 bp, Homo Sapiens
  misc_feature (14)..(14): n is a, c, g, or t
tcagagggaaagtnctttaccagagccttgtcccagagatctcaccatagccccctctagcgttccctcacctaattgggaggggagaaactatacaagaagaaacacttcccttttgattctcggtgatcacaggtcaaagatgcaagtcaggtaaaaggctgagacttaattggaaggttgtagaatgcttcaccgcctccacagtttctcatcataccaacggggctccagtataacaagaggatattacagctgaaagaactgaaagacatggatcttctctaagaagaagtactttgggaatttgaagcctctggtacctatagctacagcaaacataaaacaaagcccaactcctagcccgattaacataaacctcacaccataggcatatttaccttagttcctattacgcagtacatgtctaactttcaattaaaagatataagccatgccagaaggcaaag

SEQ ID NO: 375935 - DNA, 549 bp, Homo Sapiens
  misc_feature (104)..(155): n is a, c, g, or t
  misc_feature (168)..(232): n is a, c, g, or t
  misc_feature (252)..(391): n is a, c, g, or t
  misc_feature (436)..(436): n is a, c, g, or t
  misc_feature (496)..(496): n is a, c, g, or t
  misc_feature (520)..(520): n is a, c, g, or t
  misc_feature (531)..(531): n is a, c, g, or t
atcaagtcagtggttgccagtggatggggtgaggcaagagggaatttgggggaatgaaattgtcctgtaactagattgtggtagtagttacatggttatatacnnnnnnnnnnnnnnnnnnnnnnnnnnnnnnnnnnnnnnnnnnnnnnnnnnnngggatggagtctnnnnnnnnnnnnnnnnnnnnnnnnnnnnnnnnnnnnnnnnnnnnnnnnnnnnnnnnnnnnnnnnngttcaagtgattctgtgcannnnnnnnnnnnnnnnnnnnnnnnnnnnnnnnnnnnnnnnnnnnnnnnnnnnnnnnnnnnnnnnnnnnnnnnnnnnnnnnnnnnnnnnnnnnnnnnnnnnnnnnnnnnnnnnnnnnnnnnnnnnnnnnnnnnnnnnnnnnaccatgcccagtcgtttataacaacatttatccaaaactcactgncatcataaaattgcaagagtaaattttactgtatgtaaatatcttaattttttaaagganaaaaaaagtccaaaataagtagcntataattaccntttccttttaggaaaaag

SEQ ID NO: 375936 - DNA, 570 bp, Homo Sapiens
  misc_feature (97)..(136): n is a, c, g, or t
  misc_feature (536)..(536): n is a, c, g, or t
  misc_feature (560)..(560): n is a, c, g, or t
aaaccccaaaacttgctgcattattgctcttttattgacaatgggcaaaaaaataagtagacctgatatggttgatgaaaatacgtaagtaaacttnnnnnnnnnnnnnnnnnnnnnnnnnnnnnnnnnnnnnnnnctgtataggtagtacttgtgtgtgaaaggcaggcgtttcagtccacattagcaatacccaccttacaaggagctccacttacctaataggaagacagtaccttagctgggtgtgtgagacaatagaccaaaccctaaatgctaggaacaaattcagatacttcatattttcatacaaagaagtccctctaggactggctaaaatctttacacaatcattactaactgtgccaagtaacataggcatctaactgtttaaaaagtccagtattgctttgtataaatccttattttattaacaggattactattcataaataggtattattaatgctgtttatttcaggggttgggccaattgggctaaacttgcaggtacacttctaccggtgggccactcnggggtccggttgggttaccagctngggttgtctt

SEQ ID NO: 375937 - DNA, 396 bp, Homo Sapiens
  misc_feature (20)..(20): n is a, c, g, or t
  misc_feature (25)..(25): n is a, c, g, or t
gagcccccaaaaacctggtnatggnaccccaacccctccaaaagccagggcagccatccacctgtacctggacctgtacctggtcaaggccattccataggaggagaccatagatgtcaaggcctctggaagattataagggatgggaaaaattgcagctgctattttgggactatatagtctgcccacagctgtatttccaaggatgaaagaaaactatacacataacgtatttgtattaataggttcataggaaaatgaataatgacggaacaattgttttcctaaatactttattcaaatcaatatatcaaattaacaaaatctctttgacctaaaatgccttctgtcagttcttataagttcatggcattatttcagtaaaaggtaaaaggc

SEQ ID NO: 375938 - DNA, 508 bp, Homo Sapiens
  misc_feature (57)..(57): n is a, c, g, or t
  misc_feature (88)..(250): n is a, c, g, or t
  misc_feature (269)..(297): n is a, c, g, or t
  misc_feature (441)..(458): n is a, c, g, or t
aaggccgagcacagtggctcatgccctgtaatccccagcattttgggagacccaagncggatggatccacgaggtcaggaaatcgagnnnnnnnnnnnnnnnnnnnnnnnnnnnnnnnnnnnnnnnnnnnnnnnnnnnnnnnnnnnnnnnnnnnnnnnnnnnnnnnnnnnnnnnnnnnnnnnnnnnnnnnnnnnnnnnnnnnnnnnnnnnnnnnnnnnnnnnnnnnnnnnnnnnnnnnnnnnnnnnnnnnagagtgaaattccatctcnnnnnnnnnnnnnnnnnnnnnnnnnnnnncatgccgtttgagtactgtgtttttggtgttgtccaaggaaaattaaaaacctgtagcatgaataatgtttgtttttcatttcgaatcttgtgaatgtattaaatatatcgctcttaagagacggtgaagttcctatttcaagnnnnnnnnnnnnnnnnnngtaaataaagctgttttttaatacattaaatggtgctgagtaaaggaaaa

SEQ ID NO: 375939 - DNA, 328 bp, Homo Sapiens
  misc_feature (69)..(69): n is a, c, g, or t
  misc_feature (130)..(146): n is a, c, g, or t
gctggtgcatgactgtggtcccaactactcaggaggctgagatgggaggattacttgagtttaggagtntaagggtacagtgagctatgactgtgccactgcactccagatagagcaagaccctgtctcnnnnnnnnnnnnnnnnncctaacaataacaaagcacgaggctacagagatctgttttgaagcattctggaaataacaaatttagatgtatttataaaatccaaggttagatgctgccttttaaaaatatctagataaaatacactcaatttaaaaaaaactaaatatgctttaaatgaattaggcaaatcactttgaac

SEQ ID NO: 375940 - DNA, 546 bp, Homo Sapiens
tggcacgagggacaggccttaccaagattagcggtgtcaattaaggccaaacgggtgccctctggtgcagtgcctggcccgcagtaagcgtgctctccaacaagctccctccagccctggtggtgagcatgacagcagcatgctctgaacctcatggagagtcccagcacgccttctccccatcccaaattatttctaacacaggtacgccagtgaggtgtgtgtttgctgcctgggtgacatgagctaccatcgtctacaagtctttgtttggtccttatgggaacaatgcattctgtggccatagtagggaatggaaagggcaaggtcattaaaggaaaatcagcatcccatgtgctagcccactctacaactcaaatgaattcagaacctcacagctggggccagaacaccccacgaccagtgctttcccattcagggtaggagcatgggagagaaggagagccccgaagccagcctggggcacatgatgccactattagaagggtgtccaacagcactgatatttcttatctctcgcccctt

SEQ ID NO: 375941 - DNA, 407 bp, Homo Sapiens
aaaccaaattaatcatttggacaaagagaaccaggagtttaatgttttgaaaatgtgggagccaaacatttcccagatggactcttcatgtgttggggtccagaaaggaaagaggaccagcctgggcattggaggatctgggtagccctgggctccgctactggccagctgaatggcctggggcaaaggaccactgcctctgtttcttcacctgcaataagaggagtgaggaacgccctctgaagtcccttccaccccagtgagccagcactcttggcctcagcgtcccttcccctcctgtaagctctgcctctggagcttacattgcctagtgtgcacttgggagagtgagcaaagtatctgggtatattttctcttttcatctattctgcagacaagccaaaaaa

SEQ ID NO: 375942 - DNA, 357 bp, Homo Sapiens
ggaaggcaactaagaagcatgagcagtgctgccctgagtgttctaccagaggctttgcatgtgttatcatgtaatcctacatcgacattttacagttgaagaaaatcagccttataatgtcaaggtagctgccttgagttggcacagccaagtgtgtagccagaactcaagtctaagcctgtctcactccacggtccaggttctttctgttattccacatgtatcaagtcctgtatcaattctttagattcaaagaatcagctgctcatagacaagataggcaggcttggttcagctgcattttctagagctccagcaactttgtaggctgagatcaggaaaatcgcttgaggccag

SEQ ID NO: 375943 - DNA, 268 bp, Homo Sapiens
  misc_feature (88)..(88): n is a, c, g, or t
  misc_feature (187)..(187): n is a, c, g, or t
  misc_feature (198)..(198): n is a, c, g, or t
  misc_feature (214)..(214): n is a, c, g, or t
aatttataaagaaaagaggtttaattaactcatagttctgtgggctatacaggcttctccttctggagaggcctcagaaaacttacantcatggcggaaggcgaaggggaaagcaggcacatcttcacatggccagcaggaaaaagagagcaaaggaggaggtgctacacactttcaaacgaccagntctcataaaanctcattattgagagancagcaagggggatgtctgcccccatgatccaatcacctcccaccaggcccctcc

SEQ ID NO: 375944 - DNA, 525 bp, Homo Sapiens
  misc_feature (15)..(15): n is a, c, g, or t
  misc_feature (30)..(30): n is a, c, g, or t
  misc_feature (52)..(52): n is a, c, g, or t
  misc_feature (62)..(62): n is a, c, g, or t
cccatgaaacaatgnaaaaaccccatcccnaaatggcccctgttttcctttnctaataaaancaagggaatgtgatatccccctggtgatggaaattcaccgtgaactaccgccccatgccctagagaccagcctcttccaaagacggacggcgtgggacatatgccccggttgcggggggagcttctctacagaatgtcacttgggagttgacacaaaacccagggggagaaaaaagacccagcaaatactacaaactgccctctccctcccgccacccacaggtgaccaacggctttggggaggatggcaatgcagtggaggaatagaaatggatacattgtgaacttgatatgaatcaaaagagcgtgttctttgaacctgattcaaattctatgcccagtatccttagtttacaaataaagaagtaccctgaagggctcagaggatttgcgtccatgtgtttgtccttggcatgtacttacaaaggtatttgtggcctgttagcccacatgttccctttca

SEQ ID NO: 375945 - DNA, 569 bp, Homo Sapiens
cctgggcccaagcctccaggtggtgagccctttggagctacacagtcctgttatttgtagccttcccatttcctggtagtgtgaccatgggtaagaaaagacaatgaagccttcagcccccattatttgcaaagggagtataacacactgcctacccttacaagtttcccttggagaagtactggttaattgccaggctttgtctgccctcataaccatccataatggcctaatcctttactgggaaaacttgcctgtaagtcagtcagtgtgcctaagtaccgtacacccattatgttacttaattctcataacagtctgaggaaacagattctatagtagtaaaaagctcagttggattcccttgagcaaatcaatttctctaacagtttcctcatagcttgagggtcctgtgcctattttgcggtgggggtgggggaaggttgagaattaagtcaggaggtaatgctcgggaagtgtcacaaatttaggtaagcggtggtggtagcaccattggaagttttaaaaatctgagatcaaatagtaaaaggttgcaaattcaaaaaaaa

SEQ ID NO: 375946 - DNA, 434 bp, Homo Sapiens
  misc_feature (18)..(18): n is a, c, g, or t
  misc_feature (33)..(33): n is a, c, g, or t
cctacccttaacaaattncccttggaaaaaatnactggttaaattgccaggcctttgtcctgccctccataacccatccataatggcctaatcctttacctgggaaaaacttgcctgtaagtcagtccagtgtgcctaagtaccgtacacccattatgttaccttaattcctcataacagtcctgaggaaacagattcctatagtagtaaaaagctcagttggattcccttgagcaaatcaatttctctaacagtttcctcatagcttgagggtcctgtgcctattttgcggtgggggtgggggaaggttgagaattaagtcaggaggtaatgctcgggaagtgtcacaaatttaggtaagcggtggtggtagcaccattggaagttttaaaaatctgaggtcaaatagtaaaaggttgcaaattcaaaaaaaa

SEQ ID NO: 375947 - DNA, 637 bp, Homo Sapiens
  misc_feature (46)..(46): n is a, c, g, or t
  misc_feature (56)..(56): n is a, c, g, or t
  misc_feature (106)..(106): n is a, c, g, or t
  misc_feature (146)..(146): n is a, c, g, or t
  misc_feature (161)..(161): n is a, c, g, or t
  misc_feature (343)..(343): n is a, c, g, or t
  misc_feature (504)..(504): n is a, c, g, or t
aacatataaaacagctaaattaaggcctgcaatgacccagaaatcnaaatgaatgnaaattgatggatgagtgtactgcttaaaaatatgcaaaagcatgaagacnatattagtcatggaacaacttttattcagctgtccaaccnaatttgtaattgcanttatggttgtcataatatataactttatagcagaaaataaaggtttatagcaaaactcatgcatataaatatattttgatggcaacagaaattaaataggatcctgcccaagagatgcccaagtttaaccgcgattaatacaataacaatgtaattgatgaaaacatatactcgacattagnccatgaaaatatatttaatagattttgaacataattttaaggtagtttgttgtatgctggaagcaattcaattgttttaatgtgcattgtttatatacacaaactaacaattttatattttgatacccccttcccaacactatcatgcatttaacatagtnctagcaaaaattgcaacaataacttttaaatatttaacaaacaacatgcattaaaacattgttaactagagtgcagcaagtttttttaccccacatatattttaaatacactttggtgttttactaaaatgtc

SEQ ID NO: 375948 - DNA, 559 bp, Homo Sapiens
  misc_feature (29)..(29): n is a, c, g, or t
  misc_feature (108)..(108): n is a, c, g, or t
  misc_feature (116)..(116): n is a, c, g, or t
gtaagacttaaggcaaaagaaccctaacngataaagtggttccacaagaagaggtaagttaaacaaccctaaaaaatacagtgaacctttgaaacaacatgggtttanaacaacanggaacccacttaatttgtaagaatttccttcctggcctctgcccaccccatgaagaagaagcaaggcccaactgctcttcctttctcctcctctgcaccctacccaatgtgaggatggtgaggatgaagacttttaggatgatccattttcacttaatgaatagtaaatatattttctttttcttataattttcttaataacattgacttttctctagcttactttattgtaaggacacagtatataatacatacagcatacaagatacgtgttaattgactgttatcagtcagattctgctcaacagtaggctccttgtagtttagtttttgaggaggcaaaagttctacatggatttttgcctgtgtggggcataggtgctcctaacccctgtgttgttctagggtcaactacatactaggattgaacaattaagtaaatc

SEQ ID NO: 375949 - DNA, 485 bp, Homo Sapiens
  misc_feature (112)..(112): n is a, c, g, or t
  misc_feature (119)..(119): n is a, c, g, or t
  misc_feature (461)..(461): n is a, c, g, or t
catggagccccgcagcatggagtacttctgcgcccaggtgcaacagaaggacgtcggcggccggctgcaggtcggcaaggagctcctgctctaccttggcgcccccggcatncttcggnacctggaggaggacctgggccgcctaggcaagacagtcgacgcgctcaccggctgggtgggttcgagcaactaccgggtatcattaatgggattggaaattttaagtgcctttgtggacagattatcaacacgctttaaatcctatgtagcaatggttattgtagctttaatagacagaatgggagatgccaaagacaaggttcgagatgaagctcagactctgatattgaagttaatggatcaagtagcaccacctatgggtaagcctacattttaaaatttcagatttttgctaatggtaatcacagggaattcattaaagccacagcaagcatgaacantgaattttttaaggcattgttttt

SEQ ID NO: 375950 - DNA, 459 bp, Homo Sapiens
  misc_feature (385)..(385): n is a, c, g, or t
  misc_feature (394)..(394): n is a, c, g, or t
  misc_feature (442)..(442): n is a, c, g, or t
aaaagaagggagagaggtttagacatatggcaggactgtgatccctggcccagcacagccaaagactgtcactgtttgcctttgcttgtcctgtctggatagaggcacctgccatgtgcagactagtggaggcttctagaggccataggtctcaatttgtgcctatttgggttctaacggttttcagggtatttgttttgcatagtcactttcctgatgttgacataggtggctgctgtgaaaatgctgtggatggtgtgacattcttgactgagctgggtggctgtggagagaccacttaaatcttctggttcagatttcacttacagacttagtaagatgtccacttcagagcccgccctcttgtggctacttactctggggntaatcacanttctttaggggtgagaacctgccttcctaggagtgactgtttgggtgnttgtccagtgggccata

SEQ ID NO: 375951 - DNA, 491 bp, Homo Sapiens
ttctctgttcagttggcttggcaaagtaccctctgttctcatgtcactaattcctgctctaggtcatctttcctttgtgcagcccacattcccaccatcctgtgaactttgttgtacttggtgttgggcaactggtgagtgttgtgacaggctcagacctgatccttcctcaggagcaattggagaccacaaatttaaagcagaaatacctgttaaaagcttggctttccttatatgagtgaggctcccagcttgggtgtggcctcctgggctcacggatcagcttgctgggccagagggggtcttagtaatgtgcttagagagacacatgctcccttctcatcgtagagagcctgcatgctgagaggctccctttagacacctgcctctcgctggcttttcctttagacctagccaccagtgttttgaatcatggttttgttttgtttttgcatgcaaaaaccagaacatgacttagaaattaaaaaaaa

SEQ ID NO: 375952 - DNA, 340 bp, Homo Sapiens
accctttcccactatagttgtgcccgaatagagaagactgttcactctggggcagtattggcattgtctaccctggaaggccctcagggaaacgccttgctctgttcctatggcacggataacatcatacacttgacagaggccgtgcttcaggtgaacaaggtagtccttcagcctgtcagcaaaatcctctgtggctgccccctaaaacgtgtgatactcttgccaggttctgtgggtgccatcactgaaagctactgctggtgtctctggcactatgaaggctttctgacatcttcagaatcaaaacagagctttgtgtggagagagacaaaatgcc

SEQ ID NO: 375953 - DNA, 456 bp, Homo Sapiens
  misc_feature (379)..(379): n is a, c, g, or t
  misc_feature (403)..(403): n is a, c, g, or t
  misc_feature (410)..(410): n is a, c, g, or t
  misc_feature (428)..(428): n is a, c, g, or t
ggagatgctcactaggcagacagaatcagccaccacagcccactccctcagccagtattactttgactaagttagtgaggaaccaggccccagattaagaagcagaactcacactgtcatctgctgtgtgcctggctggctcatgcataccttgtctatctaatgtggaccaaagccctgtggcacaccctgctggttacccccagtggttaccctggcacagaggaggaaagggagtcgtgggagggagaaggacttccctgggaggtctctgggctggcaagttgggtgacacaggtccggttggctgcaacttggggctcttgctgttgtaatcataaatgtgtgtgtgtgtacagttgtttacaatgtcagcatngggtgtcctttatttgttaagagntacatgncactgctccccattcatngaggaaaatccccaagcccttcccatga

SEQ ID NO: 375954 - DNA, 324 bp, Homo Sapiens
  misc_feature (282)..(282): n is a, c, g, or t
aaaatattgaggaatagtgaactctatattgtgccactattcaaatttataaaatcaaacatttcagttctgatacaagaacaggtaggttgaaccaaaaaagagctctactaaatcattattatatgatcaaaatggcagctcaaagtagtgcaacaaggatgaaagctcagtcaatgaagctgggacaatttgctagatccttacctgtgatcctgccagcacagccttcagtagtcatgtcctctgggggttctgtgcatatataagaataattactgnaacatccatcataacactgaaaatttcagaataactgatgtg

SEQ ID NO: 375955 - DNA, 299 bp, Homo Sapiens
  misc_feature (245)..(257): n is a, c, g, or t
gcgtgggatggggattggggtgagatggatgggagcccgctggagcttgtcttccctaacatagcctgggagaccaccccttgccacttgggccacttccgcctaccccacttttcattttgttccaaaatagttgcagatcctgacagaatcaaaactctctgcctcaaacacacatcctggcatcgcactgttagcatttaacttcttgttaggattcagggaaggaacagttggccaagaannnnnnnnnnnnnaaacaagccaaccacctagctggtaattaatgaggttcactt

SEQ ID NO: 375956 - DNA, 475 bp, Homo Sapiens
  misc_feature (374)..(374): n is a, c, g, or t
  misc_feature (383)..(383): n is a, c, g, or t
  misc_feature (413)..(413): n is a, c, g, or t
  misc_feature (446)..(446): n is a, c, g, or t
cggactcatccccagctgcactgaaggcaggtggtggtacagacttatgaggacggatcagtttgccaaggctgatggtattgggtcactgagcctggtatccatggccgctgaccaggaagcttatgcaaagtggaagcaaggaacaaggcagaataactcagtcactttcatgaagatttttctaaacaagaaggcttaccaccaaaaaagaggtaccctagtggttaccctttgcagatgtgaaagctggaaaacttgacttttctttttggtaatgacttgcatttatctggtgcctttcgttgggaggaatcccaacgtgctttagagactatctttttaacatctcttgttacatacatatatacttnttataaaantattatcttggcccaactgggaccttttantcacttctggggcatgaggatgtcccattgccnttgagtttttccagtggtgggttccagat

SEQ ID NO: 375957 - DNA, 396 bp, Homo Sapiens
tacttatccttagcactcaaataattgaactaccctgctaattcttgccgcatttcaaagaaaataagttgttatgcactttgggatagtggtgatctgtacaggctgtgtgttagctacttgaaggcgtaactggtatttcttgtgtgttttaacagcatgacttcttacagagctgtaatttttaaaattgaggatgccatatttgagatgtcagttttaacactcattaacacactactgtgcaagcattgacacaggctgcactgaaccattatgtctgattgctgcactttcatctctgtgcctcgattcgggaatgggcagtaatactgacacactcgggactccagcatcaaaaagtgtgcagattaaatagacaaaaattaataaaaa

SEQ ID NO: 375958 - DNA, 445 bp, Homo Sapiens
  misc_feature (339)..(339): n is a, c, g, or t
  misc_feature (395)..(395): n is a, c, g, or t
cacatgtgaaggaaaaaggaaagaaaaagggagggaagaatagaaagactgtagtaagaaatccatgatcggtgcgaaacatggagttttcacaacgagctaaagaaacactataggctgtctcctagagacacacatttctgccatctaatctgcagatttgtttacattaaaaaacaagactaaatttaagcttcaaagtaaaagctcaacatttagggagacatacgggctgtttgctttgaatgaggggcaggagccagccttctccgagttggcccagagaaaattttttgaaacacagaaatgtaataatagctgggcacatggggatgtgtnggaattgaaattcagcacttttcaaaaaggaaaggattgaaggaggattattaatnattaggcccatgcctttcagttctttttgggttaatgttccaatttttac

SEQ ID NO: 375959 - DNA, 569 bp, Homo Sapiens
ccagctgctcgtcttcagaacatttacgattcatacagtagtttagcaggcagcatggtcccactgcttcacattaatgtcaaatgccaaacttggaacagagttttttggtattttccctcccctccccaccttataaacaaaacatggcattcagttttcagcttactcctgttctgtagcaatttgtaattagcttgtgactttacataggtgcaaacatttcccatacattgagcccaaagactgcagagtgcaaacaaaattttatctgacttacagtagcatctgacttaataagaaaacaaaaggatttgaacacattggattctaaataaccagaccagttcagatgctcctttttgttcatagtgttccatcattattttgtttctccagcaattttagtgacaggaagtagaatcacaatgataacgtgggaattattttaacatggctttgggacatggcatcggtagaaagctcatctgacagaattaaataaatatatttctgatatttgtggaaaaagactatcggaattacaacagtagaatttaccttttaaa

SEQ ID NO: 375960 - DNA, 193 bp, Homo Sapiens
  misc_feature (25)..(25): n is a, c, g, or t
agaccctgtctcaaaaaacaaaagntttttttaaaacttagcattttataagagtggaacaattttaatagtcaaatgcattatagtatgggaatggtgaaattaatgataatctatatggtggatacaacttctaaaaatcattttaaaaatgtactgacataagtataatataatattaagagaaaaaaaa

SEQ ID NO: 375961 - DNA, 329 bp, Homo Sapiens
aactggatcccaaatctgctcatcgaaaactgaaggtgtcccatgataacttgacagtagaacgtgatgagtcatcatccaagaagagtcacacacctgaacgcttcaccagccaggggagctatggagtagctggaaatgtgtttattgatagtggccggcattattgggaagtggtcataagtggaagcacatggtatgccattggtcttgcttacaaatcagccccgaagcatgaatggattgggaagaactctgcttcctgggcgctctgccgctgcaacaataactgggtggtgagacacaatggcaaggaaatccccattgag

SEQ ID NO: 375962 - DNA, 420 bp, Homo Sapiens
ggtaaattaataactgggtagaacaatagctttggtggtcatcccatccataaatacacccaagtaatggcatccttcccttcccttcccttccctggaaggaattttcccagtatccttcctacaaatgttaggttagaaacattctttcttcactgtgaagaaccaaaagaaatttactgaacacaatatggaattctgtatctgcatggaaatattaagtattcacctgacagctcatgtttaggtcaattcatttaattacacaaagcagtctcttgagcctgcttgttaaccaaagcacaaagatgaaatgaaaaggtagctgtattactacagcatatctgtatgaaaatcaggcaaatttagcacaagtctctagctttaaagaaaatttgcctgtataatgcagaattctag

SEQ ID NO: 375963 - DNA, 386 bp, Homo Sapiens
  misc_feature (78)..(78): n is a, c, g, or t
  misc_feature (90)..(174): n is a, c, g, or t
aatctgactttcattccttcagtattcttgctataaatttcttttggagataatgatgaagatttatttgaaaatgtntaaaatgtatgnnnnnnnnnnnnnnnnnnnnnnnnnnnnnnnnnnnnnnnnnnnnnnnnnnnnnnnnnnnnnnnnnnnnnnnnnnnnnnnnnnnnnaaccataggtgcattttactgttttgtattttcatttttggaggtagtatacacagcagataatgatgagtatgatgagtgttgtgctgtttgcttttgcagtataatatatagttctaagtgtttaaattactgtatatacaatattcattataggctagcatgcttgttttaaagactgtcattctagtgtattaaaatctgaatgtaag

SEQ ID NO: 375964 - DNA, 362 bp, Homo Sapiens
ggaaagggggcaaagctgattgattacaagtaaaatgaaaaaatactgtttctgctaagacagaaagggacctttaatacgcgcccttttaatctgattgtcagaagtaggacagtgcacagtttctcaaagatggccagaggatctgataaaatacaaaagaattgtggaggcgatagtaaacattcttcttcctgtgctgctgatccacaggcttctctttgagaatgactggcctgcaagctgtacaagggtgtttacccgctgactctggtgggagtccatttggttcaccagaagggcttgaggggcagacaaaagaccttgagctctctgcgtgtgccagtcatcctgtgtttcct

SEQ ID NO: 375965 - DNA, 248 bp, Homo Sapiens
cagttgtgaaaaccaaaaatgtgtattgagatcagccctggttgagaatcaccaagctagacctctttgggttttgttgggcaatttaacggaactctggctatgccttttttgaggcagttgtagctagcttggttcattgaagctaggtttgaaatcattcataactaagttatgatgttaggaattcgacagtccatgcattgtttcatctgaaaaacaactactctacctgcacgacaacccat

SEQ ID NO: 375966 - DNA, 513 bp, Homo Sapiens
  misc_feature (348)..(385): n is a, c, g, or t
gaaccagcagcagcatccattaatttgattagttgtttatgggctggaagagaagcctggcacctagccctaagcaaatcaattgtgtgaggtctaagcataagtatccatccaagccagccttgccagccaggattctacacagagtgacaacagtggagggagggcaaaacgttagacaagaagtgtcttacggcccctctttctgcctgcttggcattttaccatcagttacctcttatctaaaggcagtgagtgtaagctgtttttctactccaccctactccggccccataccctgttgtcctttctgaaggacagagtagagggatttctgtgggtggttgnnnnnnnnnnnnnnnnnnnnnnnnnnnnnnnnnnnnnnaaacctaaggacttaaatatgtatcatcatccaagcctggaaaacaaataaatctgggacattgaaggaaaacagggagccaagagcccggggccccaattccactgccaggttccctctgttttttg

SEQ ID NO: 375967 - DNA, 516 bp, Homo Sapiens
  misc_feature (22)..(22): n is a, c, g, or t
  misc_feature (33)..(33): n is a, c, g, or t
  misc_feature (40)..(40): n is a, c, g, or t
tgcccaaccccacccccacacnggaggagctgnccccganaaacgggccctaacgctgggggcgggccaacgggaacaccgctggattttggtaggagtcactcagtgattgaataaagcccgaatcccacagaccctaaggatgctcctgcacaaaaaacccaactgaaataatgcccaaagaataatgctttgcctaaggcagggaagattgcatttgtttttataacagtctaccttcaaaaaaaggtagtcctttctatagctataattaagtcattatttgtgtcattatgagttttaagtgtatctttccctctagttatttgtatggctcaatcctgtatatctagtgcctctctcaggatatatgataaatgtttgtgaggatggatatgttaattagcttgatttaattattccacatttgtattacaaaatcatagcatcattttgtactctataaatacatacaactataacttgtctatttacaataaactttttataacaagg

SEQ ID NO: 375968 - DNA, 448 bp, Homo Sapiens
  misc_feature (372)..(372): n is a, c, g, or t
catggattgaaagactcaatgttgttaatatgtaattctccctaaattgatctacagattcaatataatcccaattgaaatccaagcaagctttttttaaaaatagaaattaacaatctgattgtaaaatgtatgtgaaaacacaaaagacctatgaacaaagttggataacttacactgtgcaatttcaatacttaactaaaaagctacaataatcaagacatggaatcggccaacatacaatcatatagtccagtgggagagcatatggaaagtctacatatagacacatatggtcaattgattgttggcacaagtgccaaggataattctatgggaaaggacaatcttttcaactaatcatactggggnctattgggtatccctataggaaggaaaaggaacctcaaacctttattttcacctattacacaaggtttgaattccc

SEQ ID NO: 375969 - DNA, 500 bp, Homo Sapiens
  misc_feature (35)..(35): n is a, c, g, or t
  misc_feature (47)..(47): n is a, c, g, or t
  misc_feature (65)..(65): n is a, c, g, or t
  misc_feature (70)..(70): n is a, c, g, or t
  misc_feature (83)..(83): n is a, c, g, or t
  misc_feature (97)..(97): n is a, c, g, or t
atggggccccccccaaaaaggccatcccatagccngcccttatgccntagccagcccccaaaaanggaanccagccccccagngtcccaaccaaccnggttaccctgaccaaaccaaattggtgggtcccccttatttaccataatagacccccccgccttgggtataaaataaccccctggataccatgcaaaatgtagataaatcctcaaatacattattctgagtgaaagacgtcagaccccaaaattacaaatggtatgattcaacatatatgaaattctaaaaacacaaaactgtagttacagaaagcaaaacaatggtggcttggggtatcagatgaggaggatggacttgaaaagagcacaggatggacttttggagtgataaaaatctgtatcatggttatagtgatgattagatgagtgaatgaatttgtcaaaattcatttgtctgtacactttaaaatgggtatggttgtatacaggttaaacatcaat

SEQ ID NO: 375970 - DNA, 456 bp, Homo Sapiens
aagccaggggttaaggttctttcctttttttgaaagccaaagacccagtttgcattgtgctgctgcattccatggttagaagctttccatgcctaggttctagggaatttatttttctatgtgtatatattttcaaactttgtttcctgggtactgggcatgtgcctgtctgagccccaggtctgtctacaccccaccattcattctgtctgtctgttccctggacactgcctaaaagggtctcaagacagtgccctgtgggttcctaggactagggcccatcactgttctcttctgctgggaaatgcagctttaaaatggctaaccacagcagagggcagatgcttgatagattatcttttccttgctttcttgtttctgttttgaaagtgaaatggggttttaaattgttatttaaactctttttccaaataaaggtttaccttttttcccccc

SEQ ID NO: 375971 - DNA, 725 bp, Homo Sapiens
  misc_feature (41)..(41): n is a, c, g, or t
ttcacaggggtcgtatgagtaaggggatttggaaactgtcnacttacaaaggcactataacaattacagaatcatgattgccatgggccactttatttacatgaagacaactggagaacgactaagaccaaattatggaaaataagaaaaagctgttgctggcaagaccatcaagactgttctgacaccctgtccccatcatccctgactgagtactctgacatcacggaaagtgttgaacctgggaccctgaggaattcaccaggagtaaatggctttcatgtatttgtgttgtttgcttttttcttacgtgattttatgttcatagagctagaaagtagcatctcatgatggcccaaccaatctctgttgcccagttaaaggttcccttggaagatgaggcctgaaataattatgaacctcaccttctctgattgtgggagtggcaagaactggggagacgtcctccataagtggagcacagggtatggggttaaagcatgacagggagagtcttctgtgcctggtttcttctcctctatctcataatgcattatgggcccgaggaataggggagggttaataagactccaaccctaatggcccaacagggaaattctcattttggtcgatgatattctgatggactggtttggtcttaataccagtcaaccgttgtccttctggaaatatacatatatgaaataaataaaggtaacacttgc

SEQ ID NO: 375972 - DNA, 445 bp, Homo Sapiens
  misc_feature (361)..(361): n is a, c, g, or t
  misc_feature (398)..(398): n is a, c, g, or t
  misc_feature (406)..(406): n is a, c, g, or t
aggagcttgtcacaaacattaaccggctcagggctgggtaactgcattgacaaatttggaagcagcagggccagagagccaaggcccccgggtatccccattggccactggtggaggtgcactggaaggtcagggccttgacaccacagagccaagcaacacacacctccttgggcccaggccccagcacggtggccctccagtgctggcaggtggcctcacccacagcaggggaggcgtgggtcctccaatgaccttcctgcccctgccagatgattttcacaactacctaactttggtgtttacttctaggtcctttggccaaatgcgttttcttctaaggagttgttgggcaaaatantgtttacaagcttttttatggggatttttgttcttantgtgggcngggtttaaagggttttgttcctcctgttttaattccatt

SEQ ID NO: 375973 - DNA, 425 bp, Homo Sapiens
  misc_feature (19)..(19): n is a, c, g, or t
taggaaaacaaaacaggantggaaggaaagtgggcccaggtggggccctggtaaactgtggggtacccagggagcccactgttaccccagtcaggcagactgtttcccacaggggaagcagggaagacacagtgttgtcagatttggcagttaaaaaaaagaaattgaaaatgcagatttttatgtgaaaccccccagtttttgtatgttgcaacaaactgacatatgcgtatacaactatgtgggtcaagccgaacacatctgtgggtgagatccagctcacagtgctggtgtctgtcctctgagaccacagtaatcgtttttaactcttaagcaattgaaaagaagcaagagctgacacatcctccagggagcaaacgacacttgcttagtcaaaacccctttatacctctactttgtggggt

SEQ ID NO: 375974 - DNA, 389 bp, Homo Sapiens
  misc_feature (31)..(31): n is a, c, g, or t
  misc_feature (40)..(40): n is a, c, g, or t
  misc_feature (70)..(70): n is a, c, g, or t
  misc_feature (90)..(90): n is a, c, g, or t
  misc_feature (128)..(128): n is a, c, g, or t
  misc_feature (140)..(140): n is a, c, g, or t
atgtgtgaaaggaatggccgggatggataantgttagtancccttttagttcccaagtccatatggcccnattatataaatatttagccntaatattgggaaactagttttataaaactattatatcntttggaatatantctgtttattttgggagatatatatatatactgtatctgtggctttacaaagaatataacactatcagtattattttcaacttgttgaattatgtgaaatttatcctttaaatggaactgtgctttagttttacaggataaattttagtattttaatatcagaaggaagctatacttagtaacgtatttgctactttatagtgaatagtaaaagacattaataaaatttctttttccatgatgtctctt

SEQ ID NO: 375975 - DNA, 422 bp, Homo Sapiens
  misc_feature (260)..(286): n is a, c, g, or t
  misc_feature (366)..(366): n is a, c, g, or t
  misc_feature (380)..(380): n is a, c, g, or t
  misc_feature (392)..(392): n is a, c, g, or t
  misc_feature (398)..(398): n is a, c, g, or t
cagcacccctgcctcattaaccagatggctgggataagactcttgattttgaaaattcaacaaccagagttcagctatttgcagtgatatgcagtcatttgtcactatcaaaaaggaaaataactaaaatgtggtgtgttggcattagttacttactaatgagcaagatcagcacctgcatttcagcttggctctgtcattttctatttattggaagaatggtgttgtggttaagtgtgtggtgtgtagaggaagactannnnnnnnnnnnnnnnnnnnnnnnnnnattgaaatataggcatgcatactggaaaaatgcacaaatcatatgtgcagggcttcactggaattttcacaggaatggantacacccctggcantggcactcaggnccaggngacaggacattggcaggcaccccc

SEQ ID NO: 375976 - DNA, 494 bp, Homo Sapiens
  misc_feature (465)..(465): n is a, c, g, or t
  misc_feature (479)..(479): n is a, c, g, or t
gggttattggtacaaacccagaaagccatttctcacaaataattgacgtactagtctttacgccacctaatgctagattaagaattgttgcacattttggtgtttctaaaagtcactgaggagctaatacgcaatgtctcttttcttcagtgaaacttaattcacaaaagaatttgacagtgaactcatgatacctatattcaagcataatgaattgaaatttcattttagaatctggattctttcacagttaaatattctaaaaatggttcccacacacagattccaattgaatgctccagcattctcccttggggttttgggggggcacctgctgctcattcagcacctagtctgaaaatagtaactaattgccagggcttgggttaaggcttggaaagtgcaggggggagggatataaggccaaataaccaaaagtctttgagggtggactttaatgttggntgccctccctaaanggggcccccggagtt

SEQ ID NO: 375977 - DNA, 451 bp, Homo Sapiens
ccgaagcgggggatgagcggacggcgtgggcggggcgtccgaggagagccaggccatgcaggccacgtgtctattatcctcccagtccacaacgctgaaccatggctggacgaatgtttgaggtctgttttgcaacaggactttgaaggacaagtctggggctatcattgaaaaatggagagtgaagctggaagattctggtgtccacgtgatcattggggggcacgattctccctctcctagaggcgtcggatacgctaaaaatcaagcagttgcccagagctcagggtcgtacctttgctttttggattcgggttcccagggtgggagagcctctgccaccctcctgtcccccgactcccgtctttcactgggggaaccggccgcattggttgttccacgtgcacaggaagccacatgggctttcccgggaaccgccccgaaggccttt

SEQ ID NO: 375978 - DNA, 490 bp, Homo Sapiens
  misc_feature (467)..(467): n is a, c, g, or t
  misc_feature (475)..(475): n is a, c, g, or t
gcggggcgtccgaggagagccaggccatgcaggccacgtgtctattatcctcccagtccacaacgctgaaccatggctggacgaatgtttgaggtctgttttgcaacaggactttgaaggtaccatggagctgtctgttttcaatgatgccagtaaggacaagtctggggctatcattgaaaaatggagagtgaagctggaagattctggtgtccacgtgatcattggggggcacgattctccctctcctagaggcgtcggatacgctaaaaatcaagcagttgcccagagctcagggtcgtacctttgctttttggattcggatgacgtcatgatgccccagcgggtggaggctgcaacacggaggctgccgtttcagcacccgttcgaggcatcattggtttgcagagttgagggagagatcccccttaactttcacccgaacgattacacacgtttgggttcanccaggttngacggccggagcagg

SEQ ID NO: 375979 - DNA, 485 bp, Homo Sapiens
  misc_feature (39)..(39): n is a, c, g, or t
  misc_feature (46)..(46): n is a, c, g, or t
  misc_feature (298)..(298): n is a, c, g, or t
gcccaaccgcgttgttgcaactcaataaaatttaatcangtttggnaaaaatgaggtaaaaattacaagcaatgaaatgccaggatttccgtgtgaaaattgtgtacaacatggaataatgtgtgttttgaacagctcacacgcctgtgtaactcacaccccagtcaaggtgcagagacttctgtccctcggaacggcctgcatgctcccggctccggtccccacggcagccactgccctgacttggaagccccagggcttctgttgccagctcttgaatttcatgcgtacgtgaaanccgacgctgtgccctcgtgtttctctttccactcagccggatggtcatgcgttacagcttgtgtattggtggctgtgtattggtggctccttactgtttgctcatccttctgtgactgcaccgagattgtttcgatgctgtagtttccagttcgggttactagaataaagacgtccattaacattct

SEQ ID NO: 375980 - DNA, 578 bp, Homo Sapiens
  misc_feature (552)..(552): n is a, c, g, or t
agtctctaaaaatcttgccataggatttggtctatacttttaaaaaccactcttttttcatgataaagcccttcaacttgctctaaaaggcaacataggaagagagagacgatgcaggccagtcctctccaaataaggcaaaacccagctttatttttagtaatgactttcccaactgcaagagggcacaagtccatgatccagcattacagaaacccaccaacttccagaaaagtttcaacaactcataaagactcacatgtgcatgcagacacaaagacccattttagggaagaggccccaagacatagtctgaagccccagctgggcccctttctccatgacaactcttcagccagcctgggacagtgcaacccttggagtaaccccagctttgctttaactggggacaacccacctcttcctcattcctcctggggaggaaatggcagtttttgttatttttcctgatgttttgatgggggcccgacatcagagggttcctcggaaagttcatatttcctggggaaattttgaccaaaccgttaaggnacggaaaaggctttttgggttaactt

SEQ ID NO: 375981 - DNA, 124 bp, Homo Sapiens
  misc_feature (42)..(42): n is a, c, g, or t
caatatcagtgcccacaccttactgagtattgagttttagantttcgcttgatgtgcttgaccaagagacttcttttgtatccttttcttgtcctatgatgtaaataaaagcctcgatttatgt

SEQ ID NO: 375982 - DNA, 450 bp, Homo Sapiens
  misc_feature (400)..(400): n is a, c, g, or t
  misc_feature (416)..(416): n is a, c, g, or t
cacttggaagcagaaaggcaggttctgagcagccccacaccagcaggtactacctgccataaggtttgtgttgcagccactgcagtcactgctgctgccaccacaactacagttcatagccagtaacagccttcacatgaatgatgtgtagacaccacttttgtctctgaacgcttgacaacaattaggacctgactccaggagcaggacgtcacaggaacaccggaatactggagaaatgaggttagagcaaagaaattagccatctgcctggtgaagactgtgtcctcgaggtagcatttacataggaacaacaggcaacacgtatccattttcattatcctgtgctacagatagacagaggacaaagggctttaagaaccgtgttttcttttaaggnccctgtacttaggcgnggctgttttgttccttttttccccttcctttcaa

SEQ ID NO: 375983 - DNA, 401 bp, Homo Sapiens
ctggtttgcttactctacagttattcaaatgagagtcacgcttttaaatttacagctcatcacagaaatcatcagctatacattagtaaaaataaggacatgaggttttctttcttggtttttgtcccaagatctttgcaccttaatattaatggactgtttcaggtaaaagagaatgaatgtatgattgtgaactgtgaagagaatgatgcaggatcctatttagttactgaataatacagagtattcaatgcatgttgtatgtgccaccaagttactattaactgtttttggaattgaagactctgtatagtcaatagttgtgaaattcttctcaggctccttaaaccctcgctttgttgtaaaagctaaaataaacagcatgctatattgtaattgtg

SEQ ID NO: 375984 - DNA, 458 bp, Homo Sapiens
  misc_feature (369)..(369): n is a, c, g, or t
  misc_feature (425)..(425): n is a, c, g, or t
  misc_feature (430)..(430): n is a, c, g, or t
  misc_feature (440)..(440): n is a, c, g, or t
ggctaccaaagcattcactgacttctcaaagccatttctactcagaaaagttaaggccactgacatattgaaatcctttgttttatagatgagaaaacttgctcccatggaaagcgggagacctctccagagcgatcaagccagtcagggacccatgcatgggccaggccactgtcccaaagactttgtgcacagcccctcagtgctctctcaagacaaccctactgagggcagccacagtcatcacctctcttgtacagaagagcatgctgacgcccagaggtttcagttacttcaggaatcatgttgcctcatctccagggctattttgcacttacactgtgttgtccctacacaaaaataaaaccnggggctgtgctgtggtggtgaagaccatgggcttgccacagccccacacacattcntttcntaatggttcntctcttctttcagggccc

SEQ ID NO: 375985 - DNA, 445 bp, Homo Sapiens
  misc_feature (17)..(17): n is a, c, g, or t
  misc_feature (43)..(43): n is a, c, g, or t
  misc_feature (48)..(48): n is a, c, g, or t
  misc_feature (57)..(57): n is a, c, g, or t
  misc_feature (199)..(199): n is a, c, g, or t
aattaaaacaaaacccncctagggaagaaattttagaattaantccancctgggccnatataaaacaaggcctccagtgaaatagccctgaaatttatttatttgtaatatgtgtggggtatcctatagaataaattttccaaaaaatattttgcctgaactgaaatttgaaatttgaacagctactgcccaaattgtncccctaaaagtgcatgcacccaattgatcccttcccacaaaaggcataagagaatgccctgttttcctgcatccttcccaaccctgcaatattataggattgtaggccctctgtgtccaatcatttgtcctgtgcacagagcaaataggaataatgactggtaaaaaacccttaacctcacaaagcataagggacacagacataaaaacagaaattatagtgcaatgtgggaagtgttctgctagg

SEQ ID NO: 375986 - DNA, 510 bp, Homo Sapiens
  misc_feature (43)..(43): n is a, c, g, or t
  misc_feature (58)..(58): n is a, c, g, or t
  misc_feature (71)..(71): n is a, c, g, or t
  misc_feature (87)..(87): n is a, c, g, or t
  misc_feature (95)..(95): n is a, c, g, or t
  misc_feature (145)..(145): n is a, c, g, or t
  misc_feature (189)..(189): n is a, c, g, or t
aaaaaggtgccccatgaagccggaaaatggggattaaaagggncctaccctccaatgncctttaaaagccnttccttataaggaaantaatgccnttttgccacaaacagtgaaaagccttatggttcccaccaagcaattcagnccccaggtgggagacaacacagcatttagccctaatacatgacnataatcacagaagagcaagtgttcttttctgtaatgaaaaagctgtgaaaacatagaagactctgccacatgaagagtttagaaggaaaaaatacaaacccaaacttagatgaaaagccaaaaaatttaaatatcgaaaaactcgaaactgtggcacatcaaaaaatgttgagtaactgtcttctgtgagagctgaaagtttttgttgacacaaaagtatttatgtacaactaaggcttactggttaaatatctgaggcatatctggccttgaacactttccttatatgctggagctgtaaacaagttttctcagtcatta

SEQ ID NO: 375987 - DNA, 574 bp, Homo Sapiens
  misc_feature (23)..(23): n is a, c, g, or t
  misc_feature (38)..(38): n is a, c, g, or t
  misc_feature (394)..(394): n is a, c, g, or t
gatccagagaacctggaccatgnggaattcccagaccnggtagccaaaaccaagtccagaagtcctccctccagccccggttatgaaaaacattaggtcccttccaaaaagattttagtagagagggaagttggaaaagatccaggatttcctggggacttccccctttcccaaatactattttaaaaatttaatagccttcataatgttttatgattcatgaaaccttttaagcaggtttcctataacacaactgataatgcaccattaagggatttttacaagagggcatggagagggctgccatgcagctacatacccagatgcttcctgaatgggatggatatatgttacacgaactgggatagtttccaaaacaatgacctagaacttntgtcgcaaatgtcacctatacactgacatgaatatacataaaaatttatgtaattagctactccagatctcttagctaattcacaagcatagatctcctacaagagagtaaaatagttaaggaataataaaattcagtgaagctaacaataatgaaacattctattggctttaaaaacac

SEQ ID NO: 375988 - DNA, 452 bp, Homo Sapiens
gagaagtccgttacaaaagaatatggtaggtgatgcagagactcacaagagcacaaaagcagcagcagatgagtatctgagccactcagttaaggtgatttttaagctatttatcaggaagccaaagatgaaaggggcaatccaaatgaaagaaagaacatgaacaaagacatgcagtcctgaaggaacaggaagtattagagaacaactatgactagagcctagagttcatgtgggggatggtgagaactgagaatggaaaagtagagaaggtaaaaagttgaagaaaaggaaatgaaagatcactcaagttaggcatgcagactgggaatagaagtcagaaaaagaagccctgaagaatccaactagatatgaaaagaatactgagattaaaattagagaagagggacaagcaagataaaattataacacaaaaacaagaagaaaaaaaa

SEQ ID NO: 375989 - DNA, 463 bp, Homo Sapiens
  misc_feature (419)..(419): n is a, c, g, or t
cccagaagtatggctggtgtctacacacactgaaggggcatctgcctgtgaagtagctggtggttctgaggcctgtctgcatcctctcctctagtttaatccaattgtcagtataccagtgaccaggagctgcaagtcctcctcttgtgaaccattctttcactactctgggatggctttgaggttgagaaagcacagactgatggttctctctattctgatagataatttcctgaaggtcaatgccatcttcttaagtattgcctctagctaaaagtaccatttggcttttgtttgttggcttaattgaatgttctttggagatgtgtgtatttgtacactgaaagtaatgggaattaaccctacactttgaagatgatctttcaagtttaaaatatctcggcagcctgagggaaagnggggaaaggggacaggaggagccaaggggtgaggaattgaggag

SEQ ID NO: 375990 - DNA, 431 bp, Homo Sapiens
gtgtcctcggctctgaaggcgctctctgcacttagatgctgtcagccctcaacgtaggaggggccgtggggtccctaagtgattcttctccctggcaaggctcttccttttcagggatatctctgccaacccctcccctgtcctcgggttgggcttggcctctctgcctgagagagctcagcacacacacagctcagacccacggacaggaccccgggacagaaccccgggagcactgccctaggagcctgggaccccacgagctcagtcccagctctgcctctgactcgctgtgtaccctcttgccaagtcatgcccattctctagttcttgcaaaactgcagtgttttggattagaaaacgtatttggcccctgcttaggccctgttgtttccagttttccagttgggggaatggggcagcctttattt

SEQ ID NO: 375991 - DNA, 548 bp, Homo Sapiens
ctttatgaccgttctaaggattgaacagattcctgcacagggtgccaggtttcaagttaggtcctcttagtataagctctctttttttctgaatgtaaacctatttgcattgtcatttctaataatccagtaggtttctggatattgtaaagatactgagtacagatataactgtgtaaatttcatagtgttttattttgaggtgagagttttgttatagtttataaaagatattttcctattcagacctcagggctattttgggacctacaaataaatgtgattcccagcagcttcaatttttgatattcaaaaagttaataatctttaagctaaatataatgtgatatgattcagaaaaaaatgtttttcccttttaacttctaacaaattatgtatctaatgtttaaaaaatatggaaaaaagggataatgtaaaaatgtgggagaattgtggctaaagaataaaaaatcacttgttaaaacgcattcttatggtacaaatgtgtgatatttaaataaacttaagtgtgtataaattagagaatg

SEQ ID NO: 375992 - DNA, 280 bp, Homo Sapiens
gaaaggctggaaagggaactagtttctgggatttgcctggaacttcccttggacattactagcacattctggaaaaaaagcaagttgaacatatctaccatcagtcctctcctacttccttcccaccccaccctatccactacccccactgatgctatgtttgcatcatcaaagtcaggggaattgagaaaagagattatcaaaataaattattaaaatccagaaaacagttttatgtgaagtaattcaggaagatctagtgttcattttgcatggattg

SEQ ID NO: 375993 - DNA, 400 bp, Homo Sapiens
  misc_feature (83)..(97): n is a, c, g, or t
acagatgtcagaaactgctggaaactatgaaatggggtataataacccacgactctggtgggggaaaaccgttttttaaaggnnnnnnnnnnnnnnngcgatgcatctctctcctaaagctcagccacggctgcggcaaggttccagcggtcgctgggagacagaaggttttgtgccctgctgtatcataaagcacacacttagcgctctggagccggacggtggctccaccacttccgcaggcctggaaacttccttctccggaggaccttttactaaaaggtagaagacttcatggcttacttgttccataactccaagtgagtctgtaatgtttgtgaagcttgactgtaaccatgttttttctgtttaattatgtaaaaaacaaaactacaacaac

SEQ ID NO: 375994 - DNA, 405 bp, Homo Sapiens
  misc_feature (35)..(36): n is a, c, g, or t
cagagtcctggccctgagcgggactcgcagtggcnnaggctgagcggcaggtagaaggggcgtctccggggcttcacagggaacacaggggcttcggccaaccacaagtacgcagttgcacatgccctacttttgcccattctttgcaaatcccctaaggaacgaacgcgcctcggtgcgggcctttctaatcttcgcttgtcccttcacttccacagctggaggtcgaattcaccacgtcacgtagagaaaaggggcggtgtctcgggtctccccgtgtgggcatcaaggcgggctccctataggagctggtgtggacgtccgggcgtggggttagggcggatgcgggggatcgcgggggcggtgtttgacattgttgctctcaccaggcggatcgccccgacc

SEQ ID NO: 375995 - DNA, 410 bp, Homo Sapiens
caaatgcctgactaaatcttaagaacctgaattaacatagtagtttacgaaggactaaggacctatgttggtagatggtatactctttgtttgattggaagatctatggtgacaagggaaggatttaacatagaaatggcattatttattcgatgcaaagctgagtgcaaacatcattatatctctgaatcttttgcagatgttcatgttatttagtagcggtattaacctcattggtagctgaactctagggaggtttattggtgaaacctcacagtcctctgtggtctgcacctgcctagagactcaacattatggcatggaaatgcattgacacatcccatgccatgactttaatttcctgatttgtaatctcttattttatcattaataaaatgcatttttgaact

SEQ ID NO: 375996 - DNA, 502 bp, Homo Sapiens
  misc_feature (436)..(436): n is a, c, g, or t
gctctccaagatattcccactttgtgaatgaggaacctggggctctgaggaattaaggaacttgccaaagaccataaaactcctaagtgacagagccaggattctgccagctgtctggttgcccagtggagtctctgtccatcttgtcaccagcccccgcactgtgtacaggaatggaatcagcattcattgctataaactgcagtaaggtcaaggaggcagaatttgctgcaaggaagtaaagagtcccttctacctttgccagtgctacttaccagttaaaaaaagacatcgttttttgtgatccatactcctgaaggccaaaagcacccagtggacagacgatggctcttacgcctccaatgccaaggcaaatggtcagcagtgctacataaaaacagcctgtggctgctcttgtttttgctggatgggagcntctttggccacaaacagagtttgagaaagctggggacagaggagtgtgagtgggaagggagagggg

SEQ ID NO: 375997 - DNA, 415 bp, Homo Sapiens
  misc_feature (50)..(50): n is a, c, g, or t
  misc_feature (77)..(77): n is a, c, g, or t
  misc_feature (101)..(101): n is a, c, g, or t
atgtgggaagcccccactggaaaatggggaaaacattgcctgggtaggancctgtaaaaaatggccaaaagcctacnttgaaaaatccagtttgggaattncccttagaacgttaaaacatatgattgccccatatgaccccagcaattcccacttcctaggtagaataggcaaaactagtcccgaggacgaaaaaaaattgaactgatggttgccccaacgtgaagaggaggaacggaggcgaagagacagcaaggggcctcaaggggccaatggcagtgttctatagcttgattgccatggcttgattgtcgtggtggttatctgggtgtatacactttttaaaacttcatcaaactatgtatgtaaattataccttaatgaagctgctctttaaagtaaaaaatcatcagat

SEQ ID NO: 375998 - DNA, 542 bp, Homo Sapiens
ggcacattcttgtcaaccaatcaatacataatcatgttttatgtgtgtttatgtttaaaggcacttactgaatatacattagtaattccattaaatactggaactcatgccctaaacaaagcttaacctaacacacatattttctcccataagacaaatcacaatcttcttgcatttagaagcacctcagcactatgcttgggggctatctcaaacagtggaatcaccgacaaaaagcacaaagatgagaaaaatgtagcaccaaagactgcaaaaatgacatttgcttacaatatgagagttgacaagaaggcagtgtcaccttgtttgacttcagttgagaacatgtgcatcaggcaactaaaatttttcacgtgaaaaaatgtcatgtcttccaaagaccacaaaagcattgtaagtattaatttgagggctacagacaaattttagtaagtaggtgaattcataaatacagaatccacaaataatgaggatagactgtatgctaaaattttatcaaaatacaaaaacatggcacgagg

SEQ ID NO: 375999 - DNA, 595 bp, Homo Sapiens
  misc_feature (387)..(387): n is a, c, g, or t
  misc_feature (535)..(535): n is a, c, g, or t
tagctgcagcaggtccgtggctgggtcttagaatttgcatttctaacaaaggctcagttgctactgctgatgctggaccaaggactacactttgagaagtgtaagtctgctctgggcagtcttagaagccaccattgatttctatttgagtttacccaggtgtcattagtacacacagctcctaagacccctgtgatctctggaatatggaattttcagtccccactccccgacctcaccaacatccagagaggggagagaggcttgagacttggctaatcactaacggcggatgattcaatcaatcattctgatgtcattcaacctctttaatgacgggagttcaggagagattgggtagttggtaaacacatccacatggtgggnggtgcacatcccaactccaaggggtccaaacgctcctgtggctcgggacccttcgagatctcaagacctatgtaactctttgttcacttgttaaccttgtagtaaaccctgatcgtcaatcaagtgggcttttgagttttatgagccnttttagcaggtttggcaacctgaaaggaaagcctttgggaccctgactttttagggaagt

SEQ ID NO: 376000 - DNA, 450 bp, Homo Sapiens
  misc_feature (333)..(333): n is a, c, g, or t
  misc_feature (366)..(366): n is a, c, g, or t
  misc_feature (371)..(371): n is a, c, g, or t
  misc_feature (393)..(393): n is a, c, g, or t
ccttccttctgcctccagggcctgtctgcctccacatctctgaggacagggacaggcaacaaccttgaagggacagcaatggcaaagcacaaaggcttcactgtactcaggggagatggccctaccacagccacctggagagggttgggaagccttccgtctgcggtgggcaggcagcctcaccctgggcccacagaccggccttcctttggaggaaagtgtggcctgggactgagggaggaaatgagcgagttccctctgacaccagcagatccccaggggctgctggggcagttggcctggggaatgggggtggatttttgagaaagttgntcaccatctattacaccctgttattgttccagnttttnaaacacaaaggggaaccattgnttctctttagaggtttaaagcagggtcatttaacatccttccccccattccctaaac

SEQ ID NO: 376001 - DNA, 467 bp, Homo Sapiens
  misc_feature (45)..(45): n is a, c, g, or t
taaggggagtaactgagtaattatgccggatagagtggaaacacngttacatttttatagtcccctatattgcttctgccctataaatgtgactgatcacactgacccatgtacagtgaaaaaataacccccctcatttttctttccttcttgttcctacattacttataaaatacaaggcaaatactatcttccaaaaaatgttttattagtgtaaaattgaagagtatttaaaagtcgaagggaataaataatcaaggcagcttgttccctaaatattagtgtgactttggcctgtcagattatattgtaattctgtccataattttgagatatttttctttcttatatgcccttactaattttcaagatctctgcaaatatgaagctcaccaaacaggaaagaaactaatgaaggtcattccaagagtaagaggctttatatactttgtctaagagaaaatgct

SEQ ID NO: 376002 - DNA, 418 bp, Homo Sapiens
aaatgaagagagaaatttttggttaccccagttggaaaaagtagtagctttaataggaaggtatatgatgcggtgaaggaagggtagtacctacgataatgcagtatgccctgaattaccccacaagattttcccttatttatataaagtgaagattacttaactcagtttaggatactattaaatttgctttgaaatatttgcattaaaattttcaatagtttttcatgagcaggtcaataagatatttataaattatagtttgcagaatttaatttgtatgaatcaaatgcccagagcttaagattgattattccctcttcagtgttgcctagagcagtgggtaatagcattaacaataaaagcaaagaagtctgattagatacgatggtttttaaagaaatcaatttaaaaaaaa

SEQ ID NO: 376003 - DNA, 299 bp, Homo Sapiens
tttgggttaagcaaccatttataagcatcttcatgagcaaatgatcacctctgggtttttctgatatttgaaataaacaaggtaccaaactgtatttccctcaacacataactgtccaaattgcatgtacaagtggaggtttacgtaaaagccctgacagaactatattccacctttggaattaggtgcataaggctactgaccactctatatttttaccaagagcaagagcgggtcactctttctattccagtacaattatgggacaggaaatgatatgatgcaaaatagagggttct

SEQ ID NO: 376004 - DNA, 491 bp, Homo Sapiens
  misc_feature (447)..(447): n is a, c, g, or t
  misc_feature (461)..(461): n is a, c, g, or t
atattttcaaagctatttattgtttatgaaaaaatcgtttcctaactataaagaatttctccttcaatcttgtgaatatccaataaaaagctttattcaggctcataatgtatgctaaagtacttcattaatataaaatattataaatacgtagttaggagtttttacactaacataataaatggaaatatttgagtcattctgcacattatagtaactgtagttacttttaatttctaattttgtaaaagccaaaaacaaattcatatacagccagccctccatatctataggttccatatccacagattaagtcaatctcaggtagaaaatattcaataaataataaacaatttttaaaaacgcaaatttaaaaaactgccagccatagtggtgagtacctgtagtcccagctacttcgacgccgaggtgggaggattgtgtagncccaggagttcgangccagcctggtcaaagtgtcccattgtgag

SEQ ID NO: 376005 - DNA, 767 bp, Homo Sapiens
  misc_feature (176)..(176): n is a, c, g, or t
  misc_feature (649)..(649): n is a, c, g, or t
  misc_feature (680)..(680): n is a, c, g, or t
  misc_feature (743)..(743): n is a, c, g, or t
  misc_feature (749)..(749): n is a, c, g, or t
accatttctcacagaaacagcattcctaatggtagacaatttccaggccagcttacttcaccagcatgtaatagtctaatccaactcagaggacagaaacacagcttcatcccacataagcaggagggtggtggtcacagggatctcaaagtcacttgcctctaagtgacatttgntaacagacaaatgcctctacaagaggccccctaagattccaaggaaaggattcacaggaacgcattagtaaaatagcatcctagtgaagcaaatttgaaattatacacacacatcagacaaaaaggaaaatcgggttctacatcagcaatcttgtcttaactttcagcatcacacaactacctatgaagaagacagaacaagaattcagttcttctggtctgtacttctcagaaatgtataaacaatttttatcaacattaaaactgtcctagcaaaaccaaacaatcactatcttttcacacagctgacactttcccaccatttgccatctcatcgctgggaggggcacaggaaaaacggacacttcaaaatgcttgtgcttttgaggctctgctatatacacttaagtggaactactgggcttccagttggggaatgggaggggctgaggggacaccctaatttcagtggnttcccgcagctaaggcaacttctttcagccntttccctggcggttcccctttacctggaggctggggggggtggaggaggcaggggttgacatngggggngttaggtacaggtttcct

SEQ ID NO: 376006 - DNA, 480 bp, Homo Sapiens
ctttagatttctgagtcgatgctggaacaagttaaagttttcgggaactattgggataaaattattgtattttgcttgtgagaaggacaggatacttaggcgttccaggggtagaatgcctatagtttggatatttgacccttcccaaatcctcatgttgaaatgtgattccccagttttggaggtgaggccctagtgtgtcatggtggttgattccttatgaaatggcttggagccactctctcagtagtaagtgacttcttcctctattacttctcatgagagctgactgttaaaaagagcctggaaatctccttgtatcctctcttgctacgtgatctctgcacatgccagctcctttttgccttctaccatgagtggaagcagcctaaagccctcaccagaaatagatgttggtgccatgtttcttgtacagcctgcagaaccatgagacaaataaacttttcatttttataaatt

SEQ ID NO: 376007 - DNA, 269 bp, Homo Sapiens
agttactaatcattttatgaaaataatgtatttataagtattttccttaaggtttgtgaagagtatttgcattgtgtccttcattttaatgtgtttgcaatcgctccgctccaggaagaacggaaatgctgtcttgtgagcatgaagtgaacgggctgttttgctccagccacttttcttgtacaaccacatggatggattagatgtcctcaggtcttttccatcttcagtttctatgactgtggaataaatgttcagatagaaacttc

SEQ ID NO: 376008 - DNA, 469 bp, Homo Sapiens
  misc_feature (409)..(409): n is a, c, g, or t
  misc_feature (420)..(420): n is a, c, g, or t
  misc_feature (442)..(442): n is a, c, g, or t
  misc_feature (451)..(451): n is a, c, g, or t
tggagtgatttatactgtgaaatgagttggccagattgtggggtgcagctgggtggggcagcacacctctggggggataatgtccccactcccgaaagcctttcctcggtctcccttccgtccatcccccttcttcctcccctcaacagtgagttagactcaagggggtgacagaaccgagaagggggtgacagtcctccatccacgtggcctctctctctctcctcaggaccctcagccctggcctttttctttaaggtcccccgaccaatccccagcctaggacgccaacttctcccaccccttgggcccctcacatcctctccagggaagggagtgaggggctgtggacatttttccggagaagatttcagagctgaggctttgggtacccccaaacccccaatanttttgggattnggcagattcaaggggttgggantttcatggnttccatggccgagttccg

SEQ ID NO: 376009 - DNA, 392 bp, Homo Sapiens
  misc_feature (31)..(31): n is a, c, g, or t
gcttgacaacaaaactcatgctatatttctnccctaatcttagtttaaatacatataatcattgtattgttatctttcctacaagtacttgtttcaagtaaggtaacatattttttttgctgcctgagatataatgtcaaatacagagtaccaggagcctggggactttctatctactctaaaagaacatattctactcttcactatggatttggtaacatttcctttattaaagagttgccccctttatcttgactttaattcactttcaattcatccatccctacaaaatattcaagaaagaaccatttctgtatagaaattaaacacaaattattatcaatactggaacggctattttctaccttcataaatgtctaaggttgtgattt

SEQ ID NO: 376010 - DNA, 508 bp, Homo Sapiens
ttgtgatctgaattcccagccaaggtccacagatggcacgtttgatctgactgtccttagcaatgatggagttcacagcacagtcacgagcaacatccgagttttctttgctggattttccaatgccacagtggataacagcatcttacttcgtctcggcgtaccaacagtaaaggacttcttgaccaaccactatcttcattttttacgcattgccagctcacagctgacaggcttagggactgctgtgcaactgtacagtgcatatgaagagaacaatagaacgtttcttttggcagctgtgaagcgaaatcataatcagtatgtgaatcccagtggcgtagccaccttctttgaaagcatcaaagagatccttctccggcagagtggagtaaaggtggaatctgtggatcatgactcctgtgtgcatggcccatgtcagaatggagggagctgtctacgaagattggctgtgagctccgtattaaaaagccgtgagagtcttcca

SEQ ID NO: 376011 - DNA, 428 bp, Homo Sapiens
  misc_feature (25)..(25): n is a, c, g, or t
agtatatgttgccagacgggccacnggcacacttttcctaattgggaaaaatggaacagcaacagtattgtctgttgacagaatatataacagagatattatcccacccctactcaggacttcggtggccttgatgtgcttactatatcacttggaggaattccacccaatcaagcacatcgagatgcccaaacaggtaaatgcctttattaagtagagtcacaagggaagtaaaattgttcttcaaaaagtaattgctttttcttgtggcaagactacacatttaacatgaatctcatatacagaacaatttcattcaataaaatttatgtttaaaaaagtagtttgatgtctgataatatcaattataaatatcctaagaatgtcataactatcttcagaaagtttgtaataaactattagccacc

SEQ ID NO: 376012 - DNA, 413 bp, Homo Sapiens
tcatgactgaaaaggagctttggaaatcactgcataaggcttgatttatttgcacaactttctttagggttgcagctagaacaaacctgtgcgctttgaaatgttaccttctgctctctgttcccaagtacagagaaataatgttgcaaatctcacttctgctgaacattatgcttcctgatgcatttagcagacactaaacatttgtcatactctaaacaaagttacaaaggactagaagaattcttgttctgtatttagaaacccactcacattacttgatatttgggtatttaagtcatgaaaggtatttcttctaggaagcagtgattctaaagtgtatggcttaaccagtcagttgagtgtctactcttgtgtgttcacaagtgtacacaaggttttggggtaattag

SEQ ID NO: 376013 - DNA, 736 bp, Homo Sapiens
  misc_feature (13)..(13): n is a, c, g, or t
  misc_feature (21)..(21): n is a, c, g, or t
  misc_feature (41)..(41): n is a, c, g, or t
  misc_feature (58)..(58): n is a, c, g, or t
  misc_feature (76)..(76): n is a, c, g, or t
  misc_feature (107)..(107): n is a, c, g, or t
gcctctctggctnggcttccngctggtgtaaggtgtaaggncccgaagctctgaggtnaagaggccagctgtctcncaaggaagcttgtgggccctgatgtgctggnctgaatgggccattatctgttctagaaaactggcacttgtgatggcttcctccatgtgctcctcatcagatttcaaaacagatttaatgttttctacaagttcatggatgtctggggtcatggtacaagaggactgccccaggaacctcgccaccagcagcttggtgtccatgtaggatttgtaatcctatcaaaagaccgcgggtctgcattcgcgaagctcctagatctcaagcctctccctcagagtcactgaagcccagatcccagtctcctttcagtctgtgttgcagcttcacagctgagcactggggcagctttgtcccaaaagtcctcaaggacgttgtactgacttgtgttatcgatgctcacaccatggatatgaggtagatctatagctattaccaaaagagaaatttaggtgcagaaaaagtacacatcattctggaagtcaacagagagcctgggaaatccactgcaggctctaatttccatggctgcctatatcagcaagggtgtaaagaccagcaatgcttctgcactgtgaagtgtgtgaagcaaaactcagatctggtcattatgtgtccagaagtcagccagcagccttcagcatacacaacattggcatc

SEQ ID NO: 376014 - DNA, 308 bp, Homo Sapiens
  misc_feature (19)..(19): n is a, c, g, or t
  misc_feature (112)..(112): n is a, c, g, or t
cactggggcccccttgggnaagggcctgaacttgaacacttttgtgtgacttgaagccccactgtgccccagccctgaaacaccccttcccctggtaaaacactcccacaancccaggaagagaaggaatgtactgcaacaaaataaaggcccagtcatgcaaggcccatggctgaaagtcctttcagtcattttagatgaaagactgaaatctttgccctcccaagatcaggaacaagagaaggatgcccgctctcactacttctattcaacacaggatttgaagtcaggccgggcaccagttgtca

SEQ ID NO: 376015 - DNA, 393 bp, Homo Sapiens
atttagtgatcagttacttcatgttttgtgtcagagaaaacatgtacaaaacatttgagaaaatattttaggacattatgtctaaaaattgtatactgagaaaaatcctatgaatgtggcagactataaaagcctttggtgggaagataaaccccctcagaagtgatcatagatcatgaataaactactaattcgtggaaatgtaataattataggaacgtctttgcccaaaaataaaacttcaacagattgagagagttcacactggagaaatactttcctctggcaaacccctgtggcagggttttcagtaaaatgttttgcctcatcgtgtgctagggaaataatgcagaaaaaacttatgaaaacatttcaatgtaggaagacttttag

SEQ ID NO: 376016 - DNA, 551 bp, Homo Sapiens
  misc_feature (164)..(164): n is a, c, g, or t
  misc_feature (506)..(506): n is a, c, g, or t
  misc_feature (525)..(525): n is a, c, g, or t
gtcacttcacaggtggtaaaatctacaaggtgtgcccccatcaggtggtctgcggctccaagtatcttgtgcgaggtgagagtgcccgtgaccatgtggacctgcttgcctcttcccgccactggccgcctgtctatgtggtagatatggccacgtcacgctgntggtgctgacctctgctacccagagctgactaaccagatgtgggggaggaaccagggctgtttctctagccccacagagccacctgtgagtgtgtcctgcccagagctcttggaccagcattatactgtggacatgacagaaactgagcactctatccagcacccagtcaccaagactgccacgcggcgcattcgtccatgcaggcctacagcccaatcctgggtgaccccagttgttggggaccattccttgggccctgttgccctgaaattgggcaacttaaggcaaccatcctgggcctccatcgtgggacagcaaaccaaacggtgttccgccagcgncccatttgcctttcgacantgccattcattatttaccttttacaa

SEQ ID NO: 376017 - DNA, 515 bp, Homo Sapiens
  misc_feature (20)..(20): n is a, c, g, or t
  misc_feature (108)..(108): n is a, c, g, or t
  misc_feature (366)..(366): n is a, c, g, or t
  misc_feature (405)..(405): n is a, c, g, or t
  misc_feature (415)..(415): n is a, c, g, or t
  misc_feature (436)..(436): n is a, c, g, or t
  misc_feature (465)..(465): n is a, c, g, or t
  misc_feature (485)..(485): n is a, c, g, or t
ggaagaagcacgtgccacgnccggcgcagtggtggtcacccatgtactgcaagtctgcaggagacttccccccaggagcagcacctgcagtgataccagcccccctgncccggggaagagggtatgatcgagaggaaacgggcagactctaagcagaatggcgatgccaacgcagtgctgtctgatgaggagggagctggcctcacccaacccctgggcctcctccccgacccccgaggagcgccgggccctgcgacgctccaccactcgagacagaaacaagaaggcagctgcttgctttcctgcttcagcactgggggattatggccttgcggccgatggtagttttccgggaaagagaccttnccaagacggcctttttgttccaattttggcccagggttnaaagttcttnaccttttttttaaaagcgggnaaccaacgtttaggagaggacagggcagnacagacaggaaaggccaganttttagggggaattttttgggaaacccaga

SEQ ID NO: 376018 - DNA, 381 bp, Homo Sapiens
  misc_feature (318)..(318): n is a, c, g, or t
  misc_feature (337)..(337): n is a, c, g, or t
aataaaaaacgcatttaatagcatgtcaatatacagtttaaatgtgtagtaagtcttctgttagtcagtgcattacagggataaagaggaggaatttcatttggaatgcacagtccaacgctaggtataggtgcagagaaatcttggtgctcttacactattaaaattccgttttatgaaacatcactccaggtgcagggcctgtgccagtgagggactcatctggtccagtgtgcaagctacagttttcaattaaattgtatacaagtattaacaaaagaataaaatttattattcacaaaactaaagtgggttatncataaaggcttacaagagngttacagcctaggaactaatgagttgaaaagctagtttttaaaa

SEQ ID NO: 376019 - DNA, 466 bp, Homo Sapiens
catcctttccagctcaaacgtgggtagggatgtgggagaataagaatgtgggagaaccaagagaaaaagtggggctgggagagtcggagttcccgtagggcataggcctgtgaagtaacactggggcagatatgtatgttatatacaactatttttttaaaaaacttatatccatgttgggagtagatgggtatataacagtttggaaatactatctttggagaatgtatttttgtatttataaatcaacttttaaaaactgtctcattcaaaagggaataattcatatgtacccttaggaaataaagacctgtgttatcaatgtgtcattttcttctttcctccataactgtaccttgaaaccttactgctgacctgcagaaaatgtgccgcgttatgtacctggctcatcttcaacacactaaccatgaacactaatagccattaggggacatggctacagata

SEQ ID NO: 376020 - DNA, 424 bp, Homo Sapiens
  misc_feature (365)..(365): n is a, c, g, or t
  misc_feature (407)..(407): n is a, c, g, or t
agcagatggccttgaacaagaagttcgctgtcgtgagagcatggcattcccacagacatggggtatgcagtggcgccccaccactcgggcgtgtaccccgtgcacgtgcagctgtacgaggcttggaagcaggtgtggagcatccgcgtggaccagcacggaggagtacccccacctgaagccagcccgctaccgccgtggcttcatccacaatggcatcatggttctcccacggcagacctgcggcctcttcacacacaccatcttctacaacgagtaccctgggcggctccagtgagctggacaagatcatcaacgggggcgagctcttcctcaccgttgcttcttcaattctgttgagtgcntccacagcccttgtttcttgggtgaggaagggggttgcttgnacagcttgtttttgcag

SEQ ID NO: 376021 - DNA, 442 bp, Homo Sapiens
  misc_feature (379)..(379): n is a, c, g, or t
  misc_feature (407)..(407): n is a, c, g, or t
acatatccccaagaacatctaaaagcgttcccagtaacatttgcttagtccattcactctcaaaaacacgcccgtcttcctacctggaaacttctgttgagggatgcgatgaaggggagtgaggcgtttcagtgctgcctcagcccaatcctgattctccgtgtggcagcgcttcttgtgttctaggtcgccccacagaaccagttatgtgcttacgcctgtgtctctgtctgtgctgttcccttcctggggccagcaccagggctgctgggcaggacctttgtttggcagtgtgggaaacacccactctgggggctgggcactatctgttcgagaatttaaaagtgatcataaatctgtatggaaaggttgatgtggnttttcgttatttaccatggcaccagcanttccagttcagtgttcgggccataacatcatctgt

SEQ ID NO: 376022 - DNA, 492 bp, Homo Sapiens
agcgtttgcatcattcagctatttttctgtcatttttgtagaaaatgtaagattgcagaggtttttaccagtattatgaagttatatcatgaggatgtgtgcggtagtagaatttttcgacagcagagacatttgaaagccattacagttgatcttgaagaaacaaaagccatggacggtaattgtattgtcctggaatgtgtgtgaaatgccagttgttcctaaaattctgccacactttgcccagtggatttttactatttctatccgttgcctcatttgaaagaaactttttgaaattaatagaaaagcagtttaactccaaagaaacattgacagatatgactagtaactgttgaacatgataaggattatgttcaggtcattatggatcattgacaaattgcagaacataaggcttaaaaataaactgtgctgttattcatgagtgagataaataggtggggttgtttcaaaaaatacactaatgtt

SEQ ID NO: 376023 - DNA, 464 bp, Homo Sapiens
  misc_feature (414)..(414): n is a, c, g, or t
gataccaccaccaggaaaatcaggtggggcctctgacctcatcccgaaggccgcttcagttctcgaatggatgtctcttccgcctcccgcgggttaggctcgtgatagagagtgggctgtccggggaaggtctgtagttttcacttcctcaccttcaagaggaagatgatgcaaggaaaggctggatacagccactggggaacgggcttctagaacaccctcaggaagcatcatggtgaatgagacacaggatgtgcccacctgtgggggcaaggcagaacttttcaaagaggctaagcccaccatttggcctggacttttggaatgggggattaaactttcctcctgcagcaaacctcatttggcagcccttctattctagaacctcagcagcccagaaattaacagtgacanaaagaacagataaaaccattgtccacaaggtccttcccaggccatctcag

SEQ ID NO: 376024 - DNA, 529 bp, Homo Sapiens
gtcgtcccgtccgtgatatattccataggacagaaaacctgagttctaattccagctttgccagtcatcctgtccgtgatatattccataggacagaaaacctgagttctaattccagctttgccagtcgtcccgtccgtgatatattacctaactcctccagaactcagttttctaacctataaaatgaagacattgtgctagatgatctttgtggttccttcaagctctggatctctaattccatgattagtaatgtatgtatgtgtatataaatatgcttatctgtagaaatgggcccatttgaaaagtggagacaaggtctgcccaggtgcatttattgtgccagaaacagtgaattcctaaataagttcataaaatcttgttttacaattcaatggtagtgcttaatgttactgtctgaaatccactgtttaaccagatggaagactggggccattcaaaacattattagttcacaagtgtttgctgttaaaatgcttcaataaaactcatttgttaaagtgag

SEQ ID NO: 376025 - DNA, 443 bp, Homo Sapiens
  misc_feature (72)..(72): n is a, c, g, or t
  misc_feature (336)..(336): n is a, c, g, or t
  misc_feature (368)..(368): n is a, c, g, or t
gaagtcacgtttcactcagggtcgtcagttacaaggatgctatgggagcaaatcaaacagatcatccagcgncatcacatgggtgagcccacctgccatcactctggaatggaagaggaaggtggcccaggaagccattgagagcctcagcgcctccaaattggctaagagcatttgcagccaattccggactcggctcaatagttcccacgaggcttttgcagcctccttgcggcactgggaagctggccactcaggccggttaggagaaaacggaagatctatgggctgagggttcgggaaagatcatgctccccgctgggcccgctttctctnggaaagctgttcttttacaggatgtctttgcnttcatcgtaaaccctaaacttgggggacaaggacttggggcccgggccagtattggtgttggtattacccgtttt

SEQ ID NO: 376026 - DNA, 490 bp, Homo Sapiens
  misc_feature (171)..(171): n is a, c, g, or t
  misc_feature (304)..(314): n is a, c, g, or t
aagggaaaccgtccccctgtttccagaacacctaacagaaagcccaactgccaacaggacccaagcctaaaacaaattccataatttgaatttgggcccatgaattccctcccaccctattccttagtccacagggccatgaaaccttactcagaaagatatcaatttccnttttcctacaactggctacaaatttactgtattatgttagatggaggggactgggggaaggcgggcagcagggagtttacatgttggcaatcattcattgcctttccctttacccagagaaaatgctactttnnnnnnnnnnncacccagaaatttagagttcaataatgaattttgctttcttggcacatttttgaaatgatcatatcattacatgtagctaggtctttatctcctgaatgctcctctagggaggcaagttatctaaacaacaaaataacctacaaaaaaagttaatattgtgagcagtctcaatttg

SEQ ID NO: 376027 - DNA, 450 bp, Homo Sapiens
tggtaatctatgctgatgttttatgtgctttggcccttccatttggcaaaatggacttaatgctgggttacatgtctctctttttatgaattccagtcctgctcagagtgaagcttctccagtggcttctccagatccccagcgccaggagtggtttgcccggtacttcacattctgaaagaattgtgttggcacagctctgtatagactgttactaagagcatgactttatacagattgttatgtaaataggctttcctatgtcaaacactgtgaatgagaaagtatttgtctctccaacttgaaaatgcactgtatttcctgtgatatttattggaatcattctataaggtactatattatgtgtgtaattataactgttatttttatttgagatggaagagtctttaacctttgtaattactgcataataaattttgttagaatcaa

SEQ ID NO: 376028 - DNA, 328 bp, Homo Sapiens
  misc_feature (224)..(224): n is a, c, g, or t
aataagctataaagaatgagagaaaggagagaggagctacacagcagagacaatccatttttcagaacttcaggaaatgaaaatattccaaggactctcagataagaataaagtatggggcctggaatcaagataaaaactaaaagaagagattgtttggcttctgaggctgtaaacattgcttatataggcaaatattgagggctgaatttgaggttggagantgaagccaggtatgtctgcggtccagactgtattgttgttttaagtggtttaaagaaaatgtctgggtgttttttccagtttgtgctaaagatctgaaaataat

SEQ ID NO: 376029 - DNA, 540 bp, Homo Sapiens
  misc_feature (51)..(51): n is a, c, g, or t
tccttaagcaatggttccactcacagcagccagcaagcacacatttttttnagtgccgtacatgatactgggaatacacatagtatggctggctactgcaacatgcttttgaagaactacaaacattgaacacttatttttctgcaaaagccttagaatagctaccaaattttgataagtaaaaggattcacagaatgactgtgccctactgttattcttcttccatcttgtaacttaccgataatacttacgcatattagcaaacttaaatatttatagctttgttatcaaggtcagaactttacaggacatgaattaatttaaacagcgaactaaattaagaaaatccttgagacatggaatgcctgacaattaatttacatgcacaattttagtaaaattttaatggcttctcttaatagtgtgtgtccaaattttgatttgaaggaagctaagccatggaataaataacaccataaaaatatacaaatgtatataagaaacatttatctctttagtgactatgaattaaaaactta

SEQ ID NO: 376030 - DNA, 265 bp, Homo Sapiens
  misc_feature (87)..(87): n is a, c, g, or t
  misc_feature (205)..(205): n is a, c, g, or t
  misc_feature (215)..(215): n is a, c, g, or t
  misc_feature (250)..(250): n is a, c, g, or t
aagcatcaggggctccggcctgggatgtttctgaactttgggagttataggagacaggaggaacttctcctcctcctcctcccctanaattccttttcacatattcctttcttctccctcttgggtgaccttccaaaactctgctctcaggctgaaatctggcatcatcatcaggttccctgtccccagcactgtccccatgganctggtggctnacaaagatgtagtttccatcagtcaataaaacctnagaggagagatgagg

SEQ ID NO: 376031 - DNA, 514 bp, Homo Sapiens
  misc_feature (448)..(448): n is a, c, g, or t
  misc_feature (464)..(464): n is a, c, g, or t
ctggtaagttgaagagctagaatctgaatcctggtgtctgtctttgttcccgttattccaaactgattcacttataaaatggagctaattatagcttcttcaggattattacagggattgtcataaaatttgcagataatgcttaacacataataaccactcagcgttttcggaagaagtaggaacttttatttcctttaatgattccattctcttccacagtttccctcactgctttagatagtaactaggtgttattttctttcagtctctgctgtggtgcttctgaaaattactgtcttctgaagtaggtttggggagtaggtcagaacataccttatctgctgtagccaagggacagaaaggctgggttttccatggcagccatgggggtgagggcatggattgtgcgtgttcccccagtggggtgtttacaggggcctgcttntcacaagtaggaaaantctgtgtgggggccgaggggagatggtaagtgatctatgggtgtggcctc

SEQ ID NO: 376032 - DNA, 303 bp, Homo Sapiens
  misc_feature (30)..(30): n is a, c, g, or t
  misc_feature (55)..(55): n is a, c, g, or t
cagtaaaatgattgccacggggcacccagnatccttgctgaggttggaaaccgcnaaaggtgcagcagcaacaagccacatgggtgggtgttgtctcctgtgagagcaagatgtgataggtaatctttgaagagggctttcctttcctagaattcgtgctgccacaggagtgtttagaaaacggttctacaagttcttgtttcttttctgaggttgtggcctctccattgtttggtcagatttgtagtgcactctattatcctgggtggttttgaaaacatttgttcagcacaataacctttt

SEQ ID NO: 376033 - DNA, 488 bp, Homo Sapiens
acacacttttccttacccccagtctctgtagtcattccctatctcattgcctaattttatgttcttcattatttttatcaatatgtaaacctgtcttatctatttatttatgggcctattgtcttccctacccaccccgagtacaaagaatcttctttaggtcatagactatctagaacagtataagttgcatagaaaatgctcattaaatatctgtggactgacttattgattgaccagccaagctgccatccatcctcatctataaggctagtaatatgttgggtatcatcaggtaagacattatacataaatataaaacatcatacagaaccagcccggagctttgcatcctctatggtcatcaacattgtacttcacaaaaaattattggagatggttgggtccaggggagacgatcgaaataatcaagagaaggatgattggcagaggaggaagatagttgaggaacttgcttgtacaaaagg

SEQ ID NO: 376034 - DNA, 186 bp, Homo Sapiens
gtactcctgtagatccaaagcatttcagttcagcattaatagggacaggaattgccaggccactagagtttcactttctcttctacattcccctttcctttcctgcttttgggcataggggagcatttgtttgttttgtatacatatctcttatctctgcctacctgaaatttatattctagtcaa

SEQ ID NO: 376035 - DNA, 114 bp, Homo Sapiens
taagccactgcctagaactggccatgtacaatagtcctcccttatctgtgcggcgatatcttccaggacccccagtgggtgcctgaaagtaccagaccctatatgtacaaatgc

SEQ ID NO: 376036 - DNA, 491 bp, Homo Sapiens
  misc_feature (17)..(17): n is a, c, g, or t
  misc_feature (27)..(27): n is a, c, g, or t
  misc_feature (85)..(85): n is a, c, g, or t
caccttgaaaatgggcnaagggaaggncaagagggagggaaatgaattttcctttcccctgtgaaactgaagaaggcttcccaancctggagggcttccccgggagacacattaagtcagaaggcccctagcctaggtttatatttacaactacttgcatctatctaatgagggtttcctaaattgtgtaggcctgtagtagtctagatccctggaataagagccagacttgatttatacaggaattcatacttgattactccattagcagctccagctaggtcagctggcaaaggaagccacagatatctaactgagatgaggctcgatagcataagcttaatatcgagggacaagacaggaaaggtcagctcagggagaatacaggagcttcttttaagagtcttctgttttagacaaagcaactgggctacctagagaccttaccttggcatacaccccaaagaatataggtaaatgattgctctgcc

SEQ ID NO: 376037 - DNA, 475 bp, Homo Sapiens
  misc_feature (368)..(368): n is a, c, g, or t
  misc_feature (449)..(449): n is a, c, g, or t
ccagtccaggctgtgaatgttgggcagttgctggccgtaaatgccgaggaggacgcctggttacgggcacaggtcatctcaacagaagagaacaaaataaaggtatgctatgttgactatggttttagtgaaaatgttgaaaaaagcaaagcatacaaattaaacccgaagttttgttcactctcatttcaagctacaaaatgtaagcttgcaggcttggaagtcctaagcgatgaccctgatctagtgaaggtggttgaatctttaacttgtgggaaagatctttgcagtgggaaatactttgacaaagctgacattccacttgttgttcttgtacgatacctccagggaggaaggtgatattccantatccaatgccacctggcttggaagggctatattgtggaccaaatcactaggaggtttcacctggcagggtttgacgcccntgttaccaccaattgttccaaggtaa

SEQ ID NO: 376038 - DNA, 720 bp, Homo Sapiens
  misc_feature (648)..(648): n is a, c, g, or t
  misc_feature (683)..(683): n is a, c, g, or t
aacttgtggaaagatctttgcagtggaaatacttgacaaagctgacattccacttgttgttctgtacgatacctcaggagaagatgatatcaatatcaatgccacctgcttgaaggctatatgtgacaagtcactagaggttcacctgcaggttgacgccatgtacacaaatgtcaaagtaactaatatttgctctgatgggacactctactgccaggtgccttgtaagggtctgaacaagctcagtgaccttctacgtaagatagaggactacttccattgcaagcacatgacctctgagtgctttgtttcattacccttctgtgggaaaatctgcctcttccattgcaaaggaaaatggttacgagtagagatcacaaatgttcacagcagccgggctcttgatgttcagttcctggactctggcactgtgacatctgtaaaagtgtcagagctcagggaaattccacctcggtttctacaagaaatgattgcaataccacctcaggccattaagtgctgtttagcagatcttccacaatctattggcatgtggacaccagatgcagtgctgtggttaagagattctgttttggaattgctcggactgttagcattaaaggttacaaaagtgggattgaaaccagngggattcgcacatgtttattttattttacccctanggaacttccctgaccctcatcgcagtatttaattcgg

SEQ ID NO: 376039 - DNA, 288 bp, Homo Sapiens
aaaatctttttttataaaaaatttgattcatagtttttttaaatacaacgagtacattgaacatgcttcacattcagaacatgaagtcttttaaatgaatataggtagaacttccaacttccaggctttgtaacagaaatcatattaaagactcagtagcaagcctaatcctcaaatcccccatctgttaacctgataatcctcatgtgtaaacttatttaagaagctaactcctgagccacctgtattctgagcattgcaataaagatgtgaagattttaaaaaaac

SEQ ID NO: 376040 - DNA, 144 bp, Homo Sapiens
  misc_feature (125)..(125): n is a, c, g, or t
aaataatagtatttgctaagactagatgattggtgtactggatttcatccgctattttctaagtttgttatgaacgctttaaatatatatgtatgtagtaaaattaatgtaaatttgtacaaatnaaaataaatggcatgtgat

SEQ ID NO: 376041 - DNA, 470 bp, Homo Sapiens
  misc_feature (27)..(27): n is a, c, g, or t
  misc_feature (82)..(82): n is a, c, g, or t
aaggaaccctgaagggaaaacacagangcccagcacccaggcccctgaaaagtcccagccaagccccggggcccactctganccagctgaagggtaacgagcctaactgtaccccaaagagccccacagccagcccagggaagttcctattctctggttattatggtgatttaaagacttctggattggcttgatctggaaaacacagtttaagtgtttgaacattctcagcccgccagtggcccacagatgtttaaccagctgtgaatttcctattttgggggctgaattaagttgctagtggcaagctatttctgcaagctctctgcttttcttctgactccttttacgttttcttataatataaggcaaaaagagttgagaatagagagacagaagttccataatgctgatttatgttaggcaatttgttactggctcaatcctaggctttgaaaataaaagaaata

SEQ ID NO: 376042 - DNA, 487 bp, Homo Sapiens
  misc_feature (213)..(213): n is a, c, g, or t
accaagaaaaaagggccacggtgacagagggaaggcgcgcagcacggatctgcaccccggatgcatctggtgcagcttgtgccgggcctgctgcatgtgggctcggtgatgccccagaccgaagctgccccccctgcaccgcccaactgcacagcgcagcatggccctgtggagcggggatttcctgctcagcccgcctcaggtcccattccncgccccgctcatcatttcagtaaagggttagtctctggcagacaactggggagaacacagatgtaagaatgagacactgagtttcctctgaattttaagacgaaattttaagaacaaacacaatcaaatgaagaaagtaagttttgattagaaagtaaaaccgttttaataacattaacaggtgcttttattacaaaaatgaacactaatttattgtggtaaatttagaaagaaacattaaaatacaaaataaaataaaagctttcataatccc

SEQ ID NO: 376043 - DNA, 446 bp, Homo Sapiens
  misc_feature (25)..(25): n is a, c, g, or t
  misc_feature (100)..(100): n is a, c, g, or t
  misc_feature (136)..(148): n is a, c, g, or t
cctacttgggaaaacctgaggccangaagaattcaacttgaaaccccgagaggccagagattgccagtgaaactgaaaatcaacacccattgcacttccnacccctgggcccataagagcaaaactcccatcctcnnnnnnnnnnnnngggagttgtttttgtccttaggtccacatggctgggggacactgatctgtttgactccgacgtttgggccacctcgaaacataagagcccagtccctgcttcaaggatgtgagagtctaatcacggaagatgggtgtaaatggaataaaaccccaggtcgggggactttgggaacgcccttgtagtttaaatactaattgtgagaactaactggtatggaccgataagaccacacaattcaggaagaaataaatatcagaaatagagcatttaaaattgagatttgagaagagacttg

SEQ ID NO: 376044 - DNA, 531 bp, Homo Sapiens
  misc_feature (16)..(16): n is a, c, g, or t
  misc_feature (26)..(26): n is a, c, g, or t
  misc_feature (40)..(40): n is a, c, g, or t
  misc_feature (53)..(53): n is a, c, g, or t
  misc_feature (61)..(61): n is a, c, g, or t
  misc_feature (64)..(107): n is a, c, g, or t
  misc_feature (140)..(140): n is a, c, g, or t
ggggtttccaccgtgntgggtcaagnctgggcctcgaaanccctgaaactcgngtggaccnacnnnnnnnnnnnnnnnnnnnnnnnnnnnnnnnnnnnnnnnnnnnncacccaaacccggcccgcaaactcccctttccngagtccaagttttcccattgttgtaatgacaattgttaataccccaccctcaaagagccctgccttaagattccctttcccttgactccctgccttggcatcctggacaatggggcccatagcaagttctctgcagtgactgtttgcagtttccacagtgcctagcccagagctgagctgcaagtaggacaatattaaaggtcattggttaatatagagccaactgtgcagaagtagaggcagctatgatgtaacagaaaaaggccttggcttggagtcagaattcctgggttacaatgtcagttctgttcactgtgaggcccttggatgagtcactaaccctccctgagccttttctttatctgttaatattaaaaatatgattaataat

SEQ ID NO: 376045 - DNA, 423 bp, Homo Sapiens
  misc_feature (18)..(18): n is a, c, g, or t
  misc_feature (37)..(37): n is a, c, g, or t
  misc_feature (46)..(46): n is a, c, g, or t
  misc_feature (57)..(57): n is a, c, g, or t
  misc_feature (63)..(63): n is a, c, g, or t
  misc_feature (68)..(68): n is a, c, g, or t
  misc_feature (84)..(84): n is a, c, g, or t
gaaggaaacccccatggnaaagggcccggtaaaaggncccatccanggccaacccanagattnccctncccccatttgccatantttccaaagatatgttaaaaaatcccttagacctatacatagcccctgatttaaatgtgatccataggtgttatttttagttgccatagggtatttgatacaatcattaatggatcatacacaataggtttttaaaaattaataacttttagtaattacttttattaatttaaaatagaacgcttgagaggcactttgtaaagatttgttaaactggaaacgttttacatgatctgatacaaccattaatgaatcatacacaataggttttttaaaattaatattaataacttttattaatttaaaatagaatgcttaaaataaaatagaatgcttgag

SEQ ID NO: 376046 - DNA, 350 bp, Homo Sapiens
  misc_feature (173)..(205): n is a, c, g, or t
tctaatcgttattgattagaagcatgactcctgaaggaaagggaaataaatctcaattcatactaacttgcaacaaaacacttttaccatataaataagtatatgatttatttttaacccaaaaaatgtataaaataagtgtgtcctttactgtcaatttatcgagaagatcnnnnnnnnnnnnnnnnnnnnnnnnnnnnnnnnncaacatagccaaatgtatgaaaacttgacaatgtataatttggaattcacatgctacctatgtagacaggtatgaaattaagttataattttcatgagacattttcatcactgttgacacagtttcaaggcattccatcatgtta

SEQ ID NO: 376047 - DNA, 885 bp, Homo Sapiens
  misc_feature (833)..(833): n is a, c, g, or t
  misc_feature (842)..(842): n is a, c, g, or t
  misc_feature (850)..(850): n is a, c, g, or t
  misc_feature (874)..(874): n is a, c, g, or t
accttactacttgggaattcctctttcccattctgtattggagtagcaattcttcagcagctgcgggaccggcttttggctaatggctttaatgagtgtattcttctcttctccgatttaccagaaattgacattgaacgctgtgtgagagaatctatcaacctgttttgttggactcctaaaagtgctacttacagacagcatgctcaacctccaaagccatcttctgacagcagtggaggcagaagttcggcaccttatttctctgctgagtgtccagatcctccaaagacagatctgtcaagagaatccatcccattaaatgacctgaagtcagaagtatcaccacggatttcagcagaggacctgattgacttgtgtgagctcacagtgacaggccacttcaaaacacccagcaagaaaacaaagtccagtaaaccaaagctcctggtggttgacatccggaatagtgaagactttattcgtggtcacatttcaggaagcatcaacattccattcagtgctgccttcactgcagaaggggagcttacccagggcccttacactgctatgctccagaacttcaaagggaaggtcattgtcatcgtggggcatgtggcaaaacacacagctgagtttgcagctcaccttgtgaagatgaaatatccaagaatctgtattctagatggtggcattaataaaataaagccaacaggccttcctcaccatcccatctccttcaaatatggaaggaaccaaggagtgtggactggccaaaacttagtgtgggcatccagcacccaacagcacaggttcttcatatcccacggcantcttcaggncaaaactnggatgtccagattggttgcatttnccgtaaaggtt

SEQ ID NO: 376048 - DNA, 543 bp, Homo Sapiens
  misc_feature (88)..(88): n is a, c, g, or t
  misc_feature (102)..(102): n is a, c, g, or t
accaattggttaccttatgtaatcctaaaagccacaaagaccctcctgcccacagaaccatgggaccctgaaaatatcccggcagganaaactgggtacccnggagaacactggtacatgaaagtttcccagaaaccagcccatgtccatcttactaatccaagactctctctgttaaatctgcaactcaaatgactttaaggaaaaatggatttcattgattcacataaccatcactcaaggactaactttcaacatagtgagatcctgaggctcaaatattattacccggtaaggccttctccatctctgttcttatctctctgcttcactttgcccttcaggcaaacattctgcaggttggtggcagcattcccagattatcttcttcctagataagcaacacagcaggaaaagaccttctttccagatagctcaggcagccttagtcatgtcattgcacctgaaccacttgcaggtcttgggtggagtgatctgatttggtcatgactagacctgaagaggagaaggtcctcatgggga

SEQ ID NO: 376049 - DNA, 426 bp, Homo Sapiens
  misc_feature (45)..(45): n is a, c, g, or t
  misc_feature (143)..(143): n is a, c, g, or t
ctggggcagctgtgccccacccagcctcacttcccatagagtttnttagagctgcatgcccagttttctaccagtactagttttgtcttcgggggctttctgggaagagttttctgattactctattgcccttacatgcaagncaactggacattgacctaaatatggatagcatgtttggtatatagacataaaatatgggttataaaggagattcacttagagaagaaaagccacgcagccttttggagagaaacccccaatcaataggccattgggactgaacacaggaataatcaatcacaatagacaatgctttctgagtcctatgtaggtcaggctctggagtggctggtgctgatttgctccagatctgcagtggctccccctccactcgggaggctgaggtgggaggattgcttgagc

SEQ ID NO: 376050 - DNA, 377 bp, Homo Sapiens
gacaaagagtaatggagtcactgttgtctaattattgcagtatataatgggcaaagtctaagctgttgcattaagagctcttcatattgggataatatctgaagtatacagtatgagtaaatatcatcatatttctagttggatttgtgtctgtactttcaggatttaaacacaccactttttactttttaaaaaagttggaataggacattaccacaaatgtcttaaatacttgttcagctagttgtcctttgagatgaatacattaaaggatgttggttcaaaatgcatcacaaacatcaaacccacatttagtactacccatcataggatgaggcaacatgccaaaggtcaaattagtaagtgggcaaagcaaa

SEQ ID NO: 376051 - DNA, 358 bp, Homo Sapiens
tgaccaatgcccccggtggttttacaacaaacttatggaagccacattaaaagttacataaatattacccagagagcctgatgcctctctgatagctgtgcccataagtgcttgtgaggtatttgcaaagtgccatgatagtaatgcctcggagtttttataattttaaatttcttttaaagcaagtgttttgtacatttcttttcaaaaagtgccaaatttgtcagtattgcatgtaaataattgtgttaattattttactgtagcatagattctatttacaaaatgtttgtttataaagttttatggatttttacagtgaagtgtttacagttgtttaataaagaactgtatgtaa

SEQ ID NO: 376052 - DNA, 510 bp, Homo Sapiens
  misc_feature (356)..(356): n is a, c, g, or t
agttattgtcaatttgacagttgaagataaggatgaccccaccacaggtgcatggagggctgcctacaccatcatcaacggaaaccccgggcagagctttgaaatccacaccaaccctcaaaccaacgaagggatgctttctgttgtcaaaccattggactatgaaatttctgccttccacaccctgctgatcaaagtggaaaatgaagacccactcgtacccgacgtctcctacggccccagctccacagccaccgtccacatcactgtcctggatgtcaacgagggcccagtcttctacccagaccccatgatggtgaccagggcaggaggacctctctgtgggcagcgtgctnttgaacagtggaattgccacgggaccccgacttccctggcaggcattcaaaccattcaggtatttcttgttttacaagggacccaggcaggtttgggttgaatatttaaccccttcaatggggaattgtttgaacaacacaggtgttgttggaa

SEQ ID NO: 376053 - DNA, 476 bp, Homo Sapiens
  misc_feature (332)..(332): n is a, c, g, or t
  misc_feature (382)..(382): n is a, c, g, or t
  misc_feature (390)..(390): n is a, c, g, or t
  misc_feature (396)..(396): n is a, c, g, or t
  misc_feature (414)..(414): n is a, c, g, or t
  misc_feature (458)..(458): n is a, c, g, or t
gtcacagttgctttgactatagagtccctatgtagaaatagaattatcctattctttttttggcaacctcactgatttacaatgaaattattggaatggtcaatagatacatccatatagcattttgacataagcaaaatgtaacttgactgaatagtaaaataatactgtaattttttatttccaatttcaaagattattttaaagaactgaggagatgatatattatgttgctatgcattggcaatttctggtaggaagttagggggaagatcaactcaaattctgaaactttactccattataaacttttctacatcctattagttccnaatatgcagaaaggggattgtgcaggtgatacccttctggcttaaaatgnccaaaccngggggntgatggaatgcttttccngggggccaattgaacccctggcccaaggcttcttcaggtggtcnttaaggaatggctgtggg

SEQ ID NO: 376054 - DNA, 454 bp, Homo Sapiens
aagaatacatgtgacttgactagtattagattactaaccatttcccatctctatattaaacataaatcacagataccaagattcactttagatatgaggaaaatggttttaatggacacaaaggagtcagccacgttggaaccaacatagtttcataccacgttgaaaccatgtgtttgatatgcaaataacagcaaataattttttcactcttgtcaatgccaatgcattgaaaggcccagaaaatgagaaaaggataacaaacttttgataaaaaggtaagaatttctgtgtggatgttcctcagtttctgggaaaattttgctacaaaagagatttaaataatttaggaggcagtcttttgcatggtatttttggcttacctttgaatctagtgggacctgtaatatgtaaggattgaaggatgtggcttagcaaactgaatggggaaggt

SEQ ID NO: 376055 - DNA, 485 bp, Homo Sapiens
  misc_feature (16)..(16): n is a, c, g, or t
  misc_feature (25)..(25): n is a, c, g, or t
  misc_feature (44)..(44): n is a, c, g, or t
  misc_feature (52)..(52): n is a, c, g, or t
  misc_feature (100)..(100): n is a, c, g, or t
  misc_feature (106)..(106): n is a, c, g, or t
  misc_feature (124)..(124): n is a, c, g, or t
cccaaaaaggttaaantgggtgggnaactttaaaaaaccccaantgtggttnaaagaacctgggaattgccgtttaacctccctggatgaaataacatancccctnaaaaccccccgcccctgncgccaactctgtgtgccttccagagatgtaacatccacagccctggtttcctgatgcctactaactcctgctcttggagagctggagacacgaggatcagatagtcccttgcctttggagcactcttgataagcttttgtattttgtgttgtccttttaaaatgttctagaatgactttacgttgcaggtactggttaattggctgttgacaccacatctattttgtcttatgattctgcagttttgcagtacttttctctatctgattcagccatttctgccagagggaaaaggtcggcagaaaagatgtattgagtgaatagttaaggataggatctttgtccaaaaatttcagaaaga

SEQ ID NO: 376056 - DNA, 347 bp, Homo Sapiens
  misc_feature (97)..(97): n is a, c, g, or t
  misc_feature (125)..(125): n is a, c, g, or t
cagtaggcacatttccagggcacctttccacatttcccttggatagatggtgatagtatgcccactgcccctatgagaaggattatccagtagagtnctgtcattaaaattcctcatataaaagnaaaaatatattaactataataattgaatattcaaatatgttacacactaaattgaacagccaaagaatgtggacaaactcaaattctactaaaatatatctcaagtttttgcaaaccttttctgtggaatatattcctgaatgattttcattaattcttttcagtgagcagaagggaaaaacagtataaattaaaatgttagtattttccaaccccatattt

SEQ ID NO: 376057 - DNA, 315 bp, Homo Sapiens
atgtttctcctgtctcccttctcctcatttcaatttggcaacttactgttgatccccagtattattttctaaattgaacttgtttgtggaaataaaaaatctgaggaccactcagagggcataagggaaccctctttgtcttagttcataaggactttctcatcatttttgtgtgtagtattattacatttaaaataaggatgatattgctgaagtagattaaatgttctctatagatatcaaagaagattagtaattctaatccttaaatttttagtctgaagtgaaatcttactataatcaaattgttgccca

SEQ ID NO: 376058 - DNA, 664 bp, Homo Sapiens
  misc_feature (457)..(457): n is a, c, g, or t
gaggaccagcagacagtcctaaagccccagttttatgagatcaaagcaggagaagaatttagaagtttcaaagattctgccacaaagcagaaactgatgaacaaaacccttgaagatcgtttgaaaattgaagcaaaaaatgggacattgagtgtatccaacaccaccgttggcagcaaacaattgacattcacgttaaagaggtctgaacagcagaagaagcaacaggaggctgagaaactgcatcgacaagcaaggaaaaaactccgtcgttcggccggacacctgaagtcaagacacaaaagaggacggtcgtttcaatgatttgggaagtggccctacctgtgattagggaggggtacgtctcccccaaactgatcatcgttagggtgttaaacacagacgaggaaacacacgtttttaaagttcatgtacgttcttgtacacagaggtaaanatttgaaaacctgtgccttgtgggttggactttgaaactggccccgcgacggccaaccgcacagccccaggggtgtgcttgcgagtcgttgctccctggaaacattgtcctttccccacggctttaatcatgaaaaccaggctggggtttttttaatattgtgaaatgtacaccatgaaatgaaaggtttatcctgtgccagaaacc

SEQ ID NO: 376059 - DNA, 514 bp, Homo Sapiens
  misc_feature (495)..(495): n is a, c, g, or t
aaaaaagacaaaaaagaccttgctatttgccaggcaacccttcctacacataccattccctagggcagcaggttgtatcttcaggcagtagtcatagtttaagtcttattttgcaaaatgtccttgaaactaagttccgggtaaaataacgaccagtacacagagagtgaacatactctgttatgtaagataacatcactttatgcatcacacaactagttgactcattctcagcttaatgtggttagttttggtttttgttttcagtttccactgctactaagtcagacattctttttcctatacttctgttttttgctctgttttggcttcctgaatgcaagttcaggtcctaacagtgaagtgaggacagaaaaataaccttggatttgcctattttgtggaagtgatggggaaaggtagtcagttggagagactgttgagaaggagtaagggactgttagggacaactcttttcaaggaagattgaaggantgagggagatgcagaggga

SEQ ID NO: 376060 - DNA, 226 bp, Homo Sapiens
  misc_feature (23)..(23): n is a, c, g, or t
  misc_feature (83)..(83): n is a, c, g, or t
acatgaaatgaccaataattttnttttatatttcaaataactagaattgtacagagtttaattttacagctttagggcaaggntaaactcatttttatttttgcagtaaaaggtataaatattgaaaattatgtaggtttaaaactttactatgatatagacacattctcaaattaatgaattttactgagctttttatatcaaacttactgatatttaatgcaaa

SEQ ID NO: 376061 - DNA, 581 bp, Homo Sapiens
  misc_feature (528)..(528): n is a, c, g, or t
  misc_feature (542)..(542): n is a, c, g, or t
  misc_feature (555)..(555): n is a, c, g, or t
  misc_feature (568)..(568): n is a, c, g, or t
tatttgaaggactcaattcctttgtctccagcaatttattggtgaaaagaaggcaaggagttgaagataatatattgacattgagaatgtcacttcaggttaccaaaggtaccaaaacatgcccctaacaaactgctatcaggattgcatgctttcaggtggaaaggggaccaaggagcaaagtgagtgtggctgcctgccatttgccaagatccatcctatatgcagctgctcctattccttctgaagaagcactaaccctggttgttctttcaaggtaactggtaggggttataaaggaagtctgcagaattgttgaatctgataaaaattctttgggagaggatatgtgtgtgtaaagtatgaataaattaccaaggaattaaatacaatcgacatttaagaacacaggccatacacagctggcttaaaatcctattaggcagagagaatcttttaaaattgtgaccacggaaggcactattcaggcttagccttggggaggaacaacaaatagggaaggattanttggaaccaaaagnttgtttttttccngggttggccttantttcacatggggg

SEQ ID NO: 376062 - DNA, 860 bp, Homo Sapiens
ttaattgattctgaacaaataattaacaattaccaaatgcctactatattccaggcattgtacttagatgatttacatacattatctcatttatcctcacaacaaccctatgaaataggtatattatcatccccattttatagatgaggaaattgagtaactcactcactcaaggtcacacagctggtgagtgttggagccgggattcgaacctaggtcttacttgaaagcccgtgctctttccactatactacattgcttcccacaaagttgccaactggactctgttataaaaattaaaagcacacatcacgaaaattcttggacttgcaaagaataagcctactaacaaaataagtgctatagtttcttttgaaataaggcattctaattatctcagtatgtctgccaaccaaataatgggaaatcagggaaactaacttaatatttaatacattaactattagtaaaataaaaacactcttacatccaggccctaaatactatagatattatagatgaggaaagaggcatttcctctatacaagggtgcttgctcaatgtacaataaaggtaataacacaaatattattcaagtctgtgtttttggttggggagttcctagttttaaaaaatactcatttggtgaaataaatcatcttgagatttttctgaaaccatgctgcttacaaggatttcccatattactagaatttttttacttttctgtaaacattttctaattaagccagcatttacaaaaggtttaaaaatattaaaaatgtaactttaataactaaattaagaatgccttacataatacatctaacaattcccctcagtagtattatgaaaaaaaa

SEQ ID NO: 376063 - DNA, 494 bp, Homo Sapiens
gtgaacccaagagctacatatggagtctagtgaagagttcccatgtagcctaactaattgtatttaaattgaggagatccaaaaaccccatcacccttcaccccaaagaccccttcacccttcaccagggaattctatcctgggtgctgtcccacctatgaccccttcaagaggccattggaaaaaggccatttacaagttaatgttacttatagctttgttactaagactcacctattgttagtgcagccaagtcacagaagtgcttattgcagttaaatagcaatttgtttccatgaaactgcaattaaagtattactgagcagccattttagattgggcagtgctctgaacgcatgttaaacagccagctactcccacttggcagagtctggaggttctgactaggcaggcaaagtgttaggcacatttcggccgatggtggggtacctagtttaaagggggcttttgttggccctctggttcccttcgtg

SEQ ID NO: 376064 - DNA, 450 bp, Homo Sapiens
  misc_feature (13)..(13): n is a, c, g, or t
  misc_feature (47)..(47): n is a, c, g, or t
  misc_feature (91)..(91): n is a, c, g, or t
  misc_feature (98)..(98): n is a, c, g, or t
caaaattgttccncattttcaatgcataggcaaaggcatgtcgaaanattccattatgtgtgtaccagaattcccctgagttagtagggcnctacagngccagttagtaagtgaatgcattatgctatcaatattaggacttttttcctaaaggatgatgaaactatcatgtatgatactcaagtgatggatacacaacagcatgcatttgtcaagacccatacaatttatagcacaaaaactgactttaatatacgcaaatttaaaaaattatttgaaaggttgggagttctcagaatgaaatgcatactgtgacaaaagaatctaactgcataacatgtacaaaacaatctcactaaaaaaataaggagaaaaggttctggcttaagaaagtttgaaaatgagtggagtctgtaagactaacagcaaataaacttcatgtaagtattg

SEQ ID NO: 376065 - DNA, 397 bp, Homo Sapiens
  misc_feature (53)..(53): n is a, c, g, or t
  misc_feature (340)..(340): n is a, c, g, or t
  misc_feature (348)..(348): n is a, c, g, or t
  misc_feature (356)..(356): n is a, c, g, or t
  misc_feature (367)..(367): n is a, c, g, or t
  misc_feature (383)..(383): n is a, c, g, or t
cctacttcacaaaatagttatgagagtcaaataaaagtacattttagaaagtnaaatgctgtggacatttaaggtggagccactgtgagagtctagggggatagatggtagtcgtctcagaatgaaacgaatacacccctctcagagccctttccaaggatcccctccttctttcagctccttccctccacctcaatacacactcctgtcccgggaacctaacctcatctaggaaataccaggggccagcatgccttaacacctaggagggttgggttgggctttcagaggaaactttttggagggcttaaaaggcaggccaaggaaggaatcaggccanttacatgnttggggantgggggtttgnacaggaggcagtgagnttttgattggggga

SEQ ID NO: 376066 - DNA, 400 bp, Homo Sapiens
  misc_feature (290)..(290): n is a, c, g, or t
  misc_feature (331)..(331): n is a, c, g, or t
  misc_feature (341)..(341): n is a, c, g, or t
  misc_feature (355)..(355): n is a, c, g, or t
  misc_feature (367)..(367): n is a, c, g, or t
  misc_feature (372)..(372): n is a, c, g, or t
ggggcacatgtaaactgctgagcagaagtttaaataaccagctgggggctatggccatctttcttttgcctccagcataaggtgagcaaagtcctggtggggacacttgctgcttcagccagggtccagagtgagacagacatggaccagagcctgtccagtgaagaaatgaaccttggttgtaagccactgagatttggaggctgcttgttaccacagcataacctagcctctcctgatgggacccattttcacctggcactccttcacaaaggaacttcaaggacttnccatttcatttcattcaggttactttggcagtgtcctttgntgggccaggnactgtttgggcccntagtatactatncagtnaacagacagacaccgattgttttttatt

SEQ ID NO: 376067 - DNA, 432 bp, Homo Sapiens
ccatgcacgtgcaggggtctgaggtctgcatttgagcaaaaggcagcaggtgccagggaagggtttttcagcaggaaagtgcaaatgtgccaatttcacttaaaaacagatcccacttgggagaatgtgtgcaagatgcaagcgtggcagtgggaggtccggctggagcacttgtgagcttgggtgagagtggggtgtcatggcggacgtgactgtgggaagggctctgaagaggggtcggggacagtgaccagcaacaaggtggatggtgtggccggttactgagatggggaagcctggaagaggatcagatttaaaggggtaagtaagaaatgtggttgcagaggcagtaatttgaggtatctgtgtgacatccaaacagagatgtcagattggcagctgtgtgggtacatcttgctcaacacattaaat

SEQ ID NO: 376068 - DNA, 354 bp, Homo Sapiens
  misc_feature (337)..(337): n is a, c, g, or t
atattaagaagttactctgtgccaggaaggaactggagactaagatgcataggatacaccccctgcagagaaagacagcaaaatctcaagccaacatcagtcatcaagtgccacaagtgccattcaatcatttattcattcacattcacagcagtaaacagaacaaagatccaccatcacagagcttatattctagaagggaagacaggtacattactaaatatataatgttagatcagtactacaaagaaaaagtaagctggtgtaaaggctaaagaaggggtagttctatttcaggaaaaatgagaaggggaggaatatctcagggtggtccaangacagcctttcctaggg

SEQ ID NO: 376069 - DNA, 519 bp, Homo Sapiens
agaagatgacgccacatttgtgaaaaagatttcattagtgtacatcgtttattaggtctaccagctgcccattcttttgctcatctgtttaatttttaataaatatcaatgatctgagaggcattgggtagcactgaggatgcaatccgatgtgaacaagacttcaggagctctgctttcattaggcttacatttggttaatggagataaacttgaagcatataaaccaataaataaacaagaaaatatcagggagtgacaattgctattaaggaaagaaacagggtgataggatagagagggaggagagagacttcttcagtcagatgatcataaaatgcaagtatgattaagtcatggcctcaacttttaaggaatgatgggctcaccttgctttcattcttgccacctcctcaatgaaaatgaaagatgtttttgggaaactgatagctaattttctttttcttagaatatttgatttagataatatgtatttaaaataaagttatcacgtaaaat

SEQ ID NO: 376070 - DNA, 552 bp, Homo Sapiens
  misc_feature (19)..(19): n is a, c, g, or t
  misc_feature (36)..(36): n is a, c, g, or t
  misc_feature (51)..(51): n is a, c, g, or t
  misc_feature (64)..(64): n is a, c, g, or t
  misc_feature (69)..(69): n is a, c, g, or t
  misc_feature (81)..(81): n is a, c, g, or t
ctataactacaacttacangccacccactaatctangcccatcattgcccnaccccaataatangaaancctggctttacnggaaataatagaatcctagagcaacatttacccgccctccatgttaagtgagtaactagtattcctaaagttgtttgcccatacatatcaagttcttcctaacctttgaagcaaaccaaaacacttcaaaactcagggctcccagggctgctgctccagattcccagcattcagcatgcttcattatgtggagaaagacatttcaagacaagctgtatctatacaccttcagaaggaacaaagctctaagaaggtgggattatgttaacacatagtacatggtttagcgtttctccacatttcaaactcaaaatagctcaataatatgctgctacatgagcattgattctgaatgttcataatataaacttcaatttgaagcaacaatgttacacagttcagctgttattaccaacctactctgtaagttaaaatacaaataaaatattaattttattgagtaactaaaaa

SEQ ID NO: 376071 - DNA, 527 bp, Homo Sapiens
  misc_feature (305)..(316): n is a, c, g, or t
  misc_feature (444)..(444): n is a, c, g, or t
tcacagccgccctaaatacagccacccagaacccgctccccgagaccctcactatctcctgcagggtgtcacagagcctgccgctctgtcagactcacctttgtcttctctgtgagaaggaccaggctcctgatttttggctgatttttcagtcaagcccagatggaaaattctagaaagggaggaggcttcatttggatttttaatttctgctgcaatctcagaatcctgggtcccttttgggactaaagccccatctcctggcaggattttctatcaccggaatacagtagattttccctccnnnnnnnnnnnnccccagcaccttaactctcagcttcccagactttctccaatgacagagctgggtgggtggaggaggagaggggttgcaagaaagcttgccggctggggtgaggagactgtgtgtggagcaggcgtgangcgtgggccgcgtggggagagaatgcgaggctgccgtcaagcccagcgtccacacgaggaggcctgcgatggcgtctgaggga

SEQ ID NO: 376072 - DNA, 430 bp, Homo Sapiens
  misc_feature (12)..(12): n is a, c, g, or t
  misc_feature (24)..(24): n is a, c, g, or t
  misc_feature (109)..(109): n is a, c, g, or t
  misc_feature (119)..(119): n is a, c, g, or t
  misc_feature (126)..(126): n is a, c, g, or t
  misc_feature (145)..(145): n is a, c, g, or t
ctttgccggaanaagggacctgcnaaatatttgtcccctggccaccctgaaaaaggctgtttcccaccacgggctacaacatggcccgaaatccctatcacttcaaacntgtgctcaangggctgntggacaagggctcagcagntgaccggcaggggggcctcaggctccttcaccctgggcaagaagcaggcctccaagtccaagctcaaggtcaagaggcaacgacagcagaggtggcgctccgggcagcgcccctttggacagcacaggtcactactgggctccaaacaggggcacaagcggcttatcaaggggcttcgaagggtggccaagtgccactgcaattaatgaggcaggccaggcaagcagtcaggggtgccaagaacgccattggctcagtgcagtgggaataaaaggaacataactt

SEQ ID NO: 376073 - DNA, 396 bp, Homo Sapiens
  misc_feature (377)..(377): n is a, c, g, or t
ggacccatttcattttagtaacgtttctgttcctatagacagtttggataactagctcctactttttatcctttaaaaaactgtttttcccagtgaagttacgtataattatttacttcaagcgtaagtataccaaattactttagaaatgcaagacttttcttatacttcataaaatacattatgaaagtgaatcttgttggctgtgtacatttgactataataatttcaatgcatattatttctattgagagtaagttacagtttttggcaaaccgcgtttgatgagggctatctcctcttcctgtgcgtttctaaaacttgtgatgcaaacgctcccaccctttcctgggaacacagaaagcctgactcaggcngtgccgctattaaagcagc

SEQ ID NO: 376074 - DNA, 433 bp, Homo Sapiens
catctcataagatttcttgtttaaaaagggtttttttgctttaaaaataatttcaaaatgactgacatgggcaaaaacctaaaagttttaatggtattacttaaaaaaactctgtaaccctacctcatatttatgtcctttaaacctgatttccctatgacttttctgtatatccccttaattttagcccaaaccctattcacattcctcaaaatgttggcagactctttacacttccatgactgtatttattctcgcatactcaggagacctggcttccaaccctagatctacctctgatcatgtaaacagatcatcagctttaatgagcctttgttcctgtagctgtagcggaggaatttagctatttcttccctcatacaggaatgatagtcatgcaaacttggagcacttggctgggcgtggtggctca

SEQ ID NO: 376075 - DNA, 163 bp, Homo Sapiens
aactgtagtttgtttaagtcaccaagcagcatccaaaatcttaatgtgtttcatttgatgttgttagatcagagaagaaattggcataaaatcggttaatagtattgtcaaagaattgtgtattgtgtactcactgggaaaaaataaaatatattcacatttc

SEQ ID NO: 376076 - DNA, 477 bp, Homo Sapiens
  misc_feature (372)..(372): n is a, c, g, or t
  misc_feature (390)..(390): n is a, c, g, or t
  misc_feature (395)..(395): n is a, c, g, or t
  misc_feature (405)..(405): n is a, c, g, or t
  misc_feature (443)..(443): n is a, c, g, or t
  misc_feature (449)..(449): n is a, c, g, or t
ggtcacagcactcgagaacctcatcccactaaaaacaactattaaatacggcagctggaagaagacctgacgcttgctggtggaagtggccccagaaggctgcagctatgagcgattgtaacgaggtggaaggagggttccctggaattggaggggacgttgtgacccaagcatggatggtgtgggtagcaggatgtgaactgaggggctgataggtgtttgtggtgtgtgtgtggctggggttggccgggtgctgctttccacattgacttggcgcctgcagcggtgcggtccagttcttttgactgaagttctcgccagtcatgggacttcctattcctcctgtttcacggagctccatctccatctttntgctgatgtgttgagagntgccngcacgcaagncagtgggcaacagttaacgcctttggagttgcagtccntcgccnggttggagcagttttttggaacggcgtt

SEQ ID NO: 376077 - DNA, 509 bp, Homo Sapiens
  misc_feature (319)..(319): n is a, c, g, or t
  misc_feature (430)..(430): n is a, c, g, or t
  misc_feature (449)..(449): n is a, c, g, or t
atcactttgaatggaaaccagagcagtgacgatcaccagattgtcctctatgagtggtccctgggtcctgggagtgagggcaaacatgtggtcatgcagggagtacagacgccataccttcatttatctgcaatgcaggaaggagattatacatttcagctgaaggtgacagattcttcaaggcaacagtctactgctgtggtgactgtgattgtccagcctgaaaacaatagacctccagtggctgtggccggccctgataaagagctgatcttcccagtggaaagtgctaccctgggatgggagcagcagcagcgantgaccacggcattgtcttctaccactgggagcacgtcagaggccccagtgcagtgggagatgggaaaatattggacaaaggcaatagccactgttgactggtctccaggtngggggacctaccatttccnttttgacagtgaaagaccagcagggattgaggcagcacgttccaccttcatttgggtttt

SEQ ID NO: 376078 - DNA, 630 bp, Homo Sapiens
  misc_feature (15)..(15): n is a, c, g, or t
cacatgcacacacanacagatgcaattctacctttttctaacaccatctcttatctctcattattctgcctcttacttaccctattatggctcccaagaaagttcctgctttagtgttttgttccctctgccccagagagctccccttagtgatctcagttcaaatattatcttatcagtaagacaaacccttctcccatctgccttccctatcccctgtacctgacaatctatgagtttgcttctttatttctgtctatacttccccctccccagccccaaacatgcccatcacatgccctagaaggtaagtcccatgaaggcaggggctttgtcagttttgttcatttggtatttctggcatatatattctctaaatatttcttgaattaatgaactgaaaaatgtgtgttaaagttgctaagtgtaactgtatcatactttttttgtattttaaattttaaaataaaggctaatatatttagacaggatttccaaaaactttgtcttcaaattttaattttcttcctaatattcttcacattaaactatggactcataattttctggataaaatatccatgccttatggaaatgaaatatgaaattttattaaaatgctggtatatt

SEQ ID NO: 376079 - DNA, 672 bp, Homo Sapiens
  misc_feature (638)..(638): n is a, c, g, or t
aaatagaacgacagcagtcacaagtccatgacacccatgtccggacaagatcagatgatagtagcagaaatgaagtcataagcgcacagcaaatgtcccaaattgtttcttgtgaagtaagattaagagatcagtgcaaaggaacaacctgcaataggtacgaatgtcctgctggctgtttggatagtaaagctaaagttattggcagtgtacattatgaaatgcaatccagcatctgtagagctgcaattcattatggtataatagacaatgatggtggctgggtagatatcactagacaaggaagaaagcattatttcatcaagtccaatagaaatggtattcaaacaattggcaaatatcagtctgctaattccttcacagtctctaaagtaacagttcaggctgtgacttgtgaaacaactgtggaacagctctgtccatttcataagcctgcttcacattgcccaagagtatactgtcctcgtaactgtatgcaagcaaatccacattatgctcgtgtaattgggactcgagtttattctgatctgtccagtatctgcagagcgccagtacatgctgggagtgggttcgaaatcacggtggttatgttgatgtaatgcctgtgggccaaaagnaagacctacatgcttcttttcagaatggatcttc

SEQ ID NO: 376080 - DNA, 293 bp, Homo Sapiens
  misc_feature (264)..(264): n is a, c, g, or t
  misc_feature (276)..(276): n is a, c, g, or t
aatgttatctagaatttattgctaaatcattagaatagtcagagtttaagtcagtcccaaaatcaatatatgaaatcaactgcatttctgcattctagcacacagttagaaaatgcaaaattttaaaggacaccatttacaatatcaaagaagtttaaaaatacatcagaataaacatacaaaaaagagtaagaccttatggaaaagaataaaacttatgttaacattaaaaaaggctcaaataagtaggaaactgtatcatanataactcaaaancagagtgctgtatatgg

SEQ ID NO: 376081 - DNA, 393 bp, Homo Sapiens
  misc_feature (337)..(337): n is a, c, g, or t
gggcaaaatcataggtagagattagtccctaggactgcatcctcgtctcctaccctctcctattattttcttctctttactctccagaattctgataatataagtactggggccagcattcagcttatggttttctactcaagctgtcttgtctcttgtctctgtgtgttttttcgagtatgtcaacagagaagacttcaagtatggtgtggtataatagagaatatagctgatctttatccctagttgctgacacagcttcaaaaaatcttgggaatttcctgtgtgacaggagtatctttgttatggctaaatggaagtgacttatgggtggggncccctaggatagctttcagggtggggggactgggtccaccagaggggacccaaccc

SEQ ID NO: 376082 - DNA, 334 bp, Homo Sapiens
  misc_feature (80)..(80): n is a, c, g, or t
  misc_feature (225)..(225): n is a, c, g, or t
cacaccgtggtatgggatgaactggcccctcacgcctttccataacatcactaatcccatcgtgagggctctgcctcatngacttagtcattccctgaaggccccacctgttaatactgtcacagtggtgattaaacttcaacatgtgattctggcaggacgttcagatcatggcacttggcctcgtcctgctaacctgtggcaggggggcagatgaggatagancctatctggggcatcccagatgggtggggtctaggcctcgcttctggcagtcagtaatgcagggtcttgataagcctataagccgcagctgccagtggtcagggctgag

SEQ ID NO: 376083 - DNA, 506 bp, Homo Sapiens
  misc_feature (410)..(410): n is a, c, g, or t
  misc_feature (423)..(423): n is a, c, g, or t
  misc_feature (453)..(453): n is a, c, g, or t
  misc_feature (471)..(471): n is a, c, g, or t
  misc_feature (481)..(481): n is a, c, g, or t
  misc_feature (494)..(494): n is a, c, g, or t
atttaagtatactcagtgtttcaaagattgttgctgggaggcctaaatctgggagctagagtaacctggcacaaaatcagaattcactgtcctacatactaagctcagcagattcaactactttctcatcttccttctttgtatctacagacttaaaagctgtctggattttagttacttgattgaatttttgaagtatataaagtattcgtgttttatctcccaatttaatcccccattaggttatctgtcccgttttccttttgctcagttatatcctatgggactcacagataaacagaagtattttaccccttcttttacttttcaagaggggaaaattgtcagaaggatagtcaagtactaggaaatactccattttgtcttttgtttgttcacgttggcacttncacaccatatatnactttttttgggtggctccttccctggacngacttaactggacccttnatgggcgctngggggcaggctgnctacccgtaact

SEQ ID NO: 376084 - DNA, 525 bp, Homo Sapiens
  misc_feature (435)..(435): n is a, c, g, or t
  misc_feature (492)..(492): n is a, c, g, or t
  misc_feature (514)..(514): n is a, c, g, or t
ggcacagtatgaccatggtatatatacttaagcacaaatggcacatctctgagactaggccaaattcctaggaagaaatgagcagcaacaaaaatcctacattttcattaagtgctaagtatcgtctgcaactgattttcctgacagatctgcttcacatttctgtgtaagcaaattatgtttaaaagctgggctgccatccattatccttcccaatgccccaggcaaggctgatctcttccacatatcactcctcatcattaatgtttgtaactgcaagtaattctagcccatgcagtgacagggaagcaagatagaggcagagaactcaatgactgggcctgctttcttcaattaaaaggcaaggaggtttttccgaattctctttcttgcaggaaagggggtagggagttcaattcttcatctttttctccnggtgtttcttttccctctggccattatgctgaggaaagtaggagaacaggtaggaanggggctgtgtgtggagtggacnttttccctctt

SEQ ID NO: 376085 - DNA, 477 bp, Homo Sapiens
  misc_feature (428)..(428): n is a, c, g, or t
  misc_feature (456)..(456): n is a, c, g, or t
ttttttttacatttaagatatgatattaaatctttaattgaggtagaacatgtgtacagtaaatgcacagatcttaactgtgcaacttgatgaattcttacacattcatgtacctgggtgctcaccacccagatcaaaataatagaacatttccatcaccacataagcctccctgggtaccttcctagtcagaagcccccatcccttgaggtaaccactattctgacttctgtcacttgagagtcatctggcctgtttttgaccttcatataattgggaatcatgccttttttttcatcaattatggtggattataggctatggtaggtaatcccttttatggattttaccacaatttatttcatccattctcctaatgatgggggcatttggcttgtttgtcccttgggcagttatgaataaaggangctgtgggagattcttggtacaaaccantgggggggcaaaagttaaggg

SEQ ID NO: 376086 - DNA, 685 bp, Homo Sapiens
  misc_feature (300)..(300): n is a, c, g, or t
  misc_feature (576)..(576): n is a, c, g, or t
  misc_feature (592)..(593): n is a, c, g, or t
  misc_feature (643)..(643): n is a, c, g, or t
tgaacactagaaagcgctgtgagtgagctcacgcccggcacagctcacttttcaatggtggaattgaaagttgtgctttttagaaaagtggccaggctgcccgcagccccgcccacctcttggctgaatttgagtggaaaaccaggaaggaacaagcgccacgtcacgcatagcctgcaaatcgcccgcgtgaccctgagatggaggcctgaggtttgggtccaggggtgggctcttccccttcccacatcagggacccggggatgggatgtcggaagggtcaccagcctccagcctttnggagggatgggagctttgggtctgcagggctttgcagccacacagcgaggtcagttccgggggccagccgcgccattcatggtaatggtggcctcgccccattccatgtcatccatgtcacatgaggacgtgcagtctttccttgttccttttccttagtgggaattttgcctggggagaacctccacttgaataattgaaatttttttgcattgcctgttgggatttcctttacggacaatggggggaacgcggtgttttccccacctttttgtngggtaagaaagcagtnntgtttttgaggaaggcgagaaggcaaagccagggggcaggggctttgttnttggggaagctttccgttgaaaagccgttttcgacgttttag

SEQ ID NO: 376087 - DNA, 776 bp, Homo Sapiens
  misc_feature (733)..(733): n is a, c, g, or t
acacctgctctctgacacacagctctgggtgcacactcagagacagagttctggatcacgtgggcccagtgcagttcaaataaaaccagcctcagcggaatcctagaaaatgttagtcgtgagtccccagagccactgcattcatcccatatccttctgtgcgttcagatgctgtcccaggcgtgttcaccagccagtcctgatggaggtgcatgagtgactgggttgactgggacagggaaaggggaactggttttcagggaatttgggagagaatttgattacctgccttagggctttggtgtggacaatagaggcttattttcaagcagtcatggttcagactcctcccgcctgccttctgaccaacctctccccatcgttgccagtttgaaaggcaaaagcaaaacagacgtgtcagctgagccgagtcctcgcaggatttttgttgtgatctcaggactctgacaggcacgtgggtgacccgaggcttctctgaacactagaaagcgctgtgagtgagctcacgcccggcacagctcacttttcaatggtggaattgaaagttgtgctttttagaaaagtggccagggctgcccgcagccccgcccacctcttggctgaatttgagtgggaaaaccagggaaggaacaagcgccacgtcacgcattagcctgcaaatcgcccgcgtgaccctgagatgggaggcctgaggttttggggtccagggttnggctttttcccctttcccacatttaggggacccggggattgga

SEQ ID NO: 376088 - DNA, 521 bp, Homo Sapiens
  misc_feature (420)..(420): n is a, c, g, or t
  misc_feature (427)..(427): n is a, c, g, or t
  misc_feature (435)..(435): n is a, c, g, or t
  misc_feature (451)..(451): n is a, c, g, or t
  misc_feature (456)..(456): n is a, c, g, or t
  misc_feature (461)..(461): n is a, c, g, or t
  misc_feature (466)..(466): n is a, c, g, or t
ccctgatggtcccatccccactccagggatcacgtgacttggcaaaccaagatgggggatgatacccccagagcctggctccaaggcctcctgaagaggccatccttgcaacagaggaagggaaggcaggaaggccggttctgctcaaatgggaccccaggagaccaaagccctgagccgtgaatccagctcttccacttactactgtatggtgccaggcaaactgcacaacctggagtttttagtaaggttcctttgggatgcttgtcagcagcgaatacaatgtctgttcaacgtttgtcatcagctctcacctgggagaagccttgttactgtggggaaagggaaccaagtgaagggaacggacatccgattgagagcctgccatgttgccagggaccatttttaggtgtttttgcnttcctantttcatcntattcccacaaccacntaacnttatnttccnttttacagagaattcaagggacagggaccaagtttgaattggaaccccaagcaga

SEQ ID NO: 376089 - DNA, 364 bp, Homo Sapiens
gtatatttatacactggaatattattcagccccaaaataaccccacaatgaaggatttgatacatattacaaggtggatgaactttgaaaatattatgcctaagtgaaagaaatcagacacgaaagattacaaattttatgattcccatttatatgaaatgtcctagaatatgtaaattcatacagacagaaagcagattagtggttgccatggtctaggggagggaaggatggagagtgactgcttaatgagtacagggtctccttttagggagatgaaaatgttttggaactaacagtggtgatggttacacaacattgtgaatgtactaaatgccactgaattatacatttcaaaatggtt

SEQ ID NO: 376090 - DNA, 177 bp, Homo Sapiens
gcttttctcgagtcactctgtgtggtgcttgtgggagaagggagagggtgggagagcgttggtggatgtgttctgcatgttcctttctgtacagtaacttctgcatttactctgtttaggatggttccttcaccactatccctgtctgtagccagtaaatttctggaatattcaaag

SEQ ID NO: 376091 - DNA, 448 bp, Homo Sapiens
ataagatgaaagcttccctccgtggcaccgttaattgaacatgtgaaatgagaggaagatcgttcaaaaacattgcaaagcatgtctttctaccgaatgggcatttaaaaaattgccaccaatgaccacacactgcaactgaccctaagacaacctgaattaatttgagaacatgtggttcacacctaagtgcaaggagtatccaacatagtggtactttgctatctcacaaaagacagactgtcttctgggggttcagtggaaagacttctagaatttaaatcaagaggtgtgttgttacccttaactatgcagcctgcgcaagtcacctctttgccccgccacgatcctcatttctgaatgagaatgtggggctgtggttgtctcaagagtactttccagcttttcaaagtccataagtttcatggccctccagttattaaaactt

SEQ ID NO: 376092 - DNA, 388 bp, Homo Sapiens
  misc_feature (54)..(54): n is a, c, g, or t
  misc_feature (71)..(71): n is a, c, g, or t
ggaaaaaataaattttccctttttaatttccttaaattaaatgtgtcttcccanggatgccccagaaaatnggaaagttacataaatgcctaattaaaaacatgcctgacaagctgtgcccactagtcccgttgatcattctttaattcacatttcacagcaatttctaagaacatcaccacgtccttcattaactacatatcaattaaaatacctctgagaggcaggtacaataatgcactatatattatccttgaaaactgaaaggcccactttgctaactgctacacacagcacatagagacttagagagagaaggaaaaaaaataaagcctgcccttaaggatttcgcagacgatgaagaaagacattttttccaatgctgtac

SEQ ID NO: 376093 - DNA, 314 bp, Homo Sapiens
  misc_feature (261)..(261): n is a, c, g, or t
  misc_feature (283)..(283): n is a, c, g, or t
  misc_feature (302)..(302): n is a, c, g, or t
atgagccacagtgcctggtcttagctgtgtttttaattatgccatgcatcaacataacaccgggccatcttcctatcccttcctatcccatatgtttgatgaaaacatattttatgtgctaaattaggttaatttaccagagatttagcttagtgtttttaaactataggaccaatacccctatagaaccaatgtacagctgcacccaagggtaaaaaagaggtaggcaggggaaaacaaactttaaaactcttttgtatntggggtggaaccccttcccttntcctggccctcttatgggnttgttttacatt

SEQ ID NO: 376094 - DNA, 415 bp, Homo Sapiens
  misc_feature (24)..(24): n is a, c, g, or t
gggacctattagtaggtatggagncagattcctcccccaattagaaccttgacatgactacagccccggctgatgcttgactgccagcctttgggagagacccccaagtcagaggcatcccaggtaagttacaatgggatttctgagcacagaaactgaggtaataaatgtttgttattttaagctattaagttttaggataatgtgttaggcagcaataggtactagtacaatagaggactaaatagaaaaaaataatgctctaaatgctgaacaaattttatcttagaagatatcagaaggatcttcatctcagggttgagaagaaacaaatggagaaataaaatcagagagtaacaatttcttactaatctaaaatctccttttaaaatgaaatcactctattttcaaattc

SEQ ID NO: 376095 - DNA, 232 bp, Homo Sapiens
accacgcattcattcacagaaaagcagaatttcttaattgcagcaagaaagtcagtcatttttgcctgcctttctttggtattattaggtatcttcagactacagagagaatttgtggtaacatgttcgtgcttttcttcttaggttaatctttagccttgggatagatcctttgctaaatactctgatcccagttataatctgttctgcaacaaaactaaggccaaactgg

SEQ ID NO: 376096 - DNA, 481 bp, Homo Sapiens
agagttagcaggccttgccgaagagttccccagcacccacagaagagccaaagagacattccaaatatttagaggaaatgataaaccccaacaacttcaataaatattgtgatcttggataaataagtcttcccagacacgtttggagaagccttcaaagcaggtggtggttgcattgttgacattagtggtggaaaacaaagaggctgaaataccgccactgaggactaggatccagacaccagcacacacaatggcagaattcctcctagtcctaatagtacgagatcgaaaaggatagacaatggccaggaaacgatccacactaatacaggtgagaaagagcatgctcccatagatgttggtaaggaatgcagttccagagatcttgcagagggtgtcaccaaaaggccagtggcggttgaagttgtaaaatattttaaaaggtagtgtacagacaaaaagcaaatcagagacagct

SEQ ID NO: 376097 - DNA, 486 bp, Homo Sapiens
  misc_feature (314)..(346): n is a, c, g, or t
tataatcaccagcagtgtgaggtttaaaaaacttcgttgtttttacaccaaattaaaattttcatgtcaaacttcaaagccagaaagcgcctaaatacgtgtctggcaggtaaaagcctggaaaattacttaaaacaggaaagtgtcaataaaaaaacttgagcaacacccaacatattttttccttaaaatgtcacgttatccttcattttgggaaactaggttctataaaatatttatcctccctgttatactttggagcacagcacagccagaaaggggctgcatttgtgcccaggtcaggagcaaattgnnnnnnnnnnnnnnnnnnnnnnnnnnnnnnnnnctataaagcaaaaacatttattaaaacctgaattaatcctttttggagggaggagtagagatatataacctgaaaatacttattctttcttatcgaattttggagcctaatatagccaggagctgctgaatttgtgcccc

SEQ ID NO: 376098 - DNA, 440 bp, Homo Sapiens
  misc_feature (372)..(372): n is a, c, g, or t
  misc_feature (380)..(380): n is a, c, g, or t
  misc_feature (385)..(385): n is a, c, g, or t
  misc_feature (392)..(392): n is a, c, g, or t
  misc_feature (410)..(410): n is a, c, g, or t
  misc_feature (428)..(428): n is a, c, g, or t
gctgactacagcactgacatggttggctggaatttctttcttttaattgtggcatataggtttgtgacacaagaagtcatactttggtggctaagttttactaaggaaaataactgaaaagattaaaagtgagagctgaaaagagaaatgataatgcttccaaactgtagctgtcacagggcaatttctttatttataacatgaagcacaatggatttacagctctaggaacttagtactttggagcttttgcctctcacactgacaacataacaggatgtgattgccttctctggggattcagacaggctctgtcaatgtgggagcacaaaagggagattttccatataactttgtttaaaaacatgttcntaagtccntgttntagggcntaaggtttttaaggaggncctgggggggattaaaangccccacagtta

SEQ ID NO: 376099 - DNA, 249 bp, Homo Sapiens
cagtgaggaggagatggatatgctctctccaaagaccattccttccatccacaatgcttagattgatatttgcctcactgtgtggattattctaacagagttcctccggcttgccacttaaagttgctatttctgatgtccttggttcctaacagagggaagggggaatgctacagaattcctgaaagaaaaactgtttagaaagtctcccgcctttcactctcactgccagcatgtctgtgtctggaa

SEQ ID NO: 376100 - DNA, 495 bp, Homo Sapiens
  misc_feature (28)..(28): n is a, c, g, or t
  misc_feature (44)..(44): n is a, c, g, or t
tgtcccagctcctgtaccacccaagggnccatcaagaaaaaaantcctgctgccctgtgaaatccccatctcccctctccccaaacccctaacaggaagatgttctggagaaccccacatgcgggggtgtcaaactcctatcccttaagcagcagatctgaggcccaaagtgcaccagagaagccacaaacagccccgtggccagccagcacctgcagtcactggtccacgttcctctcattcagacaaggccttttctgtattttgtttgaagctgttcaaaaaagagcatgtgaaaccacttttaaaatccctccctccctttcctgcccaacgcacctttttttccctcccctgactgttccatcgcttaaaaatggcttaaccaatttgggttatttttagaaaaatgctggtatgttggctgacaacctatattctaagtttcaacctgatatggaaaagacagagtttataaacccctaggaaaaaaaa

SEQ ID NO: 376101 - DNA, 360 bp, Homo Sapiens
tgagaaagggaagggtgaataaaccagaaacgccctagagaagctcagggaaagtcattattgtagggtttactacagtcacattcttttatcttgcagcacaagttcttggcatagaataccaatgagctgaggcacattactaatttgccagatcgacatagcctctagggagaaaagcaaaaaagcattcctattaacttcagcattgggataatttgaatctctcttctaagacatcttgtctcttttttggttaattactgtggcaaaccttattttctctttaaattaagccatgagatgcctttaattcaactaggctgctactaaaatgtggttttcatgggaaggaattag

SEQ ID NO: 376102 - DNA, 253 bp, Homo Sapiens
  misc_feature (21)..(21): n is a, c, g, or t
tcacacacttccgtatccaantcagtcacaaatgttgctagtcttctacctttgtaagattttgaacatcaccactggtctaagccatcattctcttttctgagaaatattgaatgaaccttctaattggccttcatgctttctttcttgctttccttctgtgtaacaacttggaaaggaaagttccaaacctatcacagttaagcattaaaagtgtttgcttacataataaagaatgttggaaatttctcat

SEQ ID NO: 376103 - DNA, 778 bp, Homo Sapiens
  misc_feature (102)..(125): n is a, c, g, or t
gatttctttaagcataagaccatatggaaaaaggcctaagacaaaatctgatgggaactgaattccagtttttaatagagttataatccatagttttatttnnnnnnnnnnnnnnnnnnnnnnnntctttcctgcagagataagcaagccgttcagtgtggctgtggcttggcaggatttgtttgatctttgtttttcctgcagggccagtcttgtctttgtgtccccgaggactggtctgtttagttgtgcctgcctggaatcaaaaggcttagtcaggccccataattggtgatgactggcatactatatgcaaacttcacaatgccccttccagtggttgaaaggtccgcatacccatgctgtgtaagaactttagctctctgcaatgagacttaaattcagattcactctactccttattagttatctgatttttggaaacttaatctctttaaacctcagtttcatctctaaaatgggcataatagtttacctcatagagtttggggagaattgagtgaattaatgtgtgtgaggacactaagattcccatatagaaataggctcaatgaatagtagctgtttttatttctatgtaaagtgagtagcggtagttgatgggagctgttgaaacaggtaaacagcattctagcaatccttcgacttttgtgatagcaaaccataaaaacaattttagtggctgttttactaattaaaggacatccacaattcaatgtataacagaaaaagtaatgattaaagcttgtgaatctga

SEQ ID NO: 376104 - DNA, 457 bp, Homo Sapiens
ttaatggtggggttcaacactgagcatcattttctgtgatcaagtttctaactggcatgtgttttgatcatgagggtttaccatatcttgcccatacagacaaatgagagatctagtttcattttgttccctaaagaaagaacactctctaaaattaaatcatacctgtaaatttcttcagcatttgtttctgttcaatgaaattgagacccttaatgttgctttaatgtaaaattgaatattttgtctgtgatatactttaataatttaaagtaagtaatagttctaaagtcttcactgttgctactaagagaaaatagaattttaaaggtgatgataaagatgctataatgtcagttcactccagtccaatcaaatgtagtaagaaaaagtccttgaatagttctctagggacaatttctcacttgccattgacattaatctttggtgtattctc

SEQ ID NO: 376105 - DNA, 104 bp, Homo Sapiens
catccctttgtgtaaacctgttaataatgagcccatcactaatatccagtgtaaagtttaacacggtttgacagtaaataaatgtgaattttttcaagtagtta

SEQ ID NO: 376106 - DNA, 503 bp, Homo Sapiens
  misc_feature (465)..(465): n is a, c, g, or t
  misc_feature (475)..(475): n is a, c, g, or t
  misc_feature (492)..(492): n is a, c, g, or t
tccagaaattaacttgctactaagattcttgcaaactgatggcttaggacttcttttcatcatcatcttggccactcccctcatgtctcttcctatgctgagtctcttttcctggtccctgtatatctcttcgttgcttatctttaattctcatttggggatcactttcttcagtaactttctgagaagacaatccatggcatgtggcctgcactggttattctctgtttgcttctccagtcttgttctccgtctttttcttcttgtgctgtgcccctggaggctgacatgtctgtattctatcacctggggtacacatcttccagtagggactggccaatgcgaggcaatggtagggagatcagagggcagtgggaagagacttgaaggaatcactgaaggattatcagagatttacatttagggcaggtgggtgaatgaccatcacagctgctgaatttggangtgccgtctnctctggaaaatcagcanggccccgggaa

SEQ ID NO: 376107 - DNA, 512 bp, Homo Sapiens
  misc_feature (20)..(20): n is a, c, g, or t
  misc_feature (35)..(35): n is a, c, g, or t
  misc_feature (42)..(42): n is a, c, g, or t
  misc_feature (55)..(55): n is a, c, g, or t
  misc_feature (65)..(65): n is a, c, g, or t
  misc_feature (87)..(87): n is a, c, g, or t
  misc_feature (105)..(105): n is a, c, g, or t
  misc_feature (112)..(112): n is a, c, g, or t
  misc_feature (119)..(119): n is a, c, g, or t
  misc_feature (127)..(127): n is a, c, g, or t
  misc_feature (176)..(176): n is a, c, g, or t
aatcccagggattccataantgcccccttcccagnaaggggnaccccaaaatggncccccaggtnccctaagggaaaccctcctccnttatggaaggaattgatnactgatnaagtgtnaaagaaantgataagaattggggaaatcccccattttgtcacttgaatggaatattncattagggttataatcatcaaacgcatgctaaaatcttaggcaaaagggcaatgggtaactgaacattcacagtggcgccaaagcatgacttcacagtttacttactagtcatgagggcaaaaactaacttcacaatggagagttctggctgttaccaccttattcaaggaacaatacttaacatcactaacagtggaaaaaccagatattatgtgcccccttgtgtaacgaaaatgaggaacacaggtatcaaccacaaagtattcttgcccaaaatggataaccagaattgaatccagcctttagatatccttttcagtttacaggaaatcaaa

SEQ ID NO: 376108 - DNA, 252 bp, Homo Sapiens
  misc_feature (23)..(23): n is a, c, g, or t
  misc_feature (39)..(39): n is a, c, g, or t
  misc_feature (78)..(78): n is a, c, g, or t
  misc_feature (230)..(230): n is a, c, g, or t
atacaatatttctaagactcagnacaataaaaaaatgcnaaatacaaatgattttttatactgatgacatgtaatgancatattttggatatattgggtttacaatatttttaaaattaatttcacctgtttctttttattgtttttaatgtggctactagaaaacctcaaattataatcatgtttggctgtcactgtatttctaccggttagtgccgccccatatcatnaaaacagtaaagatatttatgg

SEQ ID NO: 376109 - DNA, 365 bp, Homo Sapiens
  misc_feature (21)..(21): n is a, c, g, or t
tatctaaggaacgtgggaccnacacactgggtccctggtgtgaaggcaaggcagggatccaaaaacaaacaggaattcaccaccctcgccttcagctcaacaaaggaaaggaaagtctctttgctttgccaatgcctgcataggtatctgttagtttatttctcttcctagagctggacctgagtgcctgtctttttaactgatggccatctacatcttttgaccctctgccttcttgactgtccatttttagctaatcaaaacccttcatgtcatatttggtagatgcgtgaccctcttttctctctgtgttttattcattaattccttcttaataaaatgagtatctgtaaacctgaaaaaaa

SEQ ID NO: 376110 - DNA, 583 bp, Homo Sapiens
  misc_feature (14)..(14): n is a, c, g, or t
  misc_feature (38)..(38): n is a, c, g, or t
  misc_feature (45)..(45): n is a, c, g, or t
  misc_feature (58)..(58): n is a, c, g, or t
  misc_feature (84)..(84): n is a, c, g, or t
  misc_feature (89)..(89): n is a, c, g, or t
  misc_feature (100)..(100): n is a, c, g, or t
  misc_feature (116)..(116): n is a, c, g, or t
caaagaatggaatnaccataagcatgccatggaaatangtgccanccctgaagatgtnattattgcaaagcaccgaaaaatttnaaaanttgagcttaanggaaaaatgagatggnagctctggcatccaagtataaaacaaacttttaatattcattccctcctgcactcttggaaattcaccttcagagagcccaaggtgaaacagggggaaaaaagttcaataattttccaaaccctaattataattcatcacaggtggttaaacaaggctgtgggtatttgttgctcaccacttgtttttttcttacagtggacatttaattttaattaaaaagagagttttttattaaatgatgcctagtgctatttttccttttccatgcagagagactcaatttttcaatttgccgatattataagataaaaaacactgcatacatgtttatgccttgtattttgatggggtgggaggctatcagttcatccacctttagggtctctatacttcccgagagagtcaatccagactccacagactgcctttccagatctccataattgagctagcatttacacttct

SEQ ID NO: 376111 - DNA, 447 bp, Homo Sapiens
  misc_feature (93)..(93): n is a, c, g, or t
ccaccacaccccaactgtcagtaagtacgaattatctcccatttacatttagaaaactgaggctcagcagtattttataacttaactccgaantccccgctgcctgccttgtccagtgacagaagtcgatttggtcccacgtggggagagctgtggaattcccaagcccagaccctgcattataacggctatttccagcacttctggagaggatgccaaatgcattcatcagcttttctgagattccttagggaagggagagtggagtgtgtagccctgctttgtgctttttttctctaacagagggttgtgagagagagaaccctgttgggcataaggaaatatgtttttagtacaggttctgccacttgctcataggtcatttcactttagcttggtttttcaattatagaaaaaaattattaagcttcattcctagaaaaaaaa

SEQ ID NO: 376112 - DNA, 431 bp, Homo Sapiens
  misc_feature (408)..(408): n is a, c, g, or t
tacagtttagttagggcaataaaatatatcctggacaattaactctagagtaagttaagtgtgagttgtctggcccattccccagtacataggtattcaataaatgtttctgggttagtgcaatacttaagaaatacaagcatgtgttttaggagtttaggggagaaattgctttgtttatggggaagagaggtttcagagaagttcttttggaaaaagaaaaggctagatactgactttccttaaatgccatgaaataatttcagagtcaggcatttctgactcttaagtcagaacccaattgttaagtcagaaattggggtagagaggatagtgtgagcattgattgctaaagtaggtgctttcacgtgtgttgatggttacttgtttgttaaatgaagtaattcntcaaactttaatgtgtccatacc

SEQ ID NO: 376113 - DNA, 155 bp, Homo Sapiens
aaaaatgagcattacaaaaaataccagtgaccatttctttccatccatgattactgaatacatcaccttctctcatgtaacaattcaagtggcacatggctacagactgaaaataaatggaccctggacacaagtgatgttggtataaaaagtac

SEQ ID NO: 376114 - DNA, 868 bp, Homo Sapiens
  misc_feature (246)..(246): n is a, c, g, or t
  misc_feature (259)..(260): n is a, c, g, or t
  misc_feature (263)..(263): n is a, c, g, or t
  misc_feature (265)..(265): n is a, c, g, or t
  misc_feature (267)..(267): n is a, c, g, or t
  misc_feature (269)..(269): n is a, c, g, or t
  misc_feature (283)..(283): n is a, c, g, or t
  misc_feature (288)..(288): n is a, c, g, or t
  misc_feature (299)..(299): n is a, c, g, or t
  misc_feature (302)..(302): n is a, c, g, or t
  misc_feature (312)..(312): n is a, c, g, or t
cctgatgaaggaatccggttaaaagctgggagaaatagctggaaagactggagtccgcagagggcatggaaggccatgtgattcaccgatgggtgccttgcagcagagatccaggtaccagatcccacatcgacaaggcagtgcttctggtccagattgatgataaatatgtgactgtaattgaaactggggtactagaacttggggctgaagtgtgagccagtgtttattataaagacatttctntttccctctcaannccnangnanttgggaaaagaganggggnacacgcagaanatncctgcaggtntcacttttgatcctatgtgggagcgactgaaaaatagaatgagcttggttaagcacctctcctttgcccttcaccctgactcctgtcactgtctccatccccaaataaagctgaaatatttttttaagttagctgccgagaaaacatttggcatgaaggataaagttctgttaaaatacatccttaaaaaaagtttttcctatgcattgcctatgctttaaatcaacaaactcttcatttctaaactatgatctcatatttttctaatttctttgccaaaaataattgccatgttttgtcatagaacatgaaattcatttaccttgatttttaagaacagaccagtgtagaaatgttccttttgacttatagcagtataaaagtttaatgtacagtgaaagagactatgaacagatatagatttatcttattccttgagcgctaaaaactttaataaaaaaaactgcactaattttttacagcaatgcactaaagtctgagatttctcagaacatttatttatatataaaaataaaataccattatttaaattgca

SEQ ID NO: 376115 - DNA, 683 bp, Homo Sapiens
  misc_feature (59)..(83): n is a, c, g, or t
cgggtggtgtgtctcaggacaaaaggaggctcttctcattcagctaaattcacatttgnnnnnnnnnnnnnnnnnnnnnnnnnatatgctcctgctattattttggtaatgctctgatgcaacattgcaactttatgaaatatttgtatgaaaacaaaaagactgcaaaaaatacactttcaaaagaaaccattcattgcatgtttattatgcaagtttaaatgaacaaagaaaaccttcagaaacaagttgatcaacgtgagagaaatttcatgataattattcatagtaataaagtgtcgtgggcttaattgtatatctggagccagtgtcatccaccaacaatgtgatacaatatgaacttgacagtagttttgggttttgcttcattctttcagccacctgtgatccgttttgttggattaagggacttcttgttcagggccttttttaatatcaaaggctgaagcaatatccattcagggattttcatcagttgcgtcacaaaacacggatgataatatacatcactccattttttccattttgagtccttttaaatgtaatgctaacctttacaattaaaaagtcagattcagaatggaaacaaggtcattttgcaaacattggagctcttttattacaagtctgcttgttaattttagaactgtaaaaccgctctg

SEQ ID NO: 376116 - DNA, 432 bp, Homo Sapiens
  misc_feature (23)..(23): n is a, c, g, or t
  misc_feature (210)..(210): n is a, c, g, or t
  misc_feature (220)..(220): n is a, c, g, or t
cgtggggccctaaatggtaaaancccgggagccccagtgtccacccccaccccaacaaggtgaataccaatatgaaacctgaaccagtaagttttggggttttggccccaatccttccagcccaccctgtgatccagttttgttgaattaaggaccttccttgtccaggcccattttttaatatccaaaagctgaagcaatatcccattncagggatttncatcagttgcgtcacaaaacacggatgataatatacatcactccattttttccattttgagtccttttaaatgtaatgctaacctttacaattaaaaagtcagattcagaatggaaacaaggtcattttgcaaacattggagctcttttattacaagtctgcttgttaattttagaactgtaaaaccgctctgattaaactatttaactaac

SEQ ID NO: 376117 - DNA, 446 bp, Homo Sapiens
aataatccatagtaaataaagtgcccgtgggccttaattggtaataatccgggagcccagtgtccatcccacccaacaatgtgaatacaatatgaaacttggacagtagttttgggttttgcctcattcctttccagcccacctgtgatcagttttgttgattaaggacttcttgtcaggcccattttttaatatcaaagctgaagcaatatccattcagggatttcatcagttgcgtcacaaaacacggatgataatatacatcactccattttttccattttgagtccttttaaatgtaatgctaacctttacaattaaaaagtcagattcagaatggaaacaaggtcattttgcaaacattggagctcttttattacaagtctgcttgttaattttagaactgtaaaaccgctctgattaaactatttaactaacaaaaaaaa

SEQ ID NO: 376118 - DNA, 405 bp, Homo Sapiens
  misc_feature (42)..(42): n is a, c, g, or t
ccttaaaaataagccctgtgtcccacatatcccagtaataancctggtgggggctgtcccagtccctggtggaattctgggtgggcctaaacagtctgcaactttggaaatttactgaatggatttctttctgtgtaattggaactccaccatgtaactgtttttgtggtaccattatacagcttttgcccaagacaactaagccgccctatagaatgagtgaattgttttccttcaatagctgtgcaatactgtctaataattgagacttttagaacctaaaaattgtcagggtggttcttttgggctgggaattcatcaggaactgggtctgtgggaactaattctcgggcttcctatggccattgatctcctgttacggttcctccgcaaacataacatgag

SEQ ID NO: 376119 - DNA, 362 bp, Homo Sapiens
ccctctatcgtccaggcttggagtcagtggcaccatcacgactgactgcacctcctgcgccccgtgatcttcccacctcagtgccctgagtaactgggaccacagcttcccatgggtggccagccgaatgcattatgggagaaagcaggtctcgtggataatatttctgaagatcggagcaggttgtcaggtccacgtcggccatgactgcagcacgctccggaggcagcagggggcaccctggagttcgcatcctccttcaggcccgcggcatctcccctggctccaccatccccaggtgtctcaggttggacgcacggtagttcgctatggccatttctgattaaagacagaacaaatgg

SEQ ID NO: 376120 - DNA, 288 bp, Homo Sapiens
gctgcacttgaacactgattgtccatttacagccctcagcaatgtgccttctaaatggcatgacatatgtagatgtgctgcagcgcttgttaatggtcacaataaatgccacttcaccaaggaagtctcagatgaacaattatgaacatccaaattttattggggggcaataatcaactgaattgcaaaatttgggggaaaatggcactatccgtgtacgaatcgaatacaaatcaaagatttgtcacatccctaataaaaacaagatggagatgtctctgcaaccat

SEQ ID NO: 376121 - DNA, 456 bp, Homo Sapiens
  misc_feature (380)..(380): n is a, c, g, or t
  misc_feature (417)..(417): n is a, c, g, or t
attctagattgggttgaaataacccccttggtatactttcactcccttcatcacctgctccaattggctggatgtttgtggcctctcaaacacaacaaaatgaaatcttttcttgaatgaaatcatagccataaaacaacgcaaaggaaaaaaatgacaaaactgcctgccatcactatgccccctacacactcatgtagtaaagttctgagttctatcagggagctcgtgtcccagggcattcccactgcccagtgatcttgccacactccagcaacttgatcatggccattatcatcactaatagtagcatcttcctcctcattattacagcatctatatcaggaggggaaggggggcttctgagtgaggccttgggnattatatccaaggacaccacctttttggcttgagganaaggggttgtctccaactttgcctctgtccgggggttca

SEQ ID NO: 376122 - DNA, 602 bp, Homo Sapiens
  misc_feature (505)..(505): n is a, c, g, or t
ctcctggcgactggacctcagggcacgtaggggcgccacttccctgcaatcatatcaagctcgttgatgttgaggaactgaactactgggcctgcaaaggagagggagagatatgtgtgagaggaccaaatgtgttcaaaggctacttgaaagatccagacaggacgaaggaggccctggacagcgatggctggcttcacactggagacatcggaaaatggctgccggcagaaactcttaaaattattgatcggaaaaagcatatatttaaacttgctcagggagaatatgttgcacccgagaagattgagaacatctacatccggagccaacctgtggcgcaaatctatgtccatggggacagcttgaaaggcctttttggtaggcattgttgttgcctgaccctgtaagttattgccctcctgggccccaggaaggagagggatttgaagggaacatttgcagatctctgcacaaattaagggtctgaaggaaaggccttttnggaagatatggtgaggttagggaaaggaaagtggattccttcttttgagcaggttaaagccttcacttccttcttgacatgttctcagttcaaatgg

SEQ ID NO: 376123 - DNA, 430 bp, Homo Sapiens
  misc_feature (12)..(12): n is a, c, g, or t
gccaaaagccgnaccaaggaaaagagcccattaaattaagaccaatttccaaaagtccaaccgattgtgaaccattaatgtccacaatagatcaaaccctaattatccacagccctaggtaagagcccatcagtattaatcggaaaatcctaataggaaactattatcaagaaattaggcccaaattgaatgccagtgaactttttatcttggcattcctctatttttttgtgatgtcccctggcattggcaggtgtgaccctaacagtcgattcaaggccaagtggtcagtttgtcagccttttttaagggatttctttttatttttaggaattccaaacagagttaacctaaactgtcattgccaaaagatcagtcttaaactttcttagcacctgtacctgtttaatgtgatcagctatcagtgagg

SEQ ID NO: 376124 - DNA, 408 bp, Homo Sapiens
  misc_feature (60)..(60): n is a, c, g, or t
  misc_feature (96)..(96): n is a, c, g, or t
  misc_feature (356)..(356): n is a, c, g, or t
agaggttaagagattccaccaatattgacctatacatatattgtaaaaataataaattancccaggctgatgtttgaatttgcccttacttccccnggccacctcgttgtccctattttataagctggggagttaactagcttaacaaaagatgcttagcttttgtaaaagaacaagtgtgtcattttacaaagacactccaaatgatagttacttgattttctcgagacctttaactatggtgatgaataacaggacttgctttcaagccttaataaatgtaaaatgccttttaatgaagatacagctgagtgttttcctcatgaatctgaaccaattaccaatttgtgttccangtcttgattggtattgactgattcaaataaagttggtttattttcaaatatt

SEQ ID NO: 376125 - DNA, 552 bp, Homo Sapiens
aatgaaggatacagtactgtgttgtgggtgagtgttgctattgcccagcattaatatttgggtgtgtatgtttgaggctatgaaacacgcaggagtgtttttgtgctattaattttaagagaaagcagctttttcttaaaattcactgttgagaaacttgcatgtctggaggcggtgtcctctccgccctgtcgggtcctggatgagtacgagttatggtcacggtcacagcctgatctcttatgtgttcatagccattcgctctcccatcagaactgtttgtcctgaatgtgttcctctagttctagaaaatgaccactaatttaaaaaactcggttgtgaggtttgcccagaggcacttgttccagaatttcccctcctgcttcagccatgtccttgttcacttgggcattctaagctaaagttttagcttcccaattcgtgatgtggctagggccaaggattcggggagctgtttgccagccttcgttcaaatatgggaaggaggaaacaacctgcggttcaaaaggggagtgattttgtttaagtggg

SEQ ID NO: 376126 - DNA, 501 bp, Homo Sapiens
  misc_feature (13)..(13): n is a, c, g, or t
  misc_feature (23)..(23): n is a, c, g, or t
  misc_feature (68)..(68): n is a, c, g, or t
aacaatctcccanatgagaacangtatgtcactataacgtacccaacgaagtgcaaacacaccttatnaagcaggtgcctaaactgaggtcactgctgaaaaatggaagttttggcagcactgagaacaaaagcttcttcctaggtgcaatttcaagctaagcagtaagaatcatgtgtaagaaattttcccaggcaggataaaacttcgggatgttttggtgacattgtacagaagagggcttctattctgttccaccttcatttcgcagatcatgcagaaatcttactccttacttaaagattttttggaataaaatcaaacatttttactaaaaaataatattgtgattatttcaatataaaaaagaaatatgtgaactttgccctccttgaagccagacctaacaatgaattatgaaaactgtgcagaaatatctagcagattcatttggctcaaatttccctctgtgcctctgcacctctaaaatgcatttctatg

SEQ ID NO: 376127 - DNA, 461 bp, Homo Sapiens
  misc_feature (17)..(17): n is a, c, g, or t
aaacccccgcccaatancctgtttctgtaacccccaatgccaaaagctacgcactgtgaactgatgtggaatcctatttgccccctcgcctacaaaagggtccttcaagtccttgccccctcaagtgtgtgggacccccatccgtgttaccaaatggggcttggggacctgaggctcaagactgcttgctgggaaatgtaacccctttgttctggacaggtagaaggagaggagaatggtcatcccaggcctaatgtaaagtttctgcaacccaacccaattcccagactcattttggtcatgatcaatacaggggtcaacaaaattttctgtaaagggcgagctagtaaatagatttgctgtgtgtactatgctgtctctgttgcaaccaactcggccattgtaaccttgacaacatgcaaatgatgggcgtgactgcatgccaataaaactttatttag

SEQ ID NO: 376128 - DNA, 282 bp, Homo Sapiens
aacatagtgaacatcctattatgcctagatagaagcattctctatttgaatgttgtttcctgtatcctgtactttctttaagattctagctcaacaagttttaacctgtatttctcttacagctactggaattcagtacgtgaggacttggacttggtgggcacagaatgcatctttttatatcattaaatccaccagaacatctagcatggtcatttgcctaaaacaaagcctctggaaatttagtcaagttgagatgtaaaataaaagattactgaacag

SEQ ID NO: 376129 - DNA, 374 bp, Homo Sapiens
  misc_feature (25)..(25): n is a, c, g, or t
  misc_feature (45)..(45): n is a, c, g, or t
  misc_feature (50)..(50): n is a, c, g, or t
  misc_feature (65)..(65): n is a, c, g, or t
  misc_feature (75)..(75): n is a, c, g, or t
  misc_feature (124)..(124): n is a, c, g, or t
cccaaaacaaagcccaacccatagnaaagggacaggaaaaaaacnggtanaaggggataaaacangggggtcccngtaaaggttgcctacccataaataaagcctgccaggttggaagttaccnctgggtgagtcagtgagtaaatgatgagtgaatgtgaggcccttggacatcactgtaccctactgtagactttataaacactgtacacttaggttaccctaaatctattttaaaattgttttctttcttcaataataaattacccttagcttactgtaacatttttacttgacaaaccttttaatttttaaaattttctgactgttataataatacttagcctgaaatacaaatgaattgtcctaagtgt

SEQ ID NO: 376130 - DNA, 381 bp, Homo Sapiens
tgtaatatggtaccccagccccacctccctaccccatcattattttttcttaaaggaaataagcttgccacttagaatttaaactttacaattaagataaactgatttagagaataaatgtagacacttgaaacagtcacaaggatccccaaaccagattataatctgactgaaaatattagcatatcagagatagaaaaagagatgtacctaagaagggaggacaatcatcagtggacacttactgtccaggaaaaaagaacctatgtgtacaccttgatgctctgaagctatcaaattatttgaaatttagaatccaccaattaattcctcttgctctagattcaagtttcaaaaacaaccttttggctgtaatttggc

SEQ ID NO: 376131 - DNA, 461 bp, Homo Sapiens
  misc_feature (24)..(24): n is a, c, g, or t
  misc_feature (30)..(30): n is a, c, g, or t
  misc_feature (38)..(38): n is a, c, g, or t
  misc_feature (45)..(45): n is a, c, g, or t
  misc_feature (52)..(52): n is a, c, g, or t
  misc_feature (61)..(61): n is a, c, g, or t
  misc_feature (66)..(66): n is a, c, g, or t
  misc_feature (129)..(129): n is a, c, g, or t
  misc_feature (425)..(425): n is a, c, g, or t
ggggtgaattccaagaaacccaanagaganttaaaaanggtggcnaaggaangcccacaanttccngttccagatccctctggaaataatggggtgccaagacccccaattttgtgtggaacccttccncatggataaaaatattattcctggatacttaggagatctgtgaccatcagcatctttataagaaagtgacctacaaaagctaccccaattttcaaatttgaaagttcagtggggagaaagtagtatggataatagtaatggttaccatagttaagattatccaattttcataatttctataaaaactttcaatgtgtaatccttatttgaaatagtatcaaaggaactataaaagaattttgttgttaacataactccgctctccagaaaatcaattagtgcaaatcatttgaagnaaaaaatcagaaccatttcactgagcaagtcttcag

SEQ ID NO: 376132 - DNA, 462 bp, Homo Sapiens
  misc_feature (31)..(31): n is a, c, g, or t
accagctatgaccatgattccgaatttaatncggactccactataggggaaatttggcccctcggagcccaagaattcggcacggaggatctgaaagtgggttttttctttccttgatggcagtagaaagacctcattttcataacataactactcttgatactttctttaaaaacactttttattaaagattctatcatgaggtatttggctgggagctgggagctaaagcgctcatgtcctggctcttcagtgaatttaactgtgtgaccttgggcaagtcacttaacctctctgtgcttcagtctccctgtcttgtaaaatgggagtaatacctacctcacagggttgttgtggggattaattagagataatgtctgtaaagcatttaaggttcttgaagaaggcactatataaatacaaaataatatctattaaagttggtttatttgtgaaaaaaaa

SEQ ID NO: 376133 - DNA, 832 bp, Homo Sapiens
  misc_feature (518)..(518): n is a, c, g, or t
  misc_feature (813)..(813): n is a, c, g, or t
tgacttgtaacagacctcaatcaaagccaccagcattgcccaacccaaggcccccgacaaggcatgtagaatactcccagcaacgttgcctcagcactgcagggcactgggtcttttccctaaagaatgtatatgagaagaggttattaggaaggcaaactggtgaatagaagagaacagcaatgtcacatagcattatcacgggaacaacctagtcacacagaatgcatttgaatttgagaaacaatggattttctcttagatggtcccattttcataacagctaccatgaaacaacataaaatttagcttaagattttggtggactcaatcgactacctgcagggaataaacttctatttattcatttcttaaacatttccctggctatgtcagttgcagtgataaattgataaatagttatattccattaccgtgggaaaaattgaaggtacaagacagtttcttcatcctataaataatctggtaaagctgacagcgaacagggctaaaataanccatacgtgtgattgtagaagcaagttttaaatgttgaccatgttactggcttagtagagtcataaatggaggactgaccacatttccaatccctcaaagtactaagatggctaagataaaccttcaggaagttatcctgcaatatgttggctggtgaaggttccagtacattctcactctccaagtaggctttggacatgtttagaattgcagtgtaccatttttgatctcttggtctccaaaattcatcccctcagtgtactctcatccactagactacatctcacaacaaantttgccattcaatacaaac

SEQ ID NO: 376134 - DNA, 428 bp, Homo Sapiens
ttttttttgggcttgatagatctacctttagttttgtcattttccagtattcacaatcctttcaaagtttcctttaaaggggaaaaaacagaggcttgtaagaaatatgctcaaagaggttctaggacttacagacatcccattccagtataagatacaaaaggcaaaatgtttcctttacccatgatccaggctagctccaaggaatcctaaaaacgatgttttaatttggaatctgggatggggcgttttgtggattaacatgtgttctgacacaaggactactctacttccttaagaaacatgaggcaaaaatgctttgctcaacaacctagttatgtatggtacaaatgggtgatcatgggtccttactgataaaaaacttataaggcaatttctgtttacaaaatcgattcttggctaacggg

SEQ ID NO: 376135 - DNA, 435 bp, Homo Sapiens
  misc_feature (397)..(397): n is a, c, g, or t
acccctccaaactgtgtagacatagtctaaaatgtttggagtgtaatgaagtcttccaggacgagacatcactggctacacatttccagcaggctgcagatacgagtggacaacaaatgaagaaacacccctgccgccagtgtgacaagtctttcagctcgtcccacagcctgtgccggcacaaccggatcaagcacaaaggcatcaggaaagtgtacgcctgctcgcactgcccagactccagacgtacctttaccaaacgtttgatgctggagaagcacgtccagctgatgcatggcatcaaggaccctgacctgaaagaaatgacagatgccaccaatgagggagggaaacaggaaataaaaggaaggacattaaggtccccagttcccaagcngaagttgggaaggaaccatttttggagtttcagggctt

SEQ ID NO: 376136 - DNA, 405 bp, Homo Sapiens
ctgatggttgccgctgactctactcctccagcctttccacttcatacctcctactaaatccctctgatcttggcagatctagagagttttctgtttcctgtattgaaccgtgactgacacaggaaacaagcctgcttggttgcctcatgcctgaggtctggattagtgtgggcatggagtagtgtagactctgcaggtgtttagatggctgtcctcagctgtgggtagttttggggtgggggaatgagtccaatccaggagaggtcgtcaacaatccccaaccaggagggctgaaggggacaaacattctgggatgggctctcatggcttgcctcttttcaccatgagggcctcactgcttcttttttctgacttttcaaaccaaagggaggggaaaacagcaac

SEQ ID NO: 376137 - DNA, 603 bp, Homo Sapiens
acgctcttatatctggacattcactccccagtaggcactaaactacttaaggtaagatggtgagttttcacttttcagcctgagggttgaatgacaagttactggggaaagtcagctttgttcagtgcaagcggagagctgggtgggcattgcacatctcctctgcaacattacagtcatttcctctgcccaccttgctgtctaaaccccaccttagaaccctgtacttgcagatattactcaggagctgattccttgactcttcaattgttcctgagcagagataagactgaatatatgccacttaagtaatttttgtccagagggaattgtttggtaactgttaacattgctcacaaatacatggtaccgatctctgcaggaggagtacacattcccactctgtggcaggtggttgtgaccatatgactggcactcagcagtgaaatgtgagtggaaacaactgcccttggtttttagtccctctaccaccatgtcagcaacgatacagagaagtgactcatcagcccagatcccggagcaaagatcatgtgcatgcagtggggcacaggaaaccaggatggacttgttgctaaaactgtt

SEQ ID NO: 376138 - DNA, 485 bp, Homo Sapiens
  misc_feature (35)..(35): n is a, c, g, or t
tgccggggtacgacggcgaagatgtgccggccaangggccaggcggtgtgttgccagcccaccggaatagaataattaaatatgattaggaacacacagagcgagccatgcttttgcctgactgaaaggccccactagcataattactgttttccttaccagctcactgtctgtacacatttcaaagcgtggttggtgttagactgctgcgtaaacatcaataaaatcccaagtgccagatcatcagcatcctcaggcaaaatggctttttgtttctagtgttttcatgctttgaaagatgcatttcagggctgcaaacactaggaagaaggatctccatgccttggactaatcttcgggtttataatgagttaacatcccccccaagtgaacatttattatgaaggctaattaattgctttccagttataggaactctttgcattcaaagaaagtaggattcacaaccaaagaatatactgttt

SEQ ID NO: 376139 - DNA, 442 bp, Homo Sapiens
gggcagtatgggaggcaccagtgtgccttgctcaccccattagtgtcatcctgccatcttctgtgtccccttggccctggcacacacccatgtggcaaacacgggccgtgacggcccctgaacagcttcgaggcgggtgggcttctggagccctcttggctctgaggacagccacagtggggtcagacgtcagggattggtgcagccccacgtcaggggtgattgtcttgactttctctccatttgagttctggggtgggtggctcccttcccccttgcttacaggtgctgtcctgggcacaggaggtacgcgcctggctctgcactgttctcttccctctgctgcaaagcccagttaaggaaatgtctccaaggtccaaagagataggatggtctggggccccaactgtttggaagggaacagccagggaagaaccaactt

SEQ ID NO: 376140 - DNA, 475 bp, Homo Sapiens
  misc_feature (335)..(335): n is a, c, g, or t
  misc_feature (384)..(384): n is a, c, g, or t
  misc_feature (404)..(404): n is a, c, g, or t
gggcccctggaccgggagcagatcagtgaataccaagtcctgatcacggcctcagatagtggctcacccccacttagcacccgaagacaatcactgtgtcagttgctgatgtgaatgacaatacaccaaactttcctcaaccccagcaggaacttttcgttgctgaaaacaatggccctggggcctctctaggccgagtgtttgcccaggaccccgacctggggaagaatggccttgtctcttatgagctgttggatgttatctctgaagggccatcagcctctagcttgctggcagtgggaatcatccagtggggccatcactgccaaaacttncctttggactttgaggcagctcagggggtttcatttccaagtagaaggncgggatggttggcattcctnccagaagtggcaacagtggactattaaactttgttttgttggtaggatagggattgaacatttattccggt

SEQ ID NO: 376141 - DNA, 654 bp, Homo Sapiens
  misc_feature (209)..(385): n is a, c, g, or t
  misc_feature (599)..(599): n is a, c, g, or t
  misc_feature (621)..(621): n is a, c, g, or t
taaatttaattcttaaatactgtttcagagttctaaaaaggcagttttttaaaaaacttaagttgataaaaactgtaagaataatttagcagaaatagaaccagaatgtagaagagtagtcatgtaacagcagtaataacatacttcagcttccatataggaatagaagtggtagagccaaaagtgatttaggaaaagttataaggtannnnnnnnnnnnnnnnnnnnnnnnnnnnnnnnnnnnnnnnnnnnnnnnnnnnnnnnnnnnnnnnnnnnnnnnnnnnnnnnnnnnnnnnnnnnnnnnnnnnnnnnnnnnnnnnnnnnnnnnnnnnnnnnnnnnnnnnnnnnnnnnnnnnnnnnnnnnnnnnnnnnnnnnnnnnnnnnnaacattgagtccacttaacacttaggtgttagaagacctaactttctgtaacaattaaccttatactttgtttgtcatcgaatatttgttgaatgcatgtcaggtaatggtcttgattgtgatagcttcaaggtgggaacatactgtaatctccagatgctagggaagttagtctaataattcactgcagaaaattggattaagtgggcgtccntttaattaagagtgtggggtcntaaacttaaggtcttcatatagtgacagggtcc

SEQ ID NO: 376142 - DNA, 452 bp, Homo Sapiens
cccgaattatgaaataaatgacaagcattttctaattaactctctatgtctttgctcttgtcattccttctacatggaatgcccttttctcagacctcttctatgggaatctgatcggtcatccaagatatatctcaaatgtcacttcctccaagaagcctatccttttaccccagtggtttataatctctcccttctttgaaacattataacacatggtttaatcctttcttgaaattgttttaccataaattatatactcttacaaatacatataatttgtccatccttcaccacacctctcccctgttcagacagtaaggctccttgagggtaggggcctatgtatcacttacctacataaggctttgtgggtgttttgtacataatagggctggcattaaaaatgtattttaaaggattactctggtttacaactattacaaaaaacg

SEQ ID NO: 376143 - DNA, 381 bp, Homo Sapiens
aactgtgagaaatttccaagcctttaccataggcctgatgagatatgaagtattcaccttacaatgcctgcatgcccgaagcctaccccaaataattgtgatggagaagtgagaaagtctctgtattaaagtcaggccactttaggcctgattacagcttagtaattcccattttatctgtcaagaagcacaaatatagtaaagtttgttagctttttttgctgacaaagtgccaagatgcagaaaggacactccatacccctcatttctacaaatgtacttaatggttgggttcaccttcaggctatacagaaacagcatggccatcaccagtgggggagaacccaatacctgccatgtcatttggcatgtctttttttg

SEQ ID NO: 376144 - DNA, 413 bp, Homo Sapiens
  misc_feature (367)..(367): n is a, c, g, or t
  misc_feature (397)..(397): n is a, c, g, or t
cctcagtgggctgctggacccatctttcccaagccttgccattatctctgtgagggaggccaggtagccgagggatcaggatgcaggctgctgtacccgctctgcctcaagcatcccccacacagggctctggttttcactcgcttcgtcctagatagtttaaatgggaatcggatcccctggttgagagctaagacaaccacctaccagtgcccatgtcccttccagctcaccttgagcagcctcagatcatctctgtcactctggaagggacaccccagccagggacggaatgcctggtcttgagcaacctcccactgctggagtgcgagtgggaatcagagcctcctgaagcctctgggaactnctcctgtggccaccaccaaaggatgaggantttgagttgccaattt

SEQ ID NO: 376145 - DNA, 283 bp, Homo Sapiens
  misc_feature (133)..(133): n is a, c, g, or t
  misc_feature (185)..(185): n is a, c, g, or t
gaatttttaagtttttatttaagaaataaacattgtaaaacatcattataaaacccccaactattgcaagttctagagaaatttaaaactagaacagaaatttaggggactagaaagagcagccaatggcacnaagtctttacaattaattaaaaaaataaatcattctgaagatactgcatttnctctctcacaagcagcctcctgaggtaggtaaccttgtttactgatggggaacaaggcagtgttctttaccaaatctcagggcgggtagcctgcaagc

SEQ ID NO: 376146 - DNA, 442 bp, Homo Sapiens
  misc_feature (396)..(396): n is a, c, g, or t
  misc_feature (429)..(429): n is a, c, g, or t
tttttctcttctccctttccttctggaatgccagttagatatgtgttagattttcttactctatgttgcatgtcgcccaactcttcattcatttgtcctgcattctgcataatttcttcagctctaccttgtactttattcgttctctgttcaggtcaacctgatctgaggttaaaccatttatagagttttgactgtcggtgactgtgatttccatttcttggagtttgatttggttcttcgtcatttgattttcattttctgtaatctctattcctcttaatttcatcatttatttctttaaacatacttaaaattttatttatgtatttggctatttccactgactgagggtgaaaatcttcaccagtttgattttgttgctgtttgctgccntgcaggttaggagtgacttgtggatgtggacangtgtgtgttttga

SEQ ID NO: 376147 - DNA, 447 bp, Homo Sapiens
  misc_feature (357)..(357): n is a, c, g, or t
  misc_feature (375)..(375): n is a, c, g, or t
  misc_feature (380)..(380): n is a, c, g, or t
  misc_feature (430)..(430): n is a, c, g, or t
ttttttttatagacagggtctcattgtcttgcccaggctagaatttgactatttcattgctataatttccttaaaaatgcaaaagagtacatcacagcagagtatagccaatcactcattagacaaacagtaaacatactggacacggtttcaggcatgaaggatacagcagttaattaactaaaggaacagagtccctgcattcctgaagcataggatggggaaacagtaatgcagattaatacctggggccaaaacccactgaactcaccccagctgaaaacactgaaggatactgggtaaggataaaaatatttttaaatctttctaaatggcattgttcaaggaaaatagganttattcaggaaggcccantaccntgtggaagggcattaggccatgttggtaagggacaacagggttttccctntgcgggtttttgggggg

SEQ ID NO: 376148 - DNA, 404 bp, Homo Sapiens
  misc_feature (349)..(349): n is a, c, g, or t
atgagtacaagtattgtactgatgtagacttaatatttcaagaaacttgttttcctgttcatcgtgccattttggcagcaaggtgtccattttttaaaacactgctttcttcctcaccagagtatggggcagagataataatggacatcaatacagctggtattgatatgcccatgttttctgctttgttacactacctttatacaggagagtttggaatggaggactcaaggtttcaaaatgtcgatatccttgttcagcttagtgaaggatttggaacaccaaattcccttgatgtagatatgcgtggactctttgattacatgtgtttattatggatgtccgtccntaggttttttctttccaggactctggaactgggttgaaggcttttgggtggggaa

SEQ ID NO: 376149 - DNA, 457 bp, Homo Sapiens
cccactatttatgtctttgagaagtatgtagtacctcggtattaacagacctgctgtgatgcagttacactttcacgtatttttgaagtatgtcaagctacacgggtctaagatatgattattttggataaaatgttactttggtcaagagaacttttatccagatgacattacaggttcaagtgggttaaggagaccccctgtacatcttacagtgtttccttttaaattgtccagaaaaaaggtgtgttcctcataagcctcagtgcaggatttttcaaagacgagctgttgtgcaatttgctgtatttaatgcatgttctgaaaggattcacttttgactttatatgacagttgatcaagaacaggtactacccctttttttcatttcaaacttgaaactgtgaataaggtaagaaaactattttgaataaataaactatttatttaaaatgtc

SEQ ID NO: 376150 - DNA, 350 bp, Homo Sapiens
  misc_feature (284)..(284): n is a, c, g, or t
acagaatagatttgaaagagataatatatctcttaataccaaaggaaaactaaaacataattctagtgtacttttctttgttccctcatgtctttttcaatctgtacactaacatacctagcaaatttgttttactttaacttgaaatatttaagaacattaaacaagacatttctttggctttggttgaatttttttgtctcaccaatagtaattgaaagatcaattatcaaagagtttgaatagctaatataaaccccaaagtcaccatacagtttttattncaaatatgttgataaaaagatatttgtttctttatccaccttatttttattacagctaaaaaccaa

SEQ ID NO: 376151 - DNA, 405 bp, Homo Sapiens
  misc_feature (320)..(320): n is a, c, g, or t
cccatggcacgggtgatggcgccaagaccctggccatccacgtgaaggccctgacggcagactccatccgcatcacgtggaaggccacgctccccgcctcctctttccggctcagttggctgcgcctgggccacagcccagccgtgggctccatcacggagaccttggtgcagggggacaagacagagtacctgctgacagccctggagcccaagtccacctacatcatctgcatggtcaccatggagaccagcaatgcctacgtagctgatgagacacctgtgtgtgccaaggcagagacagccgacagctatggcccntaccaccacactcaaccaggagcagaacgctggccccatggcgagcctgcccctgggggaattcattcggcggggcagtggcttt

SEQ ID NO: 376152 - DNA, 444 bp, Homo Sapiens
  misc_feature (306)..(306): n is a, c, g, or t
  misc_feature (434)..(434): n is a, c, g, or t
ttgtgggcaacagggacaaaataaagtacagtactcatacttactttgttaatcatttctttcttcattctctccacatatacaaccttttttctgacttattaaaatctctagcttctctgttattaaaattgcaggcaatcagcacacttatgaagtattcaatgtgcacaaaaccagtagttccaaacctcgactttagctaaacaaaagaactggggttatttttaaaagactcctgacaatgaccctcactctcctcccattactgtgagccccgtgaggaacaaagagtcagtatcatgncatttctcaggcatctaggccctgcgcttgggcattttgggctaacacatatctgtgggagtgaatttaaggatggatgggccaaattacagtttactttaaaggggagggtgaggtccattcgggangggtgtaggg

SEQ ID NO: 376153 - DNA, 239 bp, Homo Sapiens
tgcacagcactggggctcagctgtactatagtttgatgctgcaaggcagaaaagttaccgtgtattttctaggcaagtaaaatgcagatgatgtttaatatcagatatctctccaaggaaagaacattctgtagctcagacaaataatgcaagtttgggttaatttttggtttgtcttttaaacatagtacattcaggcttttgtttgtgatcagggcaataatgacagatataattac

SEQ ID NO: 376154 - DNA, 406 bp, Homo Sapiens
  misc_feature (52)..(52): n is a, c, g, or t
  misc_feature (59)..(59): n is a, c, g, or t
  misc_feature (84)..(84): n is a, c, g, or t
agtaggagtgtgggggttccttggggaaagacgatgggggcccttgtaattnaaggagnaaataatgaactatccttcttgaantcttcccattgaagaaaagcatatgaatccctaggaaagggctcagcctgtgataggcattcaataaatactccaatgctgtcattcctttgtctacagcatccccaaacaatgtaccagtgatgggctacctgagctcatctagtcgccaagcagtatctcctgcttgctgctgctttactacattccagatgcccacctcatccaatttccagagccactatctctgctgtccactttccttcaggctctgtgaatacttcaacctgctgtgatttggggccgtttgtactctgcatgtattcaataaattcaattcagc

SEQ ID NO: 376155 - DNA, 532 bp, Homo Sapiens
  misc_feature (311)..(428): n is a, c, g, or t
ccttgagtgacgcacccttcatgttgtagccttcaatgatgcacactccatgttatagccttgaatgatataccctttatgctgcagcctttctcttatggggaaaagcctgcagatatcctgctgcttaactgacaagtgtggtgagaaataagtagaaatctaaagaggggaagaccattttggacacttatctgcaaggcagatccaacacacttttccagtagtcaagctacttctaattttgttcagtatcaaaatgagaaacaggcctgattctccagcactcttgtcaacacaacttccccccnnnnnnnnnnnnnnnnnnnnnnnnnnnnnnnnnnnnnnnnnnnnnnnnnnnnnnnnnnnnnnnnnnnnnnnnnnnnnnnnnnnnnnnnnnnnnnnnnnnnnnnnnnnnnnnnnnnnnnttcctttgaaataaagataaatatagctgatttctttggcttcgacacttactatttgcatgactaagggaagctagttaacctttctgtgactcatttccttg

SEQ ID NO: 376156 - DNA, 568 bp, Homo Sapiens
  misc_feature (46)..(46): n is a, c, g, or t
taactgaagtcatattgtaggaaaaagaatgaagtctcttaacccncctggatagatttttctcacaaaccattgtcttctctgcaagcccagtagactttgtcccaggccatttatgtgatcttcaccccattaagttctccccaaattatttactcttcccccaaaatcacccacacttccccatctccctctcccctaaggacaagggtatatcaccatctataccccattgcttggtggggtgatcactctgattctctgcatgcatttttatagatttgtttgccatttatcctattaatctgcattctgtcaattgtggcaagttatcagcatattttttaacttttaattattattaatggaaagacacttctgtatacactggaaatctcaggaaatttcttttttccttaagcttaattgaaatgtttacttttcagtaaaatttcaagcttgagtaatgttcatgcctgcttttcattgaaatagaatgaaaaggttgcacaatattattttcatgaaattacttctagtataattctgaataaacactttgaaaggc

SEQ ID NO: 376157 - DNA, 351 bp, Homo Sapiens
cctgtggtggtcttgaggaaggggctgtgcaggtccctctggagtggtctgccttggctgggaggatgagaaagatggggcaggctgttggcaggcacacctgacaggtgcatggctggctgattgatgaactgtgacagcctgaggttcagacagccccctcagggcacccctagccatgcactgggactccctaaacttcctggctctagtctaggtgaactgtgcatgaggggctgggacatgagctcccaatactggtctttcttcctcaggctccttacaagagctcaaccccactaccaggaggagttttggggtgccaggtagctcagagtgcaaggtgaaaag

SEQ ID NO: 376158 - DNA, 370 bp, Homo Sapiens
  misc_feature (37)..(37): n is a, c, g, or t
ctgtgcaacatacagacgtgtgaataaccctaacagnaacccaaatgggtgcactcctctgtgaaaacgcaactttcaaagagttttttaaacaaaggagactcctgggcctttagaaataattgccacaaactgcaaaaacaatctccaacctcccacttctgtaaatcctcatctgttgtccttactagaaaatttatttctctggtaataatgttataattgatatccctgtcttctcaagatgtaaaatacttgtaaaaacttctctgtccatcagaaaataattattggcacttttcttctctctcatgtgcatcatggaacaataaaaagcttatggctttgctagatctattatttaacaaac

SEQ ID NO: 376159 - DNA, 437 bp, Homo Sapiens
  misc_feature (329)..(329): n is a, c, g, or t
  misc_feature (414)..(414): n is a, c, g, or t
  misc_feature (425)..(425): n is a, c, g, or t
gcacagtgcagataagagttgaatattgatatcatacatttagactgctgttctgattgcatttatctttttcctacatcatttagaattttatttccctgattcagtttttgctgctgtgaaacagtcttgatgaacactaaatattaatttcaattagctagattgtacatacttgcagatttaacaaaattttagggaaattgaaaaagacatgtagaatttgttgtcttctgctaagcacgaaaagttaagatatctgcttacattgattttgtagacacattaagtcaagatttggaatttaagtcactggcaggtatctgtgncattcatagaacttataaagggtcccaggatcactttttaagggatttttaattagtttaaaaggtaaataaagttcaggctganatctacatgtnctcttcgttttc

SEQ ID NO: 376160 - DNA, 421 bp, Homo Sapiens
  misc_feature (77)..(77): n is a, c, g, or t
  misc_feature (405)..(405): n is a, c, g, or t
gtccagggagccccccttgaacgttcccccagatacaagtaaaagccacaggtggatttcccctatttttgaatacnacatcagatttagatgcacgactacctgttgacttgttttataattgcctactgatttttttaatgtaggcaaagctttgttactttgaaatttatttaataaaagtatttgtgacataaacctgaattgttaatataggagcttattaagctactgccattagttatcgaaaaatgtgataagtaatgaagaaagtaaggaagaaaatgactttgaacattttgactttttgtgctttgttttggtgtcttccatatcctgctgcatcttatatgtcaaaatgaacatttcagtggtagctgtccaaatacataaaaactaaaattncttttgttaaaaaaaa

SEQ ID NO: 376161 - DNA, 465 bp, Homo Sapiens
  misc_feature (396)..(396): n is a, c, g, or t
  misc_feature (414)..(414): n is a, c, g, or t
ccaatggaggcagaagtcttaccacacccaatcactcacagatctcagcagcctcctgcctgaagaaagtaacatgaaatcgggagtaaaagctaagagaggtacagatgggttgcctgactatacaacatattcaccacattgttaccaacaataggccggaagtgggaattttgcaatttgcactttcatggcagtgcttcctaataggtgtttatgaatagattccaaatgtgcttcagccctagaaatggcaatgaaagtcttcaaactaggaagatgccttgtcagggacatgacgtaaaggtaagtcccatagtttcttctgattcacctggggcacctgctggcttctgccaagtgggtagggaatgaggaccaaggaggttttgaatntctacttcagcgtttacntaggcaccctggctgttaacccacttgaggctaattcaggccaccctttgg

SEQ ID NO: 376162 - DNA, 440 bp, Homo Sapiens
  misc_feature (30)..(30): n is a, c, g, or t
  misc_feature (69)..(69): n is a, c, g, or t
ggtgcatgtgctttttaatggcattcatgncagcttcagagtgactgctccaatgcagcatgtgtcttntccaaaacagagtatcattattttaaaatacttggtatgaaaaaatttgatgggattcaaatcccattcacattttgcccaaggatttttaatagtacattcatcaacaaaaagtaagctgtactatatcctttaaatataatttcagctgttgtataatttaaaatggctgtaaaaatgacttaaatgtttatatcctacttgtgcagatagtatttctgattgatgtcatctatcaagaatttcaagagattatctcttttttgtcttgaatcgtgggtagtcatttaagtatacaatctgatttcaaaaaagttatggctacagaaacaagcttaagtttctcaataaagttgtttggaaaatatttt

SEQ ID NO: 376163 - DNA, 520 bp, Homo Sapiens
  misc_feature (21)..(21): n is a, c, g, or t
gagacagaatcctggactccnccaaaagtatttaacctgaaagtagggcctgcctctgacagggcccatgtccccacaaggctgcttggccctcagtgggtgccttggctgtgcctggatgatatgttggatctgtattggataaggacccaatgaccagcaaagcaaaaatggctttaaagcttggtgttaccttttccttaagttgtttaattatagttaagcaatttcaaaaatgcctccaaagaaatgtgaaaggaccttttgtcacagcacttcagaaaatacacaacagccccttctgcccccgcacagaaatgctgcagagtatataaaacttgagacatttttgtaggatgcctgacgaggtgtagccttttatcttgtttccggatgcatatttattacgagtactctggttaaatattgaaaagttatatgctgtagtttttagtattttgtctttgtaatttacagaagttattggagaaaataaacttgtttcattttgcaaaaaaaa

SEQ ID NO: 376164 - DNA, 332 bp, Homo Sapiens
ctgtttaaagaggccaaacaatacatttattatttccatttaagttgcttatcagggcaaccttccccatctgggaacaatctagcagtcatgtaagaagcacatgcccccacaattagtttgaactccatcctggaattgcagctggttgtgattctaaggtacaggcatgccaggagcctggatttgaatagtcagtgggattttgtcacttagtggaatggataataagccaaccaatggtcatcagtctcacacataaggagtgcaggctcgtagggtatacacagtactttctcaaaagcattgcaaatgactgatttctctatgtt

SEQ ID NO: 376165 - DNA, 432 bp, Homo Sapiens
ggcctttggtatccagtaaaataaatggagagacgctcagtaaatgtcttttaagtgagtgtcctaataaatgttccctaaagtgtttatttgagtcccgtgtcttatatcatttgacagaaccacacaatttgggttctgtgaggtggatgctagggtctaggtgagatcgttctggttaggatttcctataggcatgtatcaacagagccaaagcacaattattttctccaataaaatagaacttcatttaagcacataaatacaaacataaaggaacattctgtgtaattaaaagacacaatataggagctcaagcttaaagacattcatgtgtctagggtgtaggttaaaatgcctccacttaacctttcagcccttcttcagtccacttgttattcccaaaccccattttttccctggggggtttta

SEQ ID NO: 376166 - DNA, 426 bp, Homo Sapiens
  misc_feature (83)..(83): n is a, c, g, or t
attaacaaaagaaagtactaaaaaaaatttgtaacaaagtgccccctgccatgaaaaaccagttttaaaattcccccgggganatatatgccccaggagcacaaatgcctgaaattgtaatggtgaatatggtttgacctcagatctcatcttgaaattcccacatgttgtgggagggacccggtgggaggtgactgatttgtgggggcatgtctttccctgcgctgttctcgtgatggtgaataagtctcacgagatctgatggttttaaaaaggggtgtctccctgcacaaactcattctctgtttgcctaccgccatccgcttaagatgtgacctgctcctccttgccttccgccgcgattgtgaggcctcctcagctatgtggaactgtaaatcgaattaaacctctttcttttgtaaattg

SEQ ID NO: 376167 - DNA, 450 bp, Homo Sapiens
  misc_feature (381)..(381): n is a, c, g, or t
  misc_feature (405)..(405): n is a, c, g, or t
  misc_feature (412)..(412): n is a, c, g, or t
  misc_feature (423)..(423): n is a, c, g, or t
  misc_feature (429)..(429): n is a, c, g, or t
ggagacttaatattgttaagatggtagtactcctcaaattcatttacagattcagagcagtgatctattaaaatcccagctggcttccctgcagaaactgacaatcataaaattcacatggaaatgaaaggaacccaggatagccaaaacaatctttaaaaagaataataaagttaacactatgtggtcctgggcatgcaggtagacatacagatctgtggactagagttgagagtccagaaataaaccctcatgtttatggtcagttagttttcaaaaaggatgccaagacaatttcaggggaaaaggatacagccttttcaacaaatgggtcctgcatcttttcaaaaaaatggaattgggccccctactttcacaccnttttacaaaatttaaatggggttnggacctnatgttaggggntaaacntttaaatttcgtaggaattgc

SEQ ID NO: 376168 - DNA, 413 bp, Homo Sapiens
  misc_feature (16)..(16): n is a, c, g, or t
  misc_feature (112)..(112): n is a, c, g, or t
  misc_feature (236)..(236): n is a, c, g, or t
cattccctaagaaagnccatatgaaatggggccaataaagccacatgaaaagatgccccagccatcattagcctattggagaaatgccaaatcaaaatccacaaaaagatanctgcctatgcacccgacctaagaaggcctgcaaccctagaaagcagctaatagcagtgcctcatgaggatgtggagaaattggaacctttgtatactgctggtgggaatgtcaaatgaggcggnccacttgggaaaacagtctggcagttcttcagtatgttgactgctaatagatgttatggttgcacaactctgtgaatacactgtaagtccttggtttgtataatttaaatgggtgaattacatggtatgtaaattatatcacaataaagctgttattaaatgacattttacaagctt

SEQ ID NO: 376169 - DNA, 483 bp, Homo Sapiens
  misc_feature (19)..(19): n is a, c, g, or t
  misc_feature (28)..(28): n is a, c, g, or t
  misc_feature (50)..(50): n is a, c, g, or t
  misc_feature (447)..(447): n is a, c, g, or t
  misc_feature (451)..(451): n is a, c, g, or t
aaaactgtccctaaaagtnacccagggnaccaactgagtgccagtggggncctgaatggccaggttcccacccacaaacgggctaatgcctaaggccccaagggacacccctgggttcctactttaatccccagatccccaggccagaattcaagagattcctctgaagagctataacctgcaggatggacttgggaaaggaaaaggggctgagcctctatttgggagtttatacccaaagcgcttcacacagtaaggtatggacagcttgggaacctgacaggcggcaaaagattgggcagagagggaagagtcagtttccctctgtagctagggtgaggctgctccagagtcacttggttacctcccagcacaaaccccaacatcttaagtgattaaagattaatgtaggttgggtgtatacccaaaacaattaagagcagggantcgnacagatatttgtacatccttgttgacagcaac

SEQ ID NO: 376170 - DNA, 956 bp, Homo Sapiens
  misc_feature (768)..(768): n is a, c, g, or t
ggatcatttaggtctgacccaatgattcttaggcaattaaaaataaccatactggagcagaaccttgtatgctgtaaaaataacccattcggcccctttccaggttgtggtattggaggctgtttttggaaggaggggaacaactgaatcgctggacagacttttcccatgctcctatcagctctgataacgagttaggtagttggcatggatgacaggaatgtcctctacactgagcattctaataaaccccctgtgaagttgcacagaatgagttgaactcattctggtctgcattctagttaggcggaaagctgtcacattctcagactgagtttggacacgatatggtcatatgaaatatttaaatacattacctacatcctactacatcaaaatcttgccttacctttacaacgagataaaagagcatttaaagccattgcaatgtgttcattccctgttcatacacaggtgattcaagtttgcttatgaggcaaaaactgtacaattctcatcattcaggcattaaaaaatgtctttctttaaagtcttgggatataaacagttgatttatatgaattacatatttttcatcttcattaagaaacaatatacatctttttccagagtaatttaatgttagctataataagcctaagatagtggtaaaaactgactttatcacctgtgaccatcaatacttttataaaactcatgaacattctttggccacctgggtcattgtccatttggaaggaaactgtnctcaggctctggatgatacagagatctgcctccataaaatccaaggccatagaacagctttaacagaagcccgaagtaaaacagtacagaatatacaggagcggtttccatttctcagacacaagttccttgacgtgttgaaaggtgttttcgattccggactccagaagtcttatctttactatctg

SEQ ID NO: 376171 - DNA, 726 bp, Homo Sapiens
acagatatagtttggaattgcagtttcctcacttcagggtgacaagatatgtataacagtgacagaaatctccaaagctgctgtatatgatatagctttgttaaatatgaaggtcctttaaatacaattgatgtttagtactataatatgtacttttccacattcctttggatttctggaaggttatggacactttactgtttaacagctaatgcatagttacttgcatgcccatggttgtacagtagcagactatgaccctattgtgatattaagtgtttatttcataatgccatttatacatagctgaatttgatgaggattgaatgtcatatataagaggaatgatcatacaatatgtagttgcatcttatgtaagatttctaggttgcatctaaccatgactatgtcattattttgataattaggcatttatgaattatagtatatattcctcatgttggcatgataattttgctattttccatgcattaaaaataagacaaattccttagagtaattttagtaattttatctataatctgtggggtttttttggagggggaggccactggttgtttctacttccctgtgatattttctctctcattaaaggaatgagctaagtttgtaaatatctcctaaaaacaatcaagtaattttattagcttcttttggaccctctaaatattgacttctctcatgaaaaaataaattgatgaaact

SEQ ID NO: 376172 - DNA, 528 bp, Homo Sapiens
  misc_feature (418)..(418): n is a, c, g, or t
  misc_feature (481)..(481): n is a, c, g, or t
  misc_feature (494)..(494): n is a, c, g, or t
taatgaaaaccacctgggactacacacgcatgccaccacgcccggtcagaagctgtgtttttaagtggacataccatcttgtcctgctgaagtatctccatgtaatcacaatatctatgtcacccaaatctcctccttcctcctccctcccccaaaacacccccacaggcatgcataccctcccatgcgctggaggcagaatctcccaaggggagctggccaggagaggtgtccctgagttcagatggaggtggaagccagagtggggctgggaccacccagtgacatgaggatggggcttgggataaagccctggggacactgacatttaaagtgtggacagaaggagctactgaaggcaatggatttagaaaagcaattgagtatggatttccttcttcaagaaaggctgtccaantaggttttcacttcctttcgtgttgtttcagtgttcacccggaagcagagttttaatgttgantaaagttcaaccnttggttcacattgttcagggagttttgggaagtt

SEQ ID NO: 376173 - DNA, 509 bp, Homo Sapiens
  misc_feature (154)..(154): n is a, c, g, or t
  misc_feature (292)..(292): n is a, c, g, or t
  misc_feature (363)..(363): n is a, c, g, or t
  misc_feature (378)..(378): n is a, c, g, or t
  misc_feature (402)..(402): n is a, c, g, or t
  misc_feature (408)..(408): n is a, c, g, or t
  misc_feature (471)..(471): n is a, c, g, or t
  misc_feature (476)..(476): n is a, c, g, or t
ggcccatggcagcctgttagaatccaggtgcacagagagccctgccaccgtcttacctctgggctttggtgcttaacacacgacacagctgcagaccctgctggaggccgagggctccaggtgctatcttaggtggacacagccctgggggctnccttccaggaggggaccctcagccctgtgccccccaccacttcaggccacaccaggttccctctgcaagggcctcggctcagtcgtgtgcacttcctcggagagccttgggctgccacgtccaccccgggctctgctnccttgttctggcccatggcccagcccggccgctcctgctgaacccctcctgggacgggctgggagctgggnttcttgcttttgctngtaacaatgggagggcggtgtttnctaaantgcagtgttgttgtttaaaaactttcccgtgttgggtaaaccaaattttttaagtagttaagngtaantattcgagggtagttataataaaatttattttt

SEQ ID NO: 376174 - DNA, 422 bp, Homo Sapiens
tctaaaaagaacaaattaccctgtttaaccttaaaaaggtccatggaatgaggccctaccagagaaataatattaataatataatgaataacccatagagcagtgccctttaaattagcctataggaaggaaatagtcttttcaagtttctgaacaatatatttctcttagttggcacctcacaaatactagatcatgtcagacgctgctggttaatagctgcaggaaggcatgttgtgccagtggatattgctcatggaagtgtgtgaaaatcatagtaagctttgttctccctgctaagacttgctatgtatatttccatcattgtttcatgtaaactgaaccattgtggtaaacttttggagttgatatggaatcactttaatgctgttttcacaaataaaagttttttcttataggtc

SEQ ID NO: 376175 - DNA, 383 bp, Homo Sapiens
  misc_feature (250)..(250): n is a, c, g, or t
  misc_feature (262)..(262): n is a, c, g, or t
  misc_feature (333)..(333): n is a, c, g, or t
  misc_feature (371)..(371): n is a, c, g, or t
gccccagccagtgagacttgaaccccacctgtgactccagagccttcagatttaaccccctccccatgaactgccttccctcgccaggtggagaaagcctgtcaccaggccatttttggggaagtggtggggcttgcagatgagagggctccctgggctggagaggaccagctggcccctctaagctggcttcctcagctgcttcatggggcgaagggatgccaaggtcagcacagctacctccctctcnccgcctgccctnggggacctgggcagtccccagttccctctctcctgctgggaactgttgaccttcccacaggctttcagatnggcacgaaaacccgggcattggtcaagcacaagagttnggccaagccaca

SEQ ID NO: 376176 - DNA, 441 bp, Homo Sapiens
  misc_feature (47)..(222): n is a, c, g, or t
  misc_feature (331)..(331): n is a, c, g, or t
  misc_feature (368)..(368): n is a, c, g, or t
  misc_feature (377)..(377): n is a, c, g, or t
  misc_feature (425)..(425): n is a, c, g, or t
aggaaatatttactgtaccaaaacctattgaatgattggtccagagnnnnnnnnnnnnnnnnnnnnnnnnnnnnnnnnnnnnnnnnnnnnnnnnnnnnnnnnnnnnnnnnnnnnnnnnnnnnnnnnnnnnnnnnnnnnnnnnnnnnnnnnnnnnnnnnnnnnnnnnnnnnnnnnnnnnnnnnnnnnnnnnnnnnnnnnnnnnnnnnnnnnnnnnnnnnnnnngggtcgccagtgctgaggtcgagagtccaggacggatctcatagctcccaacaagatcagccatggagaattgttttgttttgttttttctctgcccccggggtccttnccatgttttaaaagattttttgtctactaagtgaaangcctaagtnaccatatatttttacatttaaaaacattaaaaactaaccagaactttntaattcagtccctcca

SEQ ID NO: 376177 - DNA, 489 bp, Homo Sapiens
  misc_feature (124)..(124): n is a, c, g, or t
  misc_feature (170)..(170): n is a, c, g, or t
ttttcagggacccccctggagaccctgtggccccgttaccacccctcaagaatccccagattggaaaccactgcggtgatccctttgttggttcaaccaccccagggcttccctataatttccnaaacaggaagtgacctgcaacactggtttggtgatccgccttctgncctccctctgtattttgggacaatgtcattagctttgagcatcaggaacatgacagagagaggacagaaacccggtgcagccgaggacagccagctgagcccttgctgagccagcgagatgcagcgtggtgccaccacatctggtctccaggagtcccaggagctcagacgtccgtcgtcttgtgacttcatgctcccctctgccgcgctcacgtgctgggcctgggcagaaaggcaacccaggaaatccattaaagcaagccaagacgacctttgcagcgtaacccaacgattccctaataaatcatgtttccaaggc

SEQ ID NO: 376178 - DNA, 161 bp, Homo Sapiens
cctggtgccaaggctcgactgagagaagtcagaacagagaaggggaaaaaaaacccaaaattatgtgaacaagcaaaattaaaatttcattttaggctattggctactgagtaaacttgacttgtgaggggtttttatttttactcattaaaagtcaactt

SEQ ID NO: 376179 - DNA, 339 bp, Homo Sapiens
  misc_feature (311)..(311): n is a, c, g, or t
  misc_feature (328)..(328): n is a, c, g, or t
tgggtgaaactaagtgaacggaatgcagtactgaggttcaagaaagctgtacgccatttctttccaacttaaatccttcagtaacaacaaacaccactcacttcaagatgcattgccagccccgtggcttccctcagctcttggccacaacttgaaaactgtcttgaatgaagtacttggggagaagacaggccactgccctctgttccacagttttcttcatgcacggggtcctcctgttaacaattactgttgtgtacatataaggtatttttagagaagaggaaacagggctttattttcctatggtncctttttttacggtttnggaatagtcac

SEQ ID NO: 376180 - DNA, 480 bp, Homo Sapiens
  misc_feature (14)..(14): n is a, c, g, or t
  misc_feature (23)..(23): n is a, c, g, or t
  misc_feature (38)..(38): n is a, c, g, or t
  misc_feature (71)..(71): n is a, c, g, or t
  misc_feature (77)..(77): n is a, c, g, or t
aaatggaccccaanggaaccaanccctcctacccgggnaaacaccctgtaaactttaaaatttggctatanaacaanccagagcccaacagcaaaattgccctaaaaccttatttccaaatgggctcatattctgtaagaacacccatattaagttgagccaattaacatatatgcataaaaggaaaatagatttagctaactgcttgtttcaaaatcaaataagtctacaaaagctgtgagagtggctgagaaacacgacccaaagtcttcttagcaatgatattcactggtggttgtgcagtgtagtctctttgtctaccacacttactctacgaagtccagtgtgcagagaaatctggatctggaacaaccagccattttaaaaaggttctttcatacctggacatacatttctaagcggtgccttgtctctgaaagatgattttcctcacattaaaatgagagagaagctcacgtg

SEQ ID NO: 376181 - DNA, 508 bp, Homo Sapiens
acaattctaagatgggaaaaagcatggacaactgtaaggggaagaaagggatcctcacccttctccctaatgacacgctttgggcttagtcttttggggctgctataaccaaatatcctaagttgggtggcctataaacaacagaaatgtatttctcactgttctggaagctgggaagtccacgatcaaggctctggcagattcgatgactggggaggccctgttttctagttcgtacttggcaccttccagctgtgccctcacgtggtgcaaaggacaaatgagcttccttgggcctctcttacaagaggtctgtcttcatgacctaatcacctcccaaaagccccaccccctaaatactatcaccatggggggttagggttttcaacatggaatttgtggggggatacaaatattgggaacatagcactctcctcatctatggatttcggtgctgtggaaattggggagaaagagaacatttaggattcagggggtaagtttttgt

SEQ ID NO: 376182 - DNA, 437 bp, Homo Sapiens
  misc_feature (61)..(80): n is a, c, g, or t
aaagtccacctaattcacattccattcattcattccatattcctcctcctctcctcctctnnnnnnnnnnnnnnnnnnnnccagtcaaaagagggagagcaaggagaccccagatattgaaataaaaagtggtaaatagtggttatcactccctggaaaaaaaatttaagaaaagggcctctgccatgcatgtcatggggtgagggagtatttttaaatatacatatgtctaactaagacgcctctaccctcaccaggtggcctgagcagcacatgctcaactctggagcaagcagctttgcagacacattttagaaaagggattcctgcatcttctctatcagaatgcatgatctctggaaagaacaattggcacttttttcttagttcattcatttcaagaaataaataaggaactggcaattgctgaaaaaaaa

SEQ ID NO: 376183 - DNA, 460 bp, Homo Sapiens
  misc_feature (26)..(26): n is a, c, g, or t
  misc_feature (31)..(31): n is a, c, g, or t
  misc_feature (42)..(42): n is a, c, g, or t
  misc_feature (86)..(86): n is a, c, g, or t
gctaattggaagggaggcaccctggnaaaantgggcatgganctccaactctgcccttgccctgccaaaatccctgccctgttgangctgaactaaagccttgggacaggcaggctttgggggctggaagctgtcccaggaattcctggtgaggggaaggggaccctgtcaacctgctttatttatttgggtcccaaaaccccgcagccgcatgccccttatgtccctcttctccctcttgcatgctttacctgtcccacacccatgccaatgtgccaagtctcccttggggacccagctgagtctgggtgttcccattgggttgggccaggcaaggcctctggtgcccgctgccgtccccctgcagtgggctctgctaggcctgtgctgagcaacagctgttattgtcatggtttataaacaataaactgtgatgccaggcacatctctgccttccctg

SEQ ID NO: 376184 - DNA, 584 bp, Homo Sapiens
  misc_feature (83)..(83): n is a, c, g, or t
ctagaataaatcccaaatgaccagagcaaaacgggccgtccctggctgcactttgtccccaagaagagaaagacatgctgaancccctggctccgttacctgccgaactgtggccttgtttggaaaatggggtgggttgccagagataatcgaaatttacactgaagtcacaacgaaatttagggtgagccctaaatcccaatgacccagcatcccttataacaagggaagaggacacacagacacacgcccacgggaagacagtggcagacagtgcagcgacggtctcccgaacccgggagggccaagggctatggcagtacccgaagccacgcagaaggcaggaagaggctctcccctggggccttcagagagcatagctctgccgacgccttccccttggacgttctggcctccagaactgggagattatatttcggttgttttacccacacaggtcgtagtactctgttagcccaggaaactaatacacaggatgtttttaaaagggaatttctgcagagtgaaaccagtgttggttcatcaattgtaacaaacgcaagatgttaacagggaaaactgta

SEQ ID NO: 376185 - DNA, 394 bp, Homo Sapiens
  misc_feature (356)..(356): n is a, c, g, or t
gtaatgtggacattcaggacatgactggatataaaaacttttcttgcaatcataccatggcacacttgttctcaaaactgtccttttgctatctgtgctttgttagtatctatggattgacgtgcctttataccttatactggctgttctaccgttctctacgggaatactcctttgagtatgtccgtcaggagactggaattgatgatattccagatgtgaaaaatgactttgcttttatgcttcatatgatagatcagtatgaccctctctatcccaaggagatttgcagtgttcctgtctgaaggtcagtggaaaacaaattaaagcagctgaacttaaataacgaatgaacncctgataaactgaggcagaagctacagacaaatgcccc

SEQ ID NO: 376186 - DNA, 832 bp, Homo Sapiens
  misc_feature (27)..(27): n is a, c, g, or t
  misc_feature (43)..(43): n is a, c, g, or t
  misc_feature (90)..(90): n is a, c, g, or t
ttaaatatcctcccaccttccttaaantctgaaaatgaggtanttccatatttccctagctttccctggcagaagtaaatatggctgaangagttttgcaaataaaaatctctgttttatatgttctctctgcccacacacatcatgaaaaaaaacatccaagtaagacacaatctttcaaaaaaattaattatcgacaaaacaataataggtgtaacaggtggtgccccacaaaagagagtcaagatctcctcagctgaaatggactttagttggtcaaggctcttctcacggaaaagtcgatgtaagaatggaaaaaatgctaatccaatagtgacaacatttcccagcatctgataacctactccttgctgataggcattgaccctgctcatgatgatgccacttatttccaacacagacatatccatctttttgcactcattcccctcccagattattgcactaactcgatcagaggaaggacttgaattctgaagccagaataaatgattctgctgaaaaacatcctctttggggtcacgtttggtccctgagtgaagggtattcacatgggccccctcactgtcactggtgacagatgaccggcactctgggccatgtagcaggtcgtcccataacatgtcctcagtctccgagtcatggcgggtgctttctgagtctcttcttgacatgttgaggcttcgagagccaccactcacacccgatctagagccctggctgaaggctgctgattcaaattctgattcagccagactatctgaatcccgcacaatatgacaccaccttgtagtggttttctttacctgag

SEQ ID NO: 376187 - DNA, 515 bp, Homo Sapiens
  misc_feature (27)..(27): n is a, c, g, or t
tatttggctgtttttaggcttcaggantttccaagtggaacagaaataatatactgcagcctcaccaaaataaaagttattcttgaagtctttgccatgagttctccttgctgaattaaaatgctgtttagtaaggatacagacccagggggaaatggagcaaaccaaagcagtgattacttggatctctatactggacaggctcactgtagcaaaagagatgcttagaagcagactcagctgtaggacatgaaagagaatctaaccatatttttgaggcatggtggtgtccaaaatgtatggtgataggagatgggaagcagcgaagataaaaagttatccttgtggtgttccaacttgaaacagtgggttaatgtctggtagtcaggttaaacacagagagctaccattttggaggttggctgtcaagatatagacacttggatgttaggaaataagatagagatccagttactgagtaaaatcacttatatgattatcttctttaaaaaaaa

SEQ ID NO: 376188 - DNA, 511 bp, Homo Sapiens
  misc_feature (390)..(390): n is a, c, g, or t
  misc_feature (482)..(482): n is a, c, g, or t
  misc_feature (500)..(500): n is a, c, g, or t
gtgggtgaaagcatggctgcctggttcccagatggaattcatacggacagcagcacctaccggattgtgcctgggggctacgctgtggtcggggcagctgcgctggcaggagcggtgacacacacagtgtccacggctgtgatcgtgttcgagctcacaggccagattgcccacatcctgcctgtcatgatcgccgtcatcctggccaacgctgtcgcccagagtctgcagccctccctctatgacagcatcatccgaatcaagaaactgccctacctgcctgagctcggctggggccccaccagcagtaccgggtgcgtgtggaggacatcatggtgcgggatgttccccatgtgggccctcagctgcaccttccgggacctgcgtttnggcactgcacaggaccaagggccgaatgctggcccttagtggagtcccctgagtccatgattctgctgggctccatcgagcgttcacaggtngttgcattgttggggggnccagcttgagc

SEQ ID NO: 376189 - DNA, 520 bp, Homo Sapiens
  misc_feature (148)..(148): n is a, c, g, or t
  misc_feature (164)..(164): n is a, c, g, or t
tggctctgggggaccctgggatgatatccctacccccagggacaggacccaacccccggggacctggagagactctgtgccctgcaggaccgatgggggactcctccctgtatgtacgtgtgcgtggccctgccttgttcttgccccnggacctggcctggtgnaaggaggcacgaggaaaattgccagtcagggacgctcagcctgggagctgaccctcaggtgaggccctaaggaagttcccagacctccctgaacctcagtatgctcatctgtccagcagcaaccctgggccttaagtgagaacatctatgcggaagaggcaggtgccaatcaagccctctgtaaagttacctccccttttcccttcttctcctctcacagagctgaagaatattttgcaaagttcattgtaaacattaaaataatcttgggtgtttatcattcgttaaacctgttgggctgactttaggtctaccgctctcaaaaaaccaagaataaatggcacagggagctgaaa

SEQ ID NO: 376190 - DNA, 527 bp, Homo Sapiens
  misc_feature (36)..(36): n is a, c, g, or t
  misc_feature (140)..(140): n is a, c, g, or t
actgagtgtaccactgccttcccttctagcccaggngaatgtttactcagtttagtgtcttgtatttctataatactccaacaggaatggtagtcacactgtcttgaaattgaatctgtccatctgtttataatcaaggncatatcagaaatatataggtcccaggtaatactcccaaacatcccactttttactgtttcaggccatcatatcattcttaagctacttggggtggtagtagaggattaggttgtctattataaaaccaaaactcattcgtttaatgaacttgactgtcatacctctatttagtaattgcgagggtaagattcatagtaggaatattggaaattttggcactctgagaataaataggcatatgatacccacttggacttttaacaaaagtaaaggaataaatttgcatataggcttggaaagtgaggcagcaatgctgttaactgcatttgttgtgatggtgcatttgattgaagcagcttgtctttattatgcaagactgtgtagag

SEQ ID NO: 376191 - DNA, 432 bp, Homo Sapiens
  misc_feature (18)..(18): n is a, c, g, or t
  misc_feature (27)..(27): n is a, c, g, or t
  misc_feature (116)..(116): n is a, c, g, or t
tttaatctcttctctccntctgtgagnacgcttctaatactaagaccctgaaggttaactagaaagagacaaactcccaccaagtcatcccagtggtgcacctttgaggacttccnactactcgcctaggttcctatgaggccagtatggagacagagaggtgggggcctgtggggaactggaggctacaggccccacttctaggagatctcccagctccagcccactgtgccatcaggaatgtgggcccatggctgcctggctttcaagagaagctagaaatctgctttctatgtgaaaacctcttgatttttaaatgcttgcaatgaattaaaaatttatcaaaactgtgttgtccaaacaatcatgtatgtgaccaaacatggcctacaaaatgctaatttactacctctgaactagcacaatatcctg

SEQ ID NO: 376192 - DNA, 333 bp, Homo Sapiens
  misc_feature (237)..(237): n is a, c, g, or t
aaaaaaactgctcccaactccaccgcctatcacaaacctataagaactaatgataatcccatcaccctttgctgactcttcggactcagtccgcctgcacccaggtgaaataaaaaagctttactgttcacgtaaagcttgcctggtggtctcttcacatggacgctcgtgacatgcaccactgtggtggcatggaaggatggggggaagaggaggaaaatcttaaaaggagtcagnaaaaaacacattacatcaagaacaataaaattaaaaagacttcttgccaaaacaatgaaagccagaagacagtggaccagtatctttaaggaactg

SEQ ID NO: 376193 - DNA, 405 bp, Homo Sapiens
ggacctgtacttctcagtggagctggaaagtgacctcgcccagtgggaaagagccttccagacagcaaccttcctagaagtagaacggataccagtgccaagaccctatgccatgtgtgcctagaaagtccatcctaatgggacctcacaattgatttccagccacaggatttatctgcctttgatgctgccaacaaaggtaatgtgttccaggtcagcctctgagaaatatgctgcaaacattctaattgaagaatgatttaaatgcctcataactcctttcagcattttaattgtaatcgtgtcaaatttaagatcttcgtttttgttaatggaagataaattatgcttcgatctgaaaaaaagtttgaatttttaataaaacatatgtagtaccacaaaact

SEQ ID NO: 376194 - DNA, 339 bp, Homo Sapiens
  misc_feature (100)..(100): n is a, c, g, or t
caggcatactttgattctaactttgcttgctagatggcgctcggtgtctcaggactttctgtttcagaattaaagcggctttttagcaccgttgttctgnactatttgtgggcatttgatcagtacagtgctggtaatgttattattgcccttgttttcgtcacactttttctctttttgattaaggtatcgtccaggtgggagctgcccatcttaatccatataataatgaaattcagggaaactctgcacctaaatttagggcacatgtgtggttcaattacctgttctggtgcacttaaaaaggcaccttagtaactttcctccaagaatgtgatt

SEQ ID NO: 376195 - DNA, 536 bp, Homo Sapiens
  misc_feature (430)..(430): n is a, c, g, or t
  misc_feature (461)..(461): n is a, c, g, or t
  misc_feature (506)..(506): n is a, c, g, or t
  misc_feature (514)..(514): n is a, c, g, or t
gcttgcattgaaaggaagtctttctaaggagaaggcttggtaactgagcagtcagcctatgtaagtggaagttgaggtacaggtggaaggtttatgaccaaaggttagaatatttcaacccaaagccttcctggttgccttgatcgtctaatacgtcattccttaaaaacaattttttttcttcctactctgccaggcactttgccaagtttggggaatgcaaaggcttaattagacccctcacctttccccaggtattgcccgcagtcaagggggagagccttggccctgcttgctagttagaatgtaccttctacaggttcagtaaggcatacctgggaagtctgagtctccatgctcctttctattttgacttcctgtctgccatgtccacgtttatgaaggggttaaaatgaaaaaatcaaaattnccctttagcccaaagtgtgtgtgtttaattnccaactaattagggtttgggtctgtgtcatcaccaatttccagtnggattgtnattcccagtgtttggagatgaa

SEQ ID NO: 376196 - DNA, 285 bp, Homo Sapiens
  misc_feature (13)..(13): n is a, c, g, or t
  misc_feature (33)..(33): n is a, c, g, or t
  misc_feature (42)..(63): n is a, c, g, or t
tcctctcctgccnttatgtttttgaggttgacntgtaagatnnnnnnnnnnnnnnnnnnnnnntatatcctaggcaaatgacatgaaaaaaaagttgaaatatactactggtgttcaattttgtcctgcagtgttgctttctcaaagaaataaacatgtggctggaagtgtttaatggctgcgttttgatcgtctacaacaaggttacagtgccctctggtggcagtcatcaaaatcgcttctagacttgtttttatttttaaataaaagatctaattatattgg

SEQ ID NO: 376197 - DNA, 764 bp, Homo Sapiens
  misc_feature (46)..(46): n is a, c, g, or t
cccatctctaaaaactaaaaacattacccaggtgtagtggcacacncctatagttgcagctacatggaagcccagggcaagaggatcgcctgagcctaggagtttgaggctgcagtgagcctacagactgcacccactgcactccagcccagtagattagaaatgtttgtgagaaggtaccttaatggatgggcaagatggacagcagcctatagtaattattcatagcagcactctagaaataaaaactagatcttatgtggcagggctgtgaaaatgcttttgtcaaaatttaaaattacagattaacacctatgaggctgcaggcacaggggtcacgctgatgaaggcataaaccctgctctcaagtagctcacatccagtgaaaggctcaaaccacaaacagggaagtacgtgagattaattcgttcaaggatcaaacaaatgcctcttttcacccgatgccacatttcattaaatagtttgtagcagtgatactataaaatgtgagctttaaagaactctggtaacattttcaatctcttcctttctccgtactcttctatttccccccaatttctccaatccactcctaattttcacttgtatctttcttctacaaaaaacctaaatatgccaattttactcttcttccttccagttagtaaaatcacaatttgaaacaaaattataagttgtcacacaatatgaaaaatatgaaattcctgatgattcaagtagttttgatctataaaagcagcaat

SEQ ID NO: 376198 - DNA, 249 bp, Homo Sapiens
tttttttcctaaaaattcccatagaataaaattctctctagtttacttgtgtgtgcatacatctcatccacaggggaagataaagatggtcacacaaacagtttccataaagatgtacatattcattatacttctgacctttgggctttcttttctactaagctaaaaattcctttttatcaaagtgtacactactgatgctgtttgttgtactgagagcacgtaccaataaaaatgttaacaaaatat

SEQ ID NO: 376199 - DNA, 521 bp, Homo Sapiens
gccactccactcccatcctttgtaggtagagggccaccgccaggctcttagctacttggaactagggccagcttgaggaatatgggtgaggcacccatggcctctgctacattgtttttaatccagtctcaaaaacaaaatggtcctatcacagaaactctgcaaaaataccatgaaagagtaaagaaaaacatgtaaacattttacaattacctcctatcccaaagataaatactgttaaaatgtcagtatgttccttacacaagtttttcccatgcatatatgtgtagatttatatacattaagattgtattatacatagaaaataaatttctggacagttatataacctgcccttttcaaaatatatctaggaaatctttctatgttattgtgttgtcttctataacatgattttcatgactttactattatagtctctaaaaaggatggttcataatttttactggacatttcagtggtttgcaaagttcgactattacaatatatgttgaaatgag

SEQ ID NO: 376200 - DNA, 544 bp, Homo Sapiens
aattcatgcttcagattggttcataataccatttccagaaatgtattccatggggattacaaagaatctaggtgtgtgttggggggcacctacagtcaaacaaattcagaaaattgtggattaaataaagcaaaatagtattctgtaggactactgaatactatggtatattgggactctccattgggaggtaattttatacagcatctccttaacttatatgacaaaataactcactttctgaagcatcttaacagacatttcagtgaataacacattggaaaatggtgatcttttgtgctttctgtcaggttttgatatcatggttatgctggcctcaggaatgatgaaactattagaaatctgtcttcttctatacactagaatattttaaataacgtgggggtggtctgtttattgaaggtttgatagaattcactcataagagctttttggtccagcattcctttttttgtgtgcgtggaaaggggtatagatctttgacaatctttccatttatttcatggtaatggttagattcagt

SEQ ID NO: 376201 - DNA, 438 bp, Homo Sapiens
  misc_feature (46)..(46): n is a, c, g, or t
  misc_feature (65)..(65): n is a, c, g, or t
  misc_feature (92)..(92): n is a, c, g, or t
  misc_feature (188)..(210): n is a, c, g, or t
aaccccccggaactgggaagactaccaacagcaagtcatacccaanctagattaacacgtaacanctggctgggcgtggtggctcaaacctntaatctcagcactttgggaaggccaaggccaggaggatagcttgaggctgggagttcgagaccagccgggcaacatagtgagaccctgtctctacnnnnnnnnnnnnnnnnnnnnnnnctgcatacatcctcatgagtaaattttggtaatttgtgttttccctgaaaattatctatttcaggtagatttccaaatgcattggtgtacagttgtacttagcataatttaaaaatttctgtaatggtggatagaaacctctctctcatttgtagtcttgtgtgttttctcttcttattacttatttttatcggtattttcaaataaacagcacttggttttatcaat

SEQ ID NO: 376202 - DNA, 357 bp, Homo Sapiens
  misc_feature (314)..(314): n is a, c, g, or t
gggtaggatcctttaagaacagtctatcctcatagtaattttaaacacggcagctccttctcatttgatttgccctcctctacccaaattaaattgcctaattcatgagtaaacagctaataagagctcacggaagtcaatgagcccagcctcagaaaaacacaattttcaaattttggtagtcactgagtaaggctgcactaagtatagggtcccatttcaggtccaaagaaaaagagcatttcatccttctctgattgcatctgtccctgctgttgagcacctcacaaaccaggggcaaacaatgggctttngagggagatgggggctggggccgacatcccagaccccccaggg

SEQ ID NO: 376203 - DNA, 410 bp, Homo Sapiens
  misc_feature (334)..(334): n is a, c, g, or t
  misc_feature (340)..(340): n is a, c, g, or t
  misc_feature (359)..(359): n is a, c, g, or t
  misc_feature (382)..(382): n is a, c, g, or t
  misc_feature (393)..(393): n is a, c, g, or t
ggaatctgcgggagaaacgaccatcttcttttcctgcccctgtttgaatgatacacaggagggccagtgggactgtagatggttgagaaacaaccgcagaaaagcagaaaagccatgtcagaagtggaatagcccaagatactgacaccaattcccaagacatcacaacctacccgaagcaccactgcctatggatagcaaaggtctgaccatatcaccagggccctcatgggctaggaatcccatccttgattcatacccctaatctaccaccactccctggcaacgcctttcaccaacccgaggagcctattaccctccctggacccttggntttctnctgggttttgagttcaccnggggtcccagggtattggcaggngggtgttttgntacgggttgggtacttc

SEQ ID NO: 376204 - DNA, 367 bp, Homo Sapiens
  misc_feature (24)..(24): n is a, c, g, or t
agtcagggccctgtgccctgaaanccctgggcacccatggtggcccccagtcaggagcaacagtggtaaccctgagtaaaacccattgtcccctctttggaggaacggcccagaggatgacagcagccccagcaggcagcagtgcctgggcaggctgatccagcagagcactaatgggtcagtttcatgtattggcagatgtggtgtagcatggcaaggctacaagttttaaggatttttgtctgattttcagacctggaggaggggatttttcttcctactttcccccttttttatttctaatttactttcaaccaaatattcccactatgtgctatatgtaataataaaaagttgacaacaactg

SEQ ID NO: 376205 - DNA, 412 bp, Homo Sapiens
ttttaggttttgtagatcacactatctgttggaactacaattctgccattgttgcacaaaagcagccatagacaatagataaatgaataactgtggctgtatcccaataaaactttattcacagaaacaggtggcaggtcagatctggcctgcaggctgttagtttgccaacctttggttgtacctttagcaccgtctactttcaagtgatattgtactatttcactaatagtattagtaccttatcacagcacacttccattctcctctaccagcctttgtgctaatgttttcacacattttacttttatacaaaatgtaaaccttaaaatacattgttattgtttttcttttaatagttgtattttcaggagatttaaataataaatggaggtcattggaatgatctaca

SEQ ID NO: 376206 - DNA, 175 bp, Homo Sapiens
aaaaatcaacttacttaaaatctactgtctacaatctggtaagatctattagaataaaatgtacacataccatttaacatagcaataaacactcctgggaatctatccaacaaaagcactggcttctaagggtttatgcataagagtgtttgttgcagcattgtttgtagcagga

SEQ ID NO: 376207 - DNA, 598 bp, Homo Sapiens
  misc_feature (26)..(26): n is a, c, g, or t
  misc_feature (38)..(38): n is a, c, g, or t
  misc_feature (55)..(55): n is a, c, g, or t
  misc_feature (82)..(82): n is a, c, g, or t
  misc_feature (99)..(99): n is a, c, g, or t
  misc_feature (110)..(110): n is a, c, g, or t
  misc_feature (183)..(183): n is a, c, g, or t
attggtgaaggaatgtggggaatttnaacctcatcctnaaaggtgtcaatctctnccaagaagacctgtcttcccctaaacnaagtaccctggaacctnaattcccaatnaaaagctgggaggaaaagtctctccctctggtgctccccgaagccccctgtacatccccaagtcacatctccnactcatccctggttttccccatttccgtggctgttccttggcctgactgtgtaccctggtgacagcaggggctgtgttggaaccagctcagtgtctcacagtatgcagaccaaataccccatggaatggcttctggatagtctggtgaaggcctggcatccactcccccttcctaacaacatcctgagttccttttaacagcttttcttcctcatctggtggagcattgctgcatgctcattcccagattttaaatctgaagtacagcaacagactgaaaaagactggagtttgttctagtggctgtgttctaaccagaacccagtatgaggtcacacttgtttttcttatttccctcccaaaaatgttgtttactgcttgataatccatctaataaattttcttatttcttaaa

SEQ ID NO: 376208 - DNA, 526 bp, Homo Sapiens
  misc_feature (60)..(60): n is a, c, g, or t
  misc_feature (81)..(81): n is a, c, g, or t
  misc_feature (112)..(112): n is a, c, g, or t
  misc_feature (118)..(118): n is a, c, g, or t
  misc_feature (224)..(224): n is a, c, g, or t
aaggtgcccaaaccaaaaatggcctgaaatgtcaccaatgtgccattgaaatgtccacantgaacatttgcctagcagtcnaaaagcccatatcttgtcccacctgaaaagnggatgnatcactgaggaaagtggtttgggagaggaagccaaccaattccttccagcattgccctggcacgactttcctgaagccttaggcaaataaaaatatctttgttccnaaattacatctatcgtctggtggtattgcttgtcttttacatttctattatgtgtgtctcttatgtatcccttcacttccctgttctggcaccaaaatgcaaaactcagacagcattaggaaaaagagaagttcttccaatgtgatccatagtacacagtcatgtgggagactcaagagaaagctccttcctggtgggcagaggtgctccctaaattctcattccctttgagatcaacagcaaagtttccccctaatgctgaatttgttcttgctgtttctcaaaccaaaatgcaatttaag

SEQ ID NO: 376209 - DNA, 315 bp, Homo Sapiens
  misc_feature (19)..(19): n is a, c, g, or t
  misc_feature (45)..(45): n is a, c, g, or t
  misc_feature (87)..(87): n is a, c, g, or t
aacccggtgatgggaaaanttccagactttgatttgggcccttgnaaaacaggttccagtttccagtaagatggaggtaaaaggagncaaagagcgaccttacgtaaatcccaaggctgaaggaaggaggctcctaaggggtgtgtgggtgattaggagtaaagtatcttgtctgaaatgaagagtttctatacagcatgcttatttggagtcatgcctaacaagattactttgggtctaattttggaagcttggtactcccagggagcttggacatgaatttaaagacaatgggaactcacatttaagtttctg

SEQ ID NO: 376210 - DNA, 428 bp, Homo Sapiens
  misc_feature (28)..(28): n is a, c, g, or t
  misc_feature (388)..(388): n is a, c, g, or t
  misc_feature (409)..(409): n is a, c, g, or t
ggcttaggaacaaaaaactttgccaagnaatgcaaaatcttactggtttttaaagcttgtaacagttgtgtgtaaaacttttatatttgaaacgtaaactcaccctttctgccactgctttcattgcacttttcataccaagttctctccaacgtggtgtctgaaagattttaattatatacactctttatggaattcaatgaagtgtggttatgctgtgtttctgaagtttttaggcttttcttcattggcctgcctaatactagtgtgtttctataacttcagatgattcaaaagtttagtgcttcattgtaggcaaaaaatgtatataactcataatatcctacatgtaggtattcaaaatcaattattaataaccaataagggnctcaacacattttcatggcgnggttcttctttagggcacc

SEQ ID NO: 376211 - DNA, 393 bp, Homo Sapiens
  misc_feature (19)..(19): n is a, c, g, or t
  misc_feature (74)..(74): n is a, c, g, or t
  misc_feature (260)..(260): n is a, c, g, or t
agaaggccttctgtaaccntcttatattgtttcaacgctcctaagaaaagttttgatgatgtatgttattaatnccttttcataaaaagatgtctcaagaatctaaataaatcttaaattttgggggggaaatctatttttatgtaaaaatattacactgaaaacaatttatttactgatgtgtcctctttagtgacctaaaagatacactgagccagcatactttacatttgtattcagatgttgcttagttgtctagnaaaatctgtttgactactttaggtacaatattgctatttcaagtagtgggatttgtagtcagaactagttccctctgagcgtaccactcatcaaaaacaactctgtacacaaaacagaaggaaaatgcttcag

SEQ ID NO: 376212 - DNA, 262 bp, Homo Sapiens
  misc_feature (44)..(44): n is a, c, g, or t
aacttgtagaaatgtaattaatttcatgcaaagctacattcttncctatattttaacagctaatcaaataaacatttcaaaaaattcattacatcacaataagttaaaatactacaaaggaactgcaagtcaatcaatttatcaaaaccaaactgagcgaacactatgcatagataaggccaaagttactaatttgcttataggtagcactttgcagctttttccaagtacatatttgaaaatgtagtgagaatctacagag

SEQ ID NO: 376213 - DNA, 384 bp, Homo Sapiens
  misc_feature (218)..(231): n is a, c, g, or t
tgattcgtgaataaaactaggtacatagtaagtgtatgatagatgtttgatttgtaaattacaaatataaattatcacccccatttccatttattttcttgatatatcaaaatgtgttgacttagtgattctcaatcttagctacatattagcctggcagagctttaaaaaattgatacctgggtcctattccataacaactaaatcaaaatcacccnnnnnnnnnnnnnngtaaagctttccagggtggttctaaaggacacctgggggtcaataacccatttataaaatgatctgattacactgggacactcttagggaagtatcaaaataggaacagttcaatttgcagctactttaatggattaattacatttcttaggg

SEQ ID NO: 376214 - DNA, 368 bp, Homo Sapiens
  misc_feature (34)..(34): n is a, c, g, or t
tgtccctgtttggaacaaaggagctgagccaccnataccctacagggactagtcatttgatatagcctgcttcaggagggagctgaaaaggtgtctcttccagtggagggtaattcctgtagagggctgaaagctgagagccatcatccagcagcaccccaaggagcttattcccttcagtcttggaggacctgagtggcatactacagtgtccactacaagaaatttctccttcaataggttctaataaccccaacttcttcccttggttctccaaagaacaggagccacttcctgcagttactatctctaaattataccagagcctcctttgtgcttcttccattttccaaaacctgattaagcaa

SEQ ID NO: 376215 - DNA, 418 bp, Homo Sapiens
  misc_feature (85)..(85): n is a, c, g, or t
  misc_feature (94)..(94): n is a, c, g, or t
gccccacaaaaaagggatgaaacccattcccataccacgaaaccaaccagggatgggaccgccccaaagaattaaggccgaatgnaaagaaganaaaaaaagacctaccattttgaattaatttccatttaccatactattcccagaaaatacaagtgaatcctatagtgacagaaagtgatccagggggtttgctggagatggaaatggggagaggagggacagaaggattgcaagggaacacttggtaactttggggaagagggacgtgttcattttcttgaatgtaataatggatttatgggggtatatatgtcaaaacttaccaaattgtacacttttgttatgtgcagtttattgtgtgtcaattatacctcaataaagttgttaaaaatatagttgcaggtcctcaaagttc

SEQ ID NO: 376216 - DNA, 501 bp, Homo Sapiens
  misc_feature (14)..(14): n is a, c, g, or t
  misc_feature (62)..(71): n is a, c, g, or t
tggactgcattttnacttcactttgacctctggcatcaagctgtgaatgacgaatcaccccnnnnnnnnnncaaatcttgactagatatcagaggatacctagacatacttctgcttcgctatatttaatgttgtgcttttctgtttaaaagattatcttacatctcacttgcatactaatctatattttaattactgtcatatatacattaactaatttgaaccttccaataatactgtggaccaggcatcaaatcaaactgagatcagagacggtcaggggtcttatagaatatttttggcagaggcaggattagaactcaggccgtgagctgctgcatcctttagtgtgtgagctccacgtttgatgctcaggtataaatttcccaccaagttaaagttgattgcattctgcacttttgggagcttttgcccaattgattcaaaaatgcttaggaaaattgaatttgtttttgtatgcctagcaaataaagcctgagc

SEQ ID NO: 376217 - DNA, 419 bp, Homo Sapiens
  misc_feature (63)..(63): n is a, c, g, or t
  misc_feature (358)..(358): n is a, c, g, or t
  misc_feature (396)..(396): n is a, c, g, or t
caggtagctggcgagtgtgtacgacctgacatcgccacttacttactgcgggaggcgccacgncacgctgtttgcgctctggggaagctgagaggcctggaatccgcgcgcctccccagccatctgtgctctcgcagcgcgctaggcgctcccggctgctgacttacaggatctgggttcctccgcctacgctctggggcgccctgaagcgcgggtagacacctgaggtttttgccttagccagtggcgcaagatgccgcggaactcttgggattggagagaccaagaaggctttaaaggggcgacacgcaggggcggcaaagaggaaaggttccccaggggcgcgcgtgcccaaggntccagttgggctcccccagtaaaaccttgaaagagcanttttattccttaacgatttagga

SEQ ID NO: 376218 - DNA, 732 bp, Homo Sapiens
  misc_feature (244)..(282): n is a, c, g, or t
  misc_feature (706)..(706): n is a, c, g, or t
ggaggaggagcagacggcagaggaaatcctcagcaaaggcctgagccagatgaccaccagtgctgacacggatgttgatacctctaaggacaaaaccgagtcggtcaccagcggccccatgtccccagagggctcaccttccaagtctccctcaaagaagaaaaagaaattccgaaccccctccttcctgaaaaagagcaaaaagaaggagaaagtggagtcctgattcatgacacccttgggnnnnnnnnnnnnnnnnnnnnnnnnnnnnnnnnnnnnnnncattctctgtccctgcaagcacagggctaaggagggatagagtaggacctggaccacattcggaaggggaacttagagatcacccgaccaacccttcgttttacagttgcccaagagaaatcaggtgacttgcccaaggtcacacagctagttagcggcagagctgcactcgaattcaggtctcctgacttccagtccagtgctccttctactacacaacactgcctagttgtgggctgcctttgtttggatgctgtccaccaatctgagcctagggcaagaaggccagaaatgggccgtgagctctcacaggctcagactaaattcagaggtcaaggcttccccctgagtaaggtccattttttcccagggatccaatctcctgtgggatgggagctatctctacaatttaaaaatcttcttnttctttttcccactttggggtccctg

SEQ ID NO: 376219 - DNA, 374 bp, Homo Sapiens
ggcacttcgtacaaactccgaaaaatattatatgtgatttagtcacttgttagtagccctatttgcatacttatttgttagaaataatgaaaaaggaaagactgtttactttgtttaaaccttcatttaaaatattataattttgaattaaaactttttgcaatgttttggaaattttatgctgtaacaatctaaacataatgtgaaaaacaggaagatttcatattaaagtttctccattttcctaaacctagggatgggtaagcgggatgtttgggcacctattttcgtgttgggtttttatgggaaccaagttcgggggatttgggatggaacagggatttgtttaccaagggggcctgccaataccccaa

SEQ ID NO: 376220 - DNA, 581 bp, Homo Sapiens
  misc_feature (12)..(12): n is a, c, g, or t
  misc_feature (448)..(448): n is a, c, g, or t
  misc_feature (466)..(466): n is a, c, g, or t
  misc_feature (483)..(483): n is a, c, g, or t
  misc_feature (496)..(496): n is a, c, g, or t
  misc_feature (543)..(543): n is a, c, g, or t
acctcaggaggnatcaaacattatctatgtggccagcaatcattttgtttggagactcatccctgtccccatggcaacccaaatccaacaacttctccaggacaagcagtttgaattggctctgcagctcgcagaaatgaaagatgattctgacagtgaaaagcagcaacaaattcatcacatcaagaacttgtatgccttcaacctcttctgccagaagcgttttgatgagtccatgcaggtctttgctaaacttggcacagatcccacccatgtgatgggcctgtaccctgacctgctgcccacagactacagaaagcagttgcagtatcccaacccattgcctgtgctctccggggctgaattgggaggaaggctcacttaggctctggattggactacctggacacaggaaacgaagtcaattgggtaaagaagctggatggantctggttcaccagttcangcaccttcaccggttcnggggagggcattncccaccatttaaatcccaggaggaggttgcttacaattcttggacancacctggttcagtggttttttcccttacaatgtgggcc

SEQ ID NO: 376221 - DNA, 439 bp, Homo Sapiens
  misc_feature (24)..(24): n is a, c, g, or t
  misc_feature (44)..(44): n is a, c, g, or t
  misc_feature (46)..(195): n is a, c, g, or t
  misc_feature (200)..(200): n is a, c, g, or t
  misc_feature (241)..(290): n is a, c, g, or t
acagatccacgaggttcaaagagnatcggaaacccatccctggncnnnnnnnnnnnnnnnnnnnnnnnnnnnnnnnnnnnnnnnnnnnnnnnnnnnnnnnnnnnnnnnnnnnnnnnnnnnnnnnnnnnnnnnnnnnnnnnnnnnnnnnnnnnnnnnnnnnnnnnnnnnnnnnnnnnnnnnnnnnnnnnnnnnnnncatgnccactgcactgcagcctggtgacagagtaaagctccgtctnnnnnnnnnnnnnnnnnnnnnnnnnnnnnnnnnnnnnnnnnnnnnnnnnnctctaagacatacaggtaaggatgagtaaaagcaatgtaaaagaatgggaaagcgggtaaataaaaaggctctttatttttaagatgttattctgcatttcctatgcgttggacttcaaatgtttccagtttatgtccaaaacataaag

SEQ ID NO: 376222 - DNA, 334 bp, Homo Sapiens
  misc_feature (43)..(43): n is a, c, g, or t
  misc_feature (295)..(295): n is a, c, g, or t
tacttgctgagcttatagtatcagggcactaaatactatggancacattttctagtcaaatgtaggaaaaactttttcacagatttttacaaccctttttaggacatctcaaagagagatggcaaagatctgccaattatgtctcctgccatcataatgaaatcttaattaattgtaaactaatttcaaaaagttaacaatcattagctttctgaaagctaacaatcatgagttgtcttaaaatcagaagtgaaatgatggctcaaatcacaaaagtatgacacttattcacatncttattaattatttaataagtatcccattgcacatgtgg

SEQ ID NO: 376223 - DNA, 420 bp, Homo Sapiens
  misc_feature (357)..(357): n is a, c, g, or t
cctgtttctggcgtggccttccctgggagcgagttagggacacggaagctcacccgcttctgaatgggtccactcctggggatttccgcggccttccctgggagcgggttagggacacggaagctcacccccttctgaatgggtccactcctggggatttccgcggccttccctgggagcgggttagggacatggaagctcaccctcttctgaatgggtccactcctggggatttccacggcctttcctgggagcaggttagggacatggaagctcacgcccttctgaatgggtccactcccggggatttccacggccttccctgggatgatccactcctgggggattttccgcagntttccagatgacgtgcacgcacacttaaacacccagaatttaggggaggcattgatccagtga

SEQ ID NO: 376224 - DNA, 440 bp, Homo Sapiens
caactcagagaagctttaatagcaagaggtgggactagcctcctggcccgggagagagcggcggcggcggcgcgttcaactgcggcacaaaataagcgcgcgtcgttcagcgcagtgtcatcgccgaggcctctaggtccctggatcttggtctgcaggccgcacgcgcccttggggcaatggtcactccagtctccaaagtctccccagctcagcccaggcccctgcagttcctcgccgtctgaacagcggaacgcaacgttgttcgctgctgtgttgtcaccgagggtcgtgggtgcctccacgcgaagcagaaagccactaggtaggcgccgcgcgacaccacagcggctcactccattcgccccagctgcaaggcaaagggagatgcgttgcctctgcgggcccccccttcaccaagcccttgagactttccaagc

SEQ ID NO: 376225 - DNA, 496 bp, Homo Sapiens
  misc_feature (422)..(422): n is a, c, g, or t
  misc_feature (484)..(484): n is a, c, g, or t
gggcaaaacttcgagagttccctctgaagctggagctttttcctcagatccaagatccaattggtcaccaattcgtgatttccgtcggccaagtgcgtgggcattgatctacacgcgagtttctccatctctgccgaatggcaacttcggggtgggggaggggccctcccaccgtggattgcaaagtgtttagcagcatctgtctcctccgctgactagacacatgccagggggataacattctccctcccgcttcccccagccgcggcctagtgtcccagcggggttgggagaggcatgtgagggcgaagttgccccctgttgagaaccattgctgcgcgtagtccttcttctcttgaacttgtgcagaggactctccaggtgaaggctcaagggtggatccagctcgagaacaccctcgnttccccctcacagttcgggaccttagggttttagggttttaacatttccacatcatggaganttggaaaacctt

SEQ ID NO: 376226 - DNA, 723 bp, Homo Sapiens
  misc_feature (20)..(20): n is a, c, g, or t
  misc_feature (75)..(75): n is a, c, g, or t
  misc_feature (82)..(82): n is a, c, g, or t
  misc_feature (92)..(105): n is a, c, g, or t
  misc_feature (116)..(116): n is a, c, g, or t
  misc_feature (132)..(132): n is a, c, g, or t
  misc_feature (149)..(149): n is a, c, g, or t
  misc_feature (173)..(173): n is a, c, g, or t
  misc_feature (189)..(189): n is a, c, g, or t
  misc_feature (202)..(202): n is a, c, g, or t
  misc_feature (225)..(225): n is a, c, g, or t
  misc_feature (597)..(597): n is a, c, g, or t
  misc_feature (600)..(600): n is a, c, g, or t
  misc_feature (697)..(697): n is a, c, g, or t
  misc_feature (700)..(700): n is a, c, g, or t
aacctagggggggaccctgnccccaatccaagctgcaggaccggaattgcacacggcaccccacccgggcaacanagtaagnccttgccttnnnnnnnnnnnnnnccatagaaaanaataaaagggaataanccccctaccttcaaaancctaggaaaattaaacccgaattncctaagatgaaagttntgaacaagttatncccattgcccttaacaggtgaantcctgcccataatttattttcaaataaattttaggtggagaatgtgtagtgttaatgttggagattttaagacatcttgaatttgtactgtaccttttatctgagaggttcaagcttcacttgtgtttttatttgtgtttatctatcatattcaaagagaagtagggagagtccgtgcccgaggtcctcaattctaagatcagaggatgtccagaacagcagcagataggggcaggtttgctttaccccatatccctctcctggttcacttttgagagatgaatactttgggccagtaaaggtgaacaaaatatgtattttcatcactctgtactaaaaggacaggaatgttattaattaaaacactaaagnagnaatcctacattgctattaaaattaaactttgattaccacaataaaaacagtagcaagttaaaccttgacactttatacttaagcatttagagaaagnatnaaaattatttgaagtgagaacac

SEQ ID NO: 376227 - DNA, 488 bp, Homo Sapiens
  misc_feature (354)..(354): n is a, c, g, or t
  misc_feature (377)..(377): n is a, c, g, or t
  misc_feature (393)..(403): n is a, c, g, or t
  misc_feature (436)..(436): n is a, c, g, or t
  misc_feature (450)..(450): n is a, c, g, or t
gaaaattgccttcctaagtaatttacctcaaatggtaggccttatattttaagagaataccatatttcaactatattttcacaccataatattaggcccctatatatcttatagcactttcacaattttcctctaggaagtagacatgaaataagattaagagactaagaataagatttaaaccagcctcccctttggaagcataaatgatgtgattgcagctctgggcctgggagaatactgcagctttgtaaaatatatcaatggtactttcttgcttttacagtgggcagaatatatatacaaaggacacctagtgcagtgcgtaggaaccaaaaatgaggctaagtgtcntaaccaaaacaggttggaggggntaaccaaaactttacnnnnnnnnnnnatatttcccggggacctagttaattttaaattnaccaaaattcttcntttttccttttggaggccttttgatggggcccttaggg

SEQ ID NO: 376228 - DNA, 438 bp, Homo Sapiens
  misc_feature (363)..(363): n is a, c, g, or t
  misc_feature (380)..(380): n is a, c, g, or t
  misc_feature (413)..(413): n is a, c, g, or t
gaaaagagtaggaaatgggtaaggatttaacaggcaattcacagaagacaaagtaaccggcccctaaatgggagcatatcctcaacttcactagtaataaaggaaacgaatttaaaagacgatacatttctcacttcttctctccttatagctgtattccacctttgaccatacagcctgtttttatttatcgtaagcataggttaataaatacagggcttaccatgttaatatcttctttctatggatgcgtaacaacttattttatcattccgtttgtgactgaaattgaatttctttctgtaaacctgaaaatatctgagacaagcctcgatcaacttaggaagtttactttgcccaggnttaagggacacgtcttngggagaccaggtctgtggcctttctcccaaggntggatttccgagggcttccagtatt

SEQ ID NO: 376229 - DNA, 495 bp, Homo Sapiens
  misc_feature (103)..(153): n is a, c, g, or t
tgcaacctccgtaaaggcaactttattaaggttacaatttacggtgcaacaaaaaccattatgcatgtacagtctgattaatttggacaagacatatgcaccnnnnnnnnnnnnnnnnnnnnnnnnnnnnnnnnnnnnnnnnnnnnnnnnnnnagttattcaagtctcttaatactgggttcccacccatcaacccacagccctaggcagtcattgatctgctcttcattgatctgctctgtgtcactgtggattagataaaatcattcagtatgtactttatttgtgtaaatttgttttgctcagcatagtgtctgagaaacatcacagatgcaatgatgttgcctgaatcatcgcaagacatcgcttgaatcagtagtagtgttccattaaatgaatatgctacggtttgttattctcctattggtgggtacctgggctctttctggtttggggctacccctatgaataaagtgactatgaacgtttgaatat

SEQ ID NO: 376230 - DNA, 539 bp, Homo Sapiens
  misc_feature (446)..(446): n is a, c, g, or t
  misc_feature (485)..(485): n is a, c, g, or t
  misc_feature (506)..(506): n is a, c, g, or t
  misc_feature (521)..(521): n is a, c, g, or t
gaatggcaaaagttaggcagtatttataaggtacctgttttatgttactgatatctgtttccttctcttcttataccctggcatggtggcctgtagggtagtttcttcttaatagtcaagaacagagaaagctgaggagagcagaaaatatcttgcactttaaaatgcttattttgattccatattatctgaatttccagagaggatgtaaacaagagtgaccatatttttggagtccttcttgaagccagaacaacacacagtgggttgctaagagccgacaatcataattgacatttagtgtaccagattattctaaggaatttctgaaattaccatgtacatgagtaatggaaacaactgggaattaatgtgatgatgtggaacacaattttaaagtctggcttgtctgggatttgcaggtacccttccgccaccccccaacnggtagggtaggagagcaaaggggaaccggggaaaattcngttaccattaaatggggtgantattccccgtttttngggcccttatatttgtag

SEQ ID NO: 376231 - DNA, 469 bp, Homo Sapiens
  misc_feature (88)..(88): n is a, c, g, or t
tcttttttcttgatggtgaacaagttttgtcctatgctatggaggaggcatagcacagtgattaagagcttgggctccgtagttgganctatgtgggtttaaactttaaaccccagatcaattgtatattagcctacatgagcctaatctctttaagcttcccatttcctccccggtaaaatgaaattggcaaataactttctaaggttagtgaagataggaaatactcgaaggctgcttactatccttattacattaaagttatgggtatcttgaaactacaaacctgatgtataatttcagtttcctctcatggtcttgttactaccatcatactcttgatattttaggatactttaggattacctttgaagaaccctttctagttaattctttgaatatgttttatacttatttgatggtagttgtaactgtgtacatttgaataaaatttctaaccataaaattt

SEQ ID NO: 376232 - DNA, 479 bp, Homo Sapiens
  misc_feature (37)..(37): n is a, c, g, or t
  misc_feature (45)..(45): n is a, c, g, or t
  misc_feature (66)..(66): n is a, c, g, or t
gatcaaatcctaaagtgcctagaagagaaacctgtgnttggggcnactggaataaacaagtgatgnccctagaagatcaacacccccatcagtccttaggagtatgacccctattccatggacaaggggtttccaatggacagccctgagtgcctcagccccccatcctcctctccctagcaagacaagcagtctgttgcctcagagggggaaactgatgtcatttaacaggaggtcaggatttctggttctacttcaacaaacagtgcataattttggacacagcatcagatttcctgacttcttacaaaggacagctaattaaaaacgtgtcaatctgtagtaattagttggagattaacaagggcagaagagaatccaagtcttaaaactctatgtgggatacatttctgatgaagcttctatttgactaatatactgtgatgatggcactattcgattttaaactatggagacag

SEQ ID NO: 376233 - DNA, 577 bp, Homo Sapiens
  misc_feature (42)..(42): n is a, c, g, or t
  misc_feature (240)..(240): n is a, c, g, or t
  misc_feature (408)..(408): n is a, c, g, or t
  misc_feature (459)..(459): n is a, c, g, or t
  misc_feature (484)..(484): n is a, c, g, or t
  misc_feature (503)..(503): n is a, c, g, or t
  misc_feature (535)..(535): n is a, c, g, or t
ttttgtgtcactgtgaggagtgatgtttctaggcagtagagncctgggaatgggtttcccagttcagactataggatgttattgaaagacataaaatagatagcatgtcctggaatgtgaagacttgctatcacaaaaaatgtcagttctccccaaattaatttataaacctagtgtcattccaattaggattcaaacaaagtatttttgttgggggtggtgagcaggggggagttgttntgcttttctcttttctttcatttggatgtcataaaatatatacagaagactaaaatcacaagaagagccagaaaacaatttttcagtaatcataatgggaaactggcatcactagatattaggccatcttataaagctacttataatccaaacagcacagtgattcantaaaaatagctgcatcagtagcagaggataattgacaaatgcatcccagantaaaagataatttaatatatttaanctcagagggaaaaaatggntttttaaagaaatggtactggacataactgantatccagctggaagaaaggaaaacgtgcatcatatgcaaaca

SEQ ID NO: 376234 - DNA, 201 bp, Homo Sapiens
gtggaagggaggctgtatgcatatagaatgttattattggaactttattattgtcacattgatgttacatttctcaggaaatatatgctaatgtgtttctacttgctttttttaaggccttgagtagatgtgctgaatattgaagctatttggctgcctagaaaatatatcttacaatttataagctgtatgttattattt

SEQ ID NO: 376235 - DNA, 247 bp, Homo Sapiens
taagatacttgtgtactgcaaattggcaagaatttaaaagaatgctatgaatcgatgtgaataaggatatgggaaaacagacatgcatatgccggcagtgggggtgtaaattgcacaaatatatttctaaaaccatgcaaatttgcctttactttatcccagctgttttatgtctaggaatatattctgtgaaattacaggcatgcagaaagactacagacatgcaacatcattcatgatagttttc

SEQ ID NO: 376236 - DNA, 537 bp, Homo Sapiens
  misc_feature (68)..(68): n is a, c, g, or t
actctccccaacttcaagcctgctggcaaccaactggcctaacaacgctggtaatcccgctgcctttnccctgcaagctgcctgcctttcaactaaaggccacttcctttaaaacctggtgaaaaggcctcctcctccaaaaatgaatcgcctccttcccactaaccttaggtcctactgtactcttggtgaatcacagccctttagagctccctcaagggccctaagcatcttttgttagaaaattcctggctgaaattcctcatgagatgggtccagggaaccttggagtggcagcacttgtgtcacatcctaaaggcactcctctgactaaagagaagtggcagctgagcacactgcctgcccagggattttcttctgctctaaaggacattattaagacaactggtctgtactgtattgcctgatagtatcatatcaatgtcaatttcctcattttggtgattgttctaataagaatacgtaagaatgtgtccttgtttttagaaaatacacattaaatatcgagggatagag

SEQ ID NO: 376237 - DNA, 516 bp, Homo Sapiens
tgtccctctaggactctcccagcttcatgctgctggcacccacttgtctatcacgctggtatccgctgcttttcctgcagctgctgctttcactaatggcacttcttaaatctggtgagaggcttctctcaaaaatgatcgctcttccacctaaccttaggtctactgtactcctggtgaatcacagctctttagagctccctcaagggccctaagcatcttttgttagaaaattctggctgaaattcctcatgagatgggtcagggaaccttggagtggcagcacttgtgtcacatctaaaggcactcctctgactaaagagaagtggcagctgagcacactgcctgccccagggattttcttctgctctaaaggacattattaagacaactggtctgtactgtattgcctgatagtatcatatcaatgtcaatttcctcattttggtgattgttctaataagaatacgtaagaatgtgtccttgtttttagaaaatacacattaaatacgaggg

SEQ ID NO: 376238 - DNA, 263 bp, Homo Sapiens
attgacaaattccactggatgggtcattgggtttgcctaacctaaacctccaaatggaaaggatacaaatgaatctgaagttccattttaacgtatcagtgcctacaattcaaatatttttgagttattctctgggacctttctatataaactgtttaaaaatagccttttgtactttgcaatatgcatttctcccctcattcccttcctttttataaaacaaggttttcttcactggaaaaggataatttactatagtaaat

SEQ ID NO: 376239 - DNA, 615 bp, Homo Sapiens
  misc_feature (555)..(555): n is a, c, g, or t
  misc_feature (567)..(567): n is a, c, g, or t
taatgggcttaagcgagctgggggactcattcatctggatgcccttgatgggaaatcaaatagcctggatgattcaactgaagaagttcagtctatggatgtgagtcctgtttcaaaagaagagcttatctctatcccggaattttcaccagtgagtgaaatgattcctggggtgtctctggaccaaaatggaactggtaaatgcccgagcacttcaagatctcttagatttcactggtcccccgacattccccaagagatccagtgaaaatctcagcctggacgactgtaacaaaaaccttatcgaaggatttaacagtcctggccaagaaactcctctcaacaccttctgttgacaaatacagcatccctttaataaaaggtgtttggagaacccgtaaagctgctgatagtcaaatccgagctactagctgcttgaagaagcttctgtcacccttaccgctggatcccaaattattagctcggaatgtaactgtattcctagggtagtatgttcaaacactgggccactcttgggtaggaaaccttggaaantttcaccttggngggggttttaggcaaagttttccttttaccagttctggtttatggagg

SEQ ID NO: 376240 - DNA, 658 bp, Homo Sapiens
  misc_feature (28)..(28): n is a, c, g, or t
aattttggtttccttgtggcgaaaatgnggctttccaaattaaaatgaccttttcttcttggaaactttttgtttggactggtataattaagggtttggaaagattcataattctgagagaggtttgcaaccaggagatacaaagaagtctcagtagtaatcttgttcatgtgcttttacagccagctacatttaagaatgtattagttacagaaattatatgtctgtgtatgtgtctctactcaataaagtacatgcctccacataatgcggtgctgtccatctcggcaaatactggccaagtccctttatgacaggcacacagaaaccatagcatggtctggctttcagaaaatgcctctcatctttcctggaaccttattttgctaaatgtctgttttcttgtgatttgttgtacctcacagcaccattgtgaccatggtgatgcctcatttgcatgatatgtaccttgtgtttaatgtgaaatacattttcattgaagagtctgatgacttgctagcgttttattttttctgtaagctcaatgtgctgaaaccaaaccaggcttttaaaaacctgtgtagaagaaaaccaaaaaatcctgtgtgggtgtcctttccctgtcaaactcattaaaaattcctttgttgccagtgcc

SEQ ID NO: 376241 - DNA, 501 bp, Homo Sapiens
caagtccccggagggattctgcctaccggtccatactgtccctcccagaggttcctaatggatgccctttgaaatttgggatggaggagacacacagaaagaactctggcacctatgaaacctttcctgtgactacttgttgaagaaagacaattaatgaccgaacagctgctaatgggagcctttagctggagaacttgttatgaagagcatttaccagcactcagaggaattcatactgataaacaccttacttacatgccttatttttgttctaaaatgcacaattcatccttcctaaatcaatttccttcaattacaaacagaactccttaagacaagaaagatttatcactggtttttaaaaaaatcatcctctgagctcgttaaagcctacaataggaatcatttccctgaaatgttcaaaaaatttcccacatatttgattggtagctagaccctcgtattgcataagggagttgcaaacaaatacttttgaat

SEQ ID NO: 376242 - DNA, 530 bp, Homo Sapiens
  misc_feature (485)..(485): n is a, c, g, or t
  misc_feature (490)..(490): n is a, c, g, or t
ctgaagttaaaaaatgaaggtcacaagtggcagttgcctgacccctgtccccagacattccttgcccgataaccatgaggttccatagttcggatcctgaatgggcctttaggaaatgcaggcctttcccacaccagctagaagggtagccaggcagtagaatttcattcaaccctagggttcccacctgacagagggaagttcggaagtcttactgcttcccacgtccccttcccttctaggcatttatggaaagctttttagtggagcaagagaattctacaatccagcttacctcccaccttaccccaagagccatagctgacggtgatgtgtgaatgtttatatataggtacacgtttgtatgtatatagatctaattggcacatatatggggtagatatttatttatatgttggcaccctaaattattagtaattataataattggtggaagctgtttctaaagctgcttgttcctgggntctgnggaaccacgggagcctcacactggggagccgtactccagg

SEQ ID NO: 376243 - DNA, 385 bp, Homo Sapiens
  misc_feature (341)..(341): n is a, c, g, or t
  misc_feature (355)..(355): n is a, c, g, or t
gaaaaacttcctagtaagcatctacttcaggccaacaaggttatatgaatatatagtgtatagaagcgatttaagttacaatgttttatggcctaaatttattaaataaaatgcacaaaactttgattcttttgtatgtaacaattgtttgtcctgttttcaggctttgtcattgcatctttttttcatttttaaatgtgttttgtttattaaatagttaatatagtcacagttcaaaattctaaatatacggtaagggtaaaggactaaagtcacccttccaccattgtcctaggctacttgggttcccctcaggaaaaaaattcatggatactcattcnttatggatcttccngggggtttttgagtcccctttcaaatcccc

SEQ ID NO: 376244 - DNA, 332 bp, Homo Sapiens
  misc_feature (31)..(31): n is a, c, g, or t
  misc_feature (73)..(73): n is a, c, g, or t
  misc_feature (83)..(83): n is a, c, g, or t
  misc_feature (142)..(142): n is a, c, g, or t
  misc_feature (293)..(293): n is a, c, g, or t
  misc_feature (310)..(310): n is a, c, g, or t
tgtcactggaataacttcaaggttattatgnctttcattcccaaatggatctgtcctcagctctggacccaantccccttacntcattttggcaaacactaagtcaaatagtgaaatgcctgtcactacatagaacctattncctggggcaaatacgaacagattgagtttccttcatcttgtgtaaatatgatgaaacagagacctggtaacttggtgacactgttaaaccctttttgggataaagccaaatgtaaatgaaaacattaaacagataaattgtggtgtaaagnacttttctgaattgagnaaaataaatgtaattttggaag

SEQ ID NO: 376245 - DNA, 498 bp, Homo Sapiens
  misc_feature (251)..(259): n is a, c, g, or t
  misc_feature (441)..(441): n is a, c, g, or t
ttccagaaggcaaaaagacattaccatgagtaataagggggctccaggactccctctaagtggaatagcctccctgtaactccagctctgctccgtatgccaagaggagactttaattctcttactgcttcttttcacttcagagcacacttatgggccaagccaagcttaatggctcatgacctggaaataaaatttaggaccaatacctcctccagatcagattcttctcttaatttcatagattgtgnnnnnnnnnaaatagacctctcaatttctggaaaactgccttttatctgcccagaattctaagctggtgccccactgaatcttgtgtacctgtgactaaacaactacctcctcagtctgggtgggacttatgtatttatgaccttatagtgttaatatcttgaaacataggaggatctatgttactgtaantagtgtgattactatggtctagagaaaagtctacccctgctaaggagttctcatccc

SEQ ID NO: 376246 - DNA, 501 bp, Homo Sapiens
  misc_feature (388)..(388): n is a, c, g, or t
  misc_feature (400)..(400): n is a, c, g, or t
  misc_feature (409)..(409): n is a, c, g, or t
  misc_feature (415)..(415): n is a, c, g, or t
  misc_feature (428)..(428): n is a, c, g, or t
  misc_feature (440)..(440): n is a, c, g, or t
  misc_feature (467)..(467): n is a, c, g, or t
  misc_feature (489)..(489): n is a, c, g, or t
gcacctgtaatgtcagagcccttgtctggcccttggtggcaggtgaacgaaagcagtggagcctctcaccttccagtagcctctcacattcttattttaccatttttgtcctaattaaggtagcctagctgattctagaagacagccatcctacgtgcacccccaccttgtgtccacatcttctccaggcaggtttcaacctatcagcagactcaggcacacactggggcacagatagagaaccagggcggcagcagttgcttcgcagacccacccagggagagctgtgatgggttctgcccagatactctgctcgcccacccacaagggagcaatagcttatatttgttacattagttttaaccaaggcactttctcttcttaaccntcacaacaattnttatggaanttaggntggggggaggatnattgttccttanttttttcacaggttgaaggaaaccaangttttggggaagttttgtgganttcttttggatt

SEQ ID NO: 376247 - DNA, 253 bp, Homo Sapiens
  misc_feature (39)..(39): n is a, c, g, or t
ccatttaaccccctcaaaagtccccctatgagatagganccctataaatgaggtaacctgaggtaaaaacagtaagtaatatacctcaagatccacagagctggtaaaataaagaactgagaataaactccaggtagcccctgttgctaaagccctatattcttaacccacttcattggtggtttttaaaaaatttaaatacaacccactccaaaaagtaattttttaagggctgggtgtggtggctcacaca

SEQ ID NO: 376248 - DNA, 531 bp, Homo Sapiens
aaatacggaaacccccatagacagcagttttccttataatacaaactatttcagtgacatattaaataataaataccttccagaacaaccattatgaagtaatacccaatgcaggtacaatttcattaacagcagatccaatatctgtgatgtaaatggctgtttaaaactcttcaaggactcctaagaaagacaatgggactcctcatgcttaggcaacagctagaagcttatgccatgttcccatgggagggaatcaagatgggaaagcaaagcccctacccctaccttaacacacctagaccagggactcagcatgcccatcagtgtgtatgggcatctctctgcaaaggagtttcacatgaaaccataactgtcttattaaatcatctgcccatgtcataacctcatgaaagccttctgagtaaatgtaaaacattagctttcaaagcatgtcatcattactatcttcggaaaccacgacataaatctgatgagattttgagccttcacccagaaaaatgctttgtc

SEQ ID NO: 376249 - DNA, 484 bp, Homo Sapiens
  misc_feature (366)..(366): n is a, c, g, or t
  misc_feature (398)..(398): n is a, c, g, or t
  misc_feature (407)..(407): n is a, c, g, or t
  misc_feature (427)..(427): n is a, c, g, or t
  misc_feature (432)..(432): n is a, c, g, or t
  misc_feature (453)..(453): n is a, c, g, or t
tggcacgaggccgtaagagttgcaccatggacatctgacctcatctaattagaagtctgtgagtactgatcacctttatgatcacactccttgattagaaattaacccaccacttctcagttctcaaaccagccagccggcagtttccttaagacaactggctctgcctgctgactttcacacaaaacagtcaggcaccactggtcatgactgcagagatcttacccacaaaccttactccaaaaggagggggtgtaaaacacttccaaaatgtcagaataagggacctccaaaaatcttgcacctccattaaaacaagggaaacactggggaaaattggtcaaaaggcacttttttcagattctnggaaaaccaagggtttacaacattcctggggntttttgganttcaaggcaattggccaccntttcnggatgttgagctttgtggggnttttaactttttcccaggcccttttttccct

SEQ ID NO: 376250 - DNA, 407 bp, Homo Sapiens
  misc_feature (27)..(27): n is a, c, g, or t
  misc_feature (119)..(119): n is a, c, g, or t
  misc_feature (362)..(362): n is a, c, g, or t
ccaggtgaccaagcaatgggaaaaatntggcacccaccgtgcccccatgaaattggttcaatgtttagtttagatattggctaacttgtgctattaaccttttgacaagcgtgtagtantgtttgttttgggtttctttttgatttataactatttagtagtccccagctagctaccagtacagattttaccccatgggtaggattctattgttaagccacataacaaagcacacttaattctgacaacactgcaaatggaaaatacgaaccaaaaaaaagttacaccgataagttcaacaaactgtccatttttgatatttgcatgctcccctatggactggctgtggcaatgtaatgccntgtataatgttttcaaataaaaataaatgctttatgaaagcaccg

SEQ ID NO: 376251 - DNA, 338 bp, Homo Sapiens
acagaattggtcttgaattccaaacctgctatttacattctgtttcacaaggtgagataatgtatgaaaaattgcttaaggcagtgtcttcctcccacaaagaaaaggcagctacagatgcagttatttgctattatgcaattcagtgagaggccattgtagaggatattctccaaaactccctgacaatgagtcacttcctgattgataatttcacatagctgcattcttaggagctcacttgggaacctaaaccatggagaagttaagattttgtctcagaagtctcctctgagacataggtcctctgagacacaggctactttaaggaaaagaaa

SEQ ID NO: 376252 - DNA, 337 bp, Homo Sapiens
  misc_feature (26)..(26): n is a, c, g, or t
aaaactgcccacgtgaagtaggtgcnccttggttccccccccattgcacaggtgagtcatcagaggtgcattcctagggtcaatcagaggggtgagacaacagcaacgataaacccaattcatcttcaattaaggacacccatggacaaaaatatgacagactgggaaaagacattggcaatgtctttgactaccaagggattgtatttaggtaatatcaagaacatcagccaacaaagagccaagaaataacccaaatagaaaagagacaaagtgcatgaaataaaagaagaaattcaaaatgttcactaaaaaataaagagatgctcaaatccac

SEQ ID NO: 376253 - DNA, 635 bp, Homo Sapiens
  misc_feature (134)..(134): n is a, c, g, or t
  misc_feature (141)..(141): n is a, c, g, or t
  misc_feature (377)..(409): n is a, c, g, or t
  misc_feature (424)..(424): n is a, c, g, or t
  misc_feature (470)..(470): n is a, c, g, or t
  misc_feature (511)..(511): n is a, c, g, or t
  misc_feature (516)..(516): n is a, c, g, or t
  misc_feature (577)..(577): n is a, c, g, or t
  misc_feature (598)..(598): n is a, c, g, or t
  misc_feature (604)..(604): n is a, c, g, or t
atcagccagccaggcacccacagcctcagctcctgtgcagttcctgggcagcacagtggaagtgggagcctggtccttcccctgcccatggagagctctttaagggatcccagcctgcccctcccacttctctncccaagnccaggttcccggcatgggtgggttatgctcatgctggcaatacttgaaacgggtttattaatgctgggtattttgcacaattttatagacctcttttctacatagtcttttttaaatggaaggagaaaatgtcagccacattactgtctgtgtagtgccaggtgaagggttatcagaaggctggttggttttaataagtttattccaagagaccttctggctggaatgagtgagannnnnnnnnnnnnnnnnnnnnnnnnnnnnnnnnccctgtatgaatgtngctggctcccatatcccctgggctgccccctgccccatcccctttnagtgtcagaagcactctgagccaaggggacagggggacgtncactngtcacgagaaaacctgggctccactgggctagccagcctctatcttcctctctatggactnagacagcagttttggactttncacttnccccagccttccaccagcccaggtaggttca

SEQ ID NO: 376254 - DNA, 594 bp, Homo Sapiens
tgttaaatatattgcccaagataatatgtgggggaatgtttgttttatatgcatattgtatcctgactgtgtgcagaacacattatgtgtattgcatatatgtaaaagaagtgtacaaggaagtggccatccttgttcaagttacgtatctagttagaacaacttcccagtccattggagttctttgagaagcctcagggaagtagctctgggtccttctaatcaacctcccattactgcgccagtaagtttctgtttcttataaataaactctttgctattcagaaaacctcaaggggcccccacattcactaagcatggggctcctaactggggtccaggtccatagagtgtaggaagaacatattagaacaatacttgtgcttatttttatctagcttttttatgtttgtgtatgttttataatggcataatagtacaatggtacatgtacataattttaaataaataaatgaatgaatgaataaataagcatatgcctggtgcatgcatgtgacaatattgtcgcaggtagggttgcattcactgaaatctggagagcactgaactggagaataaaccttccttatactc

SEQ ID NO: 376255 - DNA, 481 bp, Homo Sapiens
  misc_feature (343)..(343): n is a, c, g, or t
  misc_feature (412)..(412): n is a, c, g, or t
  misc_feature (419)..(419): n is a, c, g, or t
  misc_feature (451)..(451): n is a, c, g, or t
  misc_feature (456)..(456): n is a, c, g, or t
gaattcaaagcaaaattagcaaagggaaaaagcaccttgggtaaagtcgggggaggccaggctggagcttccagagtcctcttccagggggttcctacaggatgcacttaatgtctttagcaatgagttgtgacaacatgtaggagatgttgtctagcagggaagctcattagaaattcagtgcccatggtgttttgctaggggccagtcatgtgggcacctctgcctggcaggtaccaaaattctaggctctgggaaggaaagcaggtgctgagcaagaaccatattgtttgtacaaataatttcggcccagtgaactactctcatcagttaggggatggtngggaccctcctgaaatctggggttcccagatgccagccagaattcctaaggagagcagcttcaggcctntgcgttnaactctgttctactcacgggtgatcttcatgnccatnccacccagggttttcgaggggcaag

SEQ ID NO: 376256 - DNA, 398 bp, Homo Sapiens
  misc_feature (17)..(17): n is a, c, g, or t
  misc_feature (25)..(25): n is a, c, g, or t
  misc_feature (32)..(32): n is a, c, g, or t
  misc_feature (358)..(358): n is a, c, g, or t
atctggatgtccaggtnaccatagnagaacanggaaggcactgttgaggaagaaagaatagtgtgtgcagaggcacagaacagaagcatgaggaacgcattctcaaaactggatttcccaaagttcaaacccttcctttgaaaaggatatgttgaaatgatcctagagatgagattcctaggggatgtgataggagatgaggctggaaaggtaggttagagttcgagttctagaaccttgaatgatacagggtatattgtgtaggtagggaggacacgagcagccaggcacagtgactcatgcttataaccacagtgctttggaaggctgaggcttgaggccaaaagtgcaagaccanccctggtcaacatagtgagaccccatcactacaaaaaaaa

SEQ ID NO: 376257 - DNA, 190 bp, Homo Sapiens
cagggattctatttacttgaagactgtgaagttgccattttgtctcattgttttctttgacataactaggatccattatttcccctgaaggcttcttgttagaaaatagtacagttacaaccaataggaacaacaaaaagaaaaagtttgtgacattgtagtagggagtgtgtaccccttactccccatc

SEQ ID NO: 376258 - DNA, 259 bp, Homo Sapiens
  misc_feature (12)..(12): n is a, c, g, or t
  misc_feature (47)..(47): n is a, c, g, or t
cgaacccaaatnactggcccaagttccaccccttgccccagacctcnagtccccttacaagaccatgggtgcagcccctaccagcagctagcagaagggctgcccggaatctctagtcctccctggaatcaaatccaggtccctcttactgccacagctccacacttgatcccaagcctcctggtggtcaaacccagacccttcttgctacagtagtttgtcaccccctgctattaaactgccattgacttttagtctc

SEQ ID NO: 376259 - DNA, 420 bp, Homo Sapiens
  misc_feature (22)..(22): n is a, c, g, or t
ttccccttataccctcctcccnaactggctctcctgcccattcccagaagttggctttccatttccattccactaaacagtttacgaactgaattaaaataaatgagatgcaaataaattcccaggctttctcccctcattttcaaattacattttcagtcccactcaacctgttataatctcatagtgattttcatttaagagagctaaatggatatgtgattgttgttacaggaactaacaccagacaattaaatgttgaggtgttgatagataaaactgtgttttgatttgcataaacacgatgccagcaaatctaaccctggcagaaattcagttataagacttgtgtgcctaacttgggctaattaccacaagtaccattattaaagaaagagttttaatatttggagttgggat

SEQ ID NO: 376260 - DNA, 634 bp, Homo Sapiens
  misc_feature (37)..(37): n is a, c, g, or t
  misc_feature (49)..(49): n is a, c, g, or t
  misc_feature (55)..(55): n is a, c, g, or t
  misc_feature (64)..(64): n is a, c, g, or t
  misc_feature (80)..(80): n is a, c, g, or t
  misc_feature (102)..(102): n is a, c, g, or t
  misc_feature (414)..(500): n is a, c, g, or t
  misc_feature (550)..(565): n is a, c, g, or t
ttgttacccacttcccagtttatcaggtccccctttnaccaagagttcngaaggncttcacagnggagcctgaattcatnctgtagagtagtaagattccanccagccagagttggggaaccagagttgaccaggccaaagaatgtcgcccagtggaaagcccaagaggcccaaaaagggaatggcatttcagaaaaactaattccagtgtggcaagtggatgtgttagagagtagggtagaaaaagaagatgcagccagagactgcacatggaaaagaacatggtgccaggctaacatttatcctgagggcaatggtgagccctacctggacttcattagcagagtgatgtgctgggatgtgtggcattagaaagctctctccagcctgggcacagtggctcatgcttgtttnnnnnnnnnnnnnnnnnnnnnnnnnnnnnnnnnnnnnnnnnnnnnnnnnnnnnnnnnnnnnnnnnnnnnnnnnnnnnnnnnnnnnnngcaatatagcaaaaccctgtctctacaacaacaaacaacaacaacaaccnnnnnnnnnnnnnnnngtttaaatagccgaccatggcctggcacagtagctcatgcctataatcctagcacttttgtgggcaagg

SEQ ID NO: 376261 - DNA, 464 bp, Homo Sapiens
  misc_feature (442)..(442): n is a, c, g, or t
cattaatggtacaccataaatggtagatctcaaaagtaatgatttcaatttttaaaataatttttttcaaatgcgcatatctgatatttcagagaatcacttcgtacaaagtgatggaagcccagtatgaagacctgagtttggaagaatcatgaagttgtttgagcttctgctttgtccttttgcctgtctttccctcattcctgccagcaatggatagtgtcttttctcagattgatgcagatttgccagagatgagatgatctttctttaggttttctggctttctgatcttcccttcctagaaattagagaagctaagtatttgggcttcaagtactttcctttctagggcctgaggaatatacgtatgttccataaattaacaaacccaaggccaagaactgtccagaggaaaggaacatgagtggggattattaantgcttatatgtatgggggtccc

SEQ ID NO: 376262 - DNA, 330 bp, Homo Sapiens
tttcgagacagggtcttgctatattgcccagaatagcctcaaactcctgggctcaagcgatcctcctccagcctcccgagtagctatagtttggttttaatcagtaaatatttatttagcacttggactgctctaggcactatagggtacaaaattagttgtattttatcctctcatcccagctgtgaggtaggtttgctaaagctgtaataccactaagcagttttttcaatactgttcccaaggacagataatattagcaaatcccagaagcatttctaaacacttgtaggaaaaataaagtcggacttaaaatttttagtatctttg

SEQ ID NO: 376263 - DNA, 481 bp, Homo Sapiens
ccacttgctagtttgggatggagagtcagatatgttgaaagatttcccaacgactctaatttatgagcaagaaagttgccttagagcccccagcccttttgaccttcatagtctttccgactactttatgcagctcagcaatcagtactgggattgggaactgcaagaatatgaaatgtaaatctttattgatttatatccttccttaccttttttgacatggaaaatgccaaagacactggtcaagtttactctcagctccctacctccagtgagggggtctcttattaggaatgaaatatccaagagatgggcggtgctgcaggggagaccaaaactcagaggaggcattcaaacacttctagcaggttgtctactccatccaactcaaaacctattcaatatgaaggccgagggaatgtgctcacaactccctattaagggaaatcaatataaacccgcccccaccaaccaaaaaaaa

SEQ ID NO: 376264 - DNA, 432 bp, Homo Sapiens
  misc_feature (46)..(46): n is a, c, g, or t
  misc_feature (88)..(88): n is a, c, g, or t
gggaccccaacatggaggcctgcaaaaacctgagctgtgaactggnaaccctggctctggggccgaagtcaccttgcacaaggagganagtggtatggccttttggcagaccactggtcctgggcagaagcccacctgtcttgcagcccgtcctgcaaccagcccttttgaagagcagcttctgtgttcctcccctctctgagcagaactgatgctcctcagagtagtgggctggcgtccaaggatttgagccctgtcgagctcacggcaacctgggatggccgccggttgccaaggcgcctctctgcagtcgggctggtaggagggagtgtctggaggccattgctgcctccctcaacccccggggtcaactgtacccagcctagagccaagaaatccttcctttttattcattaaaacaaaatcaacctg

SEQ ID NO: 376265 - DNA, 554 bp, Homo Sapiens
  misc_feature (31)..(31): n is a, c, g, or t
  misc_feature (40)..(40): n is a, c, g, or t
  misc_feature (58)..(58): n is a, c, g, or t
  misc_feature (104)..(104): n is a, c, g, or t
ccataaacctaccctttgccaaattaacccntaaataccnggttaacaagtgtaagangcacatccatccacctgcatggcccatccaatggatttggcaggcntacctgggtagtgtaaattattccagtctttccaaaggtggcaagatccccacccggcagaatcttcactcaatgaacccaaaaacactgtaattaacaaaatataacaaagttccaccattaaaaactaaatgtacattaaccagagaactaggtcctgacaccagtacatacattatcctcagcattttggaaggcaacaaatgatgagtccaagtataagctaatggttatcacctgaagcttcaggtagaaagctaacttgtgaatctacctctcattttaatgttgttagactgtaaacagcaatttccaaatctaaaagtagcttagttgacttagtattgttatataaagtagtgtgacaaaaaacaagaactcccaaaggaattatggtaaggtacattgggaaaacccagaacaatgttttagataaaaaagtgcataaat

SEQ ID NO: 376266 - DNA, 427 bp, Homo Sapiens
  misc_feature (52)..(52): n is a, c, g, or t
  misc_feature (180)..(180): n is a, c, g, or t
  misc_feature (225)..(225): n is a, c, g, or t
  misc_feature (384)..(384): n is a, c, g, or t
gggcctacaattataatccgtctgtccttggctttgcaaccataatttaagnaagccaccgtatagttgttttttaacccaagttacatacaatctcatgtactgatttgagacttataacaatttttggagggggcatagagaaaggagtgcccacagttgaggcatgaccccctccantcagacctctaactgttgcctgagtacacagatgtgccctgattntctggcccattggccatagtactgtgcctaatcaatgtaataggtttattttcccaatcctcaaactaaaaatgttcataacaagatgaattgtagactagtaacatttgatgcttttaaatatttgcttctttttaaacaaaaactaaaacccagaangtgaatttttaggtggatttttaaataaaaaagattgattgag

SEQ ID NO: 376267 - DNA, 452 bp, Homo Sapiens
  misc_feature (20)..(20): n is a, c, g, or t
  misc_feature (43)..(43): n is a, c, g, or t
  misc_feature (50)..(50): n is a, c, g, or t
gaatatagccatgtaagagnattccgggtgggtacctcccttnccccccntgttccctgtaatggaggtttaacactgacaagaaggtgaagtcccagtatttggggataagaaagatgtaaagaatatatgaaaatatgtcctgcattcctggatattaaccctagtgttcctgtgtattatatacatttttcccccattgggacagacaattattttaaaagttgtcaactgtatctatcatgaagatcttctagtgctaccaacaagtacatattttggtcaacactgtcctctttggaaaataggcaaggaaagaatccaactgctttattccattagagtaaatattccagcagctggatctaatatgttccattaaggtcaggaaaactgaggacagctggcatggaaataagtcatcctttcatgttggttgtgcaatgaaaagt

SEQ ID NO: 376268 - DNA, 401 bp, Homo Sapiens
  misc_feature (13)..(13): n is a, c, g, or t
  misc_feature (43)..(68): n is a, c, g, or t
actgctctcccancccgggcaacagagtaagactcccacctcnnnnnnnnnnnnnnnnnnnnnnnnnnagaagtccttctgtaacccattatataattattaatttttcagattggtttggcagattatcattagtttgacagattagtggcagattattttctgccactaactacaaaatttgaaaaaattaagtcagaaaatcatgccctaggttctgaaagacattaacacgggatatttctgagttgactgtttatgattgttgatctggaaatcaacttcttaaaacactgagacttgaaatacaaaggctatgagcattctgtgacacttgtgtagtaaaatttgctacatattgaaaatttattcttcataataaatagttttcagaaaaaaaa

SEQ ID NO: 376269 - DNA, 529 bp, Homo Sapiens
  misc_feature (25)..(25): n is a, c, g, or t
  misc_feature (115)..(115): n is a, c, g, or t
accgaaaagagcggcagagaacctnggtttaaagaaagctgtgtgaagaaaaccattaatgacctaatggcaattgtaataaccccccaggtaaaagagggatgtcaaattaaanggactgtaaggaaatacattccaaacttaggtccattaatattaacagtgaacataatcaggaagcttgcagaagtatgtagcatctctgaattattgaatttgaacaaaggtttccaatagaggtcacactctttttgctctcagacaccattagtgcaaattcagatacaatcatttttacatttgcaggctcaggtacgttcaacagaaggtcaccgagaagtatgggctggttattttagcatgacagaatgcaggcttggaatttctccttgacatggcagaagaaataggaatgatgcccagaggactggaataaattcaaaatgcttggttttccaagttctattttaataaacttcggaaaattaacctttccctgaaagacacgtccttggtttggcacacaggg

SEQ ID NO: 376270 - DNA, 509 bp, Homo Sapiens
tgggattttaagctgctgctttaaatcctagtgctggaataagtcaaggtacttcagttcagctcttgcctctgtcactaatcttgctttatgaactcctttgattttctgaataagttccagaaggttctctattattctgtccttcttccaaactggaaaatggctgtatcctaattcctcaggatattttggatgtgtgcctcaggtaatttatgtggaatgtgtaaagcaagatgtctccaattctgaatattccttccccttttcccaatcctccactcttggactacctttataacaacaccgagtacgcacagacctgaacccatgcccaagaagcacacacaatgactggagctgtcgggaattcctgtcagtggcattccctgagcactggctctgtacaactcaattataattttttaagaatcatacctctgtatagatcttttggactgtactgattaaactttgatattgtggagtaaattcagaagtgcaatttt

SEQ ID NO: 376271 - DNA, 320 bp, Homo Sapiens
  misc_feature (20)..(20): n is a, c, g, or t
  misc_feature (54)..(54): n is a, c, g, or t
  misc_feature (61)..(61): n is a, c, g, or t
  misc_feature (66)..(66): n is a, c, g, or t
  misc_feature (73)..(73): n is a, c, g, or t
  misc_feature (110)..(110): n is a, c, g, or t
  misc_feature (137)..(137): n is a, c, g, or t
  misc_feature (169)..(169): n is a, c, g, or t
  misc_feature (172)..(172): n is a, c, g, or t
  misc_feature (187)..(187): n is a, c, g, or t
ccccttaacaatccaagagncctgtaccatatgtgaaaaaatacaaattaaggncccgtgntccanagacaancccaaactgtgtttcctgaagtttgtgccacattttnccctcactgtaatgttattttaacagnctgtttgttaaaatagtgaataatttaatganccnaaaagtaacaggttncgtgtgagtgtgcttgtatacgtgagaattgccttattttcaggttgttttatttaacgatggttccttggacagcattctggtgttcagcaaccaatatggaatatttgtcattaaatccatatcagtcttt

SEQ ID NO: 376272 - DNA, 474 bp, Homo Sapiens
  misc_feature (449)..(449): n is a, c, g, or t
atgatgggctcagcaaacctcacttgtgtagacaatgtccccccaaattataaattttctatgcctcagaacgtgtctataacaacatgtttaaaaggtagaaaggatacacatcccctgtagaagagtgacctgaactggagttgcatttgacatctgatgtcagcatgagggtgctggtcaccggggacttgagtacgtactttcctttcaaaagcacaatagatcaagatacaggtacacacatagctacagatatagatccagccacagatccagattagatatagatgcatatagaagcctaggaaaagccaatatgggaaaactctgggcagtgtttgattctgagtgggcaagcatattgggtgactgtaattatttcttggcagttttcttattattttttagtttcccaaactggcaaaaattacccacaacgtttaccnggggaaattgtggggtggccacagg

SEQ ID NO: 376273 - DNA, 308 bp, Homo Sapiens
tttttttagcacatgatagcaacttccttaataaatactgggtcccttctcctagccttccccattgctgttctttttaattccatcccacatgtcctgtgcctgaaatatcctgtgccatgtgcctgaaattccattcttctcctggaacccttaacaggccacattgctatgctccgttagtcccctgcatggcttaatgtattaggtaacatgaagcatgtaaggaagaactttctaacacaggtgctgaaatgggacaggaaatgctgatggagtgagctctttgtcaatagaagtattcaagc

SEQ ID NO: 376274 - DNA, 742 bp, Homo Sapiens
  misc_feature (203)..(204): n is a, c, g, or t
  misc_feature (565)..(565): n is a, c, g, or t
  misc_feature (618)..(618): n is a, c, g, or t
atagaagttatgtgatttcagtgagttgatgtgtacagcatggctgtgctccatctgatttaccccattcttaagttctgagagtatgttctcaaggaagatttaactctctttggttttaaattactttttaaccagcctaataaataaagtcttactacttttcataatatttcataatagttaaaagtaggtgttttttnntcgtgctcaatttggcactcaaaataatgttcattatggaagtttggtaatactgagcaagcctgtggaattttctttatgaaaaatgattttagcctttgcaaatgttaaccatgtgaaacacattttcagtataagtatgcgttacagggtttgatactttcctgcacttaggtttgtcctattcttcatttattcatactagggataggaaaattttgggaatcagaaaatagatccagtgtttagctacatacaatctagtacaagtgaatttttattcttaaacataggtgtgttgggctctttttttaaaagatgcgctctacctgaaaaggaaattggattttagaactggatntggtgcagtgaagtattttaggcccaggtctgtgtacacattttatagaagantgaagtactgtgaagtattttggttgccttttcatttcaactgtgttttgaatttgtcagatcacacatatattgtgttattgggcgctgtggtatcttttataaaacctcttgcttgtgtgca

SEQ ID NO: 376275 - DNA, 472 bp, Homo Sapiens
  misc_feature (15)..(15): n is a, c, g, or t
  misc_feature (68)..(76): n is a, c, g, or t
aagtataaataaccngaacctaaaaaagaaagtatgggaaaagcccctccaacacacccaccaccctnnnnnnnnnggttggtcctagagggaggaacaaagtatccatttacactggcaatggtaagttaccccctgtaatccatcaaaaacagactcaatcaagtaggtgggtcccccaaatttgtgtgtaaggtgttgagaatttaggaggacattatggttgtttccaagcatcagatctgagttcaaatctatcaattacttgggaattcaccaaaatatttctctaagaacttgttttgtgccacatactgttcaaggcattggagagattatagaaagtaagccaaaaatgaatcccagctctcacagaagagtctagtaaaagaaaaaagtgtcaacaatcctaagtgtcgtaagaggaattatacaaggaacacaatggttattaagtggagacctaaaaagc

SEQ ID NO: 376276 - DNA, 474 bp, Homo Sapiens
  misc_feature (384)..(384): n is a, c, g, or t
  misc_feature (418)..(418): n is a, c, g, or t
  misc_feature (443)..(443): n is a, c, g, or t
ccagaatcaagcagaaagcagacagccaggctttagaaccaaggcctactagtagatactaggaagtggttgtgttgcttcaattagaggggcacaatttcaaattacccttaaaaaaagtcttgaagaaaaatattgttaagtatcactttcacatttctgagtcattttttcagaactgaagagcctgtgaaacagagaaagattgctctagagccacacaataggaactgggtacatggaaatacaccaggagacatgtcaaactatagaatggacttggcacataaccctggagcatgattttacttgaagtcaatgtcaaaataaatacttaatttttatagtgtaggaatgtaaaacttacacttaactttttagganaaaaaaactgttattgttatggggttacttttanacccaagtcccctggtttctatttnggacctgggcttttttcttcacccctgtggg

SEQ ID NO: 376277 - DNA, 485 bp, Homo Sapiens
caaaaaagccatttagataactatgtcagcctgatagtaaattagatagctttgatggattttgattagcattaacctgtttacttggttttaataagagtaactttgatttgttttaaggaatatatcaaatatatgttagcagaatttaaagtactgttttttagttttagcataccgcaagctgggctactttccctctgatcttttatgtatgttaagaaataactactaagtgctttaaattgctatgctacatttctagttgttttatttaaacactgacttctcctattaatatttttaaggctaaggattcagtatttaaataaaaagtatttcagtagaactaggactgaaagattttctgttaaaattatctttatgtctttaacaacaacaaaacactgcatgtttctaattgtatgtcattatctcttagcttcatttcttttatgaaataaaattattatattttccagttt

SEQ ID NO: 376278 - DNA, 533 bp, Homo Sapiens
  misc_feature (18)..(18): n is a, c, g, or t
  misc_feature (78)..(97): n is a, c, g, or t
  misc_feature (361)..(361): n is a, c, g, or t
  misc_feature (417)..(417): n is a, c, g, or t
  misc_feature (422)..(422): n is a, c, g, or t
  misc_feature (429)..(429): n is a, c, g, or t
  misc_feature (442)..(442): n is a, c, g, or t
  misc_feature (471)..(471): n is a, c, g, or t
  misc_feature (478)..(478): n is a, c, g, or t
  misc_feature (485)..(485): n is a, c, g, or t
  misc_feature (501)..(501): n is a, c, g, or t
atttagatttaaaatgtncctgtaaaagtcagccatgacaaggaaatttacaaaatactagagtatctagaagggtgnnnnnnnnnnnnnnnnnnnngaaacacagacgcccaggtgtcagctctccgtttaaagaatgaaaaatgtaactcatgatgatctgtgaaaccttcaaactaggaccaattgacttacttgatattctgcctttgatatggtagtacccacccggtattcctaaaatcctaaaaagatacaccttgcagtagcagaggcaatgacatgagtttgttttctcattaatatgaccagtttgggtctatgtgggttcacatgtacatctactttattatgaaagganaaaacagttgtctgcctgtaaaatgttgagtttcggtttgagccctgtttgggagnttttntttactnttctggaggggtnggtgttgttggggttttcatcttccaggnggttggntcccaanctggggtttggagggntggttttaccggttccctccaaattgggcctg

SEQ ID NO: 376279 - DNA, 443 bp, Homo Sapiens
  misc_feature (24)..(24): n is a, c, g, or t
  misc_feature (29)..(29): n is a, c, g, or t
  misc_feature (53)..(53): n is a, c, g, or t
  misc_feature (60)..(60): n is a, c, g, or t
  misc_feature (103)..(103): n is a, c, g, or t
cccacaaacgtgaaatttacccanctggnctgattgtaaaaaatccatttgtnctggagnaccctagagaagaaaagtgttgccataaacttccgggctcctnacttacgaatgacccttgaaagctgctgctgagggatggcaatgacttgtcccttctctgctttcccttggcaaaggtttagtaacagctgtatttaggtgacaatcttcagatgatctacgtggccctgagcagcctagatcaagggctactgcctgccacaggcttttcctgcgtacctccttgaatgtgggaaggattcacagaggaagatcttcaaaatacggaggtggcaagcattgttgtgtagccctaagtcaaatagttctccactgtaagaaaaactcaaaatatttccagataaatttagagctgagggattggggaagtggaaaaaaaa

SEQ ID NO: 376280 - DNA, 498 bp, Homo Sapiens
  misc_feature (28)..(28): n is a, c, g, or t
  misc_feature (468)..(468): n is a, c, g, or t
tcttggggcacttgaaaagtcttctggnataaacctcctgaaaatctggtgcaccctgaccccaccagccccattgttgaaaaatcccagattaagagatctttcatttggttggggcgttgggtctgagttaaaatgcactgcccttggaagaggtggcacgttaggcttccattggatactgagaacatattgattagcctccatgctcagaatgcccctcacaaagtggagacggggggcttaggaaaagaagtcagttttcttgaggatcaggaaaggaaaggtggagtggggcaggaaaccccagaactggggcattgagaacaccatggcatctgggatgggtgagtgacatgaaagtgatcagagaaggagaggaaggcaacatcaactccagacctcattaactacctattccatagactgtacaggcgccacctgacttgaaaatccctctccgcttangtctaaaaggccagggacacaacccgctgc

SEQ ID NO: 376281 - DNA, 439 bp, Homo Sapiens
tgtattgacctctgaattaattttcatctcagttgaagaagcacttgttctttaccagctatccagagacgacacacacagttgccttcatttgggttgtgttgatcccaggtttctggaaagcttgtccttagtcacttcaaaggattatagtttctactttttgacactcgaagaataatccgttcagcagggcgaagagaaaaccttgctgactacaatcagacaatgttgttaaaagtccttccaataagctgtctcatttaaagctacatgaaacctgaagaaaagggctgataaatttggaacatacggtctttccactgtgtccagcatgggtaacaatgatgccctagtaataccttaaattataaagggatttctccttaggaagatgtttagagctagtggtttccaccattagaatcacccagagagc

SEQ ID NO: 376282 - DNA, 517 bp, Homo Sapiens
  misc_feature (416)..(416): n is a, c, g, or t
  misc_feature (458)..(458): n is a, c, g, or t
  misc_feature (466)..(466): n is a, c, g, or t
  misc_feature (473)..(473): n is a, c, g, or t
  misc_feature (480)..(480): n is a, c, g, or t
  misc_feature (504)..(504): n is a, c, g, or t
ggaagagaggagttgattataatgccgaaatcccatttgaaaaaaagcctgcccttggtttttatgatacttctgaggaaaactaccaagctcttgacgcagatttcaggaaattaagacaacaggatcttgatggggagctaagatctgaaaaagaaggaagagatagaaaaaaagacaaacagcatttgaaaaggaaaaaagaatctgatttaccatcagctattcttcaaactagtggtgtttctgaatttactaaaaagagaagcaaactagtacttcctgcccctcagatttcagatgcagaactccagggaagttgttaaaagtagggcccaaggcgagtggaaatttgcacgtccaaacttgcccgagggattctgggccttaaccaattcctgctttcccagttacantttttgttcttggggttaccattgttcacccaaccaccagcntttgcttntttgggnaacaccncgggacacccgctttcccgggggncaggtttttttgc

SEQ ID NO: 376283 - DNA, 947 bp, Homo Sapiens
ctgaagtgggagcatggtgttcttgtaatagcaatccaaatctgttattttagttgttaagggagaaattctttaaaagtcttcaaagaaattagagataggcattaatttattaaacagtgataatagaggttattggaatctattttgggaaactttaagtcatttggtattgggaagagagtacttcaaggttaatttgtataaatttaattttgttataagaggctgtactctgtttgcactctagaattaggaaggttactttcctgacttttgtatttctcaggaaaaaaagaattggaagaaacttaagaggtctgttaatgccagtacctaaacgtgacatttaacatggcatggaagctatgctttgaataaacacttgagaaaaggaattacataatttcttttttgttgtatggatggctttggattatacagagcttaacatttatataaaacaccagtctgagactgatgaagtgaaaacctttttattataaaataaaaattggaagaatggcattttattacagtatagttaagagattggctaaggcagtaaataaaacttagaaatgctcaaatttattgtaaattgcttttataatcattgatatataaagcatgctactactaatcaattagttttatgtattaagacctatcagcatgtcttttttttagtatctggttgacttaaacatgatgttctctgtaccatttaacattttcaagacatattctccccaagcaaattctgttggaaccaagtgtttccagttctagaagtttacttctagagtcttcatatgaaatttacagttgggctttcatagggttttaatttgcactgaatccttccttctgaaagatgacttatgtttaaagtataatgtagcagtgcttttgtcttacaattaaactcttacagcactcatgca

SEQ ID NO: 376284 - DNA, 427 bp, Homo Sapiens
  misc_feature (212)..(236): n is a, c, g, or t
  misc_feature (304)..(345): n is a, c, g, or t
gcgctgaagaagtcctggatggagagacaggtggtcttacatgtggctgtgagtggcctgtccttcagagaggctttaggaatctctaggtacaagggaaagataacatccccttgggctgcagtccaggttcattcaacaagggaagaaaactggaaaacatctgatgtctgttttaccagagttgttactattacttttactattattgnnnnnnnnnnnnnnnnnnnnnnnnngagacgaagttttgctcttgttgccattgcactccagcctggggtgacagaatgagaccctgtctccnnnnnnnnnnnnnnnnnnnnnnnnnnnnnnnnnnnnnnnnnngtttcccatgtgcatgtgtgcacatatgtgtgtacacttatgggacatttgggggacacctgcctggcaccccgcagtgggt

SEQ ID NO: 376285 - DNA, 474 bp, Homo Sapiens
  misc_feature (18)..(18): n is a, c, g, or t
  misc_feature (60)..(60): n is a, c, g, or t
aacccaatgcctgacccngggtcaacccttgaaaactcaatccccttgtttcctcctcantggcgggccatgaacagcaaacatgtccaaggcccgccctaaccaaaagtccacagtgaagagcccaccagacgctggatccgggcagcaacttggggttcaactgaaagctttcctccgtgcttttcctcacgctggcctccctatggccctgagaggtgcatgctcggcttgtttccatgggctgagtggttcagtgacttgcctcgggatcacaaccaccgcacaggagcaccacacatggcctggactggttctcttccaactctaaaagcagcactcatttggttaacagtctttttcattttcaacacttctttcttttgaaggggggagcaaagcgtgatcggttgccttttataattctcgttttcaatttcaatctcttttaaaatgttgaaagagtcaaaaaaa

SEQ ID NO: 376286 - DNA, 415 bp, Homo Sapiens
  misc_feature (20)..(20): n is a, c, g, or t
  misc_feature (33)..(33): n is a, c, g, or t
tcgaaattggtaaacccccnatgtgtcccaggnagggaacctgtaaacccttaacatcgaagggaagggaaagggattggaatcatgggggcggtttcccccatgatgttcttgtgatagtgagttctcatgagatctgatggctttataagcatctggcacttccctgcttgcatttccatctcctgctgccttgtgaagaaggtgcctgcttcccctcccgccataattataagtaagtttcctgaggcctccccagccatgtggaactgtgagtcaaacctctttccttcgtaaattacccagtcttgggtaatgtctttagcagtgtgcgaacaaactaatataatgtcagagggatgcttttgtattcaccccaaagccaattcagaaccacaactgatgcagcacacct

SEQ ID NO: 376287 - DNA, 530 bp, Homo Sapiens
tcaactatttggagaattaagctcctcaaatcaccctcattaggatttaattttattttggagatgtgtgctttactcatgtgtttcaagagatccatgatttatgaagtacttttaaacacatttccgtgcacttaccttcccataggaatgtggctgcctagagaccctggtgccttcccggggatagttggccgtagatttgcaccacagcagtcatattaaattaaagctcttgcttctactgagcccaaactggagtttagactgtccttcagcatgatgttcccaggtggtaccatcaagtcccacgagctggctgccatctgtgaactagactttgctttggctcagccgagttactgtttcagtgttcatctaaatgacttattatatgactaaaatattataaatgcaagaaatggagctatgtgtaatcaccataaacttttaaaatctcatactaaatgtacaaacccttcatcagtgacttccttctctttttctcacattaaaacaataccttgact

SEQ ID NO: 376288 - DNA, 335 bp, Homo Sapiens
  misc_feature (56)..(56): n is a, c, g, or t
agtggacatatcctccctcttcctctcagcctcacccaccagaggaaataactgcnaaatgtggtatttatgccctcaagacctttgtgtaaatgttttaagggctgtttattgatatttaggtggataagattaaaaaacactaaaatgtagactatgtaaagaaaggatattccatattctttgaggatgtggttagtaaaacccaaggagataatagaacaattgtaaatcgaagccaaggaatggttttatatgagataaatttattcataaatatacttttttcaaggagttagtgattttattacttaaataaaggctaataaaaagtt

SEQ ID NO: 376289 - DNA, 484 bp, Homo Sapiens
  misc_feature (381)..(381): n is a, c, g, or t
  misc_feature (421)..(421): n is a, c, g, or t
  misc_feature (428)..(428): n is a, c, g, or t
  misc_feature (437)..(437): n is a, c, g, or t
  misc_feature (445)..(445): n is a, c, g, or t
  misc_feature (459)..(459): n is a, c, g, or t
  misc_feature (468)..(468): n is a, c, g, or t
gttcccacagttcttcgggaggctctcggggaaggggctggcctttgtatactggcttttgctgatttgactatttgtctactttgcgagtaagcacataaatcttacacagaaaagtgattaggccagtattcggaaggtgaccctcatccggaagtatcattgatttggctaacttgctttcaactttgaactctggggtatctgaataacctgggtttcattaaaggaggtacaggctgaggttttgacctctgtgccccttcgctaaagctactaaaacgctgtctggcagggttgagggaactgggtctttaacatctttcggaaaaacccagctagggaaaattctttcatgggctgtggattttacatgggggntacggagcattttctttcagtttttaggattctgttcccncttttgnccagctggngttttttngatttcaaccctgnatttggtanggggctttttttgggg

SEQ ID NO: 376290 - DNA, 900 bp, Homo Sapiens
  misc_feature (745)..(745): n is a, c, g, or t
  misc_feature (777)..(777): n is a, c, g, or t
  misc_feature (801)..(801): n is a, c, g, or t
ctgattcgtagcacgcttgcttgcatcctggaatattctcaaccagaagactctgtacctacacctgatgaagtaagcatgctaacagcaattgcactcttcctgtggtctgctagtaatgaaataataggagtccagtcattacagaatggctgcatgaacagatttaaaaatgcattaaattcatgcgacccatgggttcaagccaaatgttaccagcttctcctctcagtcttccagcattccaatcgtgccctttcaactccttatattcattcattagctccaatagtggttgaaaagctaaaagctgttgaaagaaacagaccagccagtaacatagagcttttagcggttcaagaaggaataaaagttcttgaaacactggttgctcttggtgaagaacaaaacagagtccagctacttgctcttttagttcccactttgatatcttacctgctggatgaaaaatcttttgcctcagcaagttcagcttccaaagatcttcatgagtttgcactccagaatttaatgcatattggacctctgtatccacatgctttcaagacagtaatgggggctgctcctgagttgaaagtgcgtctagaaactgccgttcgagcaagccaagcgagcaaagctaaagcggctgccagacaaccagcccccgccatacattctgcaccaacaatttaagctaaaaaacaaagttttttttaatttgtaatttcatttaatttgtatntatggttggcaactaagcccctaattagtganggccactgtatcattccaggctanctaatgggtctggtttaatttggaatattgggattaatagtgcttccaaggtagggtaaagtggaaataatgctcacaccacttattggatttttaagg

SEQ ID NO: 376291 - DNA, 447 bp, Homo Sapiens
  misc_feature (325)..(325): n is a, c, g, or t
  misc_feature (399)..(399): n is a, c, g, or t
  misc_feature (411)..(411): n is a, c, g, or t
  misc_feature (423)..(423): n is a, c, g, or t
ggaagaacagaagatgaccttgtgcccacagcacctttctctgggcaccaaagaaggttacctcaccaaacagggaggcctggtcaagacctggaaaacaagatggtttactctgcacaggaatgaactgaaatacttcaaagaccagatgtcaccagaaccaattcggatcctagacctaacagaatgttcagctgtacaattcgattattcacaagaaagggtaaactgtttttgtttggtatttccattcaggacattttatctctgtggcaaagacagggagtaggaaggcttgatgagtgggatcaaggatatttacggntggggaaattgttcaccaattaagggaaaaccaggcttcaacccaggggggaagggcacggtccccgttcttcnggttcgtttccntctttttaaatnggttctttttcttttgccccaggg

SEQ ID NO: 376292 - DNA, 362 bp, Homo Sapiens
gtgttccaaagctttttcaaactagaataaggaggcaaatagaagaatgagatactgatgtccacagttcattggcagaatctaaccccttctgttatcttttttaatactatttttgtttagatagaagtttcaaagaagataaaaatgcttgaagagcctgagagtaaaaagattatgctgcaaagctatgatataaactgctcttgcagtccaaagggatacctgattaaagaagtttcttatttaaacatctcagacgcaaaaattacattaaatttttgtatatttcaacaacattttaaatgtattttgttatgtttgtattatataggataaagcaaatgtcaagttaaaaaaaa

SEQ ID NO: 376293 - DNA, 338 bp, Homo Sapiens
catatttggacaatatcaaagctcaagaaaaaggaagattggactatgctaagtcttcaagtacagaagttcaactttctaactttcaacaaatgctactttcaacactcttaagcaccgcatgataagcactgaacgatgagaatattgagagagcatgaagaggagatggttagaagagaggcaacattgacagtgaggaaatgacagatgtgctcagtgttgagctgtttgacctcaggaacaattctctaggactcccagtttgtgcttctgtgagtggaagaaaacacactcaaaagtgtttgatacagtctctcaaaaatagtcaacacagg

SEQ ID NO: 376294 - DNA, 424 bp, Homo Sapiens
  misc_feature (45)..(276): n is a, c, g, or t
gtttcctgttccccaaaattccaccataacctgtgaaaaaaagannnnnnnnnnnnnnnnnnnnnnnnnnnnnnnnnnnnnnnnnnnnnnnnnnnnnnnnnnnnnnnnnnnnnnnnnnnnnnnnnnnnnnnnnnnnnnnnnnnnnnnnnnnnnnnnnnnnnnnnnnnnnnnnnnnnnnnnnnnnnnnnnnnnnnnnnnnnnnnnnnnnnnnnnnnnnnnnnnnnnnnnnnnnnnnnnnnnnnnnnnnnnnnnnnnnnnnnnnnnnnnnnnnnnnnntatggtacgtgcctgttgtcccagctacttgggaggttgaagtgagaagatagcttacggtcaggagtttgaggctgcagtgagctatgattgtgcctgtgactatcacttcactccagcctaggcaacaaagtgagacccccatctc

SEQ ID NO: 376295 - DNA, 442 bp, Homo Sapiens
  misc_feature (345)..(345): n is a, c, g, or t
  misc_feature (377)..(377): n is a, c, g, or t
  misc_feature (387)..(387): n is a, c, g, or t
  misc_feature (406)..(406): n is a, c, g, or t
  misc_feature (421)..(421): n is a, c, g, or t
ttcactttaaatgaacatagctactactgactaaaatacctgtttttgtagtttggaaagtatccacaattctccctgatgtgaaccttgtcaaaggccaaaacagacacgcttgctgtgggagataaactttctaattgtttaattgtgaaaccacccttaaagaaagaaacatatttatgtaggctacagtgttgagcacttaagtcctctgaaagttctcttctaaatacaaatgattttgtttctgtcttccattggcatcatgtcactttgctttacatgtgattataggctattctaggatattcattaggtcatattcatagtagtatctgtggtatngctcaatcccgggaaacttaaaaaatacagtnggccttaggnaatcctccaaaggttaagngggcccttaaataanggttccatccggtgggggggg

SEQ ID NO: 376296 - DNA, 346 bp, Homo Sapiens
ggacagattgccagtatccgggaccccagttaggaccccttcacccccccaaggatgaaggacccaagggtttgtgtgattttggtttcaattcatggaatactgaattcgttgacactgttcccaatgcaccagtataacattcctaattgacttaagaggagacacataagaatatctgcttttgcctttaaagtatataatttatgttactgccaaattaaggattctgatatatcatatttttaaaatgtgtttgaattacttcttagtctagaactgagattgggaagaagtaaatatacacattttctttaatacagtattctttttctctttaaacctt

SEQ ID NO: 376297 - DNA, 421 bp, Homo Sapiens
  misc_feature (61)..(61): n is a, c, g, or t
  misc_feature (102)..(102): n is a, c, g, or t
  misc_feature (154)..(166): n is a, c, g, or t
  misc_feature (328)..(328): n is a, c, g, or t
  misc_feature (368)..(368): n is a, c, g, or t
  misc_feature (402)..(402): n is a, c, g, or t
cttcctagacttccaggcctgtgttgagaggggttgtcgcaaaggtctgacatgccctggngacattttccccattgtgttggggattaacatttggctccncgttacttatgcaaatgtctgcagccagcttgaatttctcctcagaaaatgnnnnnnnnnnnnnctcttgcaccatcagtctgcaaattttccaaacttttgtgctgtgtttcccatttaaaactgaatgcttttaacagcacccaagtcatctcttgaatgcattgctgcttaggaaatttcttctgtaggcagggacaaggctgcaggacaaaacctctgaggncaccaaggttgtaggaagggaagggggctttatttcagtnggggggaggcatcggggcaaaggttaactggccnctaaaaaatcccgaggctt

SEQ ID NO: 376298 - DNA, 682 bp, Homo Sapiens
gggattgattcaaaacttggatctcaggtacctcaatttttcccccaatttctggctactactaaaagccagaaagaacagaacagtggcctcaggagatctgagtttgaatccttgctctctaggatgcaggtggcttgaagcagaatgccacacctgcaagttgattagaactgcctttcttcccaggcttgacataggtattaagtcaaaattacatgaaacccagtggtaaaaaagcctctgaaagctgtaacaccctcagtaataacaaaagggatttttatttcacagctaaagggaaaataggtggagaagttaaaaaataatgtctgatcctgttcctaagttccaaactatagccaacactctgatgctgctctttttcttgtaggaccaacccgtcccagtttgcctgggactttctcatttttacagagtcccaaatcctaggaaactggagcaactggtacaactggtcacctactcttgcccctctgtaaatcaagccaactgtgaccatccaatgtgccatcttacagggaaaagttataaccactattcccctataacataatgctaatgattgtacttagtacatttttatacttttatgatattttactgattggaaatgtcatcctttattaaaaataaacatggttttccatagttgcctgcc

SEQ ID NO: 376299 - DNA, 455 bp, Homo Sapiens
acacaccccagctgtggctgccctgaatagtggactgcagtggttgatggcacgtgttaaattgtgtctttgttatgggaggtgagaatttggctggggacaggaagttgaccgaaattttcctattaagatcagccacttctggtgatagtagctttgtccaacctcatccacctgggcacaggaatacacttttatgaaaaggcttttgcccttgagcctgtggtagttgactcttttggagaactgggctggaccacccagaagatccattttacaatgacgaatggcataaccaagtacccttaaccaaagcaagctgagtgactttccccctttcatttgacgaccttggattccactctggtgggaaagagaagtttaaatttcgaggaaacttttgccaagaaagagttagccaaggcaagggggaagagtgatttattccctgaagc

SEQ ID NO: 376300 - DNA, 459 bp, Homo Sapiens
caacaggtgactttgcagaagtagactgtcagagtaacctacatattaaaaattgacagtaataaaaatggtaaagagttttaaccttgatgtttattgttatgattaggaatgcaagtaatggatttaatatccagcaatgtaaatgtttccatttatagtaatccctttaattttggtttttgttaatgttttatttacataaatggtagatttttatgaagttaagtcatttttacttaaggaaaatttgtttaaaataatatagatttaaaatagaaggaagccatgaaagcacaaatttgggaatttgtaaatttaggaattatttcataattggtcaggctaatattattagtttttgcaaaagaaaaaatcagtgcttgcaaatcagattaattgcttctggagagcacaattattctagctgggatatcattatcacttagagaaaaaaaa

SEQ ID NO: 376301 - DNA, 319 bp, Homo Sapiens
  misc_feature (32)..(32): n is a, c, g, or t
cccctaaaagaccccgggggggcccaacgccnaaagatcataatatccaccacaagggaaggaacccagatccctaaatgactgccataggacagaccccatctccctccaccccaatacattattagactgaactgtgacctgaaatgagcaataaactctgtattaattcactgaaatgttggggttgcttgttatagtagtcggtccatcatgaccagtaaaacataaatcaaaagttaatgtaattgttatcccattatttagagcgaaataaatgttgaatatatggactttctcagattaggaaataccaatt

SEQ ID NO: 376302 - DNA, 376 bp, Homo Sapiens
  misc_feature (164)..(164): n is a, c, g, or t
  misc_feature (189)..(189): n is a, c, g, or t
  misc_feature (219)..(219): n is a, c, g, or t
  misc_feature (270)..(270): n is a, c, g, or t
  misc_feature (278)..(278): n is a, c, g, or t
  misc_feature (351)..(351): n is a, c, g, or t
  misc_feature (358)..(358): n is a, c, g, or t
ttaaagtcgcagctctctagaggagcactgtccacctagggaggaaagtaggaggccagtagcaaacccctcccagagctggggacatgtattcccctggggaacccggtggcacccgccctgaggagcgcaccaccccgcccagatccaggtcccgtcagtgnccacctgctgcatgggcctgaggtncggggacacagcaaaggcacaccccgtgcnctttttgatgtcgtccaccgtcaggccctcccagagctccctcagcgtcancctttctncctgtgcacgtcaaacacggccttctcggtgatgatgcggtccacgcaccgttttcccggtcagcggcatggngcatttntccatgatcttggggggt

SEQ ID NO: 376303 - DNA, 1215 bp, Homo Sapiens
  misc_feature (678)..(678): n is a, c, g, or t
  misc_feature (788)..(788): n is a, c, g, or t
agctgtctaattttttctgtctacctcacagctgccaaactaaagtaggtgggaagccattttccctctctaggtcaatgaataccccccgttctccacccgcgcttttgaagattccagcactgctgccaagtcaacccatctgcaggagaacgctttggaaaaaacagactttaaaaagaaaagcaaactgctcttagcccctgatagcttctccacaggagagggaatatggacagagctgaggttcaagacacatgtgctgtttgagctgaatctgtgctgttttcttctttccgtggttacccaacaacgaaggcgtgttgtaccttcttgccttcaaacctgttcctcctcccgtcagatgtccttactcctcaatttgaagttttccttcataggatttctgagaaggactttggaaaaagtgctccagatctctgccagttccttagccatgaaaaccaaacataaaagatcatctggggacattcattcagagcacgttacccacattccaccaccactactctgacagcacaaaacatataccaggagctggggttatgtggtgggggagtccttcctattgtaagccctaacattatgaccctctggggttaaattttataattttcatattgtggagtcccatattttgttctgctttccactagnccaggcttctgaggtcttctctgtgttcattgcttattaattttattcagcaaaggattaatggagctcctgcaatgagaccacacacactatgttaggtgctgggacanaaaatagggaagggccctaccctcagaaagcttgcaatttatgaaagaatacttaacaaaacctgcaaagtggtattttaagttattttgtttccatttttgcttattgaaacaaagaaactgagaatttggtatgattcaaaaaatgtttaggtacaagaaaaagaaaaaagcaagaagcacttgccagatttaactataattcctaaaaatgatgaacattttcatcttcaggaacatgaaacatcatcgactattctctacagacaacaggcaaaggttcttactggtccagtacatacaagtccttcaggaagaaaaacatgattctaccaggattgggttgaatagagagagaattgcagtttaagattcatgagtatggaaataaacagctcttatggctaataaactctctatgaacttt

SEQ ID NO: 376304 - DNA, 538 bp, Homo Sapiens
  misc_feature (517)..(517): n is a, c, g, or t
aaggccatgaagatctgcgccaggatgagcgtgtgatgcagctcttcggcctggttaacacccttctggccaatgacccaacatctcttcggaaaaacctcagcatccagagatacgctgtcatccctttatcgaccaactcgggcctcattggctgggttccccactgtgacacactgcacgccctcatccgggactacagggagaagaagaagatccttctcaacatcgagcatcgcatcatgttgcggatggctccggactatgaccacttgactctgatgcagaaggtggaggtgtttgagcatgccgtcaataatacagctggggacgacctgggccaagctgctgtggctgaaaagccccagcttccgaggtgtggttttgaccgaagaaccaattatacccgttctttagtggtcatgttcaatggttggggtatatttttagggctggggagattagacacccttccaacctgatgttggaccttttgagttggggaagttcctgcacnttgatttttggggattgtttt

SEQ ID NO: 376305 - DNA, 461 bp, Homo Sapiens
  misc_feature (33)..(33): n is a, c, g, or t
  misc_feature (350)..(364): n is a, c, g, or t
cagcccggaacaattaaacatgggaaccttccnggattggggaacaaaaacccccccagcctgcttttgccctccacaatcccatctcccctccatcgatacccaatttccccaggccctgaacacatctgttattttgctctgacattgtgaatttgtgacagtggaaaccctgatatgtgcaactgagcttatagaaataattactgtgaaatggattaattttgataccactttaaactgtgcttgtattcatgtgttgacccttgtcagctgggaaatctgtacattcagtatatgtcagcatttcattggagcctgggggcaacagacaaacttgcttctgattnnnnnnnnnnnnnnnttctttttataattgttgaatttggctgttacattttgtctccttctttacaagaaaacaataataataaagagcaaatggcatccacttgaaaaaa

SEQ ID NO: 376306 - DNA, 272 bp, Homo Sapiens
  misc_feature (28)..(28): n is a, c, g, or t
tggcagcttccgcttgtggatctatgcncgtctagctcagatgttcatgcctggtgagcattatctggggtatatctgagccagcctacagttggatcttctgctcagctcttaaaatctctgattaaaccagagaatcaaatgtagtttacatcgcttctttgagcggccactcttagcaccctcccctttctaccactgttgaaggatacttcctctagcaattaaacacctgaaaaagatgatgtgtgtcttcagctagtgctcgctct

SEQ ID NO: 376307 - DNA, 328 bp, Homo Sapiens
  misc_feature (244)..(244): n is a, c, g, or t
ctcgctggcttgatgcgactaacagaaaagccactttcagaatgcctcgcctcacccggggcccagatatttacatagtggcctttcattctgcgaacagtgtgtgcctctgcaaatattttaggcctccctgcatgcttgacgggcccctacgtcccattcaccagcttttaagtttgttttgcaggcagggagccactgagagggaggcctgactcagagcacagggggccctgctgtactntgccgccgcctcctgccactgcagacttggcggggaaggaagcagtgggttttacagctggtgtttttggtttagcaaaaaaaa

SEQ ID NO: 376308 - DNA, 254 bp, Homo Sapiens
tctccttctcccctaaaatgtccctcaacctgtaaaaaatgaaggaaaattccaggaataaaaaaccctcccccactgttgtgaaggcctgccaaaggaataacgcccgtggcaaggccttaacaacagctggtgcctcaagttaaatgaatgatggttttccttacctgattttgaaaacctggttctcccacttaactgccctatgtgacgagcgacctaactgttcctaggcgcccaatgtgaccatatgt

SEQ ID NO: 376309 - DNA, 524 bp, Homo Sapiens
  misc_feature (484)..(484): n is a, c, g, or t
ataaaatctccctaaagcaatatttaaaaattggtcaaaacaaggtctgggagtatgtttgtgtgtctttccagctttatcctgtagcgtgtctttgttctgtgttttagtgtcccatttagggagtgatgttttaagggtttttgtgtacttggattaagtaattagaggtgagtggggggaatgggattattgaggcaatgatttttttcttcatgggctctgatagttgcattgattgtcctgtattctaattgctatatttgtgtttgcataggtgaagagcaaactggtgcgttatcttgatttttaaaaagtaataaatcctatgagttcccagtattaacacttgcccagttctgggatccctcacaccccattgggctggagcgcatttcaaggcacccaatcgaagccagggtccatctctggaggctgctggaaagggaggtgttgagggctttaggggaaattgggagccccntgtttgccccacggaaaggggaaaggattaaggggaggtt

SEQ ID NO: 376310 - DNA, 312 bp, Homo Sapiens
  misc_feature (62)..(62): n is a, c, g, or t
  misc_feature (171)..(171): n is a, c, g, or t
aggaaaaattatacaccctaaactcaaatgaatgtcataattgagagattatcactaagggnaggttttggtgcaccagagaagaggaaacattattctggtatccagtatgtcgctgagatgttaaacgagataatgcttgtgtgggaatttgggtagaagctctaggtngtgtctgttagcaatcagatagcctacaaggccgtcttgatgggtatgatcaccacctcaaattcttggaaagataagtttgtgtggaaagatgtaagaaattaagagaaagggaaaattcttagctacaaaacgttttat

SEQ ID NO: 376311 - DNA, 506 bp, Homo Sapiens
  misc_feature (386)..(386): n is a, c, g, or t
  misc_feature (401)..(401): n is a, c, g, or t
gaaaagtggcctctcttccggaatgacacatactgacttttgaagaagcaaaaggatacctgctggccagtcatatcagccaaaaaactctggtgagcagtgagttggcagatgttgcaactggaagactgtggcatcaacagagccccaaagcaataatctctctttctcttcgcccccactaatccagcaatcaaataatcacttttaagcatttactgtgcaccaccatataacataaaatgtgatgaatagctaggtatatatatgacaacctctaaattctcaaaatattataataaattaagaaagcaagagttgtggcatgtaaaaaggacaatttaactacataggggaggagggcagtggaacacatttaggtgcantctcccctgttaccnggtcactgtgtgtgagggtggctggtacaagtactaattttatcttaatccccacccaaatccgggggcggcctttctatccttgttctgtggggtggtgtgggg

SEQ ID NO: 376312 - DNA, 452 bp, Homo Sapiens
  misc_feature (44)..(44): n is a, c, g, or t
gaatcctggccccgtcttcaagcaaagggctcttgggccaagtnaattttccccatctgtaaaaatggagatggataaatacctaccctcagggtctttgccccttaattgttcattctccctggggacagtctttcccagatatcccacaaaggtcactcttttacctccttcaggtcttcactcaacttacctttttgtgagaactttcttgaacacaatagctaaacttgtaaaccatctggcatttcctatcctctttcctcattttattattttccttagcactcaatacctaacatactatatagcactcaattatcttatttattgcctctttcccacctctagaatgtatgctctataagggcaggattttttgtattctttactgctgtatccccagtttctagaatgatttaggtgattaataaatatttcttgcataaatg

SEQ ID NO: 376313 - DNA, 1533 bp, Homo Sapiens
  misc_feature (544)..(544): n is a, c, g, or t
caagtttgaatgcttcatttgcataaatgaacctgattgggaacctgggtgtgaattttctctataaaagcaaaactctccctttgttctctggatggcacctttcctttacattgaagtttgcatcttccaagtttgcaatcacttctctggaataaagtctctttcctcaaaattcctttttagagaacttttgttcacatgtgcccagggtaacaaagctaggaagtggtaagcttgggagttaacctagactggtttactctcatattgcttatgtggtcagattcaccaaattggattttgtttcttcagatttttcttttaccaaagttacactgcagtaaagtaactgcttccctttttctcagactaaactttttacagccccaatatttatttattgggggctttccaacacaccctattatattctggcaaattttatattctgcaaatcactatttggtggatatttacaaattctctacaaatgggctggtatgtgaagacctcagtcaggtgggcaccagttccactttcntcagagcagtggatttgggggccagtgtgcccctgtttgcatctgagggagggtggcctcgagacagatacctggggtgagagttactgctgtggtttcagtccatttcttggaagatgtcctggcttctccaactggtggactccttgtccttccctaacaacgtgtctctaatgtttgtgtgactctgggtcatagttccttctgtttcatgtaccatgaatgctgtttcttgactctttgcatgtaaaaactcactcaaagcctagctcaaatgttacatttattttctgggtttttatagtcctttgactaactcttcacctttcttcatgtgggcacagtttttctgaagtatacagttagttgaggagtgtttgtcagtctctcaacttcaaatctctgctactagctatgcaatactgagaaggccacttaatccttccattcctatgtttctgtgttgataattttggagatgatatttacttcatggctaagaatgttatgcagcaatgttggttgtgaaagtgcttggcagattagaaggtgtggtattcactgctgggtggctgatccaacctttattcccaattctttcctccctggcttccttttactctataggctagaaatgctaaatgctcactctccagcttcccttgcagctaaggctggctatggaacctaggaagaaccaaaggagcacacacggaggtcctctgggaggctctgcacagcgcttgaagtgaaagcagttatatgatagcaatgcaacaagttaacacaaaaacaatgatctctagccttgggggcatgtgatataactaatgtctttaagccactattatttgtgtattccattacttgtggttaaaaagcattcctgatagtgtagattcccaataagtgtttactgaatatgaatctgtattgcattgtgagtcttgggggcaaaattcaataaaattatcatctctgctctctac

SEQ ID NO: 376314 - DNA, 463 bp, Homo Sapiens
attcaactgcctggggtggctgaacccaaccttaaacccccaatccttttccctcccccggccttcccttttacctcctaataggcctagaaaatgcctaaatgcctcactctcccagcctccccttgacagctaaggctggcctatggaacctaggaagaaccaaaggagcacacacggaggtccctctgggaggctctgcacagtgcttgaagtgaaagcagttatatgatagcaatgcaacaagttaacacaaaaacaatgatctctagcctttttgtcatgtgatataactaatgtctttaagccactattatttgtgtattccattacttgtggttaaaaagcattcctgatagtgtagattcccaataagtgtttactgaatatgaatctgtattgcattgtgagtcttgggggcaaaattcaataaaattatcatctctgctctctacaaaaaaaa

SEQ ID NO: 376315 - DNA, 521 bp, Homo Sapiens
aaactagtaatgaactagttgagttttgataaataattgcatcacagatatagaatgaatgctatattttcacaagttagcaatatattaagaagtttaatagaattctccaattaatatttctgtaaataagcaccctttcttatttaccaatattgtttaaatgtgttttttcattttgtggttgcatttgaagtgatttatgaagctattatagattcttgtttttctgttcattcaatggaatgcaaaaaccttgaagaaatatgtggtcagatttatttcactgcagctgtttcttaccagaataaaatgtttatccttttgaaacccaaactttaacatgcacacaaatccatcactcattatataatggtaacattaatactgacacaatgtttttaggcaccagatacctgtgtctttacacattcttttgtagtattacctaatgaccctaaaaaaatctctgatgggatggtatataataacagccaaaatgcttataggcagaaaaaaaa

SEQ ID NO: 376316 - DNA, 546 bp, Homo Sapiens
  misc_feature (38)..(39): n is a, c, g, or t
  misc_feature (60)..(90): n is a, c, g, or t
gcaacaaacattttgtgtttattgaataattactaagnnccagaagtagcacaggaaacnnnnnnnnnnnnnnnnnnnnnnnnnnnnnnnataggcggcgagtggggggcaatacagaattattcattcaagttatttaaaattattcattcaaattacttaaagtacctactatgtgctgggtaggcttggtgctgggcattgggtggggggagttgagtataatcactcacttatttgttgaatgtatatttactgaacatctgagtgccccacactatattagcactaatgatatagtaaaccaaatagccttgttcccataatagtgtcaggaccccctgaaaacagcatctccggatagggaaactgaggcagtagagcttcccacaaaggtctcattggtgagggcgccgggctttaacccagcatcctgacgcaggctggccctgctgatgggagccacctccctctcgtcctctcacacttcctctggggcactgatgatgagtcattaataacagaattttaatggcaaaagcaaag

SEQ ID NO: 376317 - DNA, 488 bp, Homo Sapiens
  misc_feature (24)..(24): n is a, c, g, or t
  misc_feature (194)..(194): n is a, c, g, or t
atggccattggggccccggcggcnggcccaggaaaggtaaaggcagtccacccagccgttggaagtattggtggcccctaacaggaaatagttatattttaagattaaactttggatttgagaagtacttttcctatggctgacttccggggtacagacttccaagctatgtctgaaggtatcatatgctatcngtggttgcaggaagaagagtttcaaaagaaagtcaaatattcctcttaagataaacagtgagctgtgctgtatagcaagagcatacaaaaacccaaagcagacctaagtctctaatacaaggacccacactgacttaaccaaaattgatcaaagatgaattgagcttttctttgaagtaataaaacttttagaatgctattattattgctaaaaactcattttaaagtatattttactactgttatcaataaactcatgtggccaggtcatacagccctctacttgaatatgta

SEQ ID NO: 376318 - DNA, 549 bp, Homo Sapiens
  misc_feature (414)..(453): n is a, c, g, or t
  misc_feature (466)..(466): n is a, c, g, or t
  misc_feature (472)..(472): n is a, c, g, or t
  misc_feature (485)..(485): n is a, c, g, or t
  misc_feature (524)..(524): n is a, c, g, or t
ggaaggggtctctggtcaaacccagcccccagggctgagggttgaaagccttccccggctccggccattatttgggtttaatctcggagcctcactcctggactgaagtccggtgcctctcccttatccctggtggagatggaatgtggcccattgcctcctccctctcctgtcaaaaaccctgatcaggtagatttggaggcggccacgatttcctgtttggcccctgttcaccccagtgcactggccctgactccaggcgtgagtatggggaaggatacgggttcttcttgacggggagcaagggcctccgtcttcccttccttaactctccccctttgccctccgccctgaaaaaggtgtccttgaagtcccttccacctcttatggccactgtctgcttagcccagctcnnnnnnnnnnnnnnnnnnnnnnnnnnnnnnnnnnnnnnnntgagcgcaggccnagtttntgccttcgggagnttgatttgcaggggccctgttttggtttttccggacagnttgcggggaaggcttgccccagttt

SEQ ID NO: 376319 - DNA, 561 bp, Homo Sapiens
  misc_feature (66)..(75): n is a, c, g, or t
  misc_feature (541)..(541): n is a, c, g, or t
  misc_feature (551)..(551): n is a, c, g, or t
ccctctatagatgggctttagtaaagactgtcccaaagagcccctacttctctaatgccccccccnnnnnnnnnnaggaaaagaacatgcagttttactcatcacttcttcatgacaccaaatccattgctaggtttagctcctggtcccttttcagcaagattcatgttatccgtcttacaactttgattttggaaagtattatgtcctaaaaatgcactgcttaacacagtggggtttttttcccccgaggtgtctttaactggggaagtaccacaaacatagagcagagactttaatttctatattctacaatagaccatcaccaaacatcttatcatgttgttgctttctgagtaataggtgctacgcaggtaggcgggctttctctaggactaggtgtacgtttattttgtaataacagggctatctacaaggcctctcagccttaactcctgggcttccatagggacacaggtaggcattccctcttagttcattgggcaatggctcttttcagctcggagggaaggcttggganggaactcagnattacttggg

SEQ ID NO: 376320 - DNA, 352 bp, Homo Sapiens
  misc_feature (183)..(201): n is a, c, g, or t
cttgcatctccccttcagactctctgaatgtctcctccctgctccatggctttgcagctttcctgtctctaaggggtagaatgactcatcaaccctaaaggacagtcagtcttccaagagccatgaactgaatgctttatatcctaatttagatttagagtttccagaaggtgagcatgcagnnnnnnnnnnnnnnnnnnnctgtctcccaaatctgtgttttttccagatatggctggaagcagaagcttcatgtaacatccatgaatgtcctcctggtagtttgcataatggatgcacatgtgccgcatccataacattaaggggagataatgcatggtttacagccttt

SEQ ID NO: 376321 - DNA, 326 bp, Homo Sapiens
  misc_feature (172)..(172): n is a, c, g, or t
  misc_feature (273)..(273): n is a, c, g, or t
cctcctcatgctttctcagggaggagccctgatgtatatcatgaactcacagttcctagaccacagtaattgaggggcggtgggggggcctttatcggagaagctagagaacaagagtccttctcctccttatcccccaacaggacactaagagacaaggactgagtggaancctggagaaaggggactcaggaactgacctcattggcctgatttgtgaggagaggagtataagtggagaggggccattcctgaggtttccgtgttttccancctggtctcctggaaagaatctttatacagaaataaagtatgtgttcactctc

SEQ ID NO: 376322 - DNA, 441 bp, Homo Sapiens
  misc_feature (377)..(377): n is a, c, g, or t
  misc_feature (397)..(397): n is a, c, g, or t
gtcagatgtctccacatcacaaatggaaactacatgctgacaacatttaccctgaaagctttcaagctgagaaagggcttggtttagttgattgggaagcaagcaggcccatatggtcagggaagctgaggaccactcttagacatctgtacaaaatccttctggtctatctggaagagaggttcaatatcaaaggacttggtttctgtctgtattcaataagctcttcactggggacaaagaattgacttgattaaggcaaatgaaccttcttttttcttaaagaatttcattaaggggatctaatgggaatctttgccacttgaaagaatttctctctccaacagaggtgaggcagttttagtctttggaggaantattccccaggggaaaccantgataggtcagccccaggggacccacctggcaccccaacaggaa

SEQ ID NO: 376323 - DNA, 350 bp, Homo Sapiens
  misc_feature (87)..(87): n is a, c, g, or t
tatatttatatatatataaaaatggaaagcagctgcagtgtgattcaaaaaccatgtgacacggcgcagagtcagtgccgcggaagnagcatcggcagagacagaccccctcgccatgctcagggccacgctgccggccggcagagggagtgcccgtctcggcttcccaagcccctggacacacctccacctggcagagggggtccctggacacagtggggggtctctgtgctgaagaagcccctccactggcaatcattaaaaactgaaaactgtgaagtctacggtacagaccctctttgctgtctattagagttttgacaacaggactgtgacttatttaaaaaaaa

SEQ ID NO: 376324 - DNA, 487 bp, Homo Sapiens
  misc_feature (53)..(113): n is a, c, g, or t
  misc_feature (128)..(154): n is a, c, g, or t
cctgtggtcctagctaccctgaaggctgatgtgggaggattgattgagcccannnnnnnnnnnnnnnnnnnnnnnnnnnnnnnnnnnnnnnnnnnnnnnnnnnnnnnnnnnnngagaccctctctagnnnnnnnnnnnnnnnnnnnnnnnnnnntctgtttatattggtaaatggatttatatctgtaaatatctataaatagattactgcaaaatagcataatccctactccaccttgaatctggtaccacatttacaggcttccataacacacactattttctttcctataatttatcagagttttttgggagaacgaatattcctttaatgcctgtccccctaactagactatgagctgtggaagggcaggaaccatttccatgtaagggcctatttctaccacctgccaaaatgcctacacatagaagatgttcagaaaatatttgcactttgaatcaatgaatatgttattctgaaaaaaaa

SEQ ID NO: 376325 - DNA, 337 bp, Homo Sapiens
  misc_feature (311)..(311): n is a, c, g, or t
ggaagacactgagttactttaattggctattaatttttcttcataataagggataatgcaaggtttgagtgcaatatgaactgacaatagcaggtaacacatgcttttgttgcacatttgagttgtgtgtacattttaatcctactacaatggattaatggtatgatgtctcaaatactaaaagtaacctgggatcaaaggaaaaacaaactggttccatgtataacactgggaaaatataaatgcttatgggtgggcctagggagggatggaaaaggaggggaaggaatttaaggaaaattggggaaaanctaggtaggtaccctcttcccaaggc

SEQ ID NO: 376326 - DNA, 800 bp, Homo Sapiens
  misc_feature (16)..(16): n is a, c, g, or t
  misc_feature (23)..(23): n is a, c, g, or t
  misc_feature (50)..(50): n is a, c, g, or t
tttagggcaaaacccnaataacngaaaatgtgccagatacctagtgaagnatactagtacaagtttaaaaggaacacgtgactgtaaaatctcacatttacaaagtgcctgaactcttccatatttcacacgcatgttttagaatagattttagggagtgtttaattcattatccttttgacttaaaatttttgttaccaacttcctaggacttagataatatataaataagtacaaatcccaggggaagtgttgtgatgctagactaaaaggtgggaatgtgctgctgttccgtgagccttgttccattgttgaaaatttgatgcctcagtgtttattcagtaccacctcatggagcttcaatgtaaatggattatatgtataattggtaatttgtatagttttgtagattgtagattaaatgcactcatcatgtcacatgtgattgtgcttggagtatttgtgttttattcttttactttcaacggggttcttgtctgttacatctctggtgatttgaaatatcaggaaagacagtttgtcagaaatgagaataatatagttgaaatcagttgggctaaaatattctacagcaagacaatttcttttgggtgaactgattctataatttacttacttttaatgtaaggattagatttattgttgagctgctttccagatcagactgtcactttatagtttttctatataaagattatatagttgcaaacaaaggttgtgaaatttcccttttgttgtttttgacttttaattaataaaagtacattgttttcatagca

SEQ ID NO: 376327 - DNA, 362 bp, Homo Sapiens
  misc_feature (37)..(37): n is a, c, g, or t
ccagagggcccaaacggtatttaaaaaccccccctgnggcattttggaaaaaccttccaacccgtaaaaagttacctttacccgggatttattatgaagaactttgtagttgcctttgtaatttcccataaattgtctttgaaactaacattttacactgaattattttgagattttaaagaagtaattaagtgcaaaatggtatataatgtgtactttttctacttttaggaaaatttaatgagagcttattgcaaaaattgttataatttggtcattataagtgacttttagtaaaagtaccataaaccttatgttatgccacagaaattcctttaaaataaaattcttaaactaaacat

SEQ ID NO: 376328 - DNA, 395 bp, Homo Sapiens
  misc_feature (348)..(348): n is a, c, g, or t
  misc_feature (382)..(382): n is a, c, g, or t
ttttttttaaaaggcaagtacatatattttatgtgttcaagtacatatatttatgtatatttatgtatgtatctgtgtatgtatccacatgcagaaagataatataccctgatacaaaatatacatgttaagtctaagaagtcctgttactcaaagaaatattttcaaatattattagataattcacttgtcgatcatcctttttcaggcatctaaaggaaatttcaggacacaaaatatggcaactgcatttaggaataaacaggatgggaaaaggctattgtaggaaaaaaatatagggtttttaggaaaagttggggaaaggattacagggccaaaaaataaggncccttattatttaaattacatttgccaggtttcnaatatttggtaac

SEQ ID NO: 376329 - DNA, 339 bp, Homo Sapiens
caaaatcgagatatgattagctgtaggatgtcatctaatcacagatcatcccgaggctaatttatctcccccatgaccataacacatcaaaaagttgactttttgcagctcggctgtgcctcatcttcccacgaagccccgacaggcacatccagtgaggaaccacagtgggagtcctgtggcagggtcaccccacttccgatgccctccagctgcatcttggcacgaaaaaggctgcccagttctcatgccctttcaagtcccgggctggggggtagcagtggaggctggggttaaccgccgtccgtctcaaaggcctcattgtggagctgcaaacac

SEQ ID NO: 376330 - DNA, 320 bp, Homo Sapiens
  misc_feature (51)..(51): n is a, c, g, or t
  misc_feature (124)..(125): n is a, c, g, or t
agtgaaagacaagaatgtgtaacagaagcaggtcaccatcttgaggaaaanaagcccgatcttctggaaagtatgttgtattttctcacattcaggacctgactaactttattttgccgtattnnaatattatgcaaaatttatctgggaattccattaatagacaactgaatgacagtcaatactcttgaaaataattataactttaggtccagtcaaatgcttttcaaaactaaaaaagatcaccccaaacataccaatttatggcatactctgtccagcacaatcttcagggaaccaacaattgatacaaatttcag

SEQ ID NO: 376331 - DNA, 232 bp, Homo Sapiens
  misc_feature (58)..(58): n is a, c, g, or t
ttttgcatagactagccccaagggttacagaaccaacacatccctattagttatgtgntctgataaacatttttttcatgtaccttggagtgtatattttataaatattatatggcattgattatttatgtgaaactaaagctaggataacagattgtacattaaaacagaaacttgaggattttcattgaccattggttttgaaataataaaaggaaacttgaacatttcc

SEQ ID NO: 376332 - DNA, 493 bp, Homo Sapiens
  misc_feature (141)..(141): n is a, c, g, or t
  misc_feature (350)..(350): n is a, c, g, or t
  misc_feature (437)..(437): n is a, c, g, or t
  misc_feature (439)..(439): n is a, c, g, or t
cctctaacaaaggctctggagcactctaaactctcattctgggctcattcctcactcctggaggctgatttctgggggaaggaggaagtgcatgaggtacctttctgtcacatgactggtggcagaccctactttaaaccnagccccaacaaggtcatgctaacagagctgctcatggcattttccctggactctcctcccttggtcctgactggattcttctaccctgatccacttagtaagttcaagctccatctcctacttacacaatgccccttctcttgctcctttgctcatggtgtttacactggctttctccagtctctggttctcagtccccttacaaagancctggattagatttgcctgcctagctctgcctgattgggattacacattgtgtagtgccaacatcacacgttcggcatctactgtgntngcacggcactgcactaagggttttacacccattctccatttaatcctttcaaca

SEQ ID NO: 376333 - DNA, 454 bp, Homo Sapiens
  misc_feature (35)..(35): n is a, c, g, or t
agaggtataagggctgacaatactctggtccacanccatatcttctgatcctaccaagcgatacaaaaacttggtggtctggtgtcgaaatcccttcctggacggcaaaggaagtctggtatcggtcaaggattctgaagtcctgacaggtggttctgtacgtggcttgtccagctggaagtctggaaattcctccttctttggctccataaatcccgtcaactaacaaaagagcagcattaacaacttgatccaagtcaaaaagtggtaatcccctatcccttttcgcttgtctgacaatcagtttgcgtttcagtctccgagcttccggagtcatggcaacagcaccgggacaagcttccagcctcttgagcagcagcttttcctcgtagatgctcacgggagtatacctgggctctttcggctttgtgtccttctccagctgaggcttcct

SEQ ID NO: 376334 - DNA, 632 bp, Homo Sapiens
  misc_feature (426)..(426): n is a, c, g, or t
  misc_feature (488)..(488): n is a, c, g, or t
  misc_feature (506)..(506): n is a, c, g, or t
  misc_feature (511)..(511): n is a, c, g, or t
  misc_feature (534)..(534): n is a, c, g, or t
  misc_feature (542)..(542): n is a, c, g, or t
  misc_feature (558)..(558): n is a, c, g, or t
  misc_feature (588)..(588): n is a, c, g, or t
  misc_feature (596)..(596): n is a, c, g, or t
catggtgatggaaggtcccagatatctgagtccaaactgtcctgaccttttaagtgaaaaccctttacatgccttgttgccacataaaataaaaagagagaaaaagaccagtgctgttcatggtcaaagtcagagtggaacctgcaattctccagatctaatgtgtttcatgacccttgtcattggtcatactgggatctgcatacctccatgtgcccctggaagagcagaactgtttgccaaatatctaatacaggaggcctgcaatctgggtctggaagctgtaaggcctgggttttgttacttgggccaagttattccagggttttgggtctacttcattcataatttttgggtgtccgagcatcccgaacccgggagcacctggaactattctccgggctgtgcaagtgtgggcctgggggnaaacagcttgaaaacattttggtaattttggcaatatttatggcttaaaaagggcagttctnggaaccatttttgacttnccttnagggggttttgagaatgctaccnatgggatnccgattacagggtttnagtttaacattgccttgggatatctagggnagggtccngggccctttctgttttcaatgcaaaggggaaatttc

SEQ ID NO: 376335 - DNA, 430 bp, Homo Sapiens
gtgctaggcagtgaacacagggtatgaacttgaaaatctgattgcaccctcaatatctggaatatacactgatctatgacctgaaattgtatggactgcagcaatccaaggggacactaagcagggtttgagtaatgctacaatggatttataggtcattttggagaaggtgttccacatcattagggagtctgggtttcccagatgtgcctgttttatcctttttattttaaataacatcactgtctttcctaactaaaaattcttcatcttcaggaaataagattgagatacggactgaaaatataaaattagcaataatgtttattattagatacttcctcaattaaatttctccctggaaagtcttagggcaaaagcccctgtctcttacttcatatatcaagtttgggaggggaaagacataatt

SEQ ID NO: 376336 - DNA, 397 bp, Homo Sapiens
  misc_feature (329)..(330): n is a, c, g, or t
  misc_feature (344)..(344): n is a, c, g, or t
  misc_feature (366)..(366): n is a, c, g, or t
caccaagtggatcaataacaactgaagacttaggaaatttcattcgcagcgaagagccagaagttgttcaaagacttcctccagcatcctctgttagcacactagttttagcaccaagacctaaaccaagacaacgtttaacacctgtagataagaaggtatctttcgtggatatcatgccacatcagagtgatgtttcacaagaaggcagtgtagatgaggtaaaagagaatactgagaaaatgcagcaaggaaaagatgatgtgtctttactatctgaaggtcagcttgcagaacaaagcttggcatcttctgaagatgaaacaganntaacagaggacttngaaccaggaagttgaaggaggncatgtcagcttctgaccagtggatgactgta

SEQ ID NO: 376337 - DNA, 370 bp, Homo Sapiens
  misc_feature (337)..(337): n is a, c, g, or t
  misc_feature (347)..(347): n is a, c, g, or t
acacacacacacgcatgcatgcacacaccatgcaggtgacttccccaggaactagtgccagcacccctgctgcagagggggatatcaaggctaaatggaagagaggggtgacttgcctgggagcacagggcaaagcaaggacagcaaaccaggcctcctggtgctaccccaccagctgccctcacagggtggaaggtacagccatagtgggtgcctgcattgccctcccctcacctgggcccagccatgctaccccaagctcagccctgtgaccagctctcccagagctgaacattcgggcttcaacccttttaccttgagctttttttgttgcctncaaaacagcntcatcttgcagtttgttttgaaa

SEQ ID NO: 376338 - DNA, 396 bp, Homo Sapiens
caggagactgtataggtctacttaatggttgctgggcaggtcttgaaggggtcgaatctctagatcctgatctagaaggtgctttacttgacccacctatttgggatgtctgcctggcaacagggcttaattctgatttcacagatggcttggctcctctaggagaagtggtggctgtttgaccttcactagggcttttggaggctggagtcttaaggggtgggccttttttagaaacaggacttgtacttgaggagctatttcgaactcctggaatatgaatcattgtcctgcctcgagagattgaaggcatgtttgcttgaaggggctgtttcatttggcctgaaatttctgaattagatcgaacttttccagtaatcaaacttttataaactt

SEQ ID NO: 376339 - DNA, 432 bp, Homo Sapiens
ggctagaccaccaatcttctggtagtcaccacagggaaagtttgatgaaatgatttaaaagattggaaaactatttgaaataaacgctcatttgcattgatagctacttttggaatatttttcttctaatcaagagtttaagaaatattgttaaaatgtatcttactgaggaaagtaacttgcaaaaaacagtacattgccaaaagcagtatacacattgcctaaccaacacttaacccagtgtctatgaacttcacattgcctcacgccatatggaatgtgttgattcattcactgttccgtttttatctacaattttggtttaacaaggctatgtatttaaaataatttttaaactctttacaggtaagtcacttttgagttgtaaaattccaggaagtgacttttcttgaagtagggctttaatggaaa

SEQ ID NO: 376340 - DNA, 167 bp, Homo Sapiens
aaatcacaacagcaaacactccatgtataaacgaacacatttaggaataaaagtgggttggaggcgagagcacagctgaatatctgacaatatgttctaagattcaggcctgagaaaaagtgaggctgactttaaaggaatcctgtttcaatcaacagtttcaatgt

SEQ ID NO: 376341 - DNA, 394 bp, Homo Sapiens
ggttaatgtttccatattaaaagaatgtatttgtaaaatgtaacatggatcagtagttacccttttttccaagcctctgaagaagttcagattacgtgttagacttaagttacagtgaaaactgttttaatactacttttgtggctagcaaaggttgtgcatctatttaaaattatttacaggatgctctaaataaggggcattaaagataggtttagctcttaattttagaaattgtgacactactgatgtctgtcatacagttattcttcagaagttctctgagatgtcaaatataatttttgtttaattcagagataagtaacacctgctctattgattcactattacaacaaaccctaattttgtcattaaatattttaactctgtgatg

SEQ ID NO: 376342 - DNA, 320 bp, Homo Sapiens
ccataaaatgctactttgaaataaggaattacacatagttaatacactatttatctacaacacacatacacacatagatgcctttcatcatcagctctgcacacaggtatgaggctcttccactgcaatgaggcagcaaagggcaaatttgtctacatttcagggaatagaaaggccattaaaaataaatgaccatcacaaattggaaccctgcctatttcagccaatttgatctggaggtgaggtttggctatgcctcggtgttagttagtgcagattttattcaggggaaagtcaggaccagaacatcttgtgttctg

SEQ ID NO: 376343 - DNA, 445 bp, Homo Sapiens
  misc_feature (12)..(12): n is a, c, g, or t
  misc_feature (259)..(259): n is a, c, g, or t
  misc_feature (287)..(287): n is a, c, g, or t
  misc_feature (311)..(311): n is a, c, g, or t
  misc_feature (320)..(320): n is a, c, g, or t
  misc_feature (326)..(326): n is a, c, g, or t
  misc_feature (339)..(339): n is a, c, g, or t
  misc_feature (380)..(380): n is a, c, g, or t
  misc_feature (398)..(398): n is a, c, g, or t
  misc_feature (410)..(410): n is a, c, g, or t
  misc_feature (430)..(430): n is a, c, g, or t
tccggttaattncagaagacatttcaaacatttttcttacaccatataataaaaatacttaactaaattgacagttataaaaataaatcagtgaaatgtaccttatactttaataaaaaatgttttcagaaatagataagtgaaagctgagtgtttctttgataggttcccctgtactataggagtgataattgcagctattgcaatagtagtaattgttaaatggatactaatgaatagcatagcatagtgggtaagngtttatatagcacaggctctaggaatcnggtttaaggtaggttcaaataccngttctgccngtaacngggtttaggaccntggggcaagttaaaggaatgtctcccagcctccgtttcccnatttggtaaaatgggaantaatgggtagcnaccccaaacccccttacggntttccatggggtaat

SEQ ID NO: 376344 - DNA, 471 bp, Homo Sapiens
  misc_feature (27)..(27): n is a, c, g, or t
actgcaacacaaaatccttgtctcccnagctccctgtccccccatgaaaaaggagggaaatgccgaaacatctcccaccctacccatatgccttttccctgccctcagtgcccgtgtcccaaatgccagcaggtccttttaagtgaaggctgtagatacacaggtcaacgtcctacactgcaaaataaaatgagaagcggaaaagactttcagggtatcggaaatgaagagtaagaatattggcacgtccctcatcagtacaagccacagcacaccctgcctcaaactctcattctgcagcatgctgaggtccttacgctcactccaggtttataagaagggatcaaatgagctgtttgaaacccactaatggccataagagaacagttggtgtcagagacataggtgcctgggacttccaagagaaaaccaatggagagagggaagggagagaaataaaaatgacgtttc

SEQ ID NO: 376345 - DNA, 511 bp, Homo Sapiens
  misc_feature (488)..(488): n is a, c, g, or t
agattgttcagctggaaaaggatttgatcgtcaccttttaggtctcttactcatagcaaaagaggaaggtcttcctgttccagaactctttacggacccacttttttccaaaagcggaggaggtggaaattttgttctctcaacaagtctggttggctatttacgagtccagggagtggtagttcccatggtacacaatggttatggatttttctaccatatcagagatgacaggtttgttgtggcctgttcagcctggaaatcctgtcccgagactgatgcggaaaagctagttcagctgactttttgtgcttttcatgatatgatacagctgatgaactctactcatctttagagatgaatcatctatttaaggcacttaccaaaacatatccattaaaacttgagtgctggggagtggagttgggtaatatggagatggggaagggaatgtttgacttgcttaacattcctttaaacaagtttangaaaacttgtttaaatgttggaa

SEQ ID NO: 376346 - DNA, 475 bp, Homo Sapiens
ccaaaaccccaggccagggataaacccagagagaacatggggacatgcaatggtgtgatttgtaccctaacacagctactgatcaaagtcagtaggagaatttatgaggtactgctacccacgagccccttttcagtgcacaaactcaaactagtcttttatacacaggtgagattcttcctcttcatgaaactgttccttactgacagcccaatttcttccctaacatggctgagaactatccctcaagataaggctaaccccaggatgtactgttccacctcaactttctgttgacttcatttacatatttttattataattatgttctcaaaatataaagaattgccacagcaaatgagagtgatgtactatcaagttttgaacaagattgttaactcaccttgtcagtttcccactatcttcttggattccctgaatctcagaataaataataaaaactatttcatagttc

SEQ ID NO: 376347 - DNA, 530 bp, Homo Sapiens
  misc_feature (508)..(508): n is a, c, g, or t
  misc_feature (517)..(517): n is a, c, g, or t
acatggcgttttatagtcctctaaaatctaggtgctcccacccaccaaaggcatatcctgcaaagggctgtgaactatcttggtgaactgtcttgggtcccctttccatgtatgttttcttgtcactgaaaacaaacaacgctgagtttatcaagaaaatttaaattgggggatcataataattccaaccaagtgacaactctgacatcaaggttattaggagctgtacatccaattcaagttttatttgctgctattctgggagaataaacttgtatatggagaataaactaataaacttgtatcgaggaaatccataaagttataaattagcctgaaaaatatttcaggtaatggtgtggattggcctgctttgactctcagccaccaacagaaatctttgtccacctttgtttcctcagctaaaagtaattttgttataaacacaaagtgactttaaacaggtaaaaaaccctttcccatttttgtacattaccaaagtttttcnttacccacngggtaactatttt

SEQ ID NO: 376348 - DNA, 362 bp, Homo Sapiens
  misc_feature (260)..(260): n is a, c, g, or t
  misc_feature (308)..(308): n is a, c, g, or t
  misc_feature (319)..(319): n is a, c, g, or t
catggggcctgggtgtccacttggaacgtgatgtgcacctgggacctgagtttccacctagggcctgatgaccaccggagacccaggtgtccacctggggtctgatgtctacctgaagcctaggtaaccacctgtgccttggtgttacccgtgccttgatttccacctgagcctgatgtacacctggggcctgggtgtccatctgaggcctgatgtacacctgcaagtccagtgtccacttgtggcctgatgtcaacttnggaagctgatatccacctgggggacttgatgttcttcttggggtcttnatattcaactnggatcaaaatgttcaactaagggctggggatttaatttggggg

SEQ ID NO: 376349 - DNA, 348 bp, Homo Sapiens
  misc_feature (83)..(83): n is a, c, g, or t
acacagtgaaatatagctttgctgtataaagtcattcaaggattgttctttcatgaaatacttgggtctagcatgagtttggnagctcatactgctcatctgaaacctctaaggagaagtaatgctggggaattcatacacctcgagcccctcaagagcatggcagtgcaaggaccccacaggacactgctcagtaaagtcctacagctttactctttcatttaagtgcaagtagttttttgagggggattgggggaatggtgtgtttccatgtgacatctttaggttttatgaaaccagcatttggggcaaagaagcactcttttccccaccaccctggtggaaaag

SEQ ID NO: 376350 - DNA, 251 bp, Homo Sapiens
tgtggtagaaaggggagagagccctcaaaatgacccagagtagatggactcgtgtagtaaaactttacccaaagttggtttcctaatgatataatgtgaaacagtctatgtgctatacaaataattatatctcttttgttaagccccacgtcattttgacaaaggctttacttgattgagtattgacggcttttccaaaataaaatccagctcttaattgagatttgtggctgggcatggtagctcatgct

SEQ ID NO: 376351 - DNA, 621 bp, Homo Sapiens
  misc_feature (17)..(17): n is a, c, g, or t
  misc_feature (72)..(72): n is a, c, g, or t
tgtagaaccagtctgtnggcaaaaaggcaaatatttcctttccaaattttgtaaaattatatttaatggaantccttttcctttgattatcaaggactttcactgcaggagtgctatttcctgtgcctaagaatgtttccaaaagtcgcatcgctaatgatatttgccaagttgagtgtacacaaagtttctcatatcctgttcaagttaatcaacatcaagcacgtggggatgctttagggtgagtctatagtacaaaatgcataaaccatgtccccaggaaatttgaaaggaagcaggtgctgaatggaatttttttccttttccatgagctgtgttaattctatctccagtaggcctaatgcttgaataagcaagatgtctaatcaataaattattttcatgctcagaatttcaggtttttgtactccagcatagcttggtcttatttcttactgtatgaaagcttaacagcaatgtgatttaaggttttgttttaaatgggagatgtaagtgatttaattcatgggtacttttagaacctgatagataatcccattgcctttatttttctaattaaagaattcctaaatactttgaaaatacaaaatattcctgaaa

SEQ ID NO: 376352 - DNA, 1265 bp, Homo Sapiens
  misc_feature (878)..(878): n is a, c, g, or t
aagtcttttcttagaatattttccaaaacaaaagcaaactatatagaactattttctagtaaaaccggtgactacatttccactttgccttataggaacaaacaattcaatcaaatcagaagtaagaagtgtaaagaaaggaatgttgtgtgaggacaatgcttcgggcacacaagcggctctttcagggattaagtatttggggcaagtggcttccccaaagcagattgtcttaattcacaggccttgtttggtttggttaatcctagtttgggccgcctgattgggtcacaccaagctttagaaagggttagagtgccgaccactcacccagctgaaaggtttccttgatcctttgtcacaaaccaaagaaattcttccttaaggctaaaatgaagacgtggcctcaacagcctccagccatcccctcattcaaactcaccccaaaagcaaccacaactcagtccaatgcttcatttacatctatctctgtatttccttttttttaaaaaaaactaagaatgtttgagtagtgtggccttgttataagctgtgtacattaaagccaacacacggaggcccctagtcattgtcttcctttactgcggagactggcgggaggggtgggacgggaggtgctgggacctggagtccccggggctgggcagtggtcgttctgaagccaaacaccgaagcccgaatgggtcattctgggacagggaaaacacaggatccggcgaacccagagggaggacaaggcaaaatcgcaagtctaccagaacgaagcagcaagccacccagcagccgcgagcggggcgagggcgccggtggagcgcggctggaggggaacagaaggcccgggcaaggtgggtgcgcgnccaaggcggtgctcacttgtggctcattgtacaaacagaagataatggcaaacaaagcctttccattcacaccatgattttgaaataagtggaaagcagcgatccccccaccatagggtcggtggaacattgaagagtgaacatttctcagggggcgctgctgctgctgctgggaagcaatcgctgagcaaaagggtttatgattgtccaggcagggcgagcgccaagtaacaccgaggacaggaggaagtaagccctttggaaggacagaagggaaacactaaagaaaacccacttatgagagcacctaccccgttctccttatgccatattccattacattcctggcacaccagtctggcccgcaaacaatttcttccctatggg

SEQ ID NO: 376353 - DNA, 562 bp, Homo Sapiens
  misc_feature (465)..(465): n is a, c, g, or t
  misc_feature (478)..(478): n is a, c, g, or t
  misc_feature (494)..(494): n is a, c, g, or t
  misc_feature (503)..(503): n is a, c, g, or t
  misc_feature (531)..(531): n is a, c, g, or t
  misc_feature (538)..(538): n is a, c, g, or t
gatttgtgtacatcaagtcctagaaaatacaatattggaccaggtcccgctctaactgataactagaatagctagctttgccttcaagtcctttaatgctacagtaataaatacactagagcaagaagtcttctgtcgtggcgaatgttaggtgcacagcgtaaatttgtggaagctttcgcccctcgctctgtatttaagccatcagacactgagttcagccgacttaaccaattattcagtgtaagactcatttagtgattaatcagtgtcattttaaatagtgagttccctgaatacctgttaagtaggattcacgtcttcgaaaagttttatttgcacgaaggtcataacttcagttgcattatgcaaaatttgcccgtaggtcttttaggatctctggcagggttgggtatgtttttcatgtttccttataccccccgtaggaggtagggggcagggccnttgccacagaatngggcactactgagggnccaggatgncttgaccccattaggggggaattttttnagagccngacttggggaggttggaaggcagg

SEQ ID NO: 376354 - DNA, 550 bp, Homo Sapiens
  misc_feature (11)..(11): n is a, c, g, or t
ccaagcaattnaggttattatcggggcagggcagacagacgggacagtggggttactagaccgtagcatttttagaaatacaggcctgacctacttagagttattctctctggctggcagctgcatggtacataaagtctcctgataggctgagtctgttgctagggggaattagcatgaatttttccacacacagactcagtggctgaatgataaaagctgactggaattaaagagatttggtttagtattatacagatttatgtgcctccttttctttctcaagtgcagagaaagagtgcaaaacacagattttgtttccatttgttctttgaccttcttgttctctccccctcccctcaagatgcatgaggggaggagggcagggcagttatgaaattttggttaatctctcactgttggggtcactgaaacgatgtcgcaaattgcaaggatatttaaggcttaaaaactgttggggaatgacttaacaggaaggttaggattatttttcctcttctgtgcactaggctgttttgaagttggggcc

SEQ ID NO: 376355 - DNA, 446 bp, Homo Sapiens
actggcccaaatcctaatagaagagtttactacttcctccattcaagttagccattttgagtggtaaattaactttctaatcaacagagtattcactagttacagatgtagtacctgaaaactgggcttaaatattttaatcgccaaatagtataccagacattttggtccacataacagtgagggtgtgggagtggaaattgatacacccctcatgagcagaaggcaaaagtatgatagctcaaaggtccgtgcactgtgttaccttttgtcacttccagattaaagatctgaggaggtgacatggagttctcatgtcagccctagagatcagacttttgaaattccaaacagatatagagatatttacataaaagacaaaatgctactgtactccaaatcagtgtttgagatttattattgcatgcttatagctagaaaaaaaa

SEQ ID NO: 376356 - DNA, 398 bp, Homo Sapiens
  misc_feature (180)..(180): n is a, c, g, or t
  misc_feature (327)..(327): n is a, c, g, or t
  misc_feature (383)..(383): n is a, c, g, or t
ggaacttgacaatctttaattcagaaagaaaacatccagtaaattcacaaacataaatcatggttaaaatgtattactacaaaggaatacaaattaaatatgtgtatcagttgtgtgcagtttcagctgccagaaaaagacaatgttcactgaagaaataaacaacaaattacgtaaganttgactccaaataatatagggaaactgctgtctacaaatacactcctattgagactactcaagtactcttaattttggaaaaccttcctcttgaaatagatcatttctgtattcacttctaagtagttctgcttactgtttcatccngggatttcagttatgtgttgattttcaaacatcgtcaccctaaccgtacacatccnaaggagagtgaaggg

SEQ ID NO: 376357 - DNA, 201 bp, Homo Sapiens
tctttctaatttttctggcctcagtccaagtactactgcatgttggagtcaacttcattgactacccaagccacttgggtaactttcttccagccactatgctctatcacatttctggtttttatgaactatattttttattcaaactcatcacactctctaattcttttgtttattcagttacttgaataaaggctgtct

SEQ ID NO: 376358 - DNA, 400 bp, Homo Sapiens
  misc_feature (40)..(40): n is a, c, g, or t
aaaaggtgcccctgaacccctaactaacccaaggcctgangcaaaattccctgaacccccggagttggaggctgtagtgtgccaatgatcactgatcctgtgaatagcccactgccccactcccagccctggaaaacatagcgggaactgacctaagaaagaaaaaaagacatacaataatatatagatggtcttcaacttacaatttatgcactttacgatggtatgaaagggacacacattcagtcaaaactatactttgaatattgggttttgatcttttcccaggctggcgatatgcagtacagtatctgtcacgaagctgggcagcaacagtgagttgcagttcccagtaagccgcgcaatcactagggtagacaactagtacttggtggctcat

SEQ ID NO: 376359 - DNA, 394 bp, Homo Sapiens
  misc_feature (246)..(246): n is a, c, g, or t
  misc_feature (272)..(272): n is a, c, g, or t
  misc_feature (318)..(318): n is a, c, g, or t
  misc_feature (324)..(324): n is a, c, g, or t
  misc_feature (335)..(335): n is a, c, g, or t
  misc_feature (367)..(367): n is a, c, g, or t
gggacttgaaatcataatcatctgatattagtacagtacaagaaatttacatttgttttttacttcagaatttaagtgacttttgcccaaggaatttgagaaataaggcaaataagttgctctattttaaagtagtcattcaatataaatatattatatcaatcttaacttttttattctctgatatgattaataatatgtatattcttacttttcttctaatggggcatatgtatccttgtggancactttgaggagaggttttcttgganctctcccatttataggaatctttatactctttttactgtgtggggntccccngctttttaacnggttttctgaggggccaaatatatttgtggcnttttttccttatgtaggggggaggccc

SEQ ID NO: 376360 - DNA, 591 bp, Homo Sapiens
  misc_feature (354)..(354): n is a, c, g, or t
  misc_feature (385)..(385): n is a, c, g, or t
  misc_feature (410)..(410): n is a, c, g, or t
  misc_feature (462)..(462): n is a, c, g, or t
  misc_feature (485)..(485): n is a, c, g, or t
  misc_feature (500)..(500): n is a, c, g, or t
  misc_feature (518)..(518): n is a, c, g, or t
  misc_feature (569)..(569): n is a, c, g, or t
aaatatataagtaaatagctgtagagtcacatatatgaagtgaatagcatatgtgtcatttagtctccctgaagattcttttcaagatcctgttcagggtcctccaggcatcagctgttgtgtcctctctttgtaacagtggacaggacagaccacccagtgctgcaggagacaggccactgcgtcacctgtgagtggtcaggggctgatgtggcaacaccctctgccaagagacagagctgtcctgagaatgctttgtccttctgagcccatgttttctgctcagtagcagcttggaagcagatttggaatggtttattattttggctgctcttggggactgcgagaagcagnaggagaatgagagaccagtggcaactgcctngcacagcagaagattaaccctcttnccttggctttccttttaattagtttaaattaggactttgtattaccacctgnaccagccttttgtggcattttantcctaattcatggcntgaccgttaaaccttttngttagtccttaaccatatgtaattagggcagtgtttaaattcaccagcagntaccctgatttttcatcttacg

SEQ ID NO: 376361 - DNA, 372 bp, Homo Sapiens
gttttaaagaaaatttatgctggtggtttgcagaaagttgacatatatcctagggttcccttgtcagagggcagcagggtccccatgggttcacatcgttgcctggacaaggagtctttgtaccctagtggtgcctgggttgtcgcagggatggggtaactcatttattcacactctttctcctttcctgtttccttcaaagataccctggtcctagttgactctactttactgttcaaaattcagctcaacatatgtcaagctgtacgttcttaaactcaaggaaacagaaaggttataaccccgtggtttccaagcctggcttttcatcagagtctcttggtgaacttttagaaaatccatattcttgcc

SEQ ID NO: 376362 - DNA, 483 bp, Homo Sapiens
gaataaacttactggattaatcaggaaaatgctgtggccagaaaggcatttgaccaaatttttcatgcccttatagacaagactgaatgataatacaatcaggtgtgttcatatttggttgaaaaactgtagcccaggagtattaattgattaattcccctacaagtgctcaaagattctgtccttggtcctacctttaacaaagctcttatcaattatttggacaaagagaggcatcacatgtattaagatctgagaatgacattgagcgagataatttaatcggtgatcaaattgaaagaactgaaagatctatataagttgatataatggatcacaaccaacaagaaaaataatggagatagatataaagtccttctaagaccaagaaacacatttgcaaggatataaaatgagtgccatctgaacaagtttatttaaagcaaacaaaaaactcagggtctagttgcttcaaggtcaaaa

SEQ ID NO: 376363 - DNA, 330 bp, Homo Sapiens
ccagaagtggtggattgaagctgaagctctcttcctgaccatcaggttccctcattttgtttcacctcaagctctggcctgctcctgtgtgttacttgcacagcagctgtctacttgaaagtcttaaagttattagcagtttctctcctttcttttacctcactgtaattttatttcttaatttagaattgaaagtatatattatccatctgacatgtgtgcatggagcttggagaaatagaagatgcatttctcttcatgaaacgtttgtaatttatttgtagaaacaagacttactgatataaaaaatttggaaagcatttgtgagag

SEQ ID NO: 376364 - DNA, 470 bp, Homo Sapiens
  misc_feature (374)..(374): n is a, c, g, or t
  misc_feature (391)..(391): n is a, c, g, or t
gggtgaccggaccctatgtccaggctccctcttccctcccaaatcccttaattttgagttttcttggtctcctgggcccctccagccccagtcacgtgtcacacggaggatcaagtcctgctggtcggccgtggctgactcttcaggcacgttgggctcctgggtcagctgctgccgttcgacgctccctggagccctgactcaggtccttcccagagaggcaaggctggggccctgctgagcctctgctgaacccgggcccccgaggtcctgcttctggcttcgcatggccataatcttgacagggactctgggtcccgcattccctgctcccagcacagcggggcttcaggtaggcagggaggggagtttgntgtttcccgggcactgnctattaagggttggggcgaggggtcaagcgggggaagtaaccacaaaaggggcaagaaacagagggcccgagaagccgg

SEQ ID NO: 376365 - DNA, 426 bp, Homo Sapiens
cagagctcaaagacatcatttagtatggctggggaatgacaagactttaaaatgcctattggcaaaacacattgataaagttataccaagtccattaacttctctgggaaatatttctagctagaggaaaaatgcctggattctggaagcagggatggtggagtggaaatgacagcacaccagtctcagctcagccattatccacacgtgttcatcccagcaagttgcttcatgcttctaggctttgtgtcatcatccatagtatagagtgtttctagattgcctaatgtcactcacactacgtcgctgggcaggtgtgtggtacacttagctctaacatcaagcagacctggagtttgaatcctgggctccgtcttcaaggcaatggggctcttggggccaagtaattttcccatcttgttaaaa

SEQ ID NO: 376366 - DNA, 133 bp, Homo Sapiens
cctatgagtctctgaaagacaatgattctttagataattttatagataaaaaactattgtagcatttttaacacttgaagctttaaaacagagattccaagtgctttgctcttcacaaaacgtaacttcagaa

SEQ ID NO: 376367 - DNA, 472 bp, Homo Sapiens
  misc_feature (415)..(415): n is a, c, g, or t
  misc_feature (435)..(435): n is a, c, g, or t
gctcctcatatgctattatctgtcagaatgtgaaccatagatctgatattgcaaaagaaatgtgttttatgcaactttattaatacatttatttaatgtgactccatattcaacagaaacaatccaagatactctcttatttataatagaatacttacttcttttgtgctttctttatggacatagatacatttttcatgataaaaacctagaataaaaattacctttgtttttaaaatctggcaaatcatttcaaaatgaagattttaaaggaatttaaataattggacatgttaacaaaattatctgacttactatattgacaaggaaatgcttttacttggttgaatgcaaacagaattgctttgtttcttaaatcagtttaaggtatgaacaatgatttcagacagtaccnagtcctagtaactttaggangaaagtagtattatttatgaccgaggcctgtgaaggc

SEQ ID NO: 376368 - DNA, 424 bp, Homo Sapiens
  misc_feature (333)..(383): n is a, c, g, or t
  misc_feature (396)..(396): n is a, c, g, or t
catccatattatagaagtttgaaaattacaaataaaagacaaaaatgatctctgatttccctagcaatgattctgtttccattgattcaaattactaaaaatttaaacaatattcattggtgtgtcaaaatacacttgtgcattttctgcagttataaagatatctttgggcttaaaatatttttgtgtttcgtattactttcttggtgtagattcccaactaagttaagagttataaacataacgaaagactccatgttagagtgtgtgtatgtgtgtatgtttaaataatacatttgactagggcgcagttgctccatacctgtaatcccnnnnnnnnnnnnnnnnnnnnnnnnnnnnnnnnnnnnnnnnnnnnnnnnnnntttcaaccagccngggggtaatgtgggcccagggggttcca

SEQ ID NO: 376369 - DNA, 511 bp, Homo Sapiens
  misc_feature (54)..(54): n is a, c, g, or t
  misc_feature (121)..(121): n is a, c, g, or t
tggaacctgtgtgtaatgccagggttaataatgtatgcctttccatttccctancctcctgtcttgggaaagcccctagaagccaatttaacacccccaacagccaacgaagttatacttnagtaccccacatctttgtgtcctaatatcattctcccaataaaggaactcgggatctttggaataatggctaattctggacagaagcagggaaaatacaagatgaggctgtaatgtcttttggtgtaagaatgtaagaaagtgctagagaaagggtgggggcatgacaagacagcatagtagccagtctgaaggagctcccaatggctgaagttagaataacttgagcaagaaactaaatgatgacagtattgaattatagctcatagaataaaatagatgcccatgagtccatagtttacaaaaaaaattgaataaatggataagttggggagaagggacaactcctccttacagaagaattccaattaataaatggagaacaaatgaa

SEQ ID NO: 376370 - DNA, 411 bp, Homo Sapiens
  misc_feature (253)..(253): n is a, c, g, or t
  misc_feature (392)..(392): n is a, c, g, or t
tcatcctgggcacagaattcaggaaactgctagacagcctggtccgaaagcattgccagctgcccgtttcctcccatggcccagtatgaggccagcaggggacatttgggatgcccaggccgcagaggaagctgggcactgggtgcagaacaagggcaaggacaggctctgagtgtccagtggcagccagaacaggtgacacagagcaggggcttcagccacagagacacactcaggaggccagaagccgacnactcaaggtgttcgtggggctggctcctgaagggcctgggagggtccatcagctgcctccagcatccagtggctgctggcatacagcctcatccccacgtcccaacccctctcctgtgtgtctgtgaccctgtgcgctntctctgtgtgtacaaccca

SEQ ID NO: 376371 - DNA, 457 bp, Homo Sapiens
  misc_feature (12)..(12): n is a, c, g, or t
  misc_feature (24)..(24): n is a, c, g, or t
  misc_feature (70)..(70): n is a, c, g, or t
gctaacttcttnccaaaagaagancaatttgccccaatctaacggctgaggattccaacagccctgacanccctgaaccaacccagggcactgagcccagctctgtgccctaacgaagacagctgtctgctgaaccctttctgggtgcagcctgctgggtcctaactcgagtctctgaggcataccagggacctctgcccaacagctctccgaggctcctgatcaggaccggctgacacctctggaaaacactgaccctaagtgccacatccctacccttctcctgggtctctgccctctgactcatcactgtgatccttcattatttcatacattttgtccagatctgtttttggtgccagggtcattgactcccttagtccaccactactggacacagcactcagagatctttgccacttaaattgctttacactttgttcttcagtaaaaaatt

SEQ ID NO: 376372 - DNA, 467 bp, Homo Sapiens
acaaaagtatatcattttaattactcatcctgtgttgttcctaagaatggccatccttaagaaatccccaagattcctacgttcagacagagacagacaagtctgcaaagaagaccgaaagggcacccatacagaagacagaaaaccaccagagtacaatgacatggaaaccaaaggaagaaaatataagaaaaatgaaataattaaatatttagtgctactcaagagccaagttaggcaagtactgaaaaaattcaacgggatttagcaaaatgaaagtcactgataatctcaggctgcaaacagataaaagtagggtcaggaataaaaaggaggtaagaaattcttaaaagtagctgtgaagggaaaaaagataatgcaataattggagacagactatgggaattttggaagtcttttaaaataagaaaggtttgatcttgatcacatccttgtgaaaataattt

SEQ ID NO: 376373 - DNA, 326 bp, Homo Sapiens
aaccctaataaaactgagactcatccaaatatgtttcatctgtgagtttataaatgatgcctaaaaaataagatgtaattgatcgtttttggaggattgtagtgcacccaatttattattttgcaaactggcaggtaatggaaaagaatcaagcatttattcctgcctctcatatgatggttcactggcaaagcaaatagtagatgagggaaagcactcttcataaatgtactccagatgcaaaattaaaaagaaatgacaggatattaccgtttggcaaccttaattaattaatggatttaggtgggctggggactgtggcttgt

SEQ ID NO: 376374 - DNA, 533 bp, Homo Sapiens
  misc_feature (19)..(19): n is a, c, g, or t
  misc_feature (34)..(34): n is a, c, g, or t
  misc_feature (41)..(41): n is a, c, g, or t
  misc_feature (49)..(49): n is a, c, g, or t
  misc_feature (64)..(64): n is a, c, g, or t
  misc_feature (77)..(77): n is a, c, g, or t
ccaaggggccaaaaagggnaccccggcccgcccnaggcccnaataaggnaaataaaccaggtantttgtgaaaaagngaaagcccccccccgggggaaaaagggtatgccatacctttacctgtgtgttattagtccatatggaaaatacaatgtttttatgtatgaaaatggccgatttgaaaagagtatataaacatagacatactgtgtttgcccttttttaaaaaaagggctgtttaaatgggtccctaagataactttttgataatgtaatattgacatgataaaattgtaaacttcataattctggcacaggaacaatttatgaaaacatactaaggtatttgtaaattgatgaaataatatatatcttaggaaagtcataattattacacttgtacatacccttaaaataaaagagcctgcttgaaatgttgcaaaaagaaacagaaatacctgctaatatgcccttctaattaaggatgatgccaattaatctctttatataaataataaactttgagttgtttt

SEQ ID NO: 376375 - DNA, 575 bp, Homo Sapiens
  misc_feature (36)..(36): n is a, c, g, or t
  misc_feature (69)..(69): n is a, c, g, or t
  misc_feature (87)..(87): n is a, c, g, or t
  misc_feature (109)..(109): n is a, c, g, or t
  misc_feature (140)..(140): n is a, c, g, or t
  misc_feature (149)..(149): n is a, c, g, or t
gatcctacccccgaaagaacccactcatggcggaantggggcctcaaaaatggagctcctgggcctgtnaaatggaaaaccccctanagctgggaccgacccactcccnaagggaaacttggtggatgaaatgtgaatgnacgaccccngcccaactgcccacagtggaaacaggtgaatgaacttcccagcctccacaggtgggcacccactgtgcctggcccacagaaaaaccccacggtcatagacagcacccatacaatcagccaggctggaagtttccacattgaacctctcactccataaccctccccaacaaaaggacctggttaaatgtacaggatggggaaggacattggaaggtaaaggcagactgtcattctctgaagcgagaagtgcctgaaacattttttcaggcaaagcggttccatgtcctggtcatttcaaaaatatccaagttcctacattttatggtatcatcagaatatgaagagccaaaagaatggatgatgtcattttctgttctataaacaataaatgtaatgtattaacaaagtaaatataggcaaaaaaaa

SEQ ID NO: 376376 - DNA, 364 bp, Homo Sapiens
  misc_feature (31)..(31): n is a, c, g, or t
  misc_feature (91)..(107): n is a, c, g, or t
tgtgaaaaagttaaacggagcatgcatatgntttccaggatataatagaacccaagaaatctgtgcaccttattaagatgtttatagagtnnnnnnnnnnnnnnnnntttaatcatatttaaaataaaaatttttacttgcagctactgaggaggattgattaagcccaggagtttgagtcaccatgggcaacatagcaacactccatctctaaaaaaagaaaatttggcctactagacaaaatagaagtgtagaaatataaatcagttttctcatattctttgcatggatttagtagttacccaacattttctaaaatgtgcctattgaataaaatgaaatatgaatagaagttacatttatt

SEQ ID NO: 376377 - DNA, 335 bp, Homo Sapiens
ctcattctcctttccctcctctccatctccctattgcattgtgtctgactgattttcagagcaccttcgctgtttcccccttctcgttcccttcccataaaatatctagacaggaaggaggtggctgcagaggctgaacaatctcatattctgcctgcaatgtcatcgtttctttcccccattttagggggctgaagttgcccagcaagggatgcagaggagctgggaaaagaaggggggagctctccagagggcagctgcggtcaggggcagggactgcgccagatgtgcctgcctttctggggctttgatgagaaaggggcagcaggagggaa

SEQ ID NO: 376378 - DNA, 415 bp, Homo Sapiens
  misc_feature (35)..(35): n is a, c, g, or t
ggttaggtgccttttatccatttttaaggggcccnggatgaagattaaaacagggtaagctgttgtgcctggcccctttttaatgttgatccattggcagttacccaagcctgacctatcctgaacatgagcctgaaaaccctatgttgaaaaaatgtcccagttcccattttatgtagcttcaactcatctttaaaaaatgaagtgatttagaacacatgtcacgcactccctgggccagccagcttccctttctcttctcgtatgtaatatctttttttcccctttctagcaagtactttcaaaagaactctgtacattttaacataaaaaataaattatgttgggccattttggaaaaaaaatacttatttggctaaatttaacatttcaaacaaataaaaaattcaagcag

SEQ ID NO: 376379 - DNA, 501 bp, Homo Sapiens
aaaaatgtatttttaggcaaggtaaacttgggtaatcttctaaaaaagaaatttaaaaactcactgttagtgactttgatgccttttaaaataagagctttttcatttcattccatctttaaaattttttatctttgttgtagaatattaaaaactattttaagaaagataaattctctttaaagagatctctagcgtgtgtgaatagagctccagatgcctctaaaagccgcatgtacaaaggaagccacgtctatcctgtctgtttatatttgcttttcctgttttgtaacctctttgtactttgttcatggtgacttgtaagctaaggggaaggggtgcctagatgcctttgtatctctccatgtcacgcgctccttggcagccggcctccctaccacaccttgtatgtaatacctttttttcccctttctagcaagtactttcaaaagaactctgtacattttaacataaaaaataaattatgttgagccattttgg

SEQ ID NO: 376380 - DNA, 541 bp, Homo Sapiens
  misc_feature (511)..(511): n is a, c, g, or t
gcgatggtgtagaggtctccgatgtggctctccgtatgttcagacaacagttatgacacatatgccaacagcaccgccacccctgtgggcccccgaggggtaggcagccacaccaagaccctcatagagcggagtgggcgttagtgaagacatgtctgtcccacctgtacctgacacagaagctggggagcctaggagagctggtggaagtgtgtctgaactcggagtgctctgggagcgggctccacagcctccttgtgggctccagccccttgtcagccgcagcctctcttgagggggactccctgtcccctgaggcccagctgggccacgggactccatcctttcagatgcccctgcaggcctggggctccttctgggaagtatggggcctagggcttggtcccactattctgaggccctctactgtatcccgacctgggaagcttttgatggggtcatgggccatgcataacccctgtggcaattgagtgttttgatctaactgttncatctgtcttctgtctgtgcaggaggaact

SEQ ID NO: 376381 - DNA, 482 bp, Homo Sapiens
  misc_feature (352)..(352): n is a, c, g, or t
  misc_feature (422)..(422): n is a, c, g, or t
  misc_feature (448)..(448): n is a, c, g, or t
  misc_feature (456)..(456): n is a, c, g, or t
  misc_feature (466)..(466): n is a, c, g, or t
tgaaaatccatagaactatacaacaaaagaataagttttactgttacataaaatttttgaaagtagctttagacaacattttctagaagtcatctgaagtcacctctgtcgtgcataatccctctcagccctaaggtctgaggtcctactctactggaagcacctagaaggagagctctgctgttgtctctatcacagtctgttacaaaaagataattacttgttgactgcatgcatagtttaatctggaccataaggcatcacatttttataactcacattcccaataatttgggcagtattaaatctcactaattgcacattatctgtatgggacagatctaaatagganaaagcaaatagatgggttcaggcaattattctagggtaatttaaactttaaggccttaccttggatcccnaacatgtgtttggcatctcccggccngccggggnttgtaggggngttttggctccaccaa

SEQ ID NO: 376382 - DNA, 618 bp, Homo Sapiens
gtcaaatccaaaaatggaatgaaataaacttcctaaggggaactccgcggtccttggaatgccaccgcccacggtccttggtggtggcaaactgcctgttggcctgtgtcccacgtccttggaaagaggcaactgcggggcattctcccgcagtcattctggtagggtggacaatgaatagcaccatcgggaggcagtgggtggagaggctggtgcagggggctcctcctcagcgctctcagggatgagttcctctcgggaacatctggcagcagctcactgatgaggcggtgcaggatgctgttgtccggcaagctcccccttttcttttcagctttaatttggtcacagatgtctttaagggcagagtccagagcctcaaacacagatgctttacattttgccttttcagtctgtttcttaggagccgaattttcatctctccggaaaggcacaggactgactagaaaagcaagtttagaaaggccagggtccatttcttgccttctgggctcctcggtgttttcgtgtctggctctttcgtgttttaacattgtggtaaatcgagtgtaggaggccgggcacctgcctttgcaggagctgatgaggtggctgtgc

SEQ ID NO: 376383 - DNA, 473 bp, Homo Sapiens
accatgcaaactggccaagcatcaggcagaaatagcagctgtgcctggaaggacaggtgacatctgtgaagaaaatggccaagcaggacagggtggagagcacgggctgttcccttcctttctgggaacagcaccacctttgggggaactccttctctcatggggttttaggcaggggctgccagtcccagggccctgcctcctgtcaccccccatatgcataggaacacttgtgcaccagtcgctacatttgcaagtggaagctggtggagctgctcagctcccaacaggaagcccatgtgtgcggggccagaggacacagcccatctgaggcgctaagcttctgtgaagagggagtggagtctggatgggattccaatcccacggtccaccccttctgggacccagactcacccttccccttccttcaattctgagaaacaataaatgtccctacttgcgaacaaaaaaaa

SEQ ID NO: 376384 - DNA, 167 bp, Homo Sapiens
atccaccaatatctaagaaagggtgcgtggtgtgggacacatttttcttctatcctcacatttgtaagtttagctagggataaatttcctctcattttgaaggctttgctctattatcttccagcctccagtgtcaatgttttcattgaaaagtataaagaaattaa

SEQ ID NO: 376385 - DNA, 473 bp, Homo Sapiens
  misc_feature (429)..(429): n is a, c, g, or t
  misc_feature (444)..(444): n is a, c, g, or t
  misc_feature (462)..(462): n is a, c, g, or t
gcgaaaggatggttaggacaggagtgtagtggagggaaagttaaaacaacggtagatggatcatcttagggcttgctggtgggggtaggaacatacttcaatttggtttcagactgagaagaagaaagctatgctccctgatgaaggcacagtttgatctactagatgggaaataccctcattttataacttcagtaatttaacattttctgtattgcaaagtggaatttagtcccaaagtattaaagctaaccatagcttgatcaggagatttgacaatttagcataaaattatgttgtggatttttttatttaagaattattgtttactattattgaacaccatgtatgaaatgaaagaaagggtgcttttatttcattatacttatttggtttttttagcggacatcccttgacattaggatagcnttttgaggacatttncaggattttctaaaggtnaccttaatggc

SEQ ID NO: 376386 - DNA, 291 bp, Homo Sapiens
tttttcaaagtaaataatgccagattgttgacatcctagaaatggtttctgggtggtattatatggggcctaggactctgaactgggactagttgtttattttctgggaagtctgtattcttattctcaactgaacccctgactcttttgttgtattttttatgattccgaaatgctttgagggaaagatattttaatgtgtacaatttgttttattttcatactgatctctatttttgtttaaaaccatgttgcatcatgaaatcacttaatccaaaataaatcttcttt

SEQ ID NO: 376387 - DNA, 384 bp, Homo Sapiens
ggcacgaggacttggggccccacagcttgtagtagagcagctagggttcaaaaccaatcgtgctggctccaaaacccatggtgtttctacagcagccctttgccctccactgtcccctgcttctcccagcctcactctacacaagaccagaaggactggtctgtctctgactgatgcatgtcaccctcctttaacttcaggtggggcacaggagtctgtcaaataaaagaatatcggagaactgatattccacgtgcatcttcgtcctgagggctgcaccttgaaggaggggctacagggctgataaatgtccagatccagtcaggaaataaacccatgtctcaagaaggccgtagaacaggggtaggcggctggggagaagga

SEQ ID NO: 376388 - DNA, 305 bp, Homo Sapiens
  misc_feature (58)..(58): n is a, c, g, or t
ccccactggagaacgctgagtcatgcatgggcttctccaagtttccatcagatggganccagtgttgaatccagtgcaggactggagtctagctggcaaagggtaaatgcccccaaagccttcctgccatatggtttccacgaaggcctgagagtcagctgtacaactgtcttgtcttggccatgtccctgtttggtccctgccttgttctcttccctttctcaatttccaagctccacccactcctaaaaacaccagtcattctgaagtaaaaaatggacaataaacatgaatattcaagattc

SEQ ID NO: 376389 - DNA, 170 bp, Homo Sapiens
ggccctctagggagcagaatggccaagatgttcactaaaacctacaaaagattactgtgggaaattaaagaatattgaaatcgacataccatgttcatgggtcagaagacctattaatgttactaaatctcctcaatgtgttttattttatttttcgagactccatctca

SEQ ID NO: 376390 - DNA, 469 bp, Homo Sapiens
  misc_feature (23)..(23): n is a, c, g, or t
  misc_feature (36)..(36): n is a, c, g, or t
cccccctggaaaccgtcttttangaaggaaaccaancccatccctaaaaagggcaaataaatccaggtaaatccaatttaaaattaaagaggaaaaaagtcagttccagagatccccttcctaaactgaagacattctgttgaaatgattaaataaaaagatttcaactgatggtttactaattgtatgaatcagcaaagggaacatggatctttaattttgtcttttttcttttgctgtaactcttgacacctttggatgtatcctaagagtttatacctgggttataccttgttgtttgctccccaggtgtaacaatgatttttaaaactgaccttctgataattgtaaatcaggaccaaagggcagctgctccaatcctctgagcattttgattctcactttccagacaggcagcaagcacagtaatgactttttctaaaaatgaacatatattttttaaaagttc

SEQ ID NO: 376391 - DNA, 800 bp, Homo Sapiens
  misc_feature (48)..(48): n is a, c, g, or t
  misc_feature (177)..(295): n is a, c, g, or t
  misc_feature (625)..(659): n is a, c, g, or t
  misc_feature (710)..(710): n is a, c, g, or t
  misc_feature (733)..(733): n is a, c, g, or t
  misc_feature (744)..(744): n is a, c, g, or t
  misc_feature (758)..(758): n is a, c, g, or t
  misc_feature (766)..(766): n is a, c, g, or t
  misc_feature (779)..(779): n is a, c, g, or t
gtgaacttgttttgattttttgtttgaggcagagtctctcacagtgtnctaggctggagtgcagtggatggtcttggctcattctgggctcaagaatcctttcgccttagcatctcagtagctgggactataggcatgcgcaccatgctcggctaatttttaaaatatttgtagagnnnnnnnnnnnnnnnnnnnnnnnnnnnnnnnnnnnnnnnnnnnnnnnnnnnnnnnnnnnnnnnnnnnnnnnnnnnnnnnnnnnnnnnnnnnnnnnnnnnnnnnnnnnnnnnnnnnnnnntgaacttttagtaagtcacttcagttatctgggcccaacttgctttacctgtcaagcagggaccatggtgcctggtctcccagattgtgaatgtcaaagaaaacaggtagagaggcactttggaagataaacactcctcagaatgggagctagcagtgtaattccacaaggcacagaatgggcattcactgcatagcctgactggaagtggagcatcctttgtgagaaaaggaaacctctgagacagtgaatatgttcccattttgaaaagcttgatgcaatcaaaatagaagaaagagcaccgcttgaaggagaataaggagaagagannnnnnnnnnnnnnnnnnnnnnnnnnnnnnnnnnngtaggttaccaagcgtattttccatgtagggaaccctgttgaccaaagctncccccttaattaaaccatccggnaagtccagggntgattgggtttttnggcccaanggagccaaattgnccccatgcccacagcttttcc

SEQ ID NO: 376392 - DNA, 455 bp, Homo Sapiens
  misc_feature (11)..(11): n is a, c, g, or t
  misc_feature (35)..(35): n is a, c, g, or t
acctcaatttncggacaggacaatttccacaaaanccccaccccacagagtgatttggatattccttgcctcctagagagttttcctaatcccatataatgcaatggggtcaggtggctcatatgattaaaaaaattaatccctgtagaaatgatgtattagacatctctaaccccaagaaaaagatgtcttttgtataacttttaaattccccatttgtctatcttaggacaaatgatgacttcttcgtgtagtaatgaaaacgtctaaatcctgctctgtggagaaaagctagaaccatgggacattaagcaagaatactcctctgatttaggctcccagactacaactaacagtctttatgtatttatcatcttggttattgttttatctcaagcatatacagtgtgcagaaagtagaataatgaataaaatatgaccatggagaaaaaaaa

SEQ ID NO: 376393 - DNA, 416 bp, Homo Sapiens
  misc_feature (73)..(73): n is a, c, g, or t
  misc_feature (383)..(383): n is a, c, g, or t
  misc_feature (402)..(402): n is a, c, g, or t
cccaccttctggtattggttgggttaattgggaagggtaatcacgtctttaacattccctttttcccagtgancctttggtagcattaacagtgataggggaaggaagtatgttaaaccccaaactggttgtcttatacaagactgggaggggagtggttaagatgcagtatttttttcccgtgtagattgggggatcatctgatttctaatttacatgttctctttagcttcattagttttagtaataggtgacccataggcgaaaattgaactttcctatcttccacccagaatgactgttgccgagggaagcgagatggaattaacagtcttgagagaaaactgaagagacccctggaaagagagggcctctccagtgancggtgggaacgagttaagnaaatgcggaccccc

SEQ ID NO: 376394 - DNA, 502 bp, Homo Sapiens
ggactagttagtcaaagtctatttctaaaacatacctccttttcgtcattgcaaaggagaagtacactttactttcaaggctgactttgggcattgagaacacagaaagatgatttcctacattcttagctaattaattttaagtgtagctggaagcctggtgaggcagaacttaaagaagatgctacttcttgacttttaagcagaggcagcaaatcacttacagtaaaaattactcaaggaaatcactcaattggctttttttgctatggaattgtgacttttttcctataatgccctagggaaagaatataactgtacctcccttccttccaatttcttcaatgtccatagctttaaagaaggagggtcaaaattttgtattaaaggactcaagaacctctcgaaaggacaagctctaagagtccaatctcttaccactctcagcgtcaaggttagggcaccttcattggaaggaaactgcatggtccagttctagact

SEQ ID NO: 376395 - DNA, 381 bp, Homo Sapiens
  misc_feature (142)..(175): n is a, c, g, or t
gccattaaaataaacatcttctggccacttctgtttcaacatcaaaacagttccgtaatatcacgattgcatccctgtgtggacgccaacaattcacgtgcttctgagataaatttgaagagactacaacatcttgagttgnnnnnnnnnnnnnnnnnnnnnnnnnnnnnnnnnnctaatgattcattccttattggaggcttattgagaattggttgtaaaataggaaaataaaatcttgggcaatgggaaggaagctctggaattgggataaaatatgcagggcgatgttaacaattcttaacttaaattagggatccaattgacaattgttgggcctatgttaaggtattttctttactggaatacaagtacccccat

SEQ ID NO: 376396 - DNA, 438 bp, Homo Sapiens
  misc_feature (12)..(12): n is a, c, g, or t
  misc_feature (49)..(49): n is a, c, g, or t
  misc_feature (64)..(64): n is a, c, g, or t
cttcttaagggnaagggaaaccgactttttgtactgtggtagctcagancttcaccccgacccnaatatcccttcaaaacttctgctagctgaagatgaaataaagcaactgctcctaagaacccctctgggttcagcagatcaatccaacaactaattaaaccagaagcaggggaaagatcccaggaggatagatgatgggtgggggtgaggcttcagatctggctgggcctcacctctcactccatattctccccgacagtctggacacaccaaggtagggtgagattctgagatgggatctgctgggcccctaacgtacctcccaaggaggtatctgtgcagctcagggaaggcaccttgggtctctcagtggagaaaaattagtattatctgggttcaaacacaaatgtgggtgtttgttattttaaaatgtac

SEQ ID NO: 376397 - DNA, 255 bp, Homo Sapiens
  misc_feature (73)..(73): n is a, c, g, or t
  misc_feature (202)..(202): n is a, c, g, or t
  misc_feature (236)..(236): n is a, c, g, or t
cacctggcaccctggctaccagaatttcatatgggcagaataatattgtgtcaaactctacttcagattgtcnccttatcccatcccacaaaacagaatctgtccgtttctctagtaagggagacttgttggagaggcgggactctgagttatctaatgtcagacatctagtggggcagctctcttcctcatgttataacanggatccacttgttttatttaaaccttttaatatnattttggtcagtctccttg

SEQ ID NO: 376398 - DNA, 540 bp, Homo Sapiens
  misc_feature (22)..(22): n is a, c, g, or t
  misc_feature (29)..(29): n is a, c, g, or t
  misc_feature (34)..(34): n is a, c, g, or t
  misc_feature (83)..(83): n is a, c, g, or t
  misc_feature (115)..(115): n is a, c, g, or t
ccccccggctgtctggtccccnaggaccnctgtncttttccccactttcctatgtgtacccccccaaagaacctgcaaatgtnttgatccaccccaaaaattttgaactttgaanccctcatcgcggcacagttccgtaatagcccaaaaagtggaaaacaaacccaaacgcccatcaagggttgaatggataaacaaaacgtggccccatccttacaacagcgtaaccttgggccgtacagaggagtgaagtatgatatgcaccacgatgcggaggaaacttgagaacatagtaagtgaaagaaaccagacacaaaggacccacacacggtgtgattccattcacaccagatgtccagagcaggagatctgtagaggcagaaaggagattgctggttgtctagggctgggtttcgggaggataagggagtgataaccaaaggctgcgagtttctttataaaggatgaaaatgtcctaaaattggggtgatggttgcatgtctgtgaacctactaaaaaccactgaatcacacaaaaaaa

SEQ ID NO: 376399 - DNA, 463 bp, Homo Sapiens
tgtatttagacttatcccttaataccctcacacctggaccaaatgagctgaagctgataaaaagaaaacctagctgcttatttatttcacgtggaggaactgtttcagagcaggaaccagcagttttttagagataaaaatgatagggccaaatgcctctggcttttcccttttcactataatgtggtgaagatgtagagtcactctgtcctaggtaaaatcccaccttctagatgtgacaggacttgcgcaatttgctgaaactttcagagcttgctttttgtctcatctgtaaaatgagattaatgaggatttataggattcttgtaaaaactgaatgaaaacaaaacttgtgaaacatgagaactgtttagtgttgtatcttggatttagtgaatgttcaataaatgcagttatcagcattgtaaattcaaaaccaaagctattaaattaataggatgct

SEQ ID NO: 376400 - DNA, 412 bp, Homo Sapiens
agcagggtcagctgcagatgaggctgccccaggactggctgccagccctcaaagagccccctgggtccccctggcacaactctctgcatgaagcccccagcaggagaaggctcactgccctgagcccgacacagtacgagacggaggcctcactgagtccaggccccgcactggccctcccctggatcctgagtccaggccccaagccagcccctcccctggatctccccagaccctctctgtgggaacccaggggctggagccgctcgactacatcttggtagctctcatttgggacctcatctttaatctcagcaactcagggatcaaagagaaaaggctgaggcaggcgaggccagggtttcttgctcaagcattcggatcattaaacaaacgaaaaaaatcaaagaga

SEQ ID NO: 376401 - DNA, 501 bp, Homo Sapiens
  misc_feature (12)..(12): n is a, c, g, or t
  misc_feature (147)..(147): n is a, c, g, or t
tataaatggaangccctaaaatagataaaaaagaaaagagtattagtagttatactgtagcattacaaagtgagcttagccgattttgccaaatgtaccatggtatatatgacaaggtgtctatgtctacttcattgtttcattcancaatattggtacatctactaagttcaaggcctaggtgcataggattcatggagcttactgtctagtggggatctgacagggaaacagatgctctgatgcaatggtacataatcactggttcaaacttgcaccaagaaacagagaagactaatcctgtcatgcaacctccaaggaaggtacctttctttaacttcaagtcatctcaattgtaagagcattcattaaattcttttggtttggggcagtggaaagcaattctgactagtctagataaaacccaagaatttgttggaagactatggacacatctcacaaagtcagaagaaaaaatcagaatttaagaaggaacaaaaa

SEQ ID NO: 376402 - DNA, 287 bp, Homo Sapiens
gtaatcaccacaggaatccagacggggagtggggtcagttcactggtacaaggatcttgatcaaaggaactcatttcccaccctgatccctattcactccagggtccacatctaggagtcccaaagacccgcatgcatgggttgggtcaacaggctgcctggaggtttacctcattccaggggttggagaagcactgtgggaggaactggggttcaaatctgcaaacctccaaaacataggagggatcttctaaaagtttctgagagttctaaccacagattagggg

SEQ ID NO: 376403 - DNA, 590 bp, Homo Sapiens
  misc_feature (459)..(459): n is a, c, g, or t
  misc_feature (502)..(502): n is a, c, g, or t
  misc_feature (553)..(553): n is a, c, g, or t
  misc_feature (560)..(560): n is a, c, g, or t
attaagtggggcagtagattaggactgaatggatttgattctctcatcctacatagtgtgcccagaagccagaaggtttcccagaatttgtattatggcagcgagggcaaatttaattagcagataggaaaagctttggagcagtttaggccaatccatttaattgtatcagcaattaatattttgagaaaatggaaataattaaatttacatttcttctaggactttattttgttatcctttaaggttattgtaaatgaggagacttttgaactcacagactaaagcaaactacaccagataatcattaactttttctattgtgtgccacccttcccaaccagattgttccatagtatcacttatgaaccaagaaccctgtgagcttgcaaaaccgcatttttaagggagtctcaacttttctgatgtgtgttaaagtttagggtgtggggtcccagnaaatgagtttcatgggagggggagaggttgtctctcctggggngggtaatacaggggccactggggggctcacctgtggctttctggcaccagncaggttntggaagcagggggttacctaaaagtggggt

SEQ ID NO: 376404 - DNA, 469 bp, Homo Sapiens
  misc_feature (19)..(19): n is a, c, g, or t
tcctctccaaaaccctaanctttagcaggtgcccacagatttgggatctacgtgtgcctgaaaagattctccaacttcccttccctgaagcaagcccatggttttctctctcattcccacagctcacagacactgccaggactgggtataggaattggcccttggacccccaggaaactaccccaaatgcatttcagagatgacccggtctcaagaaatatactgaaagtaatccagttttcccaatattctttggaccagaaaagtggcttgaggccaagagagagaagcccatgtcttcctacattaagtgtcacggaaagtgtcacccactctccctctcactcctgtctatccccccacccacgtcttagtggccacagcctaggctgagaactcacagaagcagccctactttctagcacaacctggtcaaaagcaaaataatttacagggggaaaaacacgaa

SEQ ID NO: 376405 - DNA, 464 bp, Homo Sapiens
  misc_feature (313)..(313): n is a, c, g, or t
  misc_feature (324)..(324): n is a, c, g, or t
cacttggcagtgtctagtcaaggagtcggctttcaggttcctgacggccaggcagggatgctaaggtgtggctcagccgtcactgtctgtgtcactgcagtggtgcggtcctcaggcttttctgcctgtctttcccccttccttctcacctgacagcgagggagagggaagcctcttagggctggaagccaccacgctggccctctccttccccgaacacagcacacggtcaactccgcgggacacgaggacacgggacggcgtctccagaattgcttgttacgtaggaagcgtgcattgttaaccagagtanttttaaaatcnttttatctttttttaaactatgtcacatgaaatgaatgcgtctttgctgtctccaggtgcctttttattaattgttcagctttgtacatgggaaagatgaaaagcaacagtgtctgcaaataaagcaaaacagctctgag

SEQ ID NO: 376406 - DNA, 417 bp, Homo Sapiens
  misc_feature (107)..(107): n is a, c, g, or t
  misc_feature (281)..(306): n is a, c, g, or t
cctgacggcccaggcagggatgcctaaggtgtggctcagccgtcactgtctgtgtcaactgcaaatggtgcggtccctcaggcttttctgcctgtctttcccccttnccttctcacctgaacagcgagggagagggaagcctcttagggctggaagccaccacgctggccctctccttccccgaacacagcacacggtcaactccgcgggacacgaggacacgggacggcgtctccagaattgcttgttacgtaggaagcgtgcattgttaaccagagtannnnnnnnnnnnnnnnnnnnnnnnnnaaactatgtcacatgaaatgaatgcgtctttgctgtctccaggtgcctttttattaattgttcagctttgtacatgggaaagatgaaaagcaacagtgtctgcaaataaag

SEQ ID NO: 376407 - DNA, 435 bp, Homo Sapiens
  misc_feature (280)..(280): n is a, c, g, or t
actgcacgagatgaaataaatgatgccttaataaatcagaagtatgatgaagttatggctacttatattcttctaggtagaaaaccacctgaatttgaaggtggtgaatcgttatccagtggaaacttgtgtcagaggtcccggcccagtagtgacttaaacaacagcactcttcagtcccctgctcacctgaaggtccagagaagtatctcagcaaatcagaagcagcggcgtttcagtgatcatgctggtccatccattcctcctgctgtatcatatnaccaaaagaccttcagggcttaacagtgtggggaaagttgaacaggaaagagggagtgggggacaaagatgttgggcttcggaaaacttggggcaggcacaacagtttggggttccaaaaaaggcggaggttgacttgccaagccctttttgttg

SEQ ID NO: 376408 - DNA, 488 bp, Homo Sapiens
ggcacgaggcgaacccctgtgagaatgggggccgctgcgagtctgcccctggccagctgcctgtctgctcctgcccccagggctggcaagacccatgcctgaacggtggctcgtgccaagacggcgtgggctccttttcctgctcctgcctccctggtttcgccggcccacgatgcgcccgcgatgtggatgagtgcctgagcaacccctgcggcccgggcacctgtaccgaccacgtggcctccttcacctgcacctgcccgccgggctacggaggcttccactgcgaacaggacctgcccgactgcagccccagctcctgcttcaatggcgggacctgtgtggacggcgtgaactcgttcagctgcctgtgccgtcccggctacacaggagcccactgccaacatgaggcagacccctgcctctcgcggccctgcctacacgggggcgtctgcagcgccgcccaccctggcttccgctgcacctgc

SEQ ID NO: 376409 - DNA, 461 bp, Homo Sapiens
  misc_feature (444)..(444): n is a, c, g, or t
ggagaatattgatgaccagcgcaaaggcttaattggaaatctctatctgaatgattcacccctgaaaaacttcagaatctatagcctggatatgaagaagagcttctttcagaggttcggcctggacaaatggagttccctcccagaaacacccacattacctgctttcttcttgggtagcttgtccatcagctccaccccttgtgacacctttctgaagctggagggctgggagaagggggttgtattcatcaatggccagaaccttggacgttactggaacattggaccccagaagacgctttacctcccagggtccctgggttgagcagcggaatcaaccagggtcattcgttttttgagggagacgatggccgggccctggcatttacagtttcacgggaaaccccccacctggggcagggaaccagtacatttaagttnagccggttgcaacccct

SEQ ID NO: 376410 - DNA, 617 bp, Homo Sapiens
  misc_feature (76)..(76): n is a, c, g, or t
tttaagtaagaaccaaagttatgtgacatgaaaggactctagaaaggtaaaaggtaacaattctcctctcattggntccgggtgctttctggtccagagaaggaaatacttggaagccatgaggattgccttttaagcaaataaaaagatcaggacttaagcacctgcaataacaacactataaacaaaaaataaaatgttggaggtaagaaaggacacctcacataaaggcatgtcaaaacaagggatgggagacattgccaatcatagactctactatgcctcatcatttccttctacctaactcccaatgaaaatgactgctggagtaaggcactgttaataataggaatatgttatatccttcaggtgcgtgaaaaaccactttcatagacactgtaaggaagcaacttagaaatttaatagcaagagaaatatttcaacacttctctgactgtgggaaggagttattttgaaggtattgagctccctctgtcagatcctttgtgaattgcttgtcaagcagatgtgttaccttctttgctaaaggttcccttcagattactacatcattaacagaaacctgtggaagctctaaaattacactgttataacaa

SEQ ID NO: 376411 - DNA, 307 bp, Homo Sapiens
  misc_feature (13)..(13): n is a, c, g, or t
  misc_feature (57)..(57): n is a, c, g, or t
  misc_feature (90)..(105): n is a, c, g, or t
aggacttcatctnatattcagattatagcaagaaaatcaatgtgctccatatatttnacccatgatgaaacttgtcccatatccattacnnnnnnnnnnnnnnnngtttaactgggtggggttgggagggagaaggcatgaattcaaaattttaattaaatattacataatttaatgttctcccaagaatttgagctgacattttcatatgaatacaatttcacaaaggttacaaatatatatcaacttacaacagaaggaatcatttagtattttacagtgtttttaaaaatctagctccataatc

SEQ ID NO: 376412 - DNA, 402 bp, Homo Sapiens
gagaaatacaaggcatgctccaatctatatgttccttcagtagggaaagtgaaaatgttaactttgcagctaagagatgatagccactgtcaggttttgtagggtgtcatctaatactgggaaaatatcatttgcaaaggtggtatatttactgggtcataaaataaagataaaaaataaggagttaggcattttctcccatctttccctatttccttacatttcttcttttaaatagcatttttggatataaaaaaatgcaaggaggatgggatgtaggaactggatagcaagaaagatactccagatgggacaacgtcactttcaaattggtagggctggaatccatccaaggatgaggatgatctgtactttctttccaacctatttgtgtcttggaac

SEQ ID NO: 376413 - DNA, 464 bp, Homo Sapiens
tcaggggaaattgggatgtatatgtatgtccctattgtctttgatcaaaacaaatccatctagaccacagtgttccttttctgtcattaggccactgaaatggtgtttgtttcccttgccaaatattttatcccttgaatattgccctcccatttgtcagttactgttatgatgaagttaattgaagtatttacaaaacttaaaacatttaatctttattatattccaaatgttaaattaatcagttttaaaattctatatctggaaatttcatgtgtgtggtgggggaaaatttagcttttggctttaacatagcttgctgatttttttgctgtgtaatgctttcacctctccactgtgaatcctttctgtgaaagccaggggagaaagatttagaattttaaaaaagtacttaatagagccttggtaaaagtgactctaaaaataaagttcagtagatgcat

SEQ ID NO: 376414 - DNA, 608 bp, Homo Sapiens
  misc_feature (17)..(17): n is a, c, g, or t
  misc_feature (57)..(57): n is a, c, g, or t
  misc_feature (99)..(99): n is a, c, g, or t
aaccaacgatcctgaantccacatttacctgtgttccagatttccacaaatataagnggacaccaactgtagcctaagtaagtccaataagaatttacnggaatttgccctagcccagttttaccttccagggaaaacagtccacatttaaaaattttaaattgcctttgtttgtgcagatgtggcatcccaaggtccatagtgatgacgagacagtggctctcctttgtttaaccttatttatttgaaccttccttttggggtagtgatgatctccccactctcagtgtgaacgtgaaaggcagtgggctggagctagagactaagaacaaactacctggcccacaaaagctcctgacctcatagctcaatgttcaagctaatatgttgtatatgtcaatgacaatggggaatactgagggaccaagtactaattagcaataaattaaatatatgcaattgatgagatatattgaaacatacagaattacctgtttcatattttttccagaaagcaagataaattatttcattttatttaaaaagacatgactattttctacataattaagacatacaaagggactatttttccctctcatggaagg

SEQ ID NO: 376415 - DNA, 432 bp, Homo Sapiens
  misc_feature (313)..(313): n is a, c, g, or t
  misc_feature (410)..(410): n is a, c, g, or t
  misc_feature (416)..(416): n is a, c, g, or t
ttagagacatttaactttcagtttggaggaaagtcagaaaaagaacctaatactttcttatttttaattatactgtgaacaaagggttggacaattttctagaagttacttgcaaatcaaagaatatttataatttcttatttttaattatactgtgaacaaagggttggacaattttctagaagttacttgcaaatcaaagaacatttataatttcccttattaaggaattagtttattcattcattttcattcaaaagggctacctactttgaggtgtcttctcattccttaaacataacatttatttccnactgcttttatggctaaataaactttacttcattttgcagtggattattaaaaaggggatttacaggaattttattaccccataatacactttaggntatttntgtcacccactattcc

SEQ ID NO: 376416 - DNA, 483 bp, Homo Sapiens
ggcttgtgaacaagtaaacaaaaacttaacactgaaaagtgtttctgccttggaggctatcattactgtaaaaaaattttttttaactgtgtagttatgtcattaaacaagtaataaaccacttttaatttaaagtgacattaacaattgaacaaatgacatttgattaactgaactggcagttacactgatacagaattctcttctgctagtgcgggaatttgtatacttttactgggcaacatgaaataaaagatgcagtttgagagcatcagaaagaggcaaaggacaaggcttccatactaacttaaagtaggaatatcttcaggccttatcttgttcatactgttacaatagtcctgttcaatagtcctgtttccttaccttggatgtcttggactattccctggaaggcaggacagttatctttttggaacctgggtggacgtgttacagtagtcttttttcataacctgggtgttc

SEQ ID NO: 376417 - DNA, 488 bp, Homo Sapiens
  misc_feature (17)..(17): n is a, c, g, or t
aattaccacgctctgcnccttttcaaaagagataagggaaatagggttaagataaggagttaagcctatgacagatccccccaggacccaattttccatatattttaaccagaggtgttcccctaagattcttgcttaggaattatgaaaatgtagatatccaggtggctttttgttgaaaaagatctatcgattactatcacactcataaatacaaagaaagataaatgtatttggaatgggaactgcatcccacccaaaaatcatgtgttagtttattgcaaagttagttagattgggttctcaaccagctcagactcatagtatgttgatagagagggtctttttatgatctgctagaacttcattcgtcttttatgcaagcaataactgatacaattgctccttttgataacagaaaattatgcaaacaatgcctcccagaggctatccttattttacaccattaaaacatttttactttgtgg

SEQ ID NO: 376418 - DNA, 539 bp, Homo Sapiens
gaaatgaaagaactattggcagagtcatggaaaattaaatatgagctcatattatatgagtagctagaaaattttggtgctctcaaaactacattttggcaagtatcaatttccttggacaatataagtgtagtggaagcagtaaaagtcttagttttcagtattagttaatacagcggtccagaaagataatagactatacttcctactgtatggagaaaggatcagaggttatattattatttccttgacctgacatgcccaaattgaatgtgatgttcagtaccatacatttcaatgaagcaaattataataagaaagaaatttttttcatgggccatgcatatccataatagaaataacaggattgtagggtaaatggatatatcattgcataagaaatattgtctacttagttgcatgagttttaaatcaaatagagatggatgtgagtcctacttctctcctatctgtttgaacatggtctctctgagcctcaatttcctactagctaaaataaagatactattatcaacctc

SEQ ID NO: 376419 - DNA, 452 bp, Homo Sapiens
atgtcagttccctggtttttttgatattgcatcataggacctctggcattttagaattactagctgaaaaattgtaatgtaccaacagaaatattattgtaagatgcctttcttgtataagatatgccaatatttgctttaaatatcatatcactgtatcttctcagtcatttctgaatctttccacattatattataaaatatggaaatgtcagtttatctcccctcctcagtatatctgatttgtataagtaagttgatgagcttctctctacaacatttctagaaaatagaaaaaaaagcacagagaaatgtttaactgtttgactcttatgatacttcttggaaactatgacatcaaagatagacttttgcctaagtggcttagctgggtctttcatagccaaacttgtatatttaaattcctttgtaataataatatccaaatcatc

SEQ ID NO: 376420 - DNA, 394 bp, Homo Sapiens
  misc_feature (21)..(21): n is a, c, g, or t
agggaagacaatcaacacccnggtcaagaagagaggtatccctagtctcccataattccctattaataaaccctttaaatacaaaatggtggtgtttggggttctttcaggtacttacaagcctgtgtgactttgaaataaattttatcacagcacgatttcactccttacctttaccacttccagctcctccttgctggctgcttgctgtttctccagcctggtactcaactgcgaacagatctaaggatgagaaaagagtcttttactagaaaacagaacaactcttgcagcatgtacacataactacttatcaattcatgtgttatgctagcacatctgatcctagaaggaattttacaaatgaatagcactgcaaatgccagtcatttcg

SEQ ID NO: 376421 - DNA, 169 bp, Homo Sapiens
  misc_feature (19)..(19): n is a, c, g, or t
ggattcacatgtgcaagtnctttgtgacctggcaccatttggttttggccaagcagcagagcagacctcaggacctaacgaggatggttgtgattaggtcaaatagaaaactagcaggccattgctgacaatttttactatataattagaggacttcctaaaatgcttt

SEQ ID NO: 376422 - DNA, 297 bp, Homo Sapiens
  misc_feature (74)..(74): n is a, c, g, or t
  misc_feature (187)..(187): n is a, c, g, or t
  misc_feature (229)..(229): n is a, c, g, or t
  misc_feature (240)..(240): n is a, c, g, or t
tctcttaactcggacggaaacatgcaacccggcggacagagcatcaccttgaaagtactaaaacagctgtcaancctagaaatctctgccccgcaaaaactgtcataaatactgcaagaccccatgttcagatttccccccttttacaaataatgttttgttttatttcccagctactacaagtganccaaatgttctttatagcagactttttcctgcagtctagganccagtcagagntcttgcattaagttatatctctgtaatctttaatttcacgctatctgcaatgttttg

SEQ ID NO: 376423 - DNA, 450 bp, Homo Sapiens
  misc_feature (381)..(381): n is a, c, g, or t
  misc_feature (426)..(426): n is a, c, g, or t
gaaaaccatattcattctaaaacctttcatgaagacatgtgcattgctgctaagagtattgtttcgtttttaagttgcctgttacttggacctctgcttcctatgtacttgtttcactgttggtcatttttatggtgcagttcttttagtaggtaagaaaagcaaaggaggattgcttatgcgatgactgtttacagtggtgtcagactatgccgtgttcacgaacactttaatatgttgttgtaatctgattttatcctcgtcttacaaatgaggaagttgaagccaagaaaggctgaatcacttgcctaacgtcacataactaattatattagtcaaaccagaattcagattctaaatttatctaatgggtacgagagnaaaagacttgtcatgaaaagagcttgaacttgattgcctttgggnggtattttagttgtcagtaaattg

SEQ ID NO: 376424 - DNA, 531 bp, Homo Sapiens
  misc_feature (131)..(131): n is a, c, g, or t
  misc_feature (136)..(136): n is a, c, g, or t
  misc_feature (394)..(394): n is a, c, g, or t
  misc_feature (458)..(458): n is a, c, g, or t
  misc_feature (467)..(467): n is a, c, g, or t
  misc_feature (478)..(478): n is a, c, g, or t
  misc_feature (485)..(485): n is a, c, g, or t
aaacagaaataatatctgtaaactgaccagcacaatgtcacatagaaagaaaatgttcattgtaaagttatggtttggggtttgtttattgctattgctgttattgatgttatcttgacctgcccaagggnaagangttcaaactctccaccgtaacaattagctttgtcttctgtttctgtggccttttacctgccactcttttcagcttctcagtcatcacccagtaaaagtaatctttttattctgggttgggtgaactaatctagcctttaatgtcaagtgtgaacttcagttcctcagtgctcattgttttctgctggaaagggttccctttcacacctgtgttaggttactacccccaggatgcttaaggactagggcagggatcttntcaggtaggctggaggcttatttacccataaataggcctttccttataggtggaggggagatcntggcccccntagggcagganggcaggnccaccggagggcatggacaggaggagggggtgtggtccccaggtca

SEQ ID NO: 376425 - DNA, 440 bp, Homo Sapiens
  misc_feature (17)..(17): n is a, c, g, or t
  misc_feature (84)..(84): n is a, c, g, or t
  misc_feature (90)..(90): n is a, c, g, or t
accccctgtaacccccntgtcccccggcagttccatgagatttaaaggaaagaaccccatccccctaacatagaagtgccaagntgaaancagcaagtgcctgatgtaagaaagctgcacaagttatcctagaatatggagctaaagatcattgatgaaagatggctacaactagacaacaggttttcaagtgtagacaaaatggccttatattggaagaagatgtcatctaggacaggggaccccaatccctgggtttaggaactaggctgcacagcaagaggtgagtggcaggcaagcaatccatcttctgtcagatcagtggaggcattagattctcaaaggagcacgaaccttattgtgaactgtgcatgcaagggatctgggttgcgtgcttcttaggagaatctaatgaaaaatgtaatgagcttgaatcatca

SEQ ID NO: 376426 - DNA, 486 bp, Homo Sapiens
tgacatgcaatggagacatgtagttggctattggatacaccaatctggtgttttggaaagatggcctagagatgtgaatgaggaggtcattagcatatttatggtatctaaagccatgaggtccctaaggcagtcagtatagataggcaagaaaaatattttagacccagagttttgggtgctccagtaaaatattttccattattttatctcaatgatttttatgtttcattatgaacttttattcaatatttggcttaacttaaaatgtttttctattcccttctagaacttcagctcacttaaaaaatttttctgttttgtttggtatactgtattatgtatttaatggagaagaaaaatcttagacaaattaaatttaacgtaggttacttgagaaacgaattattcttaaattgggaagcccctgaaccagcacaggttcagaactccagtgctgccacatggtggaagatttatggacag

SEQ ID NO: 376427 - DNA, 417 bp, Homo Sapiens
  misc_feature (83)..(83): n is a, c, g, or t
  misc_feature (91)..(91): n is a, c, g, or t
gagagggagctttcaatggagcagccagcgtgcagggagctgatgctgacagggaaccagctggagaccagtgcacgggcgcngtgttccngtggcctcagtggcctcaaaaccttaatgctgaggagtaacttgatcggctgtgtgagtaatgacacctttgccggcctgagttcggtgagactgctgtccctctatgacaatcggatcaccaccatcacccctggggccttcaccacgcttgtctccctgtccaccataaacctcctgtccaaccccttcaactgcaactgccacctggggctgggctcggcaagtggttgaggaagaggcggatcgtcagtggggaaccctaggtgccagaagccatttttccttcaaggagattcccatccagggtgtgggccatccagggat

SEQ ID NO: 376428 - DNA, 558 bp, Homo Sapiens
  misc_feature (58)..(58): n is a, c, g, or t
  misc_feature (96)..(96): n is a, c, g, or t
atccggaatcccaaattccaggggccgttgtccattggacatcccagcactttaaatnagcaaacaggtaactccgtgaaaacctgaactgtggtncccctaatttcaagtaaccaatgattgttaatgttgtgcccatacacttaattcctctgtcaaagtggtgttgcccagcgttatcttccccatcgtctgcattaatgttgaactgcctctcccaggtcagtgtgccggtcgatggaaaaccttataggactggaagtgatatcagggtcacgagcagtcacttgcccaatcacggagtttagagcagcattttcatgaacttcaagtaggtaagtcggtgaagagaagaccggaggctcatcagcatcttcaaccacgattttgactgtcgccgtgtctttaaagggccccctgccactgaagcgtgggtcaatatggacattggctgcctctacctttagcgtataggattttttagtctcaaagtccagaggttttcttagccttataatgccatcctgggcctgggcatcagaagtgatttcaaaaagt

SEQ ID NO: 376429 - DNA, 430 bp, Homo Sapiens
atgttatttcctcctcccctaccttatgacccaaattgggctcccctaaagtggaaacaaccctgcctgtgcccacaaaccccagagcccaaatcactgtcttaaaatatccttgggatatggatgatagcaggagatgtccttagagtgacgggggctgaatttttactttcaaatgacaagaagcaaggtaaaacctcgtggagaggagacatttgtttcacagcaaacatatgaataccaaataatagtgaaacccaagaaggccagtggtttatagaaagttgtaggaagtgaatattgaaatctgtaaatatgtaaatatatttagataaacataagatgaacaacacgttttacatgtgtgtattagtagaacattttttgtgcctcatattgcatagatgggtcaatgaaaacagaaaaaaaa

SEQ ID NO: 376430 - DNA, 432 bp, Homo Sapiens
  misc_feature (310)..(319): n is a, c, g, or t
  misc_feature (368)..(368): n is a, c, g, or t
  misc_feature (386)..(386): n is a, c, g, or t
attcagtccagccaattcagtgatggggcttcccagggcagaagagtggaggtaagctcgataaaccacagggcctggctgagtggggaggcagagcactcagcagcagcagagccttggtgggaagatcttccttcccaagggcctgagagccacgctgataacatcttttctacctccacagtcacagagcacaatagggagaaggggtactggttctgaacagaatgggttcccttcatagagccgatgtttcagaaaatactgctttttgttcttaaactctgttttcttactccccacccccagnnnnnnnnnnaagtctattaaaatgcaagataaattttaccattgtttgttagtctgtntttatcttgcagcaggcnaattttgtaaaacatgaaatataggggacctcttgaaggagatggg

SEQ ID NO: 376431 - DNA, 552 bp, Homo Sapiens
  misc_feature (41)..(50): n is a, c, g, or t
  misc_feature (55)..(55): n is a, c, g, or t
  misc_feature (75)..(75): n is a, c, g, or t
  misc_feature (96)..(96): n is a, c, g, or t
  misc_feature (107)..(107): n is a, c, g, or t
  misc_feature (161)..(161): n is a, c, g, or t
  misc_feature (179)..(179): n is a, c, g, or t
  misc_feature (187)..(187): n is a, c, g, or t
aagccccggaaagaatgggggaaaaccatggaggaaagagnnnnnnnnnnagggnacctaataaaataagccccncagggaagaaaatgtatgtgnaagaaaatccnccccgggggatcagcctgatttttttaatggaatccaagtaaccctaccctccncccaaaggcaagggaatnaagccccncccactagccatagaacctaggagacttaaaggactttgaatgcatttaatttccaatttttaatatacctaggaattttcctgttttggtagtgttgaacaagttggcctttcattctgatatgactgctcggtctgcttttctccttaagactcatgggaattagcagaggaagggaatgctattagtagtgaaaatagccactatgttctcctaatgatactataggatgtccccatctctcagatcatttgagtggatgcatgttatattttcatttcctttggaaagtgaataggtgactgtgtacttttaaaacatgattccagactcctttatttggcaaataaagtgttaagtcctt

SEQ ID NO: 376432 - DNA, 200 bp, Homo Sapiens
ccaattcaagtcaggattcaaataagattcctacattgcatacatctcaaatgtcctacccagtggatccccacactctccactctttggcttcaaattcatttttttgaaaaaacaatgattgctttagcactttaaatttctatgcaatttcaaatgtaaggtgaaattttgatgtacttaataaaaaaattctaacg

SEQ ID NO: 376433 - DNA, 367 bp, Homo Sapiens
  misc_feature (316)..(316): n is a, c, g, or t
ccacatgccacccagggttaaacaatagctagaacagagggatattttgcatttcaatcctaattaagatttggaaaatcccctgaaagtggctatgcctggattgtggagcacatgtcctttgcatcaagtacaggtacggtttaatgttaatgtaaatgacagtatcctgcatagcatcatagtttcacccattctattttaggtgaggggatatggaggagatagggcagtgatctacaaatgggaagagacatctaagggacagtcctattgccaaggaaaaaccatttggggaaacctactgccccaaagnacaattctggtctaggctgcagcactgtcaccttaggcagctgcaagctct

SEQ ID NO: 376434 - DNA, 437 bp, Homo Sapiens
  misc_feature (330)..(330): n is a, c, g, or t
tggattattatggcccccccaaagcttcaaaagacttttcagggtagatgatattggttgaaatcctttgattcagtaaagctcaccctaatcctgccccaaagcaaggggtgacctaagttattgtcaaactgagtcacttgtgagaataaaaggccgtgctattctatttatgccagcacaaacagcataaaccaggactgttccagacccagcaagcaggaagtataggcagccttcctccggtcaaagagttcgcaggtggtgctgaacgactccagaacgtgaactgccctacagcaggcatcttctacagtcaagctgaggtcncctggaggttacaagcacctgtaaaagtgatttgccaacatcttgtccaaataatttctctcatctttatttttatttaaaaaaataaaacagtcaccaccaaccac

SEQ ID NO: 376435 - DNA, 583 bp, Homo Sapiens
  misc_feature (52)..(67): n is a, c, g, or t
actcacacatttataatctaaattctactagtctatctatggttctattaannnnnnnnnnnnnnnntatcccacaggaaggtaaataattaattgaagcaaatggaactcttaacactggatctctacattcttttgtttccacctttggatattaagtatgttacattgaatatttggcttcatatccatggagacatttcaatacaaatgcacggcatgcatggctttgtttaagagccgcagtttcattgttatcagttttgattattttgcagtcgagttacctatttagaagttgaaaattgtcaccaattttcccagaattaaggtatctcagaggtaaaagacttagttaactatggttctaaagtctactggtagtgttgcgggaggggcacagtgggttggggagttcatccaagcggtcttcagcagggatgggacttggggagaaaatccactctctgtatccattgacttttaattaatacagttagaaaatgtgtccaccttaatgttatatctcggtagcaaatggaatacagtggcaagaatgacaaccggacattctccacatctt

SEQ ID NO: 376436 - DNA, 439 bp, Homo Sapiens
  misc_feature (15)..(15): n is a, c, g, or t
  misc_feature (30)..(30): n is a, c, g, or t
  misc_feature (39)..(39): n is a, c, g, or t
  misc_feature (104)..(104): n is a, c, g, or t
  misc_feature (126)..(126): n is a, c, g, or t
ctgttggtgaaattngatatccgggcctgncctcctcanggttgaaaatatgtctggaggaatagcagcataacctcttggctgtttatacttttttaaacttncctgtgttgtaaatattgtatncttttggtgattccagctatgtaacctctatgctctgtaaggtgattatttgtatatagcaacatggcccagtgatattatatagtttccccaatggagaggttattgagtaacctttgcattagtttaaacactaccagaagaatgctgagccaactataaacactcaattttgtatgttttccaaattgtacttattactgcttttgatactgtattacgtgccaatagtttcccaatcacatagcaggcaagagatattttgtactttttgatccactgtaatatttaataaaaaatgttactatctgtt

SEQ ID NO: 376437 - DNA, 378 bp, Homo Sapiens
  misc_feature (51)..(51): n is a, c, g, or t
  misc_feature (68)..(68): n is a, c, g, or t
  misc_feature (81)..(81): n is a, c, g, or t
  misc_feature (128)..(153): n is a, c, g, or t
aggacctctctggggcccccctaacccgaagctccgacctctctgaagccnccatcgccccaaactcnaactctggggccnccatcgccccaccggagctactcccctttcttccaaacttttgcagnnnnnnnnnnnnnnnnnnnnnnnnnngcagccctctgcctcctccccagggaagaccctgaccgtgtacatagccctggtgctcctgcccagccacccctcagatgcgttcgcctctggccctggggtgtgtctcggtgacgttttctatcagacgtgctccctcccatcctccagccctgcccaccctccctccactcctctcaactgcctcagcgatttcaagaaggaaataaagggataaagaaaaaa

SEQ ID NO: 376438 - DNA, 860 bp, Homo Sapiens
  misc_feature (590)..(590): n is a, c, g, or t
  misc_feature (809)..(809): n is a, c, g, or t
  misc_feature (825)..(825): n is a, c, g, or t
  misc_feature (834)..(834): n is a, c, g, or t
gcatattcttaaagtcctttagattcatgccttttatgaaagaaaatgggaagttcgttgttctcttaggattagtgaatctgttttcaagtatcagcacttagaacttttgaatccctagttttgaacaccaaatacattaccttggatatttaggactgtatgagtattttatagttgatttatttttgttttacacctgcagggagaaactctggaaaccttgacaatggcaacagtgtgtctcttcagcgcacaacctcagctggcagatcaggtcccgccattgggccatcttcccaaagttatccaggcaatgaatcataggaacaatgccattcctaagagtgccattcgggttatccatgccttgtctgaaaatgagctgtgtgttcgagccatggcatctttagagaccattggcccactgatggaatgggaatgaaaaaagcgagcagatactgttgggtcttagcctgtgaagcaattaatcgaatgtttcagaaggagcagagtgaattagtagcacaagccctgaaagcagatttggttccatacctcttaaaattactcgaaggcattggccttgnaaaaccgggacagcccagcagccacttaaggctcagattgttaaagctcttcaagggcaatgactcgaagttttgcagtatggggagaacagggtgaatgaaatcctgtgccctttctttcagtctgggagtgcctttcaaagatccaggaacatgatttgttcatttcttgaggtcacatacagcaggatacctcacaggggtcttttccttcccttntaacttggggcaggcngcccccttnacctcagggagcgggctttaggtccc

SEQ ID NO: 376439 - DNA, 536 bp, Homo Sapiens
  misc_feature (78)..(78): n is a, c, g, or t
  misc_feature (524)..(524): n is a, c, g, or t
cttcctcctatgttcaaaaccagagttaaaagatttttggttgcctttcctgatggataaaagtgtgatgcacactgnaagcaaacacttgaggaacacactagaggacaaggacacaaacatcagctataatcccactaagtgctcggagagtttgtggtaaaggttcactagaggacaaggacgcaagcatcacttataatctaccaagtgctcaagagttcgtggtaaaggttttatgttgaacttcaggaaaaaaagtagagttagaatgaagagattctagaaagaagagaaatgttcacattagtcatgcatacaagagattccatcagttaaatggaaccactacacccatcctcagggggagggcttggcccacttggtccagagacatgagtttgccatcaggcaataatgaatttctcctgtacaatggttagagatataagatccatttcaacaggaacccatctataaagtaaagccttctgaatatttcatttgaccctttaaaaaagatnacagataatatg

SEQ ID NO: 376440 - DNA, 448 bp, Homo Sapiens
  misc_feature (99)..(99): n is a, c, g, or t
gtataccacttgtgaaaccaaatattggagtttcataattttcttactgatgagtgcacacagtttaaattagagagtgttgaaaaaatattcatttancttatggtcctaatattaaaccataggcagtccccataaaatattcattgtcggatttatacacttttgaactttgaagctatttgactattttgaccaattttacaagagaaacaatgatttacattaccttatcagtttgaaatgcaaactgtaagaaaatataaagcgcttaattctacaaagttaagtgaaatcattaatttgataatcattgatttttgcatttaacttttaccttatctcatcagaaaaatcttaagtatgcttaaaataataatgcataagctaaacatacgcagagaaaaactgcataaaatataacaaaatgacgtgaattaaaaagagt

SEQ ID NO: 376441 - DNA, 397 bp, Homo Sapiens
aaaatgagataatttgttttctatatcattacagttattttcatgtctggagctcttacattaagtttcttttcccaaagtgtataagttttagaaagaaggaaagagaaaaaccttgaaattaaggttttataatggaaacactgtgcgcttaactgttcttgtgcttacccatcacgttaatacagtggttctcaaactttgcctggttggttcccatttaagaattatgtaatgaattccagaactcaccatgaaacaaaattggtgaaatcacagttgggagtgtaacagacagcaaattaaacttctgtagggcagtaaaatccatgcctacaggaaatccgtggactttaccaaattggaagggtaaaaattgggtcgtaggctttaactc

SEQ ID NO: 376442 - DNA, 426 bp, Homo Sapiens
  misc_feature (45)..(45): n is a, c, g, or t
  misc_feature (51)..(51): n is a, c, g, or t
  misc_feature (56)..(56): n is a, c, g, or t
  misc_feature (84)..(84): n is a, c, g, or t
  misc_feature (104)..(104): n is a, c, g, or t
aggccccccacctacttgggagcctgaggccagaattgccttgancccccnggagncggaggttgcattgagccccacgattgngcccttgcacctcaaccccngggcgacagagtgagactatgtcctcaaataaattaattaaataaaatggatttttaaaagtttttggaatgaataacacatttaataaattagttttaaccctcagaggacctataagaatataaacaaaattgaaaattgaagcatttgttcttaatcttgattgaaagactaatcagcatatctgaaaccctggcctcagaaaaatataatatttgatgaaatcacagataacaagacctatgtaagggtgctaatactgcgaaaataaaacccaaattttatataaaaaggactgtgactggtcaaggtggtgtgcac

SEQ ID NO: 376443 - DNA, 444 bp, Homo Sapiens
  misc_feature (407)..(407): n is a, c, g, or t
cagattaaccattatcaaatatgagagcacctcgaaattaatcagaatacattttgtcctgccattcattagtcatggtaatgaggtaaaacctttcacctcatggaacctttttactcaggtataaaatagaggttatcccttattcttaagtaagtataggggccaactaataaatagtgagcataaaagacctttgtaagttaggaaatgctatgagtacaagtcattgttaggaccacccccttggaacagggaaggaaggtggttaaattttacatagttgctcttaggttttctatctcctgcttcttggtttgcataaaacaaactggggaaaatcactattgctttgtatccacttatctattcttgtagtcctacaaagttatggaacatataactgngtttggactcttttttaaggggtactgctctgggccc

SEQ ID NO: 376444 - DNA, 511 bp, Homo Sapiens
  misc_feature (418)..(418): n is a, c, g, or t
  misc_feature (436)..(436): n is a, c, g, or t
  misc_feature (482)..(482): n is a, c, g, or t
  misc_feature (498)..(498): n is a, c, g, or t
gaaaatgacaaccagtattcacagtttgagataatggctgtctatgatgggatcattagctgttctgcttcataatttccagaaaattcataataaatgcaagtgcagcaaaatctgaaggagacagtttttatcctgaaattgtttttagaagccctgcccaaacagcttgtaggttaatagaggtgcaacagtaaggttggatgcaatcaactttgattgtgggcttctcagagttggttcgtctcgccttgagtttcctatacaagaatgcaattaaggaaacaaggcagcttaatgacgttaatgattgttattcagaatgtaaaggtgttgggattaatccacaaaggactggaatctggatttcagggcgcaggccctttcttcaacatgtaacttttttaggttctacccnttctctctggggtttttngggagtggacttctggaggatataggataggctaaggcttataggntaagttgggttttccnggagccaggggaa

SEQ ID NO: 376445 - DNA, 540 bp, Homo Sapiens
tcttttctgatttcattatagtaagcaattatatttttaaagcaccaaaaagaatacatgctgcttaaaatcaaataatttcattacctggaaaagtaataagcaaatagcataatataaataattttggtctatatttttaaatagacaacaggcaatataacctaaataagaaaaaattggccctatataatatgtttttccccaaatgttacaagtacctttgaacagcaatgcaaagaataggagaatatgctgtttcaaaaaggtcttcaaacaaaagattttccagtagttgtggtcagaaatgtgatttaatttcttgtttgtaaaatagcaacaaaaaaaatcttatagaaaaatctcatatttttctgtatagcctgttcacaggaagaattctgttcagctgaactccagagaaatagtttctctctttggaaagtgcaaattctaaagcattacagaatagaaatgtaaaaggaaatagagaacagagaaatggttgtggtaggtaaagatgttacctgggaaaaaaaa

SEQ ID NO: 376446 - DNA, 549 bp, Homo Sapiens
  misc_feature (446)..(446): n is a, c, g, or t
  misc_feature (485)..(485): n is a, c, g, or t
  misc_feature (492)..(492): n is a, c, g, or t
  misc_feature (501)..(501): n is a, c, g, or t
  misc_feature (507)..(507): n is a, c, g, or t
  misc_feature (522)..(522): n is a, c, g, or t
  misc_feature (534)..(534): n is a, c, g, or t
gttcaaaccagtatctgaaacaagtaggtttctagggagaaaagataatctcttaccaagcatgtcagttcacctgccttcatcaaaggactgactgcataggtgttaacaatcataattctgaaagttgctctttgatatcagtatattctataatgtattattggcttttaaatacctcaccctcctcacagtctgtaggacatttttatttaacttcttgatttgaatcaaagcagctattacttcattagctcttttgaagtgttcttggttgagaaggaacagcaaggcttatagaagaaagccaacttttcaaatcagtctttcttttgatcagcgctgaatctgatactacactgtactttaatcagaggaaaaaatgggagatttgccttttttctatggaaaatttatccataatgagggggaagggggttaaaggntatggctttatcctcctggtaattgtcctaattgccacntaaaacncgtgggggnccccgnattttacccgccggnccttcacccccntacggccattttggg

SEQ ID NO: 376447 - DNA, 561 bp, Homo Sapiens
  misc_feature (14)..(14): n is a, c, g, or t
  misc_feature (32)..(32): n is a, c, g, or t
  misc_feature (38)..(38): n is a, c, g, or t
  misc_feature (46)..(46): n is a, c, g, or t
  misc_feature (112)..(112): n is a, c, g, or t
  misc_feature (120)..(120): n is a, c, g, or t
  misc_feature (156)..(156): n is a, c, g, or t
  misc_feature (199)..(199): n is a, c, g, or t
ccggcctgaaccanaggcccccaggaagccanacctanactgatancctagtccctatacaaaggcaagccacctttggaagaagttttcccccattaaaaaaataaagttnaagggtgncccatgttggcccccggcccagcccacctgtttacnatcctcagatacaaatataaatacaaggaatgatgattttgtncctgagggttgggtcctacccagggcaaaactgtggtctgctggtaaagtacctaggcaatgaaaagaaagcttgtattacactgcccataatgtaccccattttatggataaacaggagactttagcaccggtcaattatattagctacttaaatgtcataacaattaaaataaacatagaacattgcacctatatatttaaatcagtcatttaatgtaaaccttttagtaagtggtagggaaaatgccaaactaaatttaacctgaattatcaagaattagacctaattgtgtatgtacataaaatacactgtatctctataggcagtactgagaattaacttttgccaataaaagatta

SEQ ID NO: 376448 - DNA, 454 bp, Homo Sapiens
  misc_feature (357)..(357): n is a, c, g, or t
  misc_feature (378)..(378): n is a, c, g, or t
  misc_feature (413)..(413): n is a, c, g, or t
  misc_feature (424)..(424): n is a, c, g, or t
cctaaacaaatggatgaaatctatgggtcagattttccccctaagaagctcaatcattatgcacatggaaaatgcaaggttttacatcccacatatatttcagacactttaatgctttgattcagccttaatggcagggcttgggattttgttcccactttagtacagccagctaggattttagtgtttatagaaataaagcataaaaaagtaatatttcccatgacaaacatcagggactgggtgctttacaagtttaagtttttaaacattttaaaaatatgataacagtttttgtaaaacagttttaacttttgaataatgaaaatcttactcaggaaatgactgggtaccatntttaatgtaccccccaaccanaaccttttttttgtagtcttgtaaggtggaaaggnagaaagcccanttctttaatgtggtagggaggtgctggaat

SEQ ID NO: 376449 - DNA, 319 bp, Homo Sapiens
catccaatcagctgtcagcgtggctagaacaaagtaggcagaaggtaagataaccttgtttactgggtcttctggctcctttctttttcctgtgctggatatttctttcttctcctcttgttcttagacatcagactccaagttctttggcctctggactctgggacttgcaccagtggtttgccaggggctctccagccttcagccacagactaaaggctgcactgtcagcttccttggttttgaggcttttgcactcagactgagccactaccagcttctctctttcccagcttacaggtgacctactgtggggact

SEQ ID NO: 376450 - DNA, 450 bp, Homo Sapiens
  misc_feature (363)..(363): n is a, c, g, or t
  misc_feature (391)..(391): n is a, c, g, or t
  misc_feature (415)..(415): n is a, c, g, or t
  misc_feature (423)..(423): n is a, c, g, or t
  misc_feature (437)..(437): n is a, c, g, or t
gtctctgacgggggctggtcctctctgtggcctttagtagggtgatcctcttgggtggaggtggcagtaattcttggctgccttcccagtgtgggcagcatcttgcctaagctcaccacagaatacgtgtttgtccaaatgttacactacaagccatatagtgtggactgcttgcttttcattaatgggttctcagtcttcccattgtctctctttgtaggtattttcccccagggtcatggattgatgtctaactccaaatcaatttttaagcttaaatttcaacaaagaaagtgcttataaccacttgtcatcctcaattatccattgtgaggaggtgggatgtaaggatgacttctgggngggccagtacttcccaaatgattaaggngcccacggtctaggagtcaaaatngattgtangggcacaaaatccngggggtttccccc

SEQ ID NO: 376451 - DNA, 491 bp, Homo Sapiens
  misc_feature (304)..(304): n is a, c, g, or t
  misc_feature (337)..(337): n is a, c, g, or t
  misc_feature (410)..(440): n is a, c, g, or t
  misc_feature (452)..(452): n is a, c, g, or t
  misc_feature (477)..(477): n is a, c, g, or t
ttttttttaatcaaccatcattcctggtcattgcattttgataaaacatccagcattccctttgtagcaatgttctaatcttacagccactttttcctttttctttagagaagggctgttatgtgaggaattttctttttctcgtcagtctgggaatggtaaataaaaatgcaggagtccaaaatgcttctctttcaccatgtaatgtcttaaactcattaaacaagtaaaaacgctgccaagtttgtgcagattcttctggttgggggaaaatctgtttttaaaaaaagtcattttgatggantactcccaaagagaagagactcagagcctgggnccccaaggagtaagagaaaatatccttacagtaagggggtttcagggagtgctgggcataggaaacccagttnnnnnnnnnnnnnnnnnnnnnnnnnnnnnnngaggatgcaagntccaattactgacggttgctcaagnggggagggtaaatg

SEQ ID NO: 376452 - DNA, 479 bp, Homo Sapiens
  misc_feature (29)..(29): n is a, c, g, or t
  misc_feature (34)..(34): n is a, c, g, or t
  misc_feature (41)..(41): n is a, c, g, or t
tgttgtcccccccaaaatttgtccccccngaaanccccggnagttcgggactttcccactgtgcatggagaggaggattaaccccacattatcatttatgtattatccctaataagacaaacaagagactatagtaagaaaagtatgaaaaatctcccaaacttcactcaacacaatgaaaaatagaaaagctagaggaaaggatgagataagagggcccagcattgaggagaggcgttgagatggccagggagtgggcaagagcttgcccctacttccacttccatgcccgcccccagggtcccaaagaaaagacctggggctaggcaagcagagaaaaggaaagcagagacacattttccaacacgacaaataaattaataaatatatatgttaaacaagaaaataacttcttaggcaccgcttgaaaggcagcaaccctctagagaccaggaggccccactcgggagcctgcaggt

SEQ ID NO: 376453 - DNA, 494 bp, Homo Sapiens
  misc_feature (91)..(91): n is a, c, g, or t
  misc_feature (456)..(456): n is a, c, g, or t
  misc_feature (461)..(461): n is a, c, g, or t
  misc_feature (484)..(484): n is a, c, g, or t
aacctgggagaaggaactagcactactcaagcaggagctggctatccatgacagcctgaccaaccgcacctttgtgacctagtgaccccantggatgaaatcagaattgctgagatcaactcccaggtgcggaggtacctggaggggacactggacgagatcgacataatcagccttagacagatcaaggaggtgttcaaccagttccgggtggttctgagccaacaggaacaggaagtggagtccactttgcgcaggaagtacaccctcattgacaggaatgactttgcagccatttcttgctatccagaaggcggggcttgtggatgttgatggccaccttagtgggtgagccttgaaggacaaaattttgggattcgggagttcgcccctttcttttacccaaacctggggaagaaagccaagttccaaggaagacatttcaaagagccattnagttnctttggcaagaaagggaaggttncccagcagcc

SEQ ID NO: 376454 - DNA, 523 bp, Homo Sapiens
  misc_feature (161)..(204): n is a, c, g, or t
  misc_feature (463)..(463): n is a, c, g, or t
  misc_feature (504)..(504): n is a, c, g, or t
ctctgatttccactgactaaacctgcacctttagcatatcccagaagtggtcatcaaagtttgcactattagaaatatatacatgacttatgtttccagactattgccaccctataaattaagcaaactgctttatgtatctagttgacagcattataacnnnnnnnnnnnnnnnnnnnnnnnnnnnnnnnnnnnnnnnnnnnnagtagttgggacacctgggctaattattttttgtagaaacggggtcacactatgttgcccacgctgggtcttgaacccctggggttcaaggtaatcctcttgccttgggctcccagagtactggggattatagggtattgaaccactgtgcctagccccatgagtgtcttttgggagtaaaatattgtagcctaggggacaaaggaggacaagccatgcccttatataagtgctaggagggttatttaacccctgctcntagtgggggttttttaggggaggcaaagcaggaggatttgnaaccccccagttcttttgg

SEQ ID NO: 376455 - DNA, 418 bp, Homo Sapiens
  misc_feature (52)..(52): n is a, c, g, or t
ccccaattttccctagtggccaagctcttgctagggcaaggttactgggggnagatggaagtagggaaaagttctgagcccaagcccataccttgtgtgcctacatcctacttcaaaagggtccccatcagcttccatctttggcacacaaatggactggaaaggccccccacggaggagcagcttccttcaccagggaccatctggtttcgcacaggactgtttttcccagccttaatgccagctaatgccaggctggtgggatgccaaggccagcctttattccacctcctcctattgatgtttgcccggcaggggacagagcagacctcagagccaggcagggaatatgaacaaatgaggtcagatctattgtggggagtggctgggaacagacatcagtgacgcaaatgaaagg

SEQ ID NO: 376456 - DNA, 428 bp, Homo Sapiens
ccagccagctactgaaccttatgtgtgcctagggccattttgagacaatttgctgaatattaaaagtacaaccaataatgtttctctccacatccacaatagcgcttagaggaagcatctgggattgagccatctcacatctgtctaatcacattcattcaaatgtgatgggcccaactggcctacgtacatggctgcatatcaccatgggtggaaattaaatcagaatttggctcaggagagagatgaagagaaaatgcacgtagataattggctcagataacattctgtttctgggaagtcacaaagagtggggaaattgggaatatgttaaatttaaaggaaaaacagggtaaggaatttcacatggaacccccaacccaccacaccctgtgttattgttcctccattcttcatttcttctctat

SEQ ID NO: 376457 - DNA, 428 bp, Homo Sapiens
ctaaaattctcaaacctcttctgcctcaactgaataataagggaaaggtttggcccaaaggtgggtgactggtggggagaaggatgagggaattcaggggattgctgagcccattctctagacagtgctgctggcactggctctgtcttctccgtttccatctcgcatcagacggttcttccctctatgggcctagtcctacctagacacttttcagttggattccagttctggggatgctccgtcctgcagggatctaagtccttcccattgtcttcggctcctgggctcagctagaaccatcttttcccattgtccctgtggtgctagggctttcagtggttattaacgtctgtgttgtatcatcttgcctgaatttcagctctctgtaaccagttccccaaataaaattccccccatttacctac

SEQ ID NO: 376458 - DNA, 564 bp, Homo Sapiens
  misc_feature (499)..(499): n is a, c, g, or t
  misc_feature (517)..(517): n is a, c, g, or t
  misc_feature (537)..(537): n is a, c, g, or t
agctgcgcagcgggccggccggcgctggttgaacagactgccgctgtactggcgtggcctggagggactcagcaaattctcctgccttcaacttggcaacagttgcctggggtagctctacacaattctgtccagcccacagcaatgattccagaggccatggggagtggacagcagctagctgactggaggaatgcccactctcatggcaaccagtacagcactatcatgcagcagccatccttgctgactaaccatgtgacattggccactgctcagcctctgaatgttggtgttgcccatgttgtcagacaacaacaatccagttccctcccttcgaagaagaataaagcagtcagctccagtctcttccaagtcctctctagatgttctgccttcccaagtctattctctggttggggagcagtcccctccgcaccacatcttcttataattccttgggtccctgtccaagatcagcatcagcccatcatcattncagataattccagccctnctgtgagtgttatcaatatncgaagtgacaatgatgagggagggggt

SEQ ID NO: 376459 - DNA, 260 bp, Homo Sapiens
cccccaaaagaatattggtttaataatcatcatatttaagaaatgcactgataaaaacatattttccaattttaaatacacctatttaaaatgtaaatacacttatttaaaattcaagtaaatatgtaactatcaaagtaaatgtattcaaaacagaagttgtgcttctgaatgtaaaaatattaaaaggaagagaagacggatgaattgttgtattcatggacatttcagaattcatgcttataaagcaaatccaagtt

SEQ ID NO: 376460 - DNA, 421 bp, Homo Sapiens
  misc_feature (27)..(27): n is a, c, g, or t
  misc_feature (33)..(33): n is a, c, g, or t
  misc_feature (45)..(45): n is a, c, g, or t
  misc_feature (112)..(112): n is a, c, g, or t
  misc_feature (120)..(120): n is a, c, g, or t
  misc_feature (144)..(144): n is a, c, g, or t
  misc_feature (241)..(241): n is a, c, g, or t
agggtaaacccaacaggggaaaccccnaaccgnttaaacacagangctttaagcgcttgctgtacaaagtcatttggctacacactgaggaggcccatgggagtagtagccncctcaaanaatgttccctacctatctgtcaanaccttccatcttaggtattgagaatttaatgaggctgtgttttcttggctgtgcttcttgatgttggaagccatgtccctggggaacaaatctgtantcttttctcctaagatgtgagtttttttcaacctttgctaatattttaatggagcaaatgtacagatgttgagattttgcactgcttataaaatgcctaccatgttttttgcataatggattgtatagaaatgcagattatattcttacagcaaataaaaagatgcttttaacaaaaaaa

SEQ ID NO: 376461 - DNA, 480 bp, Homo Sapiens
  misc_feature (450)..(450): n is a, c, g, or t
ctcattctggttgacatctgcctaagtgagaagcagggcaagcgatgaagactggtggggagggctcctcctgcagcaaactttctgtgtgaccttgggccatccctgcagtggcagcgccacacacatccagccattttcaacttacagagccctgaccgctgactttcatctcatctgggcctcataacaattcctgcgtcaggcagggaagggattacaatcccattttacagttagggaaattgagccccagaggttgagtagcttgcccaagccccccagggtggttggtgacaggcaggactgagaggcggcattgggggacttccagggacagagttcctttcacttgcaccatgttagggaaccagcttgttcagggaacttttccccacaggaaccaacagccagggtgaaacccatttttaggcaggtcttgagcttttnagggttgagggagaggttgcagccaattaa

SEQ ID NO: 376462 - DNA, 460 bp, Homo Sapiens
  misc_feature (163)..(321): n is a, c, g, or t
  misc_feature (428)..(428): n is a, c, g, or t
gggaaaggagtgtttcccagacagcccagcacctgcaggggatggagggcacataagtttgaatataaagtttaacaaatcaggggcagggcagaggaaccaagtccaagctcttgggttcaactataaagtaccatggaagtttgaaaactgaaagagatcnnnnnnnnnnnnnnnnnnnnnnnnnnnnnnnnnnnnnnnnnnnnnnnnnnnnnnnnnnnnnnnnnnnnnnnnnnnnnnnnnnnnnnnnnnnnnnnnnnnnnnnnnnnnnnnnnnnnnnnnnnnnnnnnnnnnnnnnnnnnnnnnnnnnnnnnnnnnnnncattttataattcatagatctgattaaaggacttgtattaagaaatacaaaggaacttcaacttcattaacaggaaagaccaacccaattttttaaaagggttttgnaccaaagactttcttcaaaaggacaatgggcc

SEQ ID NO: 376463 - DNA, 491 bp, Homo Sapiens
  misc_feature (22)..(22): n is a, c, g, or t
cctgtctacacggaaatttgtncacaatgttcacggcggcttgaatccataatggcccaaaagtggaaaacaaccccaaatgtcccatcaacaaagtggataaacaaaacccgtaggctgcccccagacaatggaagacgattcggcctataaaaaggaaggaagcactgacacccctacagcatgaactctgaaaacatgcttggtgagagaagccagacacaaaaggccacatactgtatgatttcacttatatgaaatgtccccaataggcaaacccatagaaacggaaagtacattagtagctgtttaggtctgggggagaggggaaatggggaacatggaatctccttctggggtaacgaagatgctctgaaaccgattgtagcaacagttgaacgattctgtgaataactaaaaaccactgaattgtacactttaaatgggtgaattgaatggtacgtaaattatgtcaataaaacttattttta

SEQ ID NO: 376464 - DNA, 625 bp, Homo Sapiens
  misc_feature (22)..(22): n is a, c, g, or t
  misc_feature (41)..(41): n is a, c, g, or t
cccccaataccgggatgagtcnctttatcctaaaacttggnggaaggaaggggagttaacccaccggttccagtgtattggtatgaccctacgggatcatctaaaatggactgactgaaaactcgctagggttaaatctgccatcaaaatctaaccattttgagcctctgaagggagtgccattggctttatttacttctctcctctgctagttctgatttggaaacagttaaaagccaaatttttagctccagtggaacccatagccccacataaaactttaaatggaacaacccatatagaattaaccttattttgtcccaagtaacagttggccattttcccagaataattttacccaccctgcctagatgtcatctctggattgcacatggatgatgaaggaactcagcattgaaagttgggggattagtaaccttgttacaacggtttctttttcattttagcctattttaatggctattggtaagatactgtatgtttttagtatctcatccagtgcttagaagaaagaatggtttataattcccagtacatgtttatattgactgtgttatatttttaaatcctttaaataaaaaatccttataagtttatgtaaagc

SEQ ID NO: 376465 - DNA, 479 bp, Homo Sapiens
  misc_feature (17)..(17): n is a, c, g, or t
  misc_feature (39)..(39): n is a, c, g, or t
cccctaccctgtgggcnggaagatccttccccttttttntccttgtccaaatatttacacataactgcatatacaacctgtctttgtcttttcctaagcacatggtttagtttaattattcagcatacattcatcaggaaaagttgaattatatattatgatacataaagaatataacaaacctagcattttgtataaagctaaaacaaaaggcacagatcaagaagagcaaaataacatattatataaacagggttgatgttgataaagctcactgggaacaaataacatgtaaatagcagacaccatggttctctagcatctgtatgaaagtatattactgacaaaatattgccaagaataagttgtaaggaactggtcaaattcctgaagtaccatacagttacttttatttttaatgctttttgtaaagtaattttgtcctaattggagctatagataaaactgagagtcatttc

SEQ ID NO: 376466 - DNA, 417 bp, Homo Sapiens
  misc_feature (17)..(17): n is a, c, g, or t
  misc_feature (40)..(40): n is a, c, g, or t
  misc_feature (69)..(69): n is a, c, g, or t
  misc_feature (106)..(106): n is a, c, g, or t
cagtaagtaccagtgtncacatgcctgctggcggtaaaancaaccccaagtgtcagatcacacaaaaantagggacaagtctatcaaaaaacggacaccttgtganaatttggagtctaatttccgacttttcgtaatgtcccaatgaccttttgttgtggttgggcttttataaaaaattattttcggttggttgttgtagaatggaagagtaatcttaattatgaaatcagattgcatggaagaatataaagacactcactcggatgaaaactataacggttttcaaactattttgatggtcattgtacgagctattgtatggattactgtggagtgctgtttaccacatgatgtgtgcaatacatcatgcaatgttatttagcaatgcgtaataaaagtttttaaaagagaaaa

SEQ ID NO: 376467 - DNA, 539 bp, Homo Sapiens
  misc_feature (74)..(74): n is a, c, g, or t
acctagaggttataggaagggatgaacagagatgacagacaagacaaaaaaggttatgagagaattcctcattnatacatgggtagaattcaccccagaaaccaaagaacttttcataattacaagggagggacagcacagggcacaagatctttgaggtgttagaagacaggctgacagaccaagcttggtgactggcttaataagtctcctaccacttgaaattctgtgttatttatttaaagagaggcagaggaagagttcagaagccagaagatttttggaagagaagttgagcctcttgcattttcttacatcattaatttccttcaccagaagatatagttggaccaaattgcaatagggttcgccaatggactccattatgtagtcgacctgtgctcctcactaggccctgatttcgctatctgataacaaaggcttctgaactcttattcttttcctcactaacaaacctcaataatctacacttagcattaaggtctccaattcagggttatggaagaaactagtcttcc

SEQ ID NO: 376468 - DNA, 547 bp, Homo Sapiens
  misc_feature (18)..(18): n is a, c, g, or t
  misc_feature (78)..(78): n is a, c, g, or t
  misc_feature (89)..(89): n is a, c, g, or t
  misc_feature (116)..(116): n is a, c, g, or t
  misc_feature (188)..(188): n is a, c, g, or t
  misc_feature (216)..(216): n is a, c, g, or t
  misc_feature (255)..(256): n is a, c, g, or t
  misc_feature (275)..(275): n is a, c, g, or t
ccccccaaaatggccgtncccccaagcctaccctatcctcacattcctagacaatgatgggaacaaagaccgccatgncaaaacctcanaccccggggaatggtgtggtgcctaancctcaacaccctgacattccacagcaagcatggccccagccccaactgcatgtcctatcctcaaacccgcanaaaggctttaatactggaaaaaaagaantcaagactacaggcagctcccctctgtaccccaactcanntaaaataggaggaatcacnttttgccttacttaacgcttttttctgagcacagggatgggcacctgcaccccagaaggtgtgagctgtctctctgccaggagctaaggttcattaggggattggatggtttatcacttctttctttctgagtttacttttagtaacttttattgatggctacctttcatgtccctgtctaaagagactttctctttcatacgtcttaaatctcatcaatgaaatccagtgaaacagcaccatttcttagtatcattaaataactagaaagt

SEQ ID NO: 376469 - DNA, 574 bp, Homo Sapiens
  misc_feature (43)..(43): n is a, c, g, or t
  misc_feature (64)..(64): n is a, c, g, or t
  misc_feature (70)..(70): n is a, c, g, or t
  misc_feature (75)..(75): n is a, c, g, or t
atggcagacacggtttaaaaccctctgccgaggagggaaaaanggatgtgcagagtgagtaaantctganatganccggggtcccttcactactctcctcttccccagtcccacctcaaaaccctcaaggccaactttgtcactctgtccttctagctctcataaaacccccaatcacagaagattagccggtggaggaggaagtgtgggccagaatcatggcccccagagctcgagcctccagttgtctgtcaatccctggtcaagtctctgagctccatgtggaccacctgcagccccagggtggccagggccttccagccagcacagtctccatgtgagtctgcctgaccaggtgtatcaagtgcacaaagatgggatgcatccttagagagaaaactctgacacctcctattctacctttgttaggaaatgaaccatgacataacaagatcatagcaaaggagaaaaacaaatggttaataaatatatattttatcaatataaatcaaagaaatgcagactaaacaatgatgtactgagtagacaaatattaaaagttattttaatactc

SEQ ID NO: 376470 - DNA, 419 bp, Homo Sapiens
tcctttccaccccccccaaaataaatacagtgttccagtaatttttccagtgaagaacatagcattgtaagatggagactgaaagcctgacgttgttgttgtttaacagttgattcaggtattctggtgatgctcctgtgctcttagttaccccaaacacattattttctcacgtattaatggtatgtcatattttttaatgttaagtccttatgtgtgaataagtgtaagaataaggttgcttattggtagcatataaattgagagtcaggaatgatgctaatgccacacaatcatacattgtccacatgggtggctgagaaggtgacatcttggtttctgatgcttcaatgtatacaaactttgtttcattcacaaaatttaaaaaatattgtataaaattacctttaggttaggcc

SEQ ID NO: 376471 - DNA, 325 bp, Homo Sapiens
  misc_feature (60)..(60): n is a, c, g, or t
ctacccctttcaagatcctaatcaaggtcattttcagccttcatgcagtgccttttctantttttactaacttctgcccatcactttcaacctagaactttaataatttatcctactgtatttttcaggtcatatatacagtggtcattccaacaacatactcttctgtaagacatttcagacatcactgtcagtttttccaacagcttgactttctttgctagtaatgctttccctttttcttatttgttttacccacagggatatctgcaggactttctgacaattccaacaatatcttcacgtcagagagcagagaataagc

SEQ ID NO: 376472 - DNA, 534 bp, Homo Sapiens
  misc_feature (154)..(154): n is a, c, g, or t
aaacaagcaagtgacctgatcaaatttgggtttcagaaagattatactctgctagcctgggacaggtgaattaaggatggttgagcctagaaatagagaagccagtgaaagagctgttacagcaacccaagtgagaaatgatgagggtttgtgnctgtggccagtgaagaagggaaaagaagatgtaagtgtcctaggtagatgtgatgcgttcattgaaataggtattagaggagaaacatgtttggagaggagcaaagttctggacaagttgggactgcaacatcagtaggacctctaaatggagttgtcttaggcagttggagatgtgacaggacatgcaaacatctattaatttgtcacaaaaatgttaagggcaatgtccacttcttcctttggtatccttatataacatccatcctagcccaatcagcctgagaccaccagggatgaatgtatagtctgatttgtgaatgcttataaccaggaagaccacacaccagagaactgtgggcatcttaccaacaaagaaaa

SEQ ID NO: 376473 - DNA, 427 bp, Homo Sapiens
atctcccagcctcacctctgctgtctcctccacgcttcctgtctccagagccccgagttcagcataagcagaaagcggcctgttccctctctagggagaggagggttgcggtctggaggtctggctcgtctttatctgcgcattctcccagcctcctggcttcagacctcagcgaggcggcggctgcccgccggctctcctcttcctgcctgcagacctggcctgctgcttctttctccttcctccctccctgcctgccctgcggtttcaaagtagattagaaataacagtgtcccacatggaagcctctacttcttcctggggtcaactttgatgacgaggctccagaaaacctttgcaatgctgtgtgggaatttttaaatcggtgagctcgtgctcttgccctatttatttgtccagcgtacat

SEQ ID NO: 376474 - DNA, 530 bp, Homo Sapiens
  misc_feature (24)..(24): n is a, c, g, or t
ctcccctctgcccacctgtctccnagcctcctcccccaccttcaggatgaaatgaaaccctcagtccagctgcacccctgccccacccacctcatctcatgtgccctcccgcccctctcaggccggacagccttgcttctggaacacacgagcacagcttccacccaggcactttcctgagcaccctgcaggcgcctcccaggagtggtcagtggtcaatcagctaatgaagctgcataggacatgacccttgtttaccgcagaatgcccagagctggcaggatgttttatatgcaggaagtacccaaaatgtatttattgaggaagtgatgatggataagaggaagacggagagcgagggagagaggggctaggggcccctgcggtgtaaagggggtgtggctgggagtgtgcaggggaacagggatcatttcaaggttcctatctgggagaaaataaaaaggtttacagttagttgagataagcgtgggaatatgcgaacatttttaaagaataaaaagtttagcttt

SEQ ID NO: 376475 - DNA, 601 bp, Homo Sapiens
  misc_feature (556)..(556): n is a, c, g, or t
  misc_feature (576)..(576): n is a, c, g, or t
ctaaacccacagctttaagttcttccctaaaagaagcattgcagctaacccttgaactcacagttttaaaatacagtatttctcttctccacatctccatgccttcgcatcaatgcttgtttttcctggtgaacactatagataatctcctgtttgaaatgtgggacagggtgtttcatggcagtggagctaagtttctcctctttatagtgaactggtgacccaaatgtccctgtcatttatagtgaactgatgacccaaatgactccctgtcagtagagtcccatgtggcccatgcttcacacaagcagaaatgaacgcactgtttttaaggctagattatcagttctagaatgattacttcaaagatgggagctacctcctcagatattcacactatgaaatggaggtgcttgatgtgtttcacactggcttgtttgacagtcttctatcttactgttaattcagcagtattttattgtgaaagaaaaccccagtgtttgagctcactcagggaattggggggagaggagatgggacccaccactgtgggggncattttctttaaggtgttcnggggggaggaatggtccataacttt

SEQ ID NO: 376476 - DNA, 635 bp, Homo Sapiens
  misc_feature (32)..(32): n is a, c, g, or t
  misc_feature (35)..(35): n is a, c, g, or t
  misc_feature (443)..(493): n is a, c, g, or t
  misc_feature (545)..(545): n is a, c, g, or t
  misc_feature (572)..(572): n is a, c, g, or t
  misc_feature (585)..(585): n is a, c, g, or t
  misc_feature (593)..(593): n is a, c, g, or t
  misc_feature (599)..(599): n is a, c, g, or t
  misc_feature (606)..(606): n is a, c, g, or t
  misc_feature (620)..(620): n is a, c, g, or t
gtacttaaaatccaaactgccgcccagatggnttngttcttcatgcctaacttaataatttttaagagattaaagtgccagatggagtttaaatattgaaattattttaaaaggtaggtgtctttaagaaaataacaagcaaccctgtgatatgttccgtctctcccaattccctcgttatatagagggcttaatggtataaatggttaatattggtcccaacagggctgactcttctatcatataatcaaaactttttacatgagcaaaattcagtaagaaatgggggaagacaaaggaaacgtctttgagaagccccttcatatttatttatttatctcttcctgaaccatgaatttcatatgtggaatattgctatattgacagattcttgcctgtctgtgttattctaggatctgttacaggtccatggcaattactgnnnnnnnnnnnnnnnnnnnnnnnnnnnnnnnnnnnnnnnnnnnnnnnnnnnaaatacatgagaggcattgggctaagaaagaaaagactgttgtataataccntgttccaatggttgtatttagtgagcnccataggggtccntcatatcntgaccnagctagngttgttgtggggcngggagggtaggggct

SEQ ID NO: 376477 - DNA, 511 bp, Homo Sapiens
  misc_feature (176)..(227): n is a, c, g, or t
  misc_feature (430)..(430): n is a, c, g, or t
  misc_feature (458)..(458): n is a, c, g, or t
  misc_feature (491)..(491): n is a, c, g, or t
  misc_feature (497)..(497): n is a, c, g, or t
caaaattcagtaagaaatgggggaagacaaaggaaacgtctttgagaagccccttcatatttatttatttatctcttcctgaaccatgaatttcatatgtggaatattgctatattgacagattcttgcctgtctgtgttattctaggatctgttacaggtccatggcaattactnnnnnnnnnnnnnnnnnnnnnnnnnnnnnnnnnnnnnnnnnnnnnnnnnnnnaaatacatgagaggcattgggctaagaaagaaaagactgttgtataataccttgttcaatggttgtatttagtgagctcatagaggtccatcatatcatgaccgaggctaggttgtgtggggcagggaaggtaggggctaagggggttgtaggccttgctggggcagcctcttcaggaggcaaggttgtttcagatcttcccnttggctatttaccagtagggtttaccanttaatgagggggcagcaccccgatggccctttngtaacncgagggtatgttaa

SEQ ID NO: 376478 - DNA, 316 bp, Homo Sapiens
tctttcctagcctgtcccttctggtctatgagtctcccacctaggaatcattgcttccgttttctatctgtccagctacactccttcaagctgttactgatgaagttgagagctgcgagaggctgttaggggaagggagacttcacccttctgctttgaattcagacaggattggcccacaagactcccactggttgatgatgaaaagtaggctaaactgcctgggatgagggcatttgcacggatatgaaagcgttattatttgagacccaacgcagccaagtgagctaacaaggagaggacaaaactgcctttc

SEQ ID NO: 376479 - DNA, 460 bp, Homo Sapiens
  misc_feature (31)..(31): n is a, c, g, or t
  misc_feature (36)..(36): n is a, c, g, or t
cccccccaaaatggggatggaaaacccaccngtagncctgttttaaaagtatgcctatacctatgttccattggttaccttaacgggatattaatataaaggttattacaagaaaaatgatgaagagcaaaaggagaagaaaatatttgccaagtgaaccccacaaatcttgcagaaccatttgagttgataccaaagattttatgttcactcctttaccctagaactgtcaagcttgggaatgaggaaagtgccttggctgtgcttgaaacctgaattttagtgcttcccttattacattcattgttttcaatgattgatttataaaattaagacatactggtagtacaagttgaaagttggtttgaatacattttaattaaatgataatatgttaatatgcttttgttcattgctttctcactgaggtaaaacagcattaaaaagttgtccagaattt

SEQ ID NO: 376480 - DNA, 300 bp, Homo Sapiens
  misc_feature (92)..(92): n is a, c, g, or t
  misc_feature (240)..(240): n is a, c, g, or t
aggttgtatcaacaatgattaactcctttattatacatacacatgaatgtgcatttttggtaaatgcataaatgagaatctataatgtttantgaactttatattacagattttctcttcttttaggattagctcagcttgcccccgctttccatctccaccatctatagtgagcctctccataattagtgccaaccattagtctcgttcatatttttacaccaggagtcaacaaacatngtgcaattgccaaatatggcctcccaactgtttttttaaaataaagttttattggaacac

SEQ ID NO: 376481 - DNA, 487 bp, Homo Sapiens
  misc_feature (436)..(436): n is a, c, g, or t
  misc_feature (475)..(475): n is a, c, g, or t
ggcaagaagtgtttccagatcctttggaaaggtgggcatggggcaggtcattggagagtggcgtttgagcagagcgaccccatttccgtgtgaaccataggcacaacccaggaagtttccccacttgtaggagtgtgggtattccagagcaagactgtggccaccatcttcccctcttggtgttttccgaaagtgacagtgttggtcatcccatgaccactgaagcttagtaaccagcgccaaaaaagtagattcatcaaactagagaccccagctccccttctcgccatcttctttctcaagttgaccgtggtgctgtttctggaaggcatctgcaactccaagtccatgcagaactctggaaggccaagttcatcgcagcatgttcaccattatcccagcctccaaatcttattcctccttaccttccaacggnatggacctgttgggggagcagagatttaacccccaattnagagggaacctt

SEQ ID NO: 376482 - DNA, 280 bp, Homo Sapiens
  misc_feature (213)..(213): n is a, c, g, or t
  misc_feature (257)..(257): n is a, c, g, or t
tgaaatgcatgcacgtgtatccacctccagggacaactcccagagtagcagccggttcctcactgtcccatcccccacctggcacaggctgacacacaacagatggtggagggctgctcaggaatctcaacaccagccttggccagaagcaaatactcctcaaaacctcaactacgacacaatagaaaaagggacagaccatattgaatttantccatttctctcatatatcaatttccctgaagtttatattattnatatcaataaaattgtctgggag

SEQ ID NO: 376483 - DNA, 477 bp, Homo Sapiens
aggaattggggtatgccaccttaatccggattcctttccgggagtggatccaaaatacttttaagaaaatcatgtatagcattttgtccagatacactgcaagtgattgttgcttggagatctatgaaaaataacatttgagaaaattttacttgccaagtagtcactaatacagagtacttataatagtggcttgtcatcacaaacacctgggattttttaggggctgtaaatgacagaatactgtgactttggcattctggcctcaggattcattatcaagggtttcattttcattcagaaacatttctccgtgggaatcccactcacacgtatttttgttggcacttgggcctattaaaggtgtggtctagcatttgcttttcactcatcttaagattattttcccatgtacaaatgctggtcctggcatgaacagggtaccacttaaaaatcattatcccttcagatgctccc

SEQ ID NO: 376484 - DNA, 449 bp, Homo Sapiens
cagctagtgtagacttaaatcctgtgccctctactcaactaaagccctgccccacctaatgtatattagataaggggtgggggatggtggtggtagtaatcaggactctgaccaatattctatgccaaaggatgctaaagatacaaagttttcagttctcagtagatttccatgaaaagtccttggccaccctggaagaggcatactgcctgtcctacctccacctccaacatgaatttgacttggagtatttatgttctaaaggactgaagaacctccactcctatcctgtcccaattcaggattgtctctttcttccttccagggtcacttgcaacagtactggtccagatgaaataaaactgtcaagggaatcctgggagctattttgtcaaaaggcagccattgggagccaaacctcttgttgggcattacttcagtgccccttt

SEQ ID NO: 376485 - DNA, 435 bp, Homo Sapiens
atggtaaccagcaaaactcaacaggagtttgactcaacagggccaaaactcagttacatttgtatgactctgcaaagagaagtcagctatagtagggagaaaaggaagaaggcaagaaaaggagactcgagatgagtttacatccaagagaagcacagatgtttgtaatctacctagaataatgtgaagtacctgtccagcatgtatgctcagatcctccattcattagcacaagctgaaaacatgaactgcaaattctacaccagcatcctttgcttcctccatggcagtgggaggtagcaaggggagtccaacacttctccatgacgtaagaaaggcaggaaaaatactgatgagaatcaaactgtgtgccaaaaacagctattggggtatttgctgtcctcatcatgttaaatcatacaaagttcttcccag

SEQ ID NO: 376486 - DNA, 487 bp, Homo Sapiens
gaacaatgaagaatctcaattatatcaggaatttgtacattagatgtgtcgttttaaaatcctatgcctgattatgcatacacaaataacaagtataaatcatcctcttcatacacattttttgtttaatctttaatacaaacccatgggaaagatttatcctactatcacaaatgatgaatctaatgttcagatattaggaagcataattttgctatttgtcttcctcattaaattgtgaattcctggggaggaagtgtgtaatagtagaaccaacttacttatgctgaattcactgtcccataaaaactgtgtgtcgcctgaacaagttattaaccctcctgaatctcagtttctttacctatcaaattgcaattacatggaggtacatattaaagtcgttaggggcctggatatgtattagctaggtaatgagtgtttcttacaccctccatacatggccggagtccctggattgggctctctg

SEQ ID NO: 376487 - DNA, 450 bp, Homo Sapiens
  misc_feature (401)..(409): n is a, c, g, or t
gcacttgggcaaaaggttggccttagtccatacaggcctcccaatttatgcagaagctaagaacctctaaaaataagtcccgtttagtcactgtgaaaatgccttatgaaatttcctatctgcaatacatataatgctattaaacttcagtaactaaagtctataatgctcatgttaatgtgtaccaattagatgttaattacatgttctcaaaatttgtattctatcttcaaaggcaaattaagtgtatcttatttcatgttttttctaatgcaatttcaaaaattccacattgaaagcaggaagattcacctacttacaaaactgccaaagtagtccattcaaaaatggcttaaaaataaagacctgtctcaaaggtttacaacaataaaacactactnnnnnnnnntacatcaaactcaaagcacgtaatagttgagctgaaatgcc

SEQ ID NO: 376488 - DNA, 464 bp, Homo Sapiens
aagtgtcagtcttacttcattctgaaaaaaatgtctgccaaatatccgagtctgaaaaaccagtttgtcagctattctttcaagtaaaaatgatgtttcatgaagaaagaaaaaaacatgtaggtaagctcaaaccaaacaatctcacaagtgctcttcctgaagactgtcaatgtacacccgtataatgaaggagggattcccacttcatagcactgaacactcaaaagatgtgtcctgtagctgaaattcaataaagtcaataatgtttcctgccttgttaggaaaattctcaagtgaaattggctttgcttttttacagtgagtgacagtgcctggctctgaggaacacagtgactattagtgcagtctgatgttgctgcatgtgtgccgacattaccagttttacccaccacggctttacaccaacgtcaacacagtggaaaaggcaagtcacaaagagt

SEQ ID NO: 376489 - DNA, 553 bp, Homo Sapiens
  misc_feature (21)..(21): n is a, c, g, or t
  misc_feature (43)..(43): n is a, c, g, or t
  misc_feature (103)..(144): n is a, c, g, or t
  misc_feature (392)..(392): n is a, c, g, or t
ttcccccgccgagtgttaccnggaatttgcctttcctataaanggcttttatgagtttacagtagaatccagtggaaggaagagttaataagggctgtttttnnnnnnnnnnnnnnnnnnnnnnnnnnnnnnnnnnnnnnnnnnttttacattccttccctattctctaactacacttgggaagtgccacctcagataagtttgccagtgtgactgagagatcaaggaaatcccatagaaaaggtcctcttagtgaacaaaatttagttattaactttatagctatgaaatttccccgggcatttgtttttgttcaaacagactttaacctctgcatcatacttaaccctgcgacatgcgtacagtatgcatattttgttttgaaaaaaaantgtttcgttccagtctgttaagaatattcaaaaataataaaggtattgcttaataaaattgctagaattgtttagcagtacatgcacaatattttactagattctttgttttaatagtgttttgttgagactgaaaatcttaaaatggtctgcgcaaatac

SEQ ID NO: 376490 - DNA, 510 bp, Homo Sapiens
  misc_feature (22)..(22): n is a, c, g, or t
  misc_feature (26)..(26): n is a, c, g, or t
  misc_feature (142)..(142): n is a, c, g, or t
  misc_feature (268)..(268): n is a, c, g, or t
  misc_feature (281)..(281): n is a, c, g, or t
  misc_feature (290)..(290): n is a, c, g, or t
  misc_feature (428)..(428): n is a, c, g, or t
  misc_feature (470)..(470): n is a, c, g, or t
  misc_feature (487)..(487): n is a, c, g, or t
ccaagagtggctactggagggntgtnagtgtgcagggtagtggcagcctccaccagggagtgccagacacgtagcacaagggccagagaccccgcctaagatgtgggcccactgctgtcttcggggctggctgcaggcagangccacaagactgcaccatgaggaagccccagcatgttttccctgggcgcctctctggtgacatcccatgatgagaaggtttctaagaggagaaccaaggagagaacactagggggccgagacaggngggcggccagggnaaacgccanagctagcgcttctcattgcccggggtgcgcgcgcctgactgctgtcctctcatctcagctcttcggggccgcctggcagcaaacaggggaggctgatgacatgcagccgtttcctgaaagaccccctcatgcggagtngccagcacattcatttttccaagggaaaaggatgtttcattncacgcaagttcaatttnacattttttaattagcgactttt

SEQ ID NO: 376491 - DNA, 526 bp, Homo Sapiens
  misc_feature (460)..(460): n is a, c, g, or t
  misc_feature (469)..(469): n is a, c, g, or t
  misc_feature (475)..(475): n is a, c, g, or t
ctggctaaatgttcatcagaggaaaaaaacaatgaacaaatctaataaattctccaaagttgaaggctaataaatcctaaaagatgaaagaatcttagaactagaaagacggctaggcattatttaattcaatcatttcattttagagattaaaaagactgaggactaaacagcttaaaatgacttgcttagccacaaaaggaaatgagcagcactagatccggggctcctgcctcaagctccaaagctctctccactagagtgcagcgcttcccctactgtactagtttaaatctcacctttcgctttgatcaaagtcatctctatggttactatctggcaacaaaatgaagggcaaaaatagttaaaatgcaaaatactatttaatgacagtcacccattcacatttggcaattacttattaggtcacgtggacttgtggttccattaaagtgtgggntttaatatntggggnatttcttaatttcaggaggcctgggggtatttaaaattggccatccatacc

SEQ ID NO: 376492 - DNA, 282 bp, Homo Sapiens
  misc_feature (234)..(234): n is a, c, g, or t
gtcaccacaaatagttgaaatttaaagccagtccaatactccccctacatagtccaacttttaaagtgacctattccttaaaggggtctcttttgtttaagctgttaacaatgtaaactgttttacatttcacttgctctttgacattaaccataagaggctgaaggtgaccaaaagaaatgaaaagacattaagccaggtacagtgttgtgcactaccagctactcagaaagntgaagcaggaagatctcttaagctcaagagtttgagatccctgtatct

SEQ ID NO: 376493 - DNA, 486 bp, Homo Sapiens
  misc_feature (436)..(436): n is a, c, g, or t
  misc_feature (453)..(453): n is a, c, g, or t
cctacacactccacaaacgtcctggccatggctggacaaaccaccacggctctcttgaccatcctacaacctatccatccagaattgctcccactctgtctgtgcctatatctcttctgggtcacaaactcccacgggccttatcttttgattaattcagtattttattttcccctattataataccacaaagatactcagggctcaaaaatgtcttagttgatgctgacagtaatggaaacacatgaggattcatatgaattaagcagcaactatccagatgctgaaaacaaaactgggcccagtggcttgcggattctcatgctcaagccctggctaaggccatggaatgtaaaacattgttaggccattttacaaaaaaactcaattaaaacgtacaaaataaagtgaacgcccaaaaggaaaagtgatttgnaaaatgaactggttagnacttacagtaattactagagattactaccaaat

SEQ ID NO: 376494 - DNA, 476 bp, Homo Sapiens
  misc_feature (24)..(24): n is a, c, g, or t
  misc_feature (38)..(38): n is a, c, g, or t
  misc_feature (45)..(45): n is a, c, g, or t
  misc_feature (68)..(68): n is a, c, g, or t
  misc_feature (114)..(114): n is a, c, g, or t
  misc_feature (121)..(121): n is a, c, g, or t
  misc_feature (174)..(174): n is a, c, g, or t
  misc_feature (196)..(196): n is a, c, g, or t
  misc_feature (230)..(230): n is a, c, g, or t
tccccaaaggaaggacattttttnaaatgccatgtatngcaccanattgatgcatttgccatccgtcncacttaattattcagcccttacgatttagatgtaaaaattatatgnaagggcnaaatttagtttagatataaagtaaaggaggagggtgagatgcctttcctgcanttccttgatgacagtttgtggnccctacaaaaataaacaaaatgaataaaaagggntcaccattcaatttgagttccccagggggaagtgcatgtataatgaaatgataatggacttcaatgaagaatgtcatcaattatgtacatatgtattttcttttaatacaaagtgtaattttgtgccagtgaaatggagtctgaatagttatgtgtttcttttatccctggaaatatttattaaactttatagtttatccgagtatgttggatgctttgacaataaatgactattttcttcaaagc

SEQ ID NO: 376495 - DNA, 285 bp, Homo Sapiens
ttatagacctataataatttcccagggatataaaaaaataaagcttctacctttgaattgtaataataaaagataaacagacttgaaagcatatattatatctgaaaatgtcaggtaaacttggcttataaattaaaatataaaataataatacaatttgttcaaataagtaattaaagcttacattgtaaaatgaatatttagagagattgtgaaacctgagtattttacccaatcctctgaaattagtccctagcatcagaattaaagaatctgaaaaatcac

SEQ ID NO: 376496 - DNA, 386 bp, Homo Sapiens
  misc_feature (371)..(371): n is a, c, g, or t
ctagaaaagaatctgagtttgatccacagggctgtgagaagccatcagagcttttgtcttattcatttaccatatgtctgtcaagtacccttcagtgagtctggtatgtgtcctgtggaaatattttttacctccaatttttattaaattatggacaaaaaaagtaagagagccagatgggaaagaagtagtgctttggccatgagtcaaggcatgctctgtgggcatgagtacagccttgctagtgtggaacttgtgttcaatgtagtttaaggccttaccatagggagaaagcagggcctctaggagacacagtgccccacccttccacttcagttgggccccagggagggtgggctactctggggaanggtgaaggtctgacc

SEQ ID NO: 376497 - DNA, 357 bp, Homo Sapiens
gtaaaagaaatatatcatataaagaaatgcatgtttgctaaaagtcttttaaaattacatcaaaacaacattaaaacctgttcactgagaagagcctattgaatttaattcctgttttgaaatacctagttaacaattcagaatattgccttgtgaggtttgaatcaagatgtgattgatgtgtagagccagatagagtacatgactccatctctatctgccacgatcacaatttagatagagtcctctgatcggctgtttgatgtaaatggaccccctttaaaatagctatacaccttaaaattatctataataaacagttccccaataaccattattattcgtaaattgaaatgc

SEQ ID NO: 376498 - DNA, 557 bp, Homo Sapiens
  misc_feature (23)..(23): n is a, c, g, or t
  misc_feature (41)..(41): n is a, c, g, or t
  misc_feature (51)..(51): n is a, c, g, or t
  misc_feature (97)..(97): n is a, c, g, or t
  misc_feature (116)..(116): n is a, c, g, or t
  misc_feature (134)..(134): n is a, c, g, or t
  misc_feature (163)..(163): n is a, c, g, or t
aagaagtaataattatggggaanggaataaaaattaacccnttaacccccnggggaacctcggggccttcctgaacaaaacctgtgcaaaaaattcnaaaggtttggcctccatcnagtgtgaaactcccccantcccccacaaaaaacaagtgcccttgtcnaaggcctccttgtagtgaggccccccccgggttgaccggtgagacctcataagcccccccaagaaacccctgaagttcccctgatggaaattattttgttgagattgagtttctgacatgatgaccttcttgggcagtttgctttctcttgtgttcctgcccataaaagcagtgcttgattttgctgttcaccttttgtaaatagatggcttggccctccaggaatatatcaaagcgaacttttcggattattgtctcatgaaaacaagcaggttgttgtgatgaacttggaaagtccctgcacctagtaagtcttccaccaactgctggcggaagtggctagcagagattataattggaagaaaaaaaaggttaccgaatctaaaatgttgac

SEQ ID NO: 376499 - DNA, 392 bp, Homo Sapiens
agtaataatactctgtgttctataatttgccacagtcacctcattttgcaaataaaatgactacacaactttcaagtactctaaagcgtcttaatttttcatgcctctgcaaaaaaatactatattgttttgctagactctttggtaggacagcttttacctaatcctgatttttttaagacaaactgaacagcctcatctcatttctaagttgattttatgacaaacttcctagctgcgtatgtgctgagattacgctagcagttttgcaggtgttcaatctgtcagtcatactttgtttactgcctacaaatggggggtggggaggaatgaatgcaacaatctatttcttcagttgcatttgagggtccccacagaaaatctgatttgcc

SEQ ID NO: 376500 - DNA, 540 bp, Homo Sapiens
ctaagagtccatgggcatcttggacttccggctgccagagagctgcacgggtgagagtccagggtaaaaggagtgaaaaggagttccccttcaatccttgggctgaggaatttggagttaaccttgttagaagcagactcagaaactaccagatcatctagaaagggtgtttatccccatctttgggggcatacaggttattctccagacaaagcgatacccaaccatgtcttgaaggatagtcagagttagccagatccagaaggatatgaaggaagaagaaaagattgtgtgcagattcttggaggtgcaagaacacctcagtcagctagggaagggtgaaagctcagtgtggtcagagggagacttgcaggtcaggaagttagaaagatgatactggttaaccactgaatcctgaaggctcacagcatggaagggtctttttttctgtgttaaagaattttattttatcctgaagataaatccatggtaagattttaaaccaaagactaatagaaccagacatattttagaaaggtc

SEQ ID NO: 376501 - DNA, 400 bp, Homo Sapiens
  misc_feature (373)..(373): n is a, c, g, or t
acctttctaaaatatgtctggttctattagtctttggtttaaaatcttaccatggatttatcttcaggataaaataaaattctttaacacagaaaaaaagacccttccatgctgtgagccttcaggattcagtggttaaccagtatcatctttctaacttcctgacctgcaagtctccctctgaccacactgagctttcacccttccctagctgactgaggtgttcttgcacctccaagaatctgcacacaatcttttcttcttccttcatatccttctgggatctgggctaactctggactatccttcaagacatgggttgggggtattcgctttgtctgggaggaataacctgttatggccccccaaaggngggggggattaaacacccttttctagg

SEQ ID NO: 376502 - DNA, 476 bp, Homo Sapiens
  misc_feature (24)..(24): n is a, c, g, or t
  misc_feature (36)..(36): n is a, c, g, or t
ctgacagcacctggaaaaagacangcctagcctccnaaaataaggcctcaagccagcctacatgtattgaataattgtttcctgtagatatcaggaaaatggcactaatgaaattaggaactaggaagaaatgtgatcattagcatcatagttcctgaaccctaatacatatggaaaaaaatgggaggatggaaaaatcatgtgggtaaagatattgatgtttatggaagtaaaaccaagatagagaaaatgtgagaccagttagtccatcgggctcaagtactctattaatagaaggtaagaacatgagttctgatcctgggtaaagcagttagtgcctctctattcctcagtagtagactgaagaccaaatgacttgcaaaagtaaactctttgggtgttgcagggaaggggagtaagtattgagcatgaaaacataaatggatctgaaaagtaatcattcctgtaggaaaaca

SEQ ID NO: 376503 - DNA, 266 bp, Homo Sapiens
  misc_feature (49)..(49): n is a, c, g, or t
  misc_feature (55)..(55): n is a, c, g, or t
  misc_feature (66)..(66): n is a, c, g, or t
  misc_feature (129)..(129): n is a, c, g, or t
  misc_feature (138)..(139): n is a, c, g, or t
aggcaaacaaataaaacaggcaaacttttttgcccacatgtttgctagnaaatgnttatactttantggagtgacatgaagtttgaacactaaacagtaatgtatgagaattactacagatacatgtancttttagtnntttttgtttgaactttctggagctgttttatagaagatgatggtttgttgtcggtgagtgttggatgaaatacttccttgcaccattgtaataaaagctgttagaatatttgtaaatatcaaaaaaa

SEQ ID NO: 376504 - DNA, 444 bp, Homo Sapiens
  misc_feature (100)..(100): n is a, c, g, or t
  misc_feature (193)..(203): n is a, c, g, or t
  misc_feature (301)..(320): n is a, c, g, or t
ctgggcatgaaggactcccagatcctcctctccccattcaaaatagggctgggtcttcctactcctccatgccccatctccacccgggtcattgttcagntgcccccacggaatggggacaatttgcatatatttgggaggcctccctattctttcccacagcatgggcagaccccagaatgagactggggtnnnnnnnnnnncctggcataggtgtggtgtccatagcaggggtgggtgatgggggcttccagaggggggtggaacaagatttgagaagatgtcagtttcatacatgttnnnnnnnnnnnnnnnnnnnnccaacactccctcctccacccagggatgacggcacccccttttgtgaacccaaactgcagagatgggcacggaatcctgcttcctggtgtttttgtcttactctgtctgcagcaaggcgcctgg

SEQ ID NO: 376505 - DNA, 580 bp, Homo Sapiens
  misc_feature (545)..(545): n is a, c, g, or t
gggaacctggggaactgaagatctttctgcccaaaacaagctggtgtgagaaagggcacggttcctagacatgtgaacaaaaacaagccacttgaggggaactctggacagctttctttgagaggaaactttgccaaattcctagattcaggaaaagccaatgaataaaagtttgactctcaacaagcttatatcatagggacatgtttttgaaaagttgtattgggaccagaggaaatgttttactacctcactgattctcagaatagaagaggtttgttttaaagtatttatttgactagaaaggcatttttacatgcttgaatacactatacatttgcaaagaaagttccagtactgcaaagtgattctaggatacagtgtcttatttaatagccacatatttaaatgttcttttgttgctccatccattattacatcctgtgtttgggttgtgccagcccttattgcagagttaaattagtccaactcttagtcaccagctggggtcacacgggtggctggggaaagaccaggagggggcnggggaggggtggccccgtggtaaaatccttccagg

SEQ ID NO: 376506 - DNA, 418 bp, Homo Sapiens
  misc_feature (13)..(13): n is a, c, g, or t
  misc_feature (26)..(26): n is a, c, g, or t
  misc_feature (52)..(62): n is a, c, g, or t
cttactatgagtncaagggacttaangggctaaataaaagtaaaaatgaacnnnnnnnnnnngtgaatgcttctagatttccttcaaacagcctcttttatgacttctcttctttttgttccttctactttatgccttacttctcttctcacaccagggcaggcagtatatagtctagtaattatgagcacatgcccagattgggctcaaatccctggctagcactaccctgtgaccctaggcaagttccttaacctctgtgcctcaatttcctcatctgtaaaatggaagttaatatgtatctcatagagtagatgtaggattaaacaaactagtacaaagtacatgtgaaacatctagagccccatctgttatgtaataagtgctcaataaataataaatgccattatactgaaaa

SEQ ID NO: 376507 - DNA, 518 bp, Homo Sapiens
  misc_feature (352)..(352): n is a, c, g, or t
  misc_feature (413)..(413): n is a, c, g, or t
  misc_feature (420)..(420): n is a, c, g, or t
  misc_feature (475)..(475): n is a, c, g, or t
  misc_feature (485)..(485): n is a, c, g, or t
ccgggaatcgggaaaggggtggctgtcaaacagtcttgacaagcggctgaatgtgactgtgtcggatttggaaagtgcagcctgagaatttgaaatccattcactccccacccccaagcgttttttcatgtattcgttcattcagcacaccttgaatgaacactcttttatttgctacctattcagggacactacacaggcccgtgaccatcacacgcccagcctggccccgtggtgtgcctgagcagaggactgttggcagatggttcacttccaccctccatgataaatgctgagaaaagaaagatcaagggcttcagagcccactggagggaattcatacagccggggncccagggaagctgcttaaggaaactgcctgggacggcaaggttggcctggaccacgggggnacggggnagaaagggacccagaggagcttgagggattcctttgcttgttgggaagggcaccntatgagcttncgttgaaagttcagagttcaaaaagcaaacccg

SEQ ID NO: 376508 - DNA, 421 bp, Homo Sapiens
  misc_feature (93)..(93): n is a, c, g, or t
aggcctcccataaagggaaaattccccaaagactatgaattaattattccaccttaatgtcctttaaaaatgtggaagtataatttgtcctcnaaaaaaatggaagtataaatgtaccccaagcatacttaaatttatatttgttaatatttactcccttttatattgatatcttgaacaagtaactgttttgatattgatggagtaggatttgtgatgcttttcctagttctgtattcccataaatcattctttattaaaagtagcctaattcaatttcagtacttatattttctattgaaataaatcttctcatatcttgtacagtatggtcaaatggtaccaaaaacaaatgttgcattatatcaagaatatattgttaattttctgattaaaggaaaaaattaaccaacaaaaaaaa

SEQ ID NO: 376509 - DNA, 438 bp, Homo Sapiens
atgagacactgtttcctggaataaatagcaaagccaaagaactgcaaacttgggagtggatatatggcaaaactcccaaagtttagtataaatacttcctttcatgtgttatatgaacagtcacacttggaaattaaagtattcatagacataaagaatggaagaattgaaatttgtaatattgaagcacctgatcattggttgccattggaaatacgtgacaaattaaattcaagtcttattggcagtaagttttgcccaactgaaactaccatgctaacaaatatattacttagaacatgtccacaagaccacaaactaaacagtaaatggaatattctctgtgaaaaaattaagggaataatgtgattccaagtaaatgtcttaatacagtttcaattagaaaataaaatgtctcatacttgcacattgtatgtc

SEQ ID NO: 376510 - DNA, 336 bp, Homo Sapiens
  misc_feature (195)..(206): n is a, c, g, or t
aatcaatcaaatggtgaacagcccacaaccaaatctgaaaatagaagtgaggggatataattggcttataattattggtgaggtagagcaaaggtttaagtaaagtgagtccaatgcatttcttcagtgaacgttgtggactaccatgagccagaaactgggcattatgtcttccaagaaatgtaagacagctgnnnnnnnnnnnnaaactttgaaaggttgtattatacatttgttcagataatctgtttccacgaattgtcagattcacaaaacagaacttgtaggaagtagaactcagagaagtaaaatgaggtatcttcatctctattttta

SEQ ID NO: 376511 - DNA, 268 bp, Homo Sapiens
cctcctcaagggtctaactttacccatcataaaataattttggtgcaagggtagtggcacattttatttatttgggataccatgcagatgcaacctagccccattctttatgcaaagtagattatccgtgcatttcttctgcattgatagtgaatccttactggggacaactcattccatttggcaacaatctttaatggacaggcaatatataacattgctgaaagtctcttagcactaatttaattttataaaaggatcattacca

SEQ ID NO: 376512 - DNA, 281 bp, Homo Sapiens
  misc_feature (269)..(269): n is a, c, g, or t
gtctctgcctctgatcatcatagtgtcttcccatgtaccctgacatgtggaaggagaaggcagacttacagggaggtcaggacttgaggagtgacaaggtgggagtctctggttcctgattattccctgcatactcttcacagggagctgaagaaggctccatcttggatgtactatctgttattgactgaaaagctccaaaaaaggtctgttctcctagccaaaacaccaggaaagtgctggcgtaaaagcagaaaaccttttttggncagtaccttcca

SEQ ID NO: 376513 - DNA, 452 bp, Homo Sapiens
  misc_feature (125)..(257): n is a, c, g, or t
  misc_feature (376)..(376): n is a, c, g, or t
  misc_feature (409)..(409): n is a, c, g, or t
gctgaggactggactctgaccactgttcttggttctaaatttcttcccgaggcccaagaggaggtcacgtccaccagctaaacctagcattcttttctgctggctacaaaatttttagacaaggnnnnnnnnnnnnnnnnnnnnnnnnnnnnnnnnnnnnnnnnnnnnnnnnnnnnnnnnnnnnnnnnnnnnnnnnnnnnnnnnnnnnnnnnnnnnnnnnnnnnnnnnnnnnnnnnnnnnnnnnnnnnnnnnnnnnnttgcctgtgacctctgcctccctccctttaaaaactcctacctgtaagccattgaggccagggtctaaatcatgagctgccctgcaatcggtgcctcaatttctctcgccgcaaccctnaggtcagccttggttttggttctggttgcaatnggtggacccaaggttttgttcagtaacagtcagccttaggggt

SEQ ID NO: 376514 - DNA, 537 bp, Homo Sapiens
ccgcgagggttcagatattctgaactgacctctctcttctgcagaggggtcatcgcatactcacacactgcatggctccccctgcctccatcacatttctccactgagcagggcttcccttgcccacagaggtgggtgagggtagcagcattggggttacggctgtggtttctttcacttattattagaataatagtcactggtgagacctgaggtagagatggagccgcctctgaaccaagcccacttggtttctttactgcactggttttcatgagaaagcaatttaatattaattctttaggatgttccagcttccctcagtgcattcccttgcagccagttttgctatctgcttagcgacctgcccattgtcattgaagtgtgggcttctggggggagcgtcatatcttccattccatctcctgctttagggaaagacagtttttagtccaggggttttttcacccaatgaatgggatttcaaagccaagatgctgcagttgaaagtgtcagggagttcttatacaaagagtg

SEQ ID NO: 376515 - DNA, 943 bp, Homo Sapiens
  misc_feature (98)..(98): n is a, c, g, or t
  misc_feature (142)..(142): n is a, c, g, or t
  misc_feature (183)..(183): n is a, c, g, or t
  misc_feature (590)..(617): n is a, c, g, or t
  misc_feature (846)..(846): n is a, c, g, or t
  misc_feature (866)..(866): n is a, c, g, or t
  misc_feature (886)..(886): n is a, c, g, or t
  misc_feature (907)..(907): n is a, c, g, or t
  misc_feature (913)..(913): n is a, c, g, or t
  misc_feature (927)..(927): n is a, c, g, or t
aagcccaagatgctgcagttgaatgtgtcgggaagtctctatacaaagagtgaaaagagactttagcatgtgaaccaaacccaaataaatcttcctgnaaccatacactagagggggaagaagaaccaaccccataatcggnacaacaccggatctgccttgccagtagaagccactttgaanggtaatttccacagtcccacccagactagttttgccatagaacaaacccacagtaagtcggcaagcagagctttcctatccttgttggacccactagaaactgtcccagctctcttaagcccgcttcctgcagcagcatccgtagaatttttgtactacacccaatacccagactgggaaggcctatcctttcagtgaccctgctaactgctaggatgaatgtatagtaacatgtacaggctacattgtaaacagcacaaaacagaagctgacatgtgtggttattctttttaagagaattataaatactgtaatatataattttattttattggcatgcctttttgtaaatacaaattattaacttattaaataggaaatggcttctggcttatgcattgtcatgnnnnnnnnnnnnnnnnnnnnnnnnnnnncttcttagaacttagatgctgtcagccaatgtacatccccaaaccagacagacagacaaaaaattttttattgctaatggtcttttccaaaacaacaaaaaatatatatttttgttccaatgtgcaataaattctaaccacgtctatggcaaggatttgggctaaacttaataattgttcttagggtcttgaggtgggggcaacagaggctgtaaggatccccgcccangtacaccctggtggcttcangctaggtggatggtccattnaggctactggggggcatggtngatggngggttttttctggnggtccttaccccgttt

SEQ ID NO: 376516 - DNA, 406 bp, Homo Sapiens
aacagtttggaaggccccagaagaggataggaaaatgtgggaaagtttggaacttccctcgagacttgttgaatggctttgacccaaaatgttaatagtgatatggacaacaaggtcccaggcggaggtggtctcagagggagatgaggaatttgttgggaaatggagtaaagtcactcttactatgcaaagacactgcaggcattgtgcacctgtattagaaacgggcatcagataggcgggaaagagggaaaataagaatttttttctagagttccctacagatctgtggaactttgaacttcacagagatgatttaaggtatctgacacaagaaatttctaagcagcaaagcattcgagaagaagcagagcatacaatttcagaaaatttgtagcctgatgat

SEQ ID NO: 376517 - DNA, 491 bp, Homo Sapiens
  misc_feature (56)..(56): n is a, c, g, or t
tgttgctgaagccacccagactgtggtactttgtaatggcagccctagcaaatagncagtgatgaataaattagcagatttgatgacattgatatttccattatttattttattcaacacctctaataatctctattattatattaaacatttactctgtattaagtatagtattaaatgttctatatacattatctgttttattcactcaagacaattctatgatgtaagtactactattttccacattttgtatatgagaaaatgttatatcgatagcttgaagggtttgaagaacttgtctaagttgacacccaggtggggaactgtgatctgatcctaggtcatctgaatccagaatcagctttctgccaccattatcaagggacattggatattctgtagcatttactaaaatcaagaaagttaaaaaaatataaacatgagagatctatgatgcccatcttgaggagttcacaatccagttgata

SEQ ID NO: 376518 - DNA, 290 bp, Homo Sapiens
tctcttcagtctgtcttcttgggaagttctggtgtgagcccaaccaagactgcatccctgtgatacaagtgtgagttacatcatagtctatttcttgctaaggccaaagtagaggaagtcgaggtaaatttgcaaatgctatttgagccagtggccatggaaataattatgctcacattcttcacaacagaaaacgcaagagcatgcctcacatgcctcacatcctgtgggcagctccactcacagttcaaactctctgcagcatctgttcaccagctgcacagcaaatc

SEQ ID NO: 376519 - DNA, 439 bp, Homo Sapiens
  misc_feature (17)..(17): n is a, c, g, or t
gaattatatagtatgtnatctttgaaactggattctttagtttgcataatgttttcaaggttcatccacattgtagcatgtcagaaccttcttcctttttatgtgcgatggtatggatatagcacattttatgtaagcttattcatcagtagatgggcacgttgtttcctctttttggctgcttgaataatgctgctgtgaacatgtgtgtaggtttttgtgagggcgtaggtttccagttctcttggggatatacctaggagtgggattgcagggtcatattaattccgtgtttaagtgtttgaggaaatgccgaactgtttcacaaagaagttgcaccattttaccattttatgttcctaccttctttcatttttaagtctttctgcagtagccttaaatagttaagcataaaggggggaaaaagggaagagaagcc

SEQ ID NO: 376520 - DNA, 489 bp, Homo Sapiens
  misc_feature (29)..(29): n is a, c, g, or t
  misc_feature (58)..(59): n is a, c, g, or t
cggcaaacctatgacctgccccgtcaaanccaaccctgcccacctgtcacctaacaannctgtaacctgctccccacatacaaacatggtcgtccatccataaatccctataggtattgttgagagcaggaggaaagtttggttgagtgagtgagagaccttacccaagccttcctgtggtctctaggagtcatggcagagttcgctgacactggtctgcttttaaccagccttgccagtgacctttcaaattccctgaggagcaaaaggccaaattgaacctgaaagaaaacacctctcagtgttgactgagttgcagtagaaaatggacctgacaaaacgttagtacactttctcaattgggttagctcaaaatatgttattaggtctttttccttgttccatttcttgttagtttactgctggggatatgaggtaaaggctgtttaatttgtatgctgtgtagttgtcagattaaatcatcaaacc

SEQ ID NO: 376521 - DNA, 378 bp, Homo Sapiens
  misc_feature (17)..(17): n is a, c, g, or t
  misc_feature (29)..(29): n is a, c, g, or t
  misc_feature (39)..(39): n is a, c, g, or t
  misc_feature (344)..(344): n is a, c, g, or t
  misc_feature (363)..(363): n is a, c, g, or t
gtggaggtgctggattnatgacccgattncagagagatnctgtgtccagcaccatcactcagagaaaaaccgtggaagccaatttgcacaggcatgggaagttttccatcaaccaagatagcagaaacacaaatgagaatagatgagcgcacccaatgctaggaagcagagagtctggggcaaaattccaaaaagccgagccacttacagaaaagtttcacaaggtggggaggtattgcaacaccgagaggatgatttggattcttacgtgcagccgttggatgccagaaagatagagaagatgaagatatggtcatacatttctgtcttgagaagaagatctnggtagtaatacttcagggnttttgtagtcttccc

SEQ ID NO: 376522 - DNA, 474 bp, Homo Sapiens
  misc_feature (56)..(56): n is a, c, g, or t
  misc_feature (63)..(63): n is a, c, g, or t
  misc_feature (129)..(129): n is a, c, g, or t
tgcctgcatgaaggggcaggaatgcccaagaaaatgggccctgcctgtggataccnaaatggnaatttattttatatgatttgggctactgaaagacctagcattaaggggagacctgtcctaagtatntcctgtgtgctttccagttaaaggtgttcctaaaccttaaatgcttcttgaaagagaaatagctgccttgagtttagcaccactgcttccatctgttttgagtactagctacctttctagtgtctacataattttgcaggtttcctgttctacagttgttgcccttttaggcactccggtgatgtggtttaaagtaggtgcttcacagtcagaaagatacagttttttccaccctgagcatctccacaatgtgccgtgggcaaatagtttaaaccgtctgttccctaccttctacagctgtaaaattgcggtaataagagtatttttctcattgatttatcatgc

SEQ ID NO: 376523 - DNA, 322 bp, Homo Sapiens
  misc_feature (14)..(14): n is a, c, g, or t
  misc_feature (27)..(27): n is a, c, g, or t
  misc_feature (242)..(242): n is a, c, g, or t
ctgaaattacggcnctggcagtggtgncgagtcttcacaaaggtgaagccgcttctacaagtgactccccaggaggaagaacttcaggccaaagatgaagagctgttgaaggtgaaggagaagcagacgaaggtggaaggagagctggaggagatggagcggaagcaccagcagcttttagaagagaagaatatccttgcagaacaactacaagcagagactgagctctttgctgaagcagnagagatgagggcaagacttgctgcttaaaagcaggaattaggagagattctacatgacttggagtctagggttgaagaag

SEQ ID NO: 376524 - DNA, 420 bp, Homo Sapiens
  misc_feature (388)..(388): n is a, c, g, or t
caaggctgaacgtccaggtcacctacacgcccgtgatcgtgatgcgcggggctgctggcctgcagcgggagatccaggagggtgcctactccgggagctgctaccatcgagatggcttacggctgagtatacagtttgaggtgaggcgggtggagctccagggccccacacctctgttctgctgctggctggtgaaagacctcctccacagccaacgcgactcagccgccaggacccgcctgttccttgccagcctgcccggctccacccactctaccgctgctgagctcaccggacccagcctggtggaagtgctcagagccagaacctggtttgaggagccccccaaggctgtggaactggaggggtttgcggcctgtgagggcgnagtactcccaaaagttacagttaccatgagcc

SEQ ID NO: 376525 - DNA, 238 bp, Homo Sapiens
gctatttcagttagaggttagagaaaataaagatgaagttttttcccttccaagttcactgacaactcctttgaatcctaaccacagacccttactccaggttaagaatcctttattaaatagcctaatgagtaactaatggaaatactgagcttacttataataagacttcacagtctaaaatgtggcacttttttttctttgctttgacatggaattgtatgaatctattatccag

SEQ ID NO: 376526 - DNA, 599 bp, Homo Sapiens
  misc_feature (218)..(343): n is a, c, g, or t
  misc_feature (445)..(445): n is a, c, g, or t
  misc_feature (504)..(504): n is a, c, g, or t
  misc_feature (546)..(546): n is a, c, g, or t
gaagtttagaagtagtagacatctgctgtttatatttcctagaatatgtttcacttcttttgacacctcccattttctttggagtaccactcctctctttccgttcagtccttttggttggtagactcttggtcaaaaaaatctccaatttgctgctcaagaagaattgaccagtctccggaagggccttaacagggtcctcctggttcaagacagcnnnnnnnnnnnnnnnnnnnnnnnnnnnnnnnnnnnnnnnnnnnnnnnnnnnnnnnnnnnnnnnnnnnnnnnnnnnnnnnnnnnnnnnnnnnnnnnnnnnnnnnnnnnnnnnnnnnnnnnnnnnnnnattgaatctatccatacatacatacatacctatctgtattatatctctaaaaatgtcaggtactagaatccataaatacagactagaaatttagctatggcntaaaatgatgggtcacctttttaaaaattctaaaacaattacccgtatttttgatgccngtgtgagggcctaaatatttagggaagggcattgggtcagcngggcttttctgcccccggtcatatatggccttttggatttccttccattttct

SEQ ID NO: 376527 - DNA, 455 bp, Homo Sapiens
aggctcttacaggtgaatcatgtccgaaccagagactttgactgctgccttgttgtgcccctcatagcagaatccgggaataagctggacctggttattagtagaaacccactggcttcacagaagtctatagaccaacagagtctaccaggagattggagtgaacagaacagtgcttttttccagcagcctagccacggtggtaatttggagacacgagaacccactaatacattatagcaacgctttttataaagcaggacaaaagacaatatctacatggtgctaaaaatcctttaagatttctgtgacctttgaagcacagataatcaatcaacgtggcattaactgcaagcacaggggtcttttaaatctctctcatggctcatgttcacttcccttttcaagttgaagaggtttcttttttggtgaccactatggtatatgggtgggca

SEQ ID NO: 376528 - DNA, 287 bp, Homo Sapiens
ggctttttaaaatcactgtttattccatttggtagagggttttatttttttccatacaaatatttgaacaattttgaattccccaaaaccatacatagacgataaataccatgctattaaagtattaaatttgtacaaaaatactttacagtttaatacttgtttgttacaaataaaaatacatatttaagtgactcatgatcttttttccttttttcttaacatgatcctgctttatactttcttgcccggggggttctgaaatgtgattgaaataatattttttt

SEQ ID NO: 376529 - DNA, 541 bp, Homo Sapiens
gggaaaggaaatcagcaactcttcaatcccaacctgcgctgtgattttagcctccatgagattggagtttccatcccatgttggtttgtcccagtctaacgtgttgataaaatgtgacttgacggttgagacaaaaaatacagtagagacagaaacgaagcccagaacaaagatgaaacttgaattaccatctcagaagtcaagctgatggagtatgtgataaagtgaatgtacatgtatatacacacacacctccatatatacatgtgtgtatcagtttggtaatatgcaggtaggcattacatgcatatgtatgtagacatatgcatgcatgtatatgtaaaatatatacttttccaagacaaaatggaacatcacttctctcttctagtttttctgaacactggctgggaaatgtaaactgtgtatgcatataagtatatgctttatgtatggcatatgtatgtaggagatgtttatatcctatccgtctggcatcactctccctcaggtgttggatgtccacctgccatgaccactg

SEQ ID NO: 376530 - DNA, 355 bp, Homo Sapiens
cctctctgctgtctccttaccctgctcccctacaccatgtatttccttcctttaccatttcctccttggaattgtgctgtgtttcgttgtcctggaggacagaagagcaggttaaggcatgagcatgtgtgtatcactttgaagaaagagaaaccaggtattctgctacagtttggagaaaaacccaatgaaggaagaaatgaaagctggctctgcagagtgccttaaaaatgactttaattaggaaattctgagttgtcagtcttcagatgttacataaactcaaacagatgttgcatttcacttctctgggattaaaaaaagttaaatacagtgtgtattcaacaacaacaac

SEQ ID NO: 376531 - DNA, 335 bp, Homo Sapiens
  misc_feature (235)..(235): n is a, c, g, or t
ataaggctggcgcaggtgcttccctaaagctcaccttccctggagatgacatgcatagaaagaggggttgggactttttacttcactaggagaacttgtaacaccatggggaagtcagctgaaacttgtcttgttttgccaggaaaggaagtagttgcctttggtcatccatctgctaatagtcacagaatacagtgaaatgacatagttttgggttagattttataatgcaaangattcagaaccaaaataatttcataccccattttttcacagaaatcttatatagtaaatgtatcaagtttaataaagcatctcattgtcaaataaaaaaa

SEQ ID NO: 376532 - DNA, 514 bp, Homo Sapiens
  misc_feature (29)..(29): n is a, c, g, or t
  misc_feature (78)..(78): n is a, c, g, or t
  misc_feature (89)..(89): n is a, c, g, or t
aaaagccattaaattaaagtgccccctcntttaaagtccagatgaagttccacatcccccaaagggtaaaaacccccnaaagtataganagataaaacaatccaatccgcccatagccagagttgtgaaataaataaattgttacctatgaagtaccttacaataggggaataaaattacctatttttgttattaaatcaaatgtgtaaggcttatttcatgcatatgaggtgtcaacttgacagatgatgagtaattatgactaagaatctagcccttacttttaaaagctgacaggatttcccttgctcagttagaaaacaaaaatattcaacagattctgtgataagtaattaatcgtttaggtttgacagttgattattgtgttctttgcatattcatgtaaaactgatgtgtgaatgacattgcagtgagctagattaacggtgattatagatacagtagcctgtcaaagaaagatgtcctacattaaaaaaggtgacttattaagaaa

SEQ ID NO: 376533 - DNA, 551 bp, Homo Sapiens
  misc_feature (47)..(47): n is a, c, g, or t
  misc_feature (94)..(94): n is a, c, g, or t
  misc_feature (97)..(97): n is a, c, g, or t
  misc_feature (156)..(156): n is a, c, g, or t
  misc_feature (477)..(477): n is a, c, g, or t
  misc_feature (499)..(499): n is a, c, g, or t
  misc_feature (513)..(513): n is a, c, g, or t
cctactgaagcagttggagcttgaggccatggctcctaaagctttgnaacccatgcagcaactgaaatagagctcagcattcattcattcattnacncactcactcaatagttattgagcacctccaacatgcgaagacccgtgctaggtgctggnggatttggcagtgaaccagagatgaattctacattgaagccacttagtaaatatttgttaaacagatagacgagtggatggagacatggatgcattagtagtgagtggataatgtctctatctgtggcatcccttctgctctatgttacctcagagaaaaatctcacttctttactctccgtgatcccacaactgttctgggatgggggggaagtcccagggaagtttagtcttcaagtgggagagtaggggagagagggaaactaaaattcagagggggtagtacccactttaaagggcatcccatatgatggagtgccnggggcccagaaggagactgggnacccattgagtccnaggggtctccaggggtctttcagacatcctatgggggc

SEQ ID NO: 376534 - DNA, 531 bp, Homo Sapiens
  misc_feature (27)..(27): n is a, c, g, or t
  misc_feature (34)..(34): n is a, c, g, or t
  misc_feature (56)..(56): n is a, c, g, or t
cctagaaaaaaccttatgccaaggatnagggtanccctagagaaagtcccagaaancccacacaaatgacccaccctgttgattcccaaggcggagaccagagcactttcctccttttaaaaacagtatccctctcctctcacctcaagcttagcctgctcaactgaacagcccaggaaaagctgctggtgtttggtgatttgaagggaagggggtctgaacctcagaagcttgtcacttactggggaccctgatgagtttctctctgttgtcctgccttatccctaatctagctccctgatcatttgaatgtaaccctaattggacaagaattttctccctttcagtatggacaaaatcaacaaccatgaatcagagacttttagaggatgggtagtgaagtgggggaagaacagaacattgtagagtgaggggcagagaggcaggcagtgggcatgggtaggttctggttttgtgattagtaatattatctctttaattgaaaaaaataaactcatttcagattcgtat

SEQ ID NO: 376535 - DNA, 448 bp, Homo Sapiens
  misc_feature (29)..(29): n is a, c, g, or t
  misc_feature (360)..(360): n is a, c, g, or t
  misc_feature (427)..(427): n is a, c, g, or t
  misc_feature (437)..(437): n is a, c, g, or t
ttttttttgaatatggaggttcaattgtnccagcaccatctgttagactatcctttctccactcaatttcctttgaatgtcaaaaaaattaacaaatcatatttgcagaaatctaatctctggactatcttgttccattgatctgtgtgtctgtcctttgtcagtaccacagtcttggttactgaagcttcacattaagtcttgaaatcaggtcatgagtcttccatgtttgtcctttttcagaataattttggcttctgtaatcccttgcttttccattacgttctagaatcagtttgtcaatctttacaaaaaatatagctgtgattttgattgaaattgtattcatctgtgtaggancattttcataaggacctgacattttagcactactggggcctatcaatacattggacacaggtatatntacttagggncatctctgaaa

SEQ ID NO: 376536 - DNA, 405 bp, Homo Sapiens
  misc_feature (18)..(18): n is a, c, g, or t
  misc_feature (74)..(74): n is a, c, g, or t
  misc_feature (154)..(154): n is a, c, g, or t
  misc_feature (162)..(163): n is a, c, g, or t
ttgtgcctgacctccccnttagtcctgatgagattgggagaacaatgcccagattgattcattttgtttttaantgtcgtaaagacccattgaggggtgaggagaatgttgtttgaatttgacattttgaactgggaaacagcttggaaatgtnggcacaanncccaggtaaataaactaaatatacttatgtgtgtatgtatatgtaagtctaattgcttaaaggtatacctctaagattccaaattgattgatgctagaaggcagctgtttgaggaccagaggcatggcttatatgcaaaatgatatggaaaaaaaataattggatcacagaaagacagtattatttaatcaaaatttgaaatctggcagctctcctaggagaataaaatactattggattgc

SEQ ID NO: 376537 - DNA, 485 bp, Homo Sapiens
  misc_feature (400)..(400): n is a, c, g, or t
  misc_feature (451)..(451): n is a, c, g, or t
caacagtccagtagctgccttctgcctctagacttttcccaaaggtatgccttaaaaagtgattatttgcattttgaggacagagggcatagattaagccaatgcccaaggaggacagtctttgggtcttcagaatattatcactgatgaatagcgcacatgtctagctgcctctagctcacataaagccttataaaagcataaccttttttagttttagtttgagaaagagcatcttcttgctctctgtggtaagtgaaggaaaatacctgcctttgtgcagcttcccagagaccgtaagttcttcatttgcctcttggtttcggttcacaatctcaaatacatatatgtatgtgatgctcccatgctagggcaagacacccacacattttaggctctngacggggcattgttgggtgaaggccaaacatggccaggaggtttagtctcntggaaggggatgtgggatgggttatggaacaggt

SEQ ID NO: 376538 - DNA, 402 bp, Homo Sapiens
  misc_feature (119)..(119): n is a, c, g, or t
gcaatgtggtaatggggacatgtggcatccttccaaattttccccaagtatcccagcctgcctactcatttataatgtagattgaccttgagaacattacaataaagaaatccaaggtngtcccccctcatttggaataataataagccattgaatattcattaaagttaaagagcagccagaaaaccataagcagcatcctgggaactataacatacttagctcttcaaatcatttcttgattacaggtaagtactaggtatttggagactaggacatataatggtagtaactatcactggtaattttgtagcatgaataagtgttcaattttccactaacttcaataagaaatcagaatgatttgtaaataaactatttattcctaaaaaagaaagcccc

SEQ ID NO: 376539 - DNA, 566 bp, Homo Sapiens
  misc_feature (29)..(29): n is a, c, g, or t
  misc_feature (39)..(39): n is a, c, g, or t
  misc_feature (46)..(46): n is a, c, g, or t
  misc_feature (97)..(97): n is a, c, g, or t
agaaagcaacacccccaagtttcacctgnggaacctacncccagtnagccccttccagtgtggtcatccccgggcagagatacctatagatttaacngcctaacattgggaattgggaaacctagaatcctcctcctgagattcctaaaagcagggtgtttcctgctgcccatccttgctgcccctttgcccacatgcttcttcactttatgtgttttcaaatcacagttgccccatgggtgtgtctgatgagggaaaggtcacatacctgtaccctagctgcaaaagagctggagatttcaggctcgttgttaagggtctgcggattcataaggtcagaaattccatgaacacagaaaaagtattcaaaaggtactcagcagctagtgaattcaactggggacagttggaacttcaggatgtttgatgactggggagagggtctttgttaagaaaaagcaataatatgaaatattaatgctttccaattttatcaagatgatagcatttttgtgtactgaattacatgcatattacatacataataaaattgtaaaactctgtaa

SEQ ID NO: 376540 - DNA, 522 bp, Homo Sapiens
  misc_feature (19)..(19): n is a, c, g, or t
  misc_feature (24)..(24): n is a, c, g, or t
  misc_feature (40)..(40): n is a, c, g, or t
  misc_feature (303)..(358): n is a, c, g, or t
acgggttagttacgggtantgganaagaccggggcagcangacaactaaccagataggcattttccacagtataatcaagattccccataaaacttgggcaaggtgtattacccagtgaaaatcctaaagtttccaacttgggaaggaatacccagtgatgggtaatcccctcattctgagaacacagtcagaatatcttggagctaccaacattgtgcttggctcttaatgcgaagttttcagggttggggatgtgctaaaaacacttttaaccaatcaatctgcaaaccattcttacacgnnnnnnnnnnnnnnnnnnnnnnnnnnnnnnnnnnnnnnnnnnnnnnnnnnnnnnnnaaaaaccacctcttggaactaagggtaacaatgattcctggtcataattttacctattcttgtcaatacagattttaaaattaattttgagatttatctattgctaggcctaacagttttcaaagaccacaacgtaacattaaaattcctgacctttccagttg

SEQ ID NO: 376541 - DNA, 260 bp, Homo Sapiens
ggatgttctgtcaggctgcgagagtggacctgacgctggaccctgacacggctcacccggccctgatgctgtcccctgaccgccggggggtccgcctggcagagcggcggcaggaggttgctgaccatcccaagcgcttctcggccgactgctgcgtactgggggcccagggcttccgctccggccggcactactgggaggtagaggtgggcgggcggcggggctgggcggtgggtgctgcccgtaaatcaacccatcat

SEQ ID NO: 376542 - DNA, 466 bp, Homo Sapiens
  misc_feature (447)..(447): n is a, c, g, or t
aaatcttaacaatcaatgaagggaaaactggtggaaacataggaggaaaaatactgggataattttcatcacaaagtattggcattaacattggttagaataggggagaaactgcatgacttgacaactggacattcctgtatgttgtatgaggccctgtcttaacagaaatagtgatgtcatcatcatcctctcttatttggtcttgaattgccaccaatcggataaaacctttgaattatttaactcaatatatgttaagtttctactatgtgctgtgtattggtactataaatatgaataagacataagatattacattcaaaaacatcaggaatacatgttcttttaaagtataccccaaaacatttaccatgtgttctggggggcgcatgtttagggctgggtccacaaatcaagtctcaagggtttccaaagggttggaanccttttggggttggattta

SEQ ID NO: 376543 - DNA, 454 bp, Homo Sapiens
gtccctcagaaatacataaaatttcctggccctcccatggaggtgtgaatggttaattttatgcatgtccaacttcgctgggcccacaggatgccccccatatatgatcgaacattatttctggttgtgttccatgaagctttttctggaggaaattcgcatttgaattgatggactgaataaagcagattgcagtccccagtgtggatgggcttgatccagtcttctaaggacccaaataaaataggtggaggaagcttgaattttctgcctgactgtggcgctgggacacccatcttctcctgcccttgaactgggactgacaccatcagtgctcctggttctcagacttcggacagcagacttgggccttctcggcctccattattgtgtaagccaattccttataataaataagggtttatttattgataaatccttataggttgattat

SEQ ID NO: 376544 - DNA, 363 bp, Homo Sapiens
caaggagaagcctcatttcacattagcatattaaaggatctgataaatcctgcagatgggagacttattttgtttaaccctcggttccccagatgtgttgaaacccgaaaccctcttggctgaggtctggctaacctcttgcagagctattgcctcaaagtacacagttgtggaaccccgcccaaaccttcacctacccagactgctgagtagctcatttggactctcagagtccaaagctgctcacatttccagtccccgagggtcttgttctgtccagcccaggccaagagggaagctgtgcatctgcccggtgcagccttacacagcagtccagggcaggggcaccccacacccacacac

SEQ ID NO: 376545 - DNA, 811 bp, Homo Sapiens
cttcaccatccaccactctattcaggtaaaacaatgaatgggccaccttagcaggagcagatttttcccagaagctgctgcctcttcctgaggcagaaaattggattactaaggctcaaaactaaaagagatgtcagcattgttgggtagaaatgtcacctatatgggatttgcctgttttaataactttgtaaggagttcttgctcttctaggggtgcctggcgcaaccgtgggcaagttactgctcctctttaaacctcgtggtggttattgaaacagatttattagaaggagagggtaggtgcagagctggagagccatgggtgaggcagcttgtgacctgcctagcagccgctgaccacctctccaacagaagcctagtcctgttcagagcagcactgtcactgcaagtccagccccctttgccaggggctccattccacccctttcctgcagggaggggtgccatgagtcttgcttttggctcatacaggagagagggaaggctgccaggcactgcttgtatccctgctgataagaggagggagtcactccaggaataagacaaaaggagaggaggaggccatcacctctggcctcttccatcgtacacttcctgtctctggtttaatcatgatgcatggagctacaacagccatcttaggtccccgaggtgcccagcatcacgtaaaacatcgatatgctaagaagaacaaaaagagcccaatctctgatgttattgagctcctgcatgaactctggacctgcctgcctcagacttctgtgaaagaataaaatttctttttgcct

SEQ ID NO: 376546 - DNA, 430 bp, Homo Sapiens
  misc_feature (68)..(68): n is a, c, g, or t
  misc_feature (73)..(73): n is a, c, g, or t
  misc_feature (363)..(383): n is a, c, g, or t
cggaaaagtcacctaccctccactatgccctgcctctccctgtctgtaaaatggagtctgacaatagnaccgnaggaaattagagtgggtgtgaggattaagtaagttaatatatcctatcacacttggaacagcattcccccacgtagtcacccattcaataaatattaacaatgattgctaacaaagagtaaagctccttaagtatgtcagtttcattaggtttgtattttggcttatcagtgtacaatctatatcaacagtaaactacaaccctagagccaatggttaccatgacctgtttttagcaccagcctgttgctcagaatggtttttatatgtttaaaagggtgtcttttcttnnnnnnnnnnnnnnnnnnnnnggagcagaatatgaaacagacacagcatgtggcccataaggcttaaa

SEQ ID NO: 376547 - DNA, 404 bp, Homo Sapiens
  misc_feature (42)..(42): n is a, c, g, or t
ttcctgcccaaatgcatgcaaactttcataacactggtttgntgagtggaaggttggttttgagtgaactgtttggctcagattcaaactccaatgaacaaatacttccaagtttacttgctgaatttcccatacagagaagttcttccactgggcttgccagaggatttgaaacagtggtgagccctggaaggaagggaatatttactggcccttggacataaacccagcacagtaagactcacatcaggctgaaggcagtgcagtatgaaccgacctgatttgaggaagtttgctctgggactcctctgagctactaaatgaggaggagaaggactaatgggaacacactgactccatcacattagaagttataataaacatttagagaacaacctcaaaaa

SEQ ID NO: 376548 - DNA, 460 bp, Homo Sapiens
  misc_feature (11)..(11): n is a, c, g, or t
  misc_feature (27)..(27): n is a, c, g, or t
gccttaagggngtttaaaaaataaagnccagctgaaggaaaaacagtagttgaatccataaaactggaaagaacaacttatataagtgtgtaaggaactcaagagaaaccagtgagcgagcctttatgtgaaccactgaaacaatctcttaaaaataaggcaattcttttcctaagtcaaattcattagcaatggaacataatctacaaaattattttctcccatgatttgaatgtccatagtctcagttttttctgggcagtcttcatttattccttttgtcccacctaataatagcccctttcactctaaaaagtatcccagtttggaaaataattatttggtcattctacccaactccactggttaccccaaaacattattttgaataatcatcttttccaggagaagttacaggcctgaggaacttcaagtttttagagaaaacatcacaaactgg

SEQ ID NO: 376549 - DNA, 253 bp, Homo Sapiens
  misc_feature (20)..(20): n is a, c, g, or t
  misc_feature (55)..(55): n is a, c, g, or t
cctcatagggaatcaagtantttagctaggtgatgtcttgcaagtacgttccacnttgttacaatctactatctgtatatactatttgtatcttaattcttttatgagatgttctgtaacatttttctcactttgacaaatgtttttagactgtacagtcaagatctggcgcttgggggtaagtggaatgatttgctaatattgagaatctgttggatcaaacataataaactttttttgagatgtgaaaaaa

SEQ ID NO: 376550 - DNA, 499 bp, Homo Sapiens
  misc_feature (363)..(371): n is a, c, g, or t
  misc_feature (477)..(477): n is a, c, g, or t
aggagataaaggatgacaaactctcaaacaatatttatacatttatttactccagggtcaaatccaatcctttggaagtagcttctctagtttattttatttgtcccagagctctactcacacttaggacccacccaaaaattctcaaaaacgtaatatggattctgcctcatctgatgctatttctggcagtgggttgtcagccatactctgcttcattccactgggtgtccttgctagatggggagtgagatgtggagcagggaggagctttggattctgggagtggaggtggcaagggaaaagtctcctagtctcctgtgatgttcctgcctccagataggaatagcaaaaacaaacaannnnnnnnngtgtattatgcctccatgacattgtttacattctatggagggagcatctgtctcctttcttaggacttggaactgtgggtaggaaaaagcccccttcttcttcttnctatcctacttaggaattgggt

SEQ ID NO: 376551 - DNA, 472 bp, Homo Sapiens
  misc_feature (111)..(111): n is a, c, g, or t
gaaagcccaaagccactgaggtaattaatggaataattgattttgaacttgggtctgtctgatttcatgtgcaagattatataccttagtgattttgattttaaagtttantccttaacattttaaacccagacctattaacctcctaccctttataacccacagatacaaagaactgtatcatttattttctgaatataaaatattaatggtcaatataaaaatacaaaaatagagaactatatacaacagaaaagcaaaattacccactaataacattttgatttatatccctttagacactgtttagagtttatacatatatgtaaatatgcttgtattttaacaaaattgagatattatataaactgtttgtagcagggtgtttaaaattttaacaatatgttatggatatctttctgtgtcaataaatgtgtatttacattagagttccaagcatttgaactgaaaa

SEQ ID NO: 376552 - DNA, 448 bp, Homo Sapiens
  misc_feature (404)..(404): n is a, c, g, or t
  misc_feature (413)..(413): n is a, c, g, or t
  misc_feature (420)..(420): n is a, c, g, or t
  misc_feature (431)..(431): n is a, c, g, or t
gcttttttcttaagaaattttattttctggaatctaaatatgcatgtcagcaccccaggtaagtctattattcttctattagtaattgtagtatgcatgttatgttagcacaatgaaaaggcaaggaagcaggtaaacatccttcattgaacatccctctttctcctctcatttccattcataatttttattcagaaaaattttcaaggaaccttaaccaaagaatgctaccaaggtgtgaatgaatgaatataatttgcagcaaacaatttatatgttattgttggtttctctactagcaaaagttttcaacttcatacttctttttctatcagtagagtctaaaccattgcagggtttaatgatgccatgtggatctcttacatctgtttttatctcatttnaaaggtttnaaaggtnaaaatcctttnttcccctattctagggt

SEQ ID NO: 376553 - DNA, 429 bp, Homo Sapiens
  misc_feature (387)..(387): n is a, c, g, or t
  misc_feature (392)..(392): n is a, c, g, or t
  misc_feature (404)..(404): n is a, c, g, or t
gcctcagtctgtagcctgctagggatgcacggccacgctcctgtctttgaggtgctgtcagaacagctttctcctcggtatcccgccgggtttgactggctagtgggcttgctttggtttggactcacccagatctagtgcagggacacacacgggggccggcattgctcctttccgccatgtggagttggccggggcagaaggacattgctctggtttggacagcccggccctgggggtggaaataggaaatgcctgcgtccctttaccctgcccaggggccaacacccccagcctagctacggcttcccccaggtgaacgaggtggtcttcagccccggggagtcccacttgcggcacatgcagtgaggatgggaagtttgcggntattnggactttgcagncatggaagctttttgattccaattt

SEQ ID NO: 376554 - DNA, 549 bp, Homo Sapiens
  misc_feature (466)..(466): n is a, c, g, or t
cgtcgatgggtttgtgggcgcagggcaggagcgaaggcggtactggggctagtcctgttccctggcgtctgggcctttctgctctccgcaaggcgtgggtcgcgacctgtcactgccagccgtgcgctcgccctctgcgccccgtctcgtggtcactgccgccctccctcccgccacacctgtgatgatcgctatggagccgcgcctcaggtggcattactataaacctaagaggagaggcgcccgttcgaataagggcaaattatttagtattttgtcttcaatgttcctggcagcttaaagtaccaactgggacacttgtcactagtttgagaagtgcagccatagtgacctcttttgaaagatgaatcaatgaattaagtcatttctgagaaaccaaggaggccttgttgaaggaggctggccctcctgtgggcaggtaacccaacctccactgccctttggnaacaaggacaaaggctaattatttttcccaagaagggcctttttcagggaatgatctttccaaccccgttggactacaacaag

SEQ ID NO: 376555 - DNA, 271 bp, Homo Sapiens
  misc_feature (19)..(19): n is a, c, g, or t
  misc_feature (223)..(223): n is a, c, g, or t
gccatttaacatatatttnttgaaatctacttgatgcaaggcactgtgctagatttggtaggggatcagacatgaaaggccacccctgtcttctaagagctcacaatttaatgggtgggggagggctgaggaggagggggtgaagccaagtccacaaacagctctagtgcaaggctgattatagtgaatgccagaaaacagacaaggtaatgagatgggggantgagaaaaaagtgccaacaaccaacggaaatacaaactggggtgggac

SEQ ID NO: 376556 - DNA, 446 bp, Homo Sapiens
cagtaatgtaccaagtcagggaaagtaggtggtgggggtggctacaggctgggaacatggtgagttccttggtattgttttaaaattctctgcagccaatacactccccttattgtctgtatcttgcctctgccctgatcttagccatccattgcattattatgaattggtaatcaacaactctgatagaaattgacttgctattttctctaattgggctggttatatattgccctattgtccttagcgccttttcgattctcaagaaggttgcataattccagcagccttccatgtaaatggcagtagtatagagtagctgagataaagaatagtctccaggggactgactatataatataggaagttgaagcagtagggtagttcctaaatgttaataaatttcccccagtaagccctgtaaaaggcagggaattgggagcggg

SEQ ID NO: 376557 - DNA, 543 bp, Homo Sapiens
  misc_feature (430)..(430): n is a, c, g, or t
  misc_feature (467)..(467): n is a, c, g, or t
  misc_feature (488)..(488): n is a, c, g, or t
  misc_feature (499)..(499): n is a, c, g, or t
ctgagggctctttaaagaatggatttagtaatttctacattgtactactttctgaaatattactgattttcaatgaagtaactaagccctagccaaatgttttagtttatttctttctctctctctctttttgtcaatctgtaaatgcgtcagaaaaacgtttactgtaatgttagactgtgcatgtgttggcattaaaagtgtggttttgtccttacagggaatcaaatagaagcaaaattatagttaattcttggtttctgtggtaatggggaacagactgagtttgtaccaataacacttgaaaaatttattttagaaattaggttgaactttgtccttcactaaacttttgccagaaaatccacatgcagtcaagttgttcttctttctcttcttccgggctctgccccaagctggggtagagaanggccagcagggaaagaagggtgggattcaaaagaccntggcccaaatgtcgtggtccngaggtgggtcntcagctgttgactagggttatttgtgggaaagggaactactcaa

SEQ ID NO: 376558 - DNA, 496 bp, Homo Sapiens
  misc_feature (90)..(90): n is a, c, g, or t
  misc_feature (278)..(330): n is a, c, g, or t
  misc_feature (344)..(344): n is a, c, g, or t
  misc_feature (405)..(405): n is a, c, g, or t
  misc_feature (430)..(430): n is a, c, g, or t
  misc_feature (441)..(449): n is a, c, g, or t
  misc_feature (452)..(452): n is a, c, g, or t
  misc_feature (466)..(466): n is a, c, g, or t
tcagaatgcaaagccatcctggcccaatgggaagagtttcagattgaagatcctttcggaaataatgctttctttgagcacctgcctgtnatgcagtacgcacctggcagaaggctggcttactctcatgcactcactgcccctctctgcctttcagaaactgccctaatctgccccacatcccatgccagcctctcctctccatttgctgctctaggaagatggatcatcttctgtccccccgtagccctgcctctgggcccaggatctactcttgnnnnnnnnnnnnnnnnnnnnnnnnnnnnnnnnnnnnnnnnnnnnnnnnnnnnngggggccccctggntggtctggcccatctgaagcctttcctccccaaactctcttgcatgtagactctttaactntagcatggcattccctgtccttctnttcctttgtgnnnnnnnnnctnttctccaaatagangggtcagcttttgtggaagcatgggatcaa

SEQ ID NO: 376559 - DNA, 328 bp, Homo Sapiens
gagatagggtcttgccctgtcacccaggctggagtgcagtagtagcttgcaatgtttacgtgtgggttttgctgttggaataaaatttttttaaaacttaaggaaaacttcacttaaaaacgtaatgcccagagcttgttttatcactgctacagaatgcaattcatttcctgttgtacattcatttcatattctccccaacacaatggaattgagcagtatacgaatcagcataaatatgcacaaaatacacattttcctgatttttacagttatttttgaattaaaatctggttacataaatacttcaaactttcttccacagatt

SEQ ID NO: 376560 - DNA, 443 bp, Homo Sapiens
  misc_feature (329)..(329): n is a, c, g, or t
  misc_feature (429)..(429): n is a, c, g, or t
cactttgatgccagaagtacttaagaagttacacggcactaattttatgagttgtatgcctaatttcaatttctaacctatttgacagtttcttttaggtcagcctttgttggtcttccatgtaaatacaagttggtacaaatcaatagaaaccattttacctacataggcaaagtaaatgtgtgacttagagactgccagatttatggtgcatctacctttttatccatttgagcttgcttttttatgtttgtgtattggttgctcctgacactatacatttcaaaattttttataacttgaaaaacacttctgtgctaccactcagntctgatcaaatccttacattttgcaacactcattctggaattttcaggtaaaggaatacaccattacaaatttaaagggttaaagggcccccttttaccnggccccttcccccg

SEQ ID NO: 376561 - DNA, 489 bp, Homo Sapiens
  misc_feature (460)..(460): n is a, c, g, or t
  misc_feature (466)..(466): n is a, c, g, or t
caaaaccaaaaacatgtaacaaaatatttatcaagaggaaaaaatggctttcagtgaaggaaaattagtttgtacgctgcttttaattttttaaaagactttaggacatcaattttctgtataaatatgttagtaaacttttttctgtatgcaaatatctatttttgtaatgtatctgttttactgaaagcaaatcgtattcactgcctttgttatgtttattcaaaaatataagataatattttaaattatccagctattttgaccagttgcttccttatccaaggtccatttctgtttctccctgcttataaggatcgtctgttacttcacctcatggaattatgtgttaggcaggataatttaaggtgaagggatcttgaggagccgcaacaggacagtggaacatctgtctttcatacattttccatttaggggcccaaaaaggggtggcggcccnttcccnttttccgggagaccatgtggggg

SEQ ID NO: 376562 - DNA, 520 bp, Homo Sapiens
  misc_feature (21)..(21): n is a, c, g, or t
  misc_feature (433)..(433): n is a, c, g, or t
  misc_feature (506)..(506): n is a, c, g, or t
cagtgtgtgaattgttgatgnggttcagtgttagtttcagctcggtctttcagttgctcctcctaaactcaaaaatgcctaagagacaacatgcaaaagttccctgtggcctcctcacttatcctcccagcccagaaacaatttaacaagtgggatgacagagagaggggcacaaggagaaggacaagttcacatccttctgctctgaaggctttaaaacaccgcaattcacacaagcgcctgtaactgtaaccccaggacaacagcagttgagatggagaaacccagcagaaccacctcggaggagaaactgtctcaggattgtgttctaacgactcctaagcagggttcacccaactctgatccccgcacgtggccgagggcaggacgcctcctacatcttcatgcctggctgcctcctgcccaaactctnactctcactctgctagcaaagtacgcgctcttgtgcaaaacaaaccaatgatcatcagccttggttcaaaatnacttttggaaagca

SEQ ID NO: 376563 - DNA, 364 bp, Homo Sapiens
catatatataggcgtgacacctgcgcccggcccaaaaaatgtaaatcataagataaagcattggtttcttgtgaacagctacagctaccttcatgcggggttcttttgttttagaacctgtgagttccacagatagttgctcctttgagaagctggctggcctggttgatcacatagcctgtagttgcaaaaatacttaacaacgataattctgcactcctaagaagttttacttgaggatgctgtcaactttgctgatagttttggtagccataaaaagaataagcagaaaacccagttaattagtactgtatttctggtttattctagtgattgagttgatgtcaacagcccctgtccctta

SEQ ID NO: 376564 - DNA, 493 bp, Homo Sapiens
  misc_feature (21)..(21): n is a, c, g, or t
  misc_feature (48)..(48): n is a, c, g, or t
  misc_feature (58)..(58): n is a, c, g, or t
  misc_feature (109)..(109): n is a, c, g, or t
tacacccttaaatttcaaatnatttaattggatcctaaccaatggaanccccctgagngggataatatcccccttcattttaccagatggagacaattggggccttaanggttaaacaaatgatttcctaagctcattcagctaataaacggtaggggactgcttgacaccagtccagttgaccctcaaatccatgatttctgccaccatattcacagaaacaagacaagagctgaaaatatagcctgactcttgaaacagtcaaagaattgtgtatgtttatgaaagttctgattaataagatattctgaggacaaaagacaaggcatgggtagaggggcaatgtgtagattagaatgtatcacaatgcccactaaatagtaaaaccatagaaaatgaaatttaatccttactgtgtagaatatttagagtagattgttttttcctcggtgtcaattactattacaactatcaaagaatgaaattaaacaag

SEQ ID NO: 376565 - DNA, 387 bp, Homo Sapiens
gtctcagttcctctgggaaggtaagagcctaactctggtgggcaagtgggcaccttgctccagtttgcaataattgcctttctaatttcatggacattagatgccacatggatgaaagaggcaaacaccatatccacatcccattctaccccaaacttcagatcctggatgtccttttctgacatggcaagcaggtccacagtcaccaggaaggtctacaccctttttgctgcccaaggagccataattttccattgctatcaccagggaggtcagtacctttctgctccaacttgcagagaaataagttatttaaatctattaggatctttgctgcccctttccacttacctttacaaaatgttctttgttagttccagcttacaa

SEQ ID NO: 376566 - DNA, 369 bp, Homo Sapiens
  misc_feature (194)..(203): n is a, c, g, or t
  misc_feature (344)..(344): n is a, c, g, or t
ccacacagaggggaacaacacacactggggcctatccagagggtggagggtgggagcagggagaggatcaggaaaaacaactagtgcatactaggcttaacaccctgggtgatgaaataatctgtacaacaaccccatgacacaagtttacctatgtaacaaatctacactttcatccctgaacttaaaagttnnnnnnnnnngtgattggcacaaaatgacaggatggataacccaagggcagtagaaatggaagatgcgaacatttgaagacaaccttcataaaagtactacttacaaaacagcatgtagaaaaggaaaatagtggtttcctgaaaggaganaaaatgtgcttactaatcacttatc

SEQ ID NO: 376567 - DNA, 442 bp, Homo Sapiens
cccttttaacctccctaacaaaactccctaaacacccatttacgactttgtccatcaaatatggtccaacctaagcttggtttggcatggctcctacttccctttcacccttcccacttaggcagtgtctcccaagtcccactgcagtttctatttgtctcctgactgttactgtatcagttcttacctaaataacataacaactgatctccctactttttgcctatgccctcaaatgtgctcattgttgatctatctccctgttaggtgttctttttctcctctttagaaagcagccaaggaaaccagggttctctcaaagtggaaaatactggaacttatgtactgttatcataatgatagttggtgttttgaattataagaatgattccaggtggtttctaaatcatccaataaagctgtattcactctgtaaaaaaaa

SEQ ID NO: 376568 - DNA, 575 bp, Homo Sapiens
acgggtagctccaggatcaaaccttagctatcagtttaccctgccctgggggctgcagctgcgaccacatcccagggtcgggtttaaagatgaactgcaacaacaggagcgtgagcagcttggctgatttgaagcccaagctctctaacgtgcaggagcttttcctacgagatgacaagatccacagcatccgaaaatcgcactttgtggattacaagaacctcattctgttggatctgggcaacaataacatcgctactgtagagaacaacactttcaagaaccttttggacctcaggtggctatacatggatagcaattacctggacacgctgtcccgggagaaattcgcggggctgcaaaacctagagtacctgaacgtggagtacaacgctatccagctcatcctcccgggcactttcaatgccatgcccaaactgaggatcctcattctcaacaacaacctgctgaggtccctgcctgtgggacgtgttcgctggggtctcgctctcttaaactcagcctgcacaacaattacttcatgtacctcccggtgggcagggggtgctgggacc

SEQ ID NO: 376569 - DNA, 500 bp, Homo Sapiens
  misc_feature (44)..(44): n is a, c, g, or t
ggtccacagaatttcctgccaggcgccccattgaagagtccaanccctttcccccagggtacccgtggcagacctgtgcctgttggttgggcaaggaaagatcccctaaaaggtccatgtcccccttagcactctgtgtattgagaaaagatataaatgcaacagaggagcaagttttggaagaaattgtgaaacacgttagacagaacattggccctgtggctgcttttcgaaatgcagtgtttgtcaaacagctacccaaaaccagatctggcaagatcccccgatcagctttatctgccattgtcaatggcaagccatacaagataacttctacaattgaagaccccagcatttttggccacgtagaagaaatgctgaagcaagcataatgagtttgtcttattcctattttgagttgatttaatttcttaattgaaattaaattatttgagttgtttctcagaaataaatatttcagtagaaattacttgcaaaaa

SEQ ID NO: 376570 - DNA, 431 bp, Homo Sapiens
  misc_feature (13)..(13): n is a, c, g, or t
tagcctttaccanataccttagtacagaagcttagggaggggggatagaaatcagttacaacagtaccctaaacttcattggcaaaattccctctcagggaacgtaatatccctaataatgcactgaagtaggtaccagctgattttcccagatattgaaagtttgctgcacaacatcagcctagagataaagggacatgtaatgtccagtaggaaacaaatcagtgtatatcatttacacgacaataaatccttcatttcccttgaaataagatatgtaaagtagcacttagtttaatacaagttttgttctgctgtagacctagctgtaaaaagccattcatgcaaaaaattacttccagttttagctggatgtttaaaggacacttctcctgaaaacaagtccctttcacttagggaagggaaaaaaa

SEQ ID NO: 376571 - DNA, 442 bp, Homo Sapiens
  misc_feature (379)..(379): n is a, c, g, or t
  misc_feature (427)..(427): n is a, c, g, or t
ggcatctacgtcatccaccagggctgaaggtaaaaagtttaatcgagccaaactcttgaatgtgggctatctagaagccctcaaggaagaaaattgggactgctttatattccacgatgtgacctggtacccgagaatgactttaacctttacaagtgtgaggagcatcccaagcatctggtggttggcaggaacagcactgggtacaggttacgttacagtggatattttgggggtgttactgccctaagcagagagcagtttttcaaggtgaatggattctctaacaactactggggatggggaggcgaagcgattgacctcagactcagggttgagctccaaagaatgaaaatttcccggcccctgccttgaagtnggtaaatattacaatggtcttcccacacttaggagacaaaggcaattnaggttgaaacgcaga

SEQ ID NO: 376572 - DNA, 385 bp, Homo Sapiens
  misc_feature (42)..(42): n is a, c, g, or t
  misc_feature (222)..(222): n is a, c, g, or t
  misc_feature (226)..(226): n is a, c, g, or t
  misc_feature (282)..(282): n is a, c, g, or t
cattggtccccctagtgctgaaagcccaagacccctttattnagttgaacgctaatactgagccctggacttagttcagttctatcagctttaaattataaataagaacatatcttcatcagaagacccaacttgcacattaatcccaagctatcattttcccttttactatgagaaataattgctttataatgcagattcccaatgccacagtccataaangatngccaagcacacagacaaaccccaaatggcgcaagtttaacatcaaattgagccaangtctatggccaccacagaattgagagttctggaatataaggtcatatctgaaaacaggtatttaaaaatttaattaggcaaggtgcagtggcttacacctgta

SEQ ID NO: 376573 - DNA, 505 bp, Homo Sapiens
  misc_feature (46)..(46): n is a, c, g, or t
  misc_feature (53)..(53): n is a, c, g, or t
  misc_feature (89)..(89): n is a, c, g, or t
aaccaaacccctaaacgtatgggtttaaacaaagggcctaactggncagcaangcccctcatctcctggggcaactgcagaatcagggnagggattcaaaggagggccatcagaagaaggaggcaacatcagtggatctttggggtctcaaggccccataccattgcaaagagacccacccctctgcagtgccccactcccatcccacagacccggcctttcctcggtgagtcagtgcccactcaagcccaactcaaggctaaaagtgtgtgatgatccttcccaccttcctgttcatccactgtccctggaattcctcttctaaaatgaggataccaagtccagaacagtttttggttattaacctataaaacctcaatgcataaatctttgttataaaattggtgataatatgatcataaatgtcacctcaagtgatactttaacaaagggtcattcatttctttatgtagtcttgagaaaataaactgttgaataaaaaaaa

SEQ ID NO: 376574 - DNA, 545 bp, Homo Sapiens
  misc_feature (254)..(318): n is a, c, g, or t
  misc_feature (414)..(414): n is a, c, g, or t
  misc_feature (516)..(516): n is a, c, g, or t
  misc_feature (522)..(522): n is a, c, g, or t
agtaaccaaatagcatttaatgaaataagagggcagaccctcatagctactgtatatttaatctaggagttactggagtgaatgtctatagtttgttttggagctaaactataaaagcaccacacaattaaagcatctttttgggagccacgattccagtgagtgaattcccatttgtatcaaagttccctaagatcatacacttacctcagaatttgccaagtaatagcttttatttttaaagacagggtatnnnnnnnnnnnnnnnnnnnnnnnnnnnnnnnnnnnnnnnnnnnnnnnnnnnnnnnnnnnnnnnnngcataagctattctgccacctcagcctcctaagtagctgagactacaggcaagtgccactatgcccaactaatttttttaaaaaatttaaagtagngaaaagtctttatttatggttgccctggcttgggtcttcaaagtcctgggccttcaagtgatcccccccgcctttttgcctcccaaaagtgctggggactancaggtngggagccacctggggcccagcct

SEQ ID NO: 376575 - DNA, 394 bp, Homo Sapiens
  misc_feature (359)..(359): n is a, c, g, or t
ttttttttccataacatcatgctacctagaagaaaaagaaatgaaggtaagcagtcagccaggaaagtcaggaaaaatgatatgctacttgtaaagagctcccctatattgtatcattctgaaatgtccaattttcaaagagtcagagtagtacagaaatgttcaatgttaaatcactactcaacataagcaatctgactttgatggttcacaagctcttccagatcttgtcgtgccttaaagttctcactaacaatatcaattatcagtgcactacagatatataggaaaagaaaatcccagggtaacagaaaagccagattcacctgcctccaagatgccggggcactgcacggttntttattcagtttttatttacatccgggttcaaggg

SEQ ID NO: 376576 - DNA, 343 bp, Homo Sapiens
agcaatcacaaactggaatatcgccttaaaaatcaaactgcacggagcaagctgaaactgagacaagattatatcttttaattgatctaaagcgttgtaaataaattgttctcgacatatctagacaggggttaaagggtttctttgacacattcggaaccgttcacccatgacatgtttccatggctcacccttggcatccatcctcggtgttagcagcagcgtttccctgcctcctgcagggatgacttaggaaatctagtgagtttcttgggtgtgatgccatttttattggccctttctgtgatcaaatcatatttctgtacattttcagtgggtaggg

SEQ ID NO: 376577 - DNA, 432 bp, Homo Sapiens
tattaaagtgaatctttcaaactgaaatgccagggacagtatatggtttcctcaaatacaaactaagaaataaagaacacccgggaaatgttacctacattgtccttaggtcaatatctttctgtttgttactcatttcttgttctatctcttttaaatacaattgtataagcaataattataaaattatttgatagcttaacaaaaaatatagaaagagaaaaagggaattttaaaactatgttagaaaataatctatttaacaatcacaaaagacaggaatggatgaataaagaaatttttaaaaataaggcacatagaaaacaaatagcaaataacagatgcaaatcctacttcatctgtaaataaactaaattgaataattaaacatcccaaattgaaggtggatattgaaagaatggataaaaaaaa

SEQ ID NO: 376578 - DNA, 465 bp, Homo Sapiens
  misc_feature (26)..(26): n is a, c, g, or t
  misc_feature (76)..(76): n is a, c, g, or t
  misc_feature (390)..(390): n is a, c, g, or t
agaatatcagtgtcctagtgcatggnacttaaacatgtctcaacaaacttgtagactccattaaagcttgtcttangtttgttagagcagcctgaacaaagtattgctaattgagtgggtggcttaaacaataggaatatattgtctcacaggtttggaggctcaaaatctgagatcaaggcatcagcagggttgattcgctctgaatgcggtgagagtgatcttacccatgcctcttccctagtatctggtggtttattgaccatttttgacattccttgccatgaagaagaagcattacccagagtttttccttcatcttcactgtattaggcagtgttctctaaagggacacaactaacagggatagatgaatatatggaagggggntttttattagggaatttgacctcaccacaggtcaccaagggtgaaggtgcccccaaaagggctgtcctgccaagc

SEQ ID NO: 376579 - DNA, 388 bp, Homo Sapiens
  misc_feature (38)..(38): n is a, c, g, or t
  misc_feature (96)..(96): n is a, c, g, or t
  misc_feature (147)..(147): n is a, c, g, or t
cagggaagaagccttccctgcccctttctaacagcttnccccgcgttgccgcagaacacacagtggatcaaactccccgggagagaaatgacctgnactcggggataaaagactgaacacccaatgcccaggccccagaaagagtanacctgaagacgacgtttgatcaaacttactatcctcattgtgtaattgtactacttgcctttatttctagagagctggcagatgctaatgttccacttattatgatacagcaaaaaagggcactgggattcatgtccctgagtctgggctttaattccacatctgctactaacttgtatgactacaaataatcctgatagttacagtaataataaaaaatccctttgggccgcgtgtggtg

SEQ ID NO: 376580 - DNA, 425 bp, Homo Sapiens
  misc_feature (311)..(311): n is a, c, g, or t
  misc_feature (328)..(328): n is a, c, g, or t
  misc_feature (382)..(382): n is a, c, g, or t
  misc_feature (404)..(404): n is a, c, g, or t
cttgtgttttaactgtttaaaattaatgagaagggcagaatggttgtcaaagcaatattgaaagccgggcagccaggaccgaataagcacaaaaatccctctagagtgttaaataaacagagctccagccctctccgaatccctctgttggttattgtatacattctgtaacagctctcagaatagatctgagagccagggaggcagagaggtttcagaattccaataaaggcctcaaattaaagacagcctggggcgaattccaggagaaaattaaagagaccctcaagcttaaggtgacaggtgacttncttctgtgtcacaactntcagggggtttagtgataatatgggcaatatattacaaagggcttttcttattnccccctttagggtttcaaaatnagggcatcttttcttcccaac

SEQ ID NO: 376581 - DNA, 411 bp, Homo Sapiens
tgcctgtaaatgcatttccaggaaagggcaggcctcccacatccccaggcagcactgtgagtcccagagcaggagctcaggcggtggggccagcgtgtgcactgcagcggctgctgtggggcagtgatggcatgggggtctcaacttcctcgggtggcagcacgccctttcctttcctgcacgtctgtcatcagcagcggccttctcatgtggcttctctgggcgtttttgttttctttggggtgtttttgcctcgggttttataccacccttgtggtcggggcttctgggtggaaaatgaggtgttcgctggcttcctgcaatgtggggcttgtccgggcctgggacgctgcttgcatgtggcgctgtgtgcgggcagtcttgcccaagcccttgccacctccaggggcg

SEQ ID NO: 376582 - DNA, 408 bp, Homo Sapiens
ttttgaatgaaaatactggtatatttgtataatgcaaagagaaatacagatataaatcctcaaaacggaaggtacattaataaaaatgtagcattataagccaaaaatattatatagtacttgcagaatttagtctttcagtttaacattataatgtctaacaaagaaatattatttaaattatagttctcattattaatttaaaacaaccatcagtagaacagcacagcttaacctagcaaacattttaaggaaatgctttgcttcctaggaaggagggatatcattatattccattcatttataccataaacaacagaagaacaattttcaaagtggaaattagtttcataagacagaataaaactgggcttctcaaagcacacgccatttccataaaattaactc

SEQ ID NO: 376583 - DNA, 458 bp, Homo Sapiens
  misc_feature (34)..(34): n is a, c, g, or t
  misc_feature (101)..(101): n is a, c, g, or t
ggacccccggttggaaaataaccagaggaaaatnaaaaagtttgcctttcctttaagtaccccgtaaagtttaagaaaaggttccatttccagtccaattnactgcccaaagttacctttgcccatataagcccaaagttacttagggtagttttaattattgcaaagttattgttgaggagctcaccttccttatattatggcgattgtaatctggaattctacatgctaaatgtaaggtatgtcccttgggcactctgctgagtgggaggctgggacctgggggtgagggtggaaggggagatgctgaatttaggcttctctttcacaaaaagcctcacatctagactcttgatattatcttaaaactggattataattattatatagttttatatttgaaaagtgttcattcttaaaacataaacatttaaaatacagcagagctttcatatttg

SEQ ID NO: 376584 - DNA, 531 bp, Homo Sapiens
  misc_feature (23)..(23): n is a, c, g, or t
tgggcaagatacatgtgaaatanggcaaaagcccagaaaatagcccccctattccaggatgcctgttacctgagaataaggaaaaatccatatttccagaaaatattccccatgtaaatatgtaccatatgtagtcctagtaaaagcaggccaaacacatatcctttcctgataaaaacatcctccctttttaatccctaccttacttggggccccaggtcagtataatttagtcaacttgaaaatttcggtagtctctgtttgcatggcagaaattctgcacatgttttatctgattcctgtgataacttaaaaggctcttttatgttaaaagagaggtgaatcttctttgacagactttgtattttccacttctaactgggcctctcttttctcaggatctatcctagccaaatatctcagttacatttaccatacagtttcctttgtgaaagaacagtaggggaggaaataattctctgctgtgtattgtatttttcaaataaaaatttaaaaattcaattgaaaaaa

SEQ ID NO: 376585 - DNA, 161 bp, Homo Sapiens
  misc_feature (92)..(92): n is a, c, g, or t
taaagatttaataggactttacatactttgagtatatgcagaaaggcttaattattttgctacggtttttaatttaatcatttttattaacntatatcaaaagctgggtagtaaaaatgtgataaaaggaagtaagatgtcaacatttaaattaagatggg

SEQ ID NO: 376586 - DNA, 423 bp, Homo Sapiens
  misc_feature (28)..(28): n is a, c, g, or t
ggggaacaagacccacgatatccatagnccccacaatttcccatttcctcccccgacttaaaaacaaacagaaaggtttaagtgtttaaaatgaaatcctacttagtatatgaaagacagttaaaaatatttaatatcattttagtttctcttatgaaacaattaagctaaaatactgactcattatatttttccttatcaaaactcttgaccatagttgactcctattcttttggatgttatcctatcctcaagctcatatcagctcagattgaaataaagtatttacatggggataagagtagacttcttaagactttatatttcaaataactatttttaagtaacttattaagaatttaggctggacgcagtggcccatgcctgtaatcccagactttcttttttgttgttaaaaatgtc

SEQ ID NO: 376587 - DNA, 429 bp, Homo Sapiens
  misc_feature (61)..(101): n is a, c, g, or t
  misc_feature (345)..(345): n is a, c, g, or t
aagagaaaagcatgtcccaaatccagcactctgatacagctgccagttgggcatagggagnnnnnnnnnnnnnnnnnnnnnnnnnnnnnnnnnnnnnnnnnctcagtgaaattaacaagacccaaaggtggtattgtctaggaataaaagggataatttttgttgttcacaaaagtaacttgtctagcaccacacatcagaaaaacacaaaaatagcacactctagttctaaacagctatgtctaaaatagattatatagtaaaaccggtattatacagcatattgtggatttgataaacagataaatatttgcactgagtaggctgtttataatataacatttncttatctatacagaatgaaagccaaaaagttaactgtatagagatgtgcagaacaacattaaatattatggctcaaaagcaggg

SEQ ID NO: 376588 - DNA, 416 bp, Homo Sapiens
  misc_feature (11)..(11): n is a, c, g, or t
  misc_feature (28)..(28): n is a, c, g, or t
  misc_feature (100)..(100): n is a, c, g, or t
caagagtaccncctcaatttggacgtgncctgaaagtttcccccctgaagtagattttgggctaaatgtattaggcatccttccatgggcgttgttgtgnccttcatagtatataatacccaggaggcttatgatgttagtttgttgatgatattaaacttgattatttggtaaaggtgtatttgccagatttccccattgtaaagatatctttttctcttttgcaatcaataactaagattctgaatatcttgttttctaatagcctttcacctaatgaggttagcatccacaggtgcatctttccagaatcaggttgttactatggtggttgtaaaaatgatgactctccatttctcttgttccctgtacactcattatttgacttccctttgtgaagaaaaactttccccccc

SEQ ID NO: 376589 - DNA, 401 bp, Homo Sapiens
  misc_feature (34)..(34): n is a, c, g, or t
aggggcccctcaaagggccatccttgggcctaanactgaaacacccaggttgtttccctctgaactttaaacagtgaacactcactcttcccactttcgatgctggggctgccattgccctcagtgaccactttgtcaagctcatttcctcgtacaacagtgaatttggctacagcaacagggtggtggcccatatggcctccaaggagtaagactgctcgacaaccagccccagtgagagcacaagaggaagaaagagaccttcagcttctggcagtccctgccatgctcagtcccccaccacactgggaatctcccctcttcacagtttccatgcagaccccacaaagagctctatcttgtcgtgtaccatcaataaagtcctctgtactcaaaaaaaa

SEQ ID NO: 376590 - DNA, 420 bp, Homo Sapiens
  misc_feature (32)..(32): n is a, c, g, or t
  misc_feature (57)..(57): n is a, c, g, or t
  misc_feature (82)..(82): n is a, c, g, or t
  misc_feature (113)..(113): n is a, c, g, or t
  misc_feature (150)..(150): n is a, c, g, or t
aactggttgtgcccctggcccaaagaaagccnaggcgtctaaaaccaaaaagtcaantgacttccgggaagtggatcttccnaggccataaagactcactccgaaagccagcnggcatggtgacccagctctgaccgggtggcttcttcntcgcaagcctcccagggcccgaggtgatcccggtggtgggatccacgctgggcctaggatgggacgtttttcttcttgggcccggtccacagggccaaggacaccctccctccagggtcctctcttccacagtggcgggcccactcagccccgagaccacccaacctcaccctcctgacccccatgtaaatattgttctgctgtctgggactcctgtctaggtgcccctcagcacgggatgctctttaaataataaagatggttttgatt

SEQ ID NO: 376591 - DNA, 383 bp, Homo Sapiens
  misc_feature (49)..(49): n is a, c, g, or t
  misc_feature (181)..(181): n is a, c, g, or t
  misc_feature (347)..(347): n is a, c, g, or t
gcaacgtcaaataaccacccctgaattcccagagaaaagtccaatagcntggtgggaatcaaaacaaggaaagaaaaagacaggacagttcggctgtaagaccctgagtaagcgctggtggagtgtctgaggcacagttggccgcagagatcttcctagctggaccctgccccctctggangaagtgattgctcagacctcaaggctccattcagatacctgcgcgaaggcctatgcctgaagactgggaggctacagcccacatgacacttccctgggccccgattgagatatctggtgagttttagcatccgatgcacgcacactcttatctggcccagccactnggagacttatttcaaatgaatcaccagagccatctt

SEQ ID NO: 376592 - DNA, 280 bp, Homo Sapiens
tacatgttttctgtacacttcatgagtagttgagattttcttgtattaaggttaatcactaaaaaggtgtttacttgggtttcgttaactaaaccccctaaagatgttttccattttattgttaaacacttggtgttagcaagggtcagcacgagaaaaggcccaatggcaagaatttctgcaaactctgtaaagcttactgaattcatttgtcatttattacattgctgagtggtgcttgaataaggaaacatgcaataaatttacttatttaaccaac

SEQ ID NO: 376593 - DNA, 576 bp, Homo Sapiens
  misc_feature (20)..(20): n is a, c, g, or t
  misc_feature (37)..(37): n is a, c, g, or t
  misc_feature (42)..(42): n is a, c, g, or t
  misc_feature (48)..(48): n is a, c, g, or t
  misc_feature (72)..(72): n is a, c, g, or t
aaaaccttaaatgggtttgnctttttaacttgaaaanggttngccaangcccttggaaattttccaaaaaanattgggttacaattcaaattttaaaaggggcatcctcccttgccaatcaaccgccgtcctccaaactggaaccccaggtccttcattcttccaagcgggccgtcccgctgagctgggtccatgcatcttggctcctccccagaaaggtatacagccacgtcctccaagttcacgggcacctgggaccaggccgaaaggaagggccgagtgacgccatctcctgatgccggggagctggagggcctctctctggccacaacagcgggcccctctgtggcctgtggctcagctgggctgggggctgctggctggagaatcgagcctcttcctccagggacagatcctctggctgagcctctgcctggtgttttaagaactgtccccctatcccgaggggcacctcgtcatcagaaagcagctctgagccctgcacacagacagtgatctccccaccagctcccagaaggccagaagggaaaatccccgcagggccccacacccctc

SEQ ID NO: 376594 - DNA, 521 bp, Homo Sapiens
  misc_feature (37)..(37): n is a, c, g, or t
  misc_feature (59)..(59): n is a, c, g, or t
  misc_feature (90)..(90): n is a, c, g, or t
  misc_feature (98)..(98): n is a, c, g, or t
  misc_feature (160)..(160): n is a, c, g, or t
  misc_feature (164)..(164): n is a, c, g, or t
  misc_feature (180)..(180): n is a, c, g, or t
  misc_feature (183)..(183): n is a, c, g, or t
  misc_feature (192)..(192): n is a, c, g, or t
tcagggcctgccgggctggtctgtggggaccagcggntccaagtagccaaaaccaaggnccagcagaaccacgcgttgctggagcgggantgcagcgncggaaggagcagctgcgggtgcctgcggtcccgccggtgtgcggttcaaggaggagcccgtnagcnaggagggcgaggaggncgnggagcaggnggcggaggaggagcccatggacacttcccccagcggcctccacagcaagctggccaacgggctgcctctcgggcgggctgcgggcacagacagcttcaacgggcacccgccccagggctgcgccagcacccctgcggctcgggaactgaaggccttcgtggaggccacctttcagagacagtttgtgctcacgctgagcgaactcaagcgcctcttcaatctgcacttggccagcctgccccccggccacacactctgcagcggcatctcggaccgcatgctacaggacacggtgctggccgccggttgcaagcagatactggtgcctt

SEQ ID NO: 376595 - DNA, 485 bp, Homo Sapiens
  misc_feature (438)..(438): n is a, c, g, or t
  misc_feature (456)..(456): n is a, c, g, or t
gtgaggagacaatcttgataggaagtttgaactttgaaataatattttattctaccacccatctaaaggctaattaatcacaaatgttaaaccaatcagaagaaaatgtttgttaaaccagaaaaggctgttacctctcacagacaagtttctttctttaggtcaacatatctggtgtagctgtcaggattcagagcaacctcctcacaccctggaccacctagtgatccctcctggactcagcactcagcaccagcacaaacctactgtgtttctctgtctccacatctttccctgagtacaaaaggtagccctgcgtgagtaggcatcttccatcatcagagatctccaacttgaagctggacctgcagccagttcacctgggttcttcaggaccaggggcaaggaaatttggaaactccagtttttaaaaaaggntccactccaaaagggctnaaatgggcttacaaggtggacccctgggt

SEQ ID NO: 376596 - DNA, 486 bp, Homo Sapiens
  misc_feature (41)..(41): n is a, c, g, or t
gaacctaacctcaggatagctagatgcatagaaaattattnaacacgcccatacttcctttgtaagtggatgaaaccctgagaccccaattccctctgcccctttgtgttgcccagttaatttagcctaagacttcactaaattcttaagctgtagtgcctctcctctttccctccaatgtagagagagattacccgggaatgagccttcctagcaatatggggaaaagctacgtttaaaatgttgattatcaatgctttcagaagaggaagatctcaatcaaaaaggggaaatgagaagaaaagtagctcagagatgtctgagctatgtgaggtatgcaaaatgtatcagatccagagagacatgagtattgaaagccaacttgtaactactgctaatcaaagcatatattcatggcaacttgaatctgtgtctccttggttgcagtccccaaatttggcccaaataaatttctcgacttatgtt

SEQ ID NO: 376597 - DNA, 440 bp, Homo Sapiens
  misc_feature (18)..(18): n is a, c, g, or t
  misc_feature (27)..(27): n is a, c, g, or t
  misc_feature (32)..(32): n is a, c, g, or t
tctctctgcggtccctcntccccaaanccccntcacccccattctattccatgagaaaagccccagacccattccccattagagggtccatcctacaaaaatacctgaccagtgcttctcaaaagtgtcactgtcatcaaaatgaaggagagatgagagactgtcacagccaaaaggtgcctaaggagaccggaagaccaatgcgacaccctgggaaactgtgacctgccacgacgaaggggaccgtgcagacatgactgcatcaaggctctcagatggggagagcgtcctggaatatctaggtgggtccatgcagatatggttacatcaaggttctgagatgggaagagtatcctggaatacctaggtaggccccagagaatcacaaaagtccttaaagagagaagcgggaagtcctagccagagcaatcaggcaagag

SEQ ID NO: 376598 - DNA, 412 bp, Homo Sapiens
cccccgggggtataatccccaagaccccccagtggatgccctgaagctggggatagtactgaaccctgtatagcatatacctatgccttccttccctatacacacacatcctatgataaagttaatttataaattaggcatagcccacaattaacaataactaagaatagggtaattataacaaatactataataaaagttatgtgaacatggtctctccctcaaaatatcttattgtactgtactgagggtaagaaatggcagaaatcaaaaccatggataaggagggatgactgagattgcagaatcaaatccctcctggcctcagagcttatgatcacaggttcaaagctgtgtgatgtcaaacagccctgtgggaaaacatctcaccttgtcaactaaagaaaaaaaa

SEQ ID NO: 376599 - DNA, 369 bp, Homo Sapiens
  misc_feature (121)..(121): n is a, c, g, or t
  misc_feature (124)..(124): n is a, c, g, or t
  misc_feature (301)..(301): n is a, c, g, or t
  misc_feature (343)..(343): n is a, c, g, or t
gatggcactggcacccgcactatcattgtgcctccactgaaaactcagcttggtgactgcactgtagcaacccaggcctcaggtctcctgagcaataagactaagccagtcgcttcagtgngtnggcagtcatctggatgctgtatcacccccacagggtatcgagctcaacgcggggggaccagtgcagcacaaccactcaatcttagccagaaccagcagtcatcggcggctccaacctcacaggagagaagcagcaacccagccccccgcagcagcaggtgtttgtggcccctctctnccaagccccctacaccttccagcatggcagcccgctacactngacagggcacccacaccttgccccgg

SEQ ID NO: 376600 - DNA, 842 bp, Homo Sapiens
  misc_feature (19)..(19): n is a, c, g, or t
  misc_feature (47)..(47): n is a, c, g, or t
  misc_feature (60)..(60): n is a, c, g, or t
  misc_feature (93)..(93): n is a, c, g, or t
agtacccctacctacaacnaaaatacctaaccctttttggatataanccccaatccccanccaaagtattccagggcaagcttgggggtattnaaggtccagtaagatttccccaaaataaagatttaatccttccatggtgttggaataattccggattaatatttttattccccaaatcagcccagattttcccctcctagacaagaatgaatcgtcttaaaggcaaaagatattcccagatatgcttcatgctcttatgcttttctctttaagtaacatccacagaatccttactttagcatcgaaataatgtccaagagtaaactttacccaattacagtaaaacctcatcctatttattgttcagggggtagaaagccatctaaaaaggcaacatggaacacagcatacactacactgacggcagttctaaattcaggagcttgctgaatgcaatgtataggtcaattgtaagcttcagaacaacaatataaagcaggttcactataaaattttaggtgggttaaagatcagcatccataaatattttacctatttaaattccagaaataaaatcccaaatggtattacgaggacaagagaaacttagcactttttgcatctgggtacaggagagaatcaataaggagatagttaattcaccactacagctttgtgcattaaagacaagtttgcagaaagctatgtcttacaatcctcttttagttgcatcaaacactgtcagttcaatgactttctacttcttataggcattttatgcatttcttcccactgaaatgttttttcagatgatcaaacaccgacctagatgcagcaaa

SEQ ID NO: 376601 - DNA, 477 bp, Homo Sapiens
  misc_feature (443)..(443): n is a, c, g, or t
  misc_feature (462)..(462): n is a, c, g, or t
ttaagtcattcatgtgtgctatttgtaaaagtgtttaagtgtctacacacattagaagcatcgaaagccttgagtaaggaacaatgaacttggtaatatttttaagagcttcagatctctctctatcaaagaactggagtcaggatcttataaatatttctgggactaaggaaataaacggggtccgcagccaggctttatttataaattaagttgtctaaaaattactgacggatgcagtgccatcacctcccaaacatgctaatatttgtctttctgtgttcttagcatcaataccattcaaaaatagacggaactaattgaaggaaactgttaaaggaaatgataacactcttgggttgcaaagttcgttactatcttgggaagggagtgctgggcaaaatttatcccggatatggacggaggggacttttgttttcttnctgttctgtccatttaccntggagggcagcttcc

SEQ ID NO: 376602 - DNA, 388 bp, Homo Sapiens
  misc_feature (314)..(314): n is a, c, g, or t
atataagcaacacttcttcggattgtcggccctcagaggagagtgagctgctcacagatactaccaccaacatcctttccggcaccacttctactgtcgaatcagatatattgacccaaacagatagagaggtggctctgcacgaaaggagtagctctgtttccactattgacactgcccggctgattcaagcttttggccatgaaagagtatgcttgtcacccagacgaattaaattatatagcagcatcaccaaccaacagagggagataccttgaggaagcgggcaaacacaggcaaggaaagtgctgganttacaggtcatccccttgttgactttcttgaggcacacccggaaggggggacacatcccggggttggccaaacc

SEQ ID NO: 376603 - DNA, 360 bp, Homo Sapiens
  misc_feature (28)..(28): n is a, c, g, or t
  misc_feature (63)..(63): n is a, c, g, or t
gagaacacacagtgccgggagaccctantcaatgtaatcagtgtgagaaagccttcaggcacnagctcctcactcactgtacacaaaagaacccatgtgggaagagagaccattaggaatggcagcctgcctttatccatgtctcatccatactgtgggccccttgctaattaacttccattttgtaaaaatataaacacatggggctatgactttccctcgtaatactcctttagctgcatcctgtgtttcaatgtataatattttcattttggtttaattgtaagtattgtcttaacctccattatcgtttattctttgacccatctattatttgggaattaggatttttccaaaact

SEQ ID NO: 376604 - DNA, 398 bp, Homo Sapiens
  misc_feature (65)..(65): n is a, c, g, or t
  misc_feature (71)..(71): n is a, c, g, or t
  misc_feature (90)..(90): n is a, c, g, or t
  misc_feature (107)..(107): n is a, c, g, or t
  misc_feature (180)..(180): n is a, c, g, or t
gccccccaaacctggaaaaatatgcacctccctaacggggtaccagtttcccttttggtttggtntttggnttttgggtgggaggtttanttcaccctgaatataanccctaactgatgcacttagtatatgtcagtttttataaatgcttcatggatggttgaaatcaatgtattgtantctacaaatgtctgctagatcaagcaaatgtgtttaaaaaccatctacacatttataaatgttgatctgtgatctagcatttattgagagaggtatgttaaactctcccaccatgattatgtattgctgaaaaatctttgtcattctgtcagtttttaaatttatgtatatacatacatatatatgttttgaagcaatgaaattaaatatagatactg

SEQ ID NO: 376605 - DNA, 413 bp, Homo Sapiens
  misc_feature (382)..(382): n is a, c, g, or t
taattttttattgcaaagcaatgaaatgttgctttgtggagccagatagcattacagcaggtaaatgggtttctgctagatctccacattattggggagatgctcgaagacctcagaatatacacacccttaaggttcaagggctggggctgagctctccataaggaacttttcctcctcccagaagggcgatcattgtgtatatagacatggagacagaaccagaatgacttctgtgggtggaaatagtgccatcagaatcatttattattatgaaataaatattatttatctacaatgaaaaaatactactcctcctaaaatcattaacttttcctcagacgattttaaggaaatttgagtaatagccacacgaagggtnaaaagaccctttagtctttctgggtattatt

SEQ ID NO: 376606 - DNA, 484 bp, Homo Sapiens
  misc_feature (30)..(30): n is a, c, g, or t
  misc_feature (79)..(79): n is a, c, g, or t
  misc_feature (86)..(86): n is a, c, g, or t
aaaacttcccttcccatgtgaaaggctccnagataaaattctgccaatcccctccctctccctcatgccctccctgctnagacccnaccttcatgccccctaaacccaatctgcatcatgcctgtttcagagagtcatgggaagatgggcagtgcctcccattgtcacccattccccacacctctgcacacttctgccccttcccctctagacgccacaacttcacagtcttactgttgtaaatattcctgcacagttagtaatgatcaaatgatcctgtggtcagaggcctctttggcagtgtcttcttacccttaagaaaggtcatgaaatccagaaggggcaacctttccaggagagctttggagtcatttctgtgtgagacactattgcataatcctgtaagattgcttttatatttaaggaatgatgttacttaacaaatgaacaaaaaaaattgcaaataaattttttaacaatgttt

SEQ ID NO: 376607 - DNA, 396 bp, Homo Sapiens
gtatttttttcttcctaatgagttaggaatttagattagatacactcctagagatgtataagctggtaggctgggcactagagctaaacagccacttctagagccttttaatggtccaagccaaagactgttgagagaactgtattttctttgctgatgctcttttcttctctggattttatgtactgttcgtttattcctctgccctgtctctggagctactgcatactggtatagcttagtccattataggaaaaatcaaggaacaatgtacatttttgggtgaaaaggatttttgtgagtatatgttaaggagttgcgtatttagtccatgtttttctgttggaatggcaacccaatgttaccaatattgacagcttttcaccgggggctttc

SEQ ID NO: 376608 - DNA, 392 bp, Homo Sapiens
  misc_feature (13)..(13): n is a, c, g, or t
  misc_feature (32)..(32): n is a, c, g, or t
  misc_feature (306)..(306): n is a, c, g, or t
  misc_feature (319)..(319): n is a, c, g, or t
  misc_feature (358)..(358): n is a, c, g, or t
taaattccagggnaaatttccaataaaggggntgaaagccgggatttcctgaaaaaaactgtcctttataaaataaaatgaatgtttacagtagagagacagaagcaaagataaatatatcggtattatgccatagaatcaaataataagcttggcttaattagggctcagtataatccccacccattggttggcatcccatttgagcacagcttgaattaagctttactttgaataagtaacaaattgaagaacagagagggaaagatgtatagaatcctaggactaattcaccaggtgtggtgntcacgcctgtaancccagccctttgggagaccgaggtgggcagatcacgagntcaggagttctaggactcctgggactcattcttc

SEQ ID NO: 376609 - DNA, 374 bp, Homo Sapiens
gcgaagcacattgaccaacagacagttcaatcatgaccaaatccaataaagaagtcttccagaaagcaattgcaaatcaggaagatgttatcagaagaaagggatcctgggctggcaccataaaggatttgtgccttgcttttttcaggttaagacagcagggacttgccacggagactctaaagtctgttcctccaacctttcccattgcagtgagagcaataatttccctgaccctataaaaggcatgcaaagtgtatccaggtcaagagcttgggtaacatcaacactgtgaaatgtggggacagatatcttggtggaaaaagcactgagacttctgtttccatcagcaaagaagacttaaacaccaaggg

SEQ ID NO: 376610 - DNA, 399 bp, Homo Sapiens
  misc_feature (51)..(51): n is a, c, g, or t
gaggggccagagggacccctggacaacactggccctctttaattagcccanggggtcctacccaagtttccacaaaaaacacgtctgaaaacccctgcacacaaacttagacccagtgatggtcacccacctgaataattcccaggacacccatcactgaggaaaccatggaaaaatccttgagacaaacatattgctcttgcctacatgttaacttttttcaacactggtgcaagtattatagataactttcaataaacatatattaaaagctctaccactgttgaaaaatatgtattctaatttgatcactttgttcagaataatgaattttttagaatatattttagtttctagttatgccttacaaaaataaatactgtttaaattatttacaag

SEQ ID NO: 376611 - DNA, 456 bp, Homo Sapiens
  misc_feature (39)..(39): n is a, c, g, or t
  misc_feature (73)..(73): n is a, c, g, or t
ggtgaaaatccaaagtttcctttaaggccccactgatanaagtcctagaaaacaaatgtcctgatgaatgtgnagtggaaatcccaatgcactgttagctgcacgcgagcatttgctttcatgaagtggctattgtttccgagttctgcaacataaggataacataaagggacattcctctgcaaccagtgagaatgggttgggatcatactattaacaagggctctttgtgaataccagtgatccaaatcttgtgtccttgtgtaacatggaagaagctctaggatggtacatggtccactcacctccacagataagtggacttgtgggtcttcttatgtggggagaaatttatgcagtcctgggaatagacttcaaataaagtacaaaatggtctgctggtaagtaaaacccatctataaagtaggaaaaccaagggtactctgtttattcaag

SEQ ID NO: 376612 - DNA, 493 bp, Homo Sapiens
  misc_feature (72)..(72): n is a, c, g, or t
ggattctttaacctcagtgtcttttcttcttaaattactgttttatgaaatggaattaattttaagagaaancattcattttatcatagcaatttgaataactaatcagcaaacatttattgagtaattattaaatgttttgtaaggtggtagatatcttccatacaaccggtgtatgttttgaaatctcattcaacctatagggggcaaaagtgaatagtgcaatcttaaatcacagtaaagagcaattataactttgcagctttataacactacgatctttatcaggctggtggaataatcagattgatggtctcagatgaaccaaattaattcatatttcctaatagcaaagttattctaatttcaggatttcaagttatgaaactttgtttcaaattttgagaagtcttattctgtgttaatgccagaataataccccaaatctagttaaagcaaacacataattatttaacttctaatgcaaaaaaaa

SEQ ID NO: 376613 - DNA, 407 bp, Homo Sapiens
  misc_feature (21)..(21): n is a, c, g, or t
  misc_feature (29)..(29): n is a, c, g, or t
cccactaacacccacccacanaggcccanccacactgtgcccccaggcccttaccagggtaccccagtgaaaagcctataacataaacaagaaaaaatatattattcctatgttattggtatgtgtcaaaaaacgtggaacttattcaaagtgataaataggttttaaacaactcttttcacaaatatattggaaatggctgtgtcttataaagaaattttccaataggtgtataattgagataaaaggcatttgtcaataatttgtttatgggtttagatttcattttcaaactattgacgtttattctactatgttgatttatttttaccactggaaattttttacaagaaaataaagcaatatttcttactaaacaccataaaagtaaatcacataggatgatg

SEQ ID NO: 376614 - DNA, 529 bp, Homo Sapiens
ggcttgaaaagataagaggtaaagctatatgtttttgcaagccaaaatgttggctataccaacacaaagcactaaatttttcatttttaacttggatattaaagcaaggatagatgatttggttaaggatgtatagaaaattattctactgtctttcattttcctctgtgtaaatggtataattcctaggaggaaaagaaaaatgttttctgcctacatatgtatcccctagtagcaaaagttgggcttagggtaggaataaggtggaaagacaaggagatatagagaaattagaaatttgtactatatgtttacatgcttatgtaaataaaattataaaagtgttgaaaatctgttcttaaaaatttcttgaattatatttataaatatgaaaatgtttgaagcagcacaatttgatggtttcacattaattcactgtgtaaacaaacctaaactaaattgaaaagcagtgttacatattattaaggtattgttgcttttgaaataaacttgcccacttcaaatgctt

SEQ ID NO: 376615 - DNA, 427 bp, Homo Sapiens
  misc_feature (25)..(25): n is a, c, g, or t
  misc_feature (57)..(57): n is a, c, g, or t
caggggtaattccaacccacagagngttatccaccttttaactttttgggttttggnctgcatgccttgggaaatagaactggggccttaacgagatcaaatgtattgtaaataaatagttccatgggtatgtatgcagtttaacatggtgaaacaagttggcacagaacaaaatttcaaaaataaacatttggcaatgatgaatattattaaagaagagagctgttttgtttggttgcttagttgactgtttgcttttatactacagtgtaattcagctttttaaaaaaatgaccagtcttaactgaaatcagccttttataagaaccaaaactagtttgtattttatattacgccttctacagcctagaggttgtcatgataaatttaccacatgagaaagaaacaagacatgttttaaaaagct

SEQ ID NO: 376616 - DNA, 280 bp, Homo Sapiens
  misc_feature (39)..(39): n is a, c, g, or t
  misc_feature (267)..(267): n is a, c, g, or t
gttgttttaaaatttattatgagcaggaaatatgcatantcgttctaatcaccatgcttaaatatatcaatcttttcttagaatattaaccaaattgagaaattttcattaaataaaaatcactattttccttaggaaatcaagagccacaaaaaattatactactgtattcaatattgctaaaaattttaatttccagggtaattttctatttattatctttctcacctaaagttttagagttttagagatgatgaattaaaaaanctattatcaatgt

SEQ ID NO: 376617 - DNA, 376 bp, Homo Sapiens
  misc_feature (250)..(262): n is a, c, g, or t
gcaaaactccgtctcaaaaataataataataataatttaactgtgttctgcacacacagaattacaaaatccctataggactttcacagatagctttgggcttaaggtcttcggacaacaggtagttctaatttcttactctttgggacatttagtacatgttggtacacataaggaaagaaaatggcttatattagagctaggaaacaggggcagcctggatttttatggtaggaactcactctgtgcnnnnnnnnnnnnnctgttaagttttcttgacactgacttcggtaacattggctaaagggaattgtgagtcatgtgaatttcacctgcagtgcagactttaaaggactgtgttcattctgatttgggg

SEQ ID NO: 376618 - DNA, 492 bp, Homo Sapiens
  misc_feature (188)..(188): n is a, c, g, or t
  misc_feature (371)..(371): n is a, c, g, or t
  misc_feature (430)..(430): n is a, c, g, or t
  misc_feature (451)..(451): n is a, c, g, or t
  misc_feature (469)..(469): n is a, c, g, or t
attggatgaatgaatgaacgaatgaaattctttgcatttttactcggttagagagattttttgaaaggcatatatgtgggattatttgtgccgtcatctgctaatttcacagatgtcttctcaactgtagaccttcatataagggaaagacctatttacgcatagttgagttgcagctgctgctgccntggcctgatggcacagtggtgagggctgtctcaatatctgtcccatgtctctttcatagaataataccctccctcagccccttttccctgtatcttcctttcaagggttgctgtgtagttaactctgcttcaggcaatttatcttatctgtacttttctcttcctcattcctcttctcttttncagtgcttgtccagtaacctcaagggaaatctgttccaacccttctttggctgttgggngtattcccatttcatggaggnaaatcccaaacaaaacanactctaatcaggggcagtcggaa

SEQ ID NO: 376619 - DNA, 508 bp, Homo Sapiens
  misc_feature (253)..(253): n is a, c, g, or t
  misc_feature (379)..(379): n is a, c, g, or t
  misc_feature (412)..(413): n is a, c, g, or t
  misc_feature (460)..(460): n is a, c, g, or t
gtaagatagaggtgactgtatggctacagttcatggtataaggtcatttagggtgcacactggcacacaggctggaaaacgggcactggacccagctttcaggtgtgtggtgctgggtaagtttcacctttgaagcctcagccttccatctgtaaagggcggtaatggtgcccacctttcgaggcattgcgaggctagatggtaacacacagaaagctcccacagtgggaccttgatgcagcgtagtggtganttaacaaccgtggggacaccaggccactctttttctaccagttgttttatgaatccacctattaattttcatccatcttttggtcgtaggtaaaggtcaatcaggtttttcaaaaagactccctgnaataactttaagttcctgtatttcttaaggatnntaggggatttcttaccaaaacggacttttgacattttagtcaataanggcttaaaactctttctttaaatcttatagttttagggggagtttttc

SEQ ID NO: 376620 - DNA, 561 bp, Homo Sapiens
ggttctccacatacttgtattccaagtaatataaaattaaaaacatatattaatctacattctcataacttaatcatcctttgagagaaaatacatcacacttggtactgtacagtaagatagattgttcatagaaaaaaattcaaatacatttcttttctactaaaatgtggtgggaaaaggacaacccatgctttgtggagacaggtctgcagtccacctgttcattatattcatattttcagtccaggagtctccctagtcacacagaaatgccaccagttggccttaaaacacacttgctagagagaggggaggcaaacagtcctcccaaatgatgctgcagcctcaaacaggcttatccattcatatcttctccaccacattcttattaggcatcaaacagtccctttaaataagaatggttttaataagatattaacaactaagtttcccatggaataagaatttctaacttagggtatctcagcacgtattcccagttacatatgccctacacaattgcttaagtggtaagcagtctgaaaaactctcctccct

SEQ ID NO: 376621 - DNA, 497 bp, Homo Sapiens
  misc_feature (32)..(32): n is a, c, g, or t
  misc_feature (59)..(59): n is a, c, g, or t
  misc_feature (120)..(120): n is a, c, g, or t
ttagaaaacccttaaccccagggaaaacttanttggttaaaaaccttattaaaacccanccttaatttaaaagggactgtttgaagccccaaataagaaatgtggtggaagaagatatgnaatggaataagccctgtttgaaggctgccagcatcatttgggaggactgtttgccctcccctctctcctagcaagtgtgttttaaggcccaactggtggcatttcctgtgtgactagggagactccctggactgaaaatatgaatataatgaacaggtggactgcagacctgtctcccacaaagcatgggttgtccttttcccaccacattttagtagaaaagaaatgtatttgaatttttttctatgaacaatctatcttactgtacagtaccaagtgtgatgtattttctctcaaaggatgattaagttatgagaatgtagattaatatatgtttttaattttatattacttggaatacaagtatgtggagaacc

SEQ ID NO: 376622 - DNA, 222 bp, Homo Sapiens
atttgattcaaaggtgtgttgtctgttatagataatctcagcaagtgctgctgtatctcacttgctaggcaataccttgtacaatagctaaccattgcatcaagtgtatatgaggctgtggaattagattttgcccagggaatagtaataatagtaactaccatttatggtcatataaagtacttatcatttttacaaccctgagttatttctttcttttct

SEQ ID NO: 376623 - DNA, 267 bp, Homo Sapiens
tttatgtagtaaaatttcaccattcaaatgttccatgagagaatctaaattaaagattagaaagtaagtaaccacttcatgggggaagagttccttagcttctgggccactcccacccccatggcaccttgtgcttttccctgtcagagcactccacatacatattataaaggtgtctgtctattgttctcctggaggattgggactatataatcattgtatccattgtgtctagcaagtactcaataaattatatatttttgaatg

SEQ ID NO: 376624 - DNA, 389 bp, Homo Sapiens
  misc_feature (20)..(20): n is a, c, g, or t
  misc_feature (35)..(35): n is a, c, g, or t
  misc_feature (67)..(67): n is a, c, g, or t
ctcacattttctgatccctnttttcatgtatcttncatgatcctgtgggaagctttctccttctttnagcttccttaactcactggctcctctttctctttcctgccctgaaacacagtccttaccccccattcttcttctttattcatttgcacaggtttaatcattgtttctaaattagcaatttctaaaacaggctcatatttataattttctataggactataataatttaactcatcagaaactgaaaatagtttcaatcaagttttcttcctactccttccctgtcagttacatctttcttccctcagttctccaggatttatactttgcaggtctttcttcagccaactctaatcaggccatcaaatcctggtccaattact

SEQ ID NO: 376625 - DNA, 369 bp, Homo Sapiens
aaatgcccagccccacctgcctggcgggaaaaggcaatgggacccattctcttccagacagatgagcaagcaggaaaacagagaatacaacttgtcttggaagctagcagcaagatgaggcagtaaaacccatcagcatacatcatcctatcattgcccagtgtcatccccagcctctattagccctcgctgcatcagcgcaagtcccagacactttatcctgtttataattgctgatgagcagtaataaggcctccatgcctcagctccgtctgttccacttcggcacccacctattatgtaataacttttatttacagccttgcttgatgcgctgttctattagtagacccaggaactgagtggggc

SEQ ID NO: 376626 - DNA, 430 bp, Homo Sapiens
  misc_feature (35)..(35): n is a, c, g, or t
  misc_feature (45)..(45): n is a, c, g, or t
  misc_feature (68)..(68): n is a, c, g, or t
  misc_feature (75)..(75): n is a, c, g, or t
aatttcctgactgttgggtacctagcccaaattgntttccaaacntcagttggttttggaacctgccntaaaccnaaaatttaattatttattcacactcataagcatcaaatatttaatgccctcagtgggaaatttgtgtttaaactcaatggaatctaatatttctttatgtcgttagtccctgtaaaatgttaggtcacccaaggaaaggggagaaatagcaatggttgttcctaaggtattgcttgccctccatgtcttcctaaagagcagaacttggagtttctcctttatgtagagaagaagtaacttagggtgtatttgcaatgaaatattcatagatattgaaagcttgtgtttacatgaaatatgtttattatcaagaagtcctttttccaattctgtacattaaatatatgtgttttac

SEQ ID NO: 376627 - DNA, 271 bp, Homo Sapiens
  misc_feature (148)..(148): n is a, c, g, or t
  misc_feature (191)..(191): n is a, c, g, or t
aaaatgcaagtattctgagggacactcactagggccaagaattgcaagaattctttgggataagcagcctgacactaactcaaataagaccaccctccaatccaaataagaattcaccaaactcaaaagattttttaaatatgacatnactcacatataattaccccaaattacttatgcatgaaaacagnagatccatttccaaaggccaaaagtagatgtaaaatctatccatgacctcaactggcgtctacaatgttaacattgaccc

SEQ ID NO: 376628 - DNA, 455 bp, Homo Sapiens
  misc_feature (35)..(35): n is a, c, g, or t
ttgttgctgtctacatacacatatgtgttccatgncttcatatattgttggaagtagcagcttattgatggcttggggtatagttgaaaaggataggggcccttctatagcaccaagttggctgtcttcagtgttggtcaagattagctgtcttaaagtccaaaggattggaccggctagatattttgttgtacctcagaaaaattatcttaatttcctagatattttgttgtacctcagaaaaattaccttaattttctaccctctccaaattttttcaccacagaatatttttttggagaaaaattatcaatattttatggaactagtgggctatagaaaacacacaggatgtactgataaaacacagtagtaaaacacattggtttatgaatgatctctgtattaaaccatctgtacatattggtttaataaaagttcattgcttagatctt

SEQ ID NO: 376629 - DNA, 415 bp, Homo Sapiens
ttttcaaactgtgtctactggcacccttcccctttgtatcagagcagttctgcttttaactgttttatatgttggggttctctatgagatttcattggaacaaagagtttcactgatattcgagtttgaaaaccattgattaagtgaaaaaacaccctagaagataggaaatatgtttaaaaaatgaatgtattaaaccttatgagtaggaagatgaaatacaggtttattgtatagatacattatttatgaaggataaagatctatacatgaacagcagaatgtataagctagcatttactagcatgtctctgatgcttttgttcatttctgttaatcgtcatttctgtcccctctgcatggaattttatacttgtctagggtaagagtttgtagactctttcagcagaacaga

SEQ ID NO: 376630 - DNA, 385 bp, Homo Sapiens
  misc_feature (24)..(24): n is a, c, g, or t
  misc_feature (44)..(44): n is a, c, g, or t
  misc_feature (50)..(50): n is a, c, g, or t
  misc_feature (69)..(69): n is a, c, g, or t
  misc_feature (76)..(76): n is a, c, g, or t
gttaaaggaagatggcaaattttncccttgtatagtacttgtantttccnttcgctgatgcagctctgntctcaanttttaaacctttgcctgttaaatgcaatactttataaagaatgaacaaaattactggaagcagtattgtaagtaatgaggtagtattaatcagttttatcttttgaaaggcacagtctaaatcgaaaccctaaactcaatgctgcaagtatgaatttaattcatatataagatctatttaaatataagagtagcaatactgcacctggtgatcacaaagataatgttctacttctgatagaaataatttctcaacaaatgttgttactatgcatgtatatggatggaataaaattccagattgttggag

SEQ ID NO: 376631 - DNA, 452 bp, Homo Sapiens
  misc_feature (24)..(24): n is a, c, g, or t
  misc_feature (39)..(39): n is a, c, g, or t
  misc_feature (49)..(49): n is a, c, g, or t
  misc_feature (76)..(76): n is a, c, g, or t
gtcccttgggcctaaaccttaaantcccccagtaacaanatcctccagnaccctggcaagttccttaggcttccancagactcaactgtgtgtccccctggatgagttaatagaattggagtgttagataatcccagcgtagtggtgaatggttgtgcctatataaagaaagggaatataggtagcccagggtggatatcaaggaaaagcaactgaatgctgctttggggagctccaaccagctcagtctaggcactggaagagttggctgtatctgaaaggtgcaaatatgtggcctgatgcagtttaccatctgtcactctgctgcctcctccctgaggatccgtctgctgctatgttcttcttcctaggttactctggcagaatggagaatgctgtctgaattcaagttttcattgtgaaaatggtggggtggtgataatgtttgggag

SEQ ID NO: 376632 - DNA, 335 bp, Homo Sapiens
  misc_feature (50)..(152): n is a, c, g, or t
taaacattacaatcaggcatcaggagttcttactcaagaacatagttgannnnnnnnnnnnnnnnnnnnnnnnnnnnnnnnnnnnnnnnnnnnnnnnnnnnnnnnnnnnnnnnnnnnnnnnnnnnnnnnnnnnnnnnnnnnnnnnnnnnnnnataagctgggcgtggtcacagcgcccggcccccatttgaaattattctttggcaaaatatgtcattaaaacccaaaatgagttaataaaaagcggactcttcccagtttcagtcagctcaaactgcagaacttttgctctcacttgagcttatcatatagctaaagggaaatcagaaaatgct

SEQ ID NO: 376633 - DNA, 494 bp, Homo Sapiens
gtatcatgtgaataaattggtaaagattagagagtcctgaatcataagctcttatgagggattctcaattttccagtacgtttttgagtattttctcttggattagttaagtctttatgatggctctaagctcagctttagaccatggagtaaaagtggttacagcaggcaggctggttgactagagagtctcactttgtaaggcatttgcccaacttcccctttttcattagcctcaaggagaaaaggtaactgagcaaaagggttactgtactcaaagcatcgaggcaaagaagagacagagaaggagcaacccaggttcatgtgctgcatgagcctttcatttgcgttttgtaaagaatcttttaggcaattttagatttgtataatcctttagatgcctctgcataccgatttaaaatgcatcccgttgtttttgtggcgttttcgatcctttcttttctaatgtgtcccataaataaacagttttattt

SEQ ID NO: 376634 - DNA, 454 bp, Homo Sapiens
  misc_feature (27)..(27): n is a, c, g, or t
  misc_feature (42)..(42): n is a, c, g, or t
  misc_feature (209)..(209): n is a, c, g, or t
  misc_feature (211)..(211): n is a, c, g, or t
aatgcagaaatggacagaatgattctnattcactgtttgggnctggagaattcccattgtggaaatcttagagatctcaagtttattaccaagggaataaggaaaaaaaggtgagcaggcaccaggccaagcagtggctcccttgccaaggaacctaaggctgcaggtttcagggacccccttgaagaaacctctcctggccattggananagaaaagagaagtctctcctgtagagtcacaagagaagcaaaagagggtgggtcactgggtcctggacatagcccccaaccccaagacttcccaatatggagaaactacaccaatgtttaaaaggggaaaaggaaagaacttgtacatcaagggaagatgatttgttaaacacacagtcctgtgccaggaaagatccccctttcagggaggtgttttcccagccttccccaaagctgttgcgc

SEQ ID NO: 376635 - DNA, 386 bp, Homo Sapiens
  misc_feature (336)..(336): n is a, c, g, or t
aaatatgcatccttagaaccgaagaaattctgatatgagcaaactggaaagtggtcagcagagttagactgcagaagagtgtgtttaagaacaaatatgcagacacaaagtctagttttcccactggctgctgaggtggaagatgtgtttctgggacatgagcgctcacttctggagggtttagcatctcattaattaccaatccctgcttacaccacagagggtgtggactggcatgggagccccccaggaacacatcctgccacatctgcaagaacagggagaagcccccaagagttcctgttaccactgttctgggagagagaggagaacctnaaaaacagatagcaattgagtgtttatattataaatatttataagcaaat

SEQ ID NO: 376636 - DNA, 448 bp, Homo Sapiens
  misc_feature (13)..(13): n is a, c, g, or t
  misc_feature (30)..(30): n is a, c, g, or t
  misc_feature (40)..(40): n is a, c, g, or t
  misc_feature (62)..(62): n is a, c, g, or t
  misc_feature (81)..(81): n is a, c, g, or t
  misc_feature (88)..(88): n is a, c, g, or t
  misc_feature (108)..(108): n is a, c, g, or t
agtagaagggggncctcaagaagatggccncgttgaaaanacaatccccccccaagaccganggttggtccgggtttaaancccctgnagcccccaatcaacacaatnccctaagggaaaacccctttgtgtttccgggtatttaaataacttgaagggatagcaaaatatactgtgtattccagagggccctctctgcagctgctagctcagacacccaaaggggtaagccccaggacattcatatctttaaaagctgcaaacctggtaacctttaaacttttaaaacaaatgtcatatggggtaacactgaccttttataatttgatgtctcaaatgtagagattatctaaaaatcgtaacttgaataccttgtaatttttctcttaaaaaagaagacttgtgtaagtctctgcatcaacgccaataaacatgttgctttaataat

SEQ ID NO: 376637 - DNA, 457 bp, Homo Sapiens
  misc_feature (34)..(34): n is a, c, g, or t
cccctggcatgtaaacccctagcatgtggtgctngcaaaaagcccaaaggtgggtccctgatgcccagctccttctccccttttgagcaagcaagagggcacaagtttgggcatgtcatccctatcatgtcctcagtggtctctgggactgtactgtgaggggaaagcagagggaaaagggaagattctctcctcgcatggactgaaaatgactgaatttcaggcacccagagagctcaagaggtcacgtgttctctgcgtctcaacagtccatgctattaaaacagcatcatggcttagaggggaaaaaaatacagttctagagagggaaacaggaaacctgctctctagtcctggctctgcaatgaacatctaggggagcatggacaaggcacttcccatctccagggttcagtttactcatctgtaaaatggcaatttgggctacatgtctaag

SEQ ID NO: 376638 - DNA, 482 bp, Homo Sapiens
  misc_feature (392)..(392): n is a, c, g, or t
  misc_feature (414)..(414): n is a, c, g, or t
ctcagaaagattaagtcactttcactcaactaatcatcatcagagctggaatttgatccagttgtagactctgcactctcaacctccaagctgagctgagctgctaagtaaagttaaactgcttctgggagtctgggtagagagaaaaaagagaaatatgtttgctgaatcaactgctgccggccaagggccaggccttttgcacctggcatcacagctgactgaagctgcagaatccgcagaattcagagcctggggctcctgctgtgtgggacacagaatgggaagatgaagtcaccaccccagtgtgtcccaggtctttgtcagaggacgaaatgctgacatttcaggagggaggaagacccttgctgctatcatggcccttaatcctngaggttagggagccaaggcggnaggtcctgttaggggttgagaacatccatcccaactgtgtccgcccaccctgctcagggaagccgcct

SEQ ID NO: 376639 - DNA, 564 bp, Homo Sapiens
  misc_feature (455)..(455): n is a, c, g, or t
  misc_feature (491)..(491): n is a, c, g, or t
  misc_feature (513)..(513): n is a, c, g, or t
aaagaatgtcactttctgacaggcccagaagccccaagttattctgagacctcaggaggcgaggaagttacccaactcatagatatttgatggtataaagccgtggctgggctcagctttaaaaaagtcttatctgagattccttctatggaacaaagttccatcaaagctgattttaaaagcctgtgtgaaaaataatcattcttgctgcactgttttataatcaggccaagaatagtcaagcaaatgggtcctaccatgattggtctttagtaaaaattgaaaactggagagagaaaaatgtttcaaaaactatagtacacctgttgttagattctaatcttgcctaatgtttttccgtttttattattttccacagtttggaactgaattctattttttcccgggctaccagtctccaaaacaacattttccaattgtttgccttctctctnttctcctcccctgccccacttttcctaatttggaancactgaaaactaggctgtgctntcttaaaggcccgcaaactgaggctagggcaacaaatttcccaaggcaaat

SEQ ID NO: 376640 - DNA, 489 bp, Homo Sapiens
gcatgttgtcaggacctcctgaggctgggtcacaggtgtgcatccttaactttggcaaagtaaacttcttaaattgactgagacctgtctcagatattttgtgttcataaggaattattgttaagttttctggatctggtcataaaattgtgtttgtgttatggttattcaatttgtctatgttagagatttttcctaaagaatttacaagtaaaaggatattttatccttgattgctttaaaatactctagtaaatgaacaaaaagtggtggggaggatagagtataactaagagcaacagaatgttgctcactgttgaaatggagtgataggtgcatggacacttcttataccattctctctgctttgtgtgtgtttgacattttccataataaaaaggtattaattccctcattcctgtctccccaagtgaagctttgagctaaaaaggtcaagtgttatatcaaataaaaattttaatataaatt

SEQ ID NO: 376641 - DNA, 692 bp, Homo Sapiens
  misc_feature (24)..(24): n is a, c, g, or t
  misc_feature (614)..(614): n is a, c, g, or t
  misc_feature (624)..(624): n is a, c, g, or t
  misc_feature (646)..(646): n is a, c, g, or t
  misc_feature (669)..(669): n is a, c, g, or t
  misc_feature (676)..(676): n is a, c, g, or t
gggatccgcagtgaggctctgctngcctcctaccacccggacctgggcatcccctggttagagtggttggcacagtttgaccgggacatgggacagcagggccgacagtggctttgctgctggctgcccgagtggtggaggagctggcaggcctgctgggctctaccacgtgaagctcttgcctctggcgcctctagcaccacgcctcccctgcccagctcagtggtccgggcctttaagcaatttaccgacaccggctgttgggcaaactggctgccatccaaagcgagagggatggcacctcgctggccgaggccggggcaggcatcaccgtgctggacgccctgcacgtggcgtctgccgcctgggccaaggtgcctcctcagctcattttcagcagcttcattcaagaagggctggctcccggcaaaacgcccccgtcctcgcacaaaacctctgagatgccaccagtccccggcgggctgagctgggaggagttttcccgctttgtggacctgggagggtgaggagccaaggtcttggagtatgtaaagggaggagataggcattgaagacgagaagggggacagagagggttgcttttgagcccttgnccaccaaagntgatggccttccggcctggggnactttgaggaggtggtttgaatncaacagnatttttcttgagtatt

SEQ ID NO: 376642 - DNA, 594 bp, Homo Sapiens
  misc_feature (432)..(432): n is a, c, g, or t
  misc_feature (481)..(481): n is a, c, g, or t
  misc_feature (488)..(488): n is a, c, g, or t
  misc_feature (495)..(495): n is a, c, g, or t
  misc_feature (534)..(534): n is a, c, g, or t
  misc_feature (547)..(547): n is a, c, g, or t
  misc_feature (561)..(561): n is a, c, g, or t
acaaaactgcaatattaatagatttacatacattgataaattgataaatataattttgcttatcaacaagaaattaagaattactggtaccgatttggtaatgctgtcacccaccagcatgtcattctttttacgtcctctaaaaagtatatgccgtataatatttttgtgcattatttcctctgatttctgatggttggaggactatgactggtctaaaattgttaggcaatgcagagatttcttgtggttattcattattttaatttttcagactatgagattcagaaattattctcattataatccatgcaaaaaggagaggtttaaatacgcagctaaagctaatcaggtataggaacaataaataatactctgctaaacaatagtcttaacagttcctaagttttaaaaaagtgacactttgcttgncatttacatgttaatttattttgcttttgctgcagcagcttgactgctnctttatncagtgcntcaaggaaaaggaaaattttgttgcggtccctttaaggntaggggtagggcnggggtaaaatgtcngattaatttatgccatattaggcccagcccgac

SEQ ID NO: 376643 - DNA, 422 bp, Homo Sapiens
  misc_feature (31)..(31): n is a, c, g, or t
  misc_feature (36)..(36): n is a, c, g, or t
  misc_feature (67)..(67): n is a, c, g, or t
  misc_feature (121)..(121): n is a, c, g, or t
  misc_feature (129)..(129): n is a, c, g, or t
  misc_feature (165)..(165): n is a, c, g, or t
ggttgcaacaaaagcccaaagaagggtaaantgggnaaaagcactggaacagtgccctcatcccaanagttttcctaatcacttcccatgtggctttttctgagtgtgaacagaatgacanttgatgancgcgtcaccatgtgcgtaccccagtagtttgccaanccctgtggtagggctcactttctgctttgtccaatccatgtgtcctcatcctgattaactgctctgctagcatctgcttgaacttactaaattgaagctctcatacatatttagtaaacttacatttaccaagttcacagggcagatttctgccttctagaagtttctaatcttttcttgaatactcgtaagtaaatatagcagtttatagatgctttccaaatttggaaagcacaaaacagtctcctgagagtacc

SEQ ID NO: 376644 - DNA, 351 bp, Homo Sapiens
  misc_feature (11)..(11): n is a, c, g, or t
  misc_feature (49)..(49): n is a, c, g, or t
  misc_feature (56)..(78): n is a, c, g, or t
  misc_feature (81)..(119): n is a, c, g, or t
ctgtagttttnctgaagttcctaatatatcttcaggcctttgcctcaantggcgtnnnnnnnnnnnnnnnnnnnnnnnttnnnnnnnnnnnnnnnnnnnnnnnnnnnnnnnnnnnnnnntcaccccactctgtaacctagtttatttttatccgtaatacttataatccctaataaaaatatgtttgtttattgtgtgtctcctcccattagaatgtaagctccttaagtttaagcactttttgttcactgtatccctaacacctagaatagtgcttgtcacacagtaaatgctcagtaaatatttgttgaatgaatgaatgtgtgtaggcattgaaataaaggtattatg

SEQ ID NO: 376645 - DNA, 617 bp, Homo Sapiens
  misc_feature (534)..(534): n is a, c, g, or t
  misc_feature (568)..(568): n is a, c, g, or t
  misc_feature (607)..(607): n is a, c, g, or t
atctgaggatttgcatctctaacaaaaattcctaggcgatgctcacactgttggtgtaagggtgagtacaaattagaaataaaactatttaattctgcctggtgcaaaggagagagagagacttttaccctccacatccttttctttggtcatttactttaggaaacttaattgtaagctttttctgtgcctctttgaaatgcctgtaaatctttccaaaaactaaattaggcttttgccaattttacaacctaagaatgtgaattcctcaaggacctggggagctatctcactgaaatttaatcattgagaaaaatagtacccctatctttcagcttcctggaaacataagagcctaactttattaggcaccttgctccattacaaagctatcttctgtcataaagatacaagaaatttatttttcccttggaccaaaagggcaactaactagcagagggtcaccaaaattaccaggtgaatttagggtgaactctgtgtgacaaatggtgctgccaagtttctcttggaggnactataggaaagtgcatgacatgattttttactncatggatggtgcaaaaccattgcttttcacttttcagtnttatttttca

SEQ ID NO: 376646 - DNA, 292 bp, Homo Sapiens
cagccactgatgaagggtgtttagagactaagcaggataatctaccagatatagaagtcaggcttatcatgagaagatcatgcagtattccctctatcaaacctccatcaacagctaattaatccaaagatagtatttgacttgattggaaaatgttaggatggaccaaggtgggccataccaactccctctgtcccaaaatgtaagttattacgtatgtatggaaaatgttatgatcaatatgtggttctcttcagaagaaaaaaacaataaaggacatttctctgaatct

SEQ ID NO: 376647 - DNA, 309 bp, Homo Sapiens
  misc_feature (255)..(255): n is a, c, g, or t
gggccccattgtggtcacaagggtccctctcttaaggagacaggagaatcaaagaagatgtgaggataaaagcaaaggtcagggagtcagttttgaagatgctactctgccagctttgaagatgaaagaagaggccaccagcctaggaatacaggcagcctctagaatttggaaaaggtaagaacagattctccacttgaatttccagaaggaatcagcctgttgactgacaactttaccttaattcataagacntgattttggacttttgaccttacagaatgtaagataataaatttatgtcatttt

SEQ ID NO: 376648 - DNA, 434 bp, Homo Sapiens
ggatctgaaagattacatttagaacatttagtactattacactctcagaaactgtggtaaaaagtcacattttcaaaacttcatgcatattgtattcttgttggaaataagtcctatagtttcttaattgtcttcatgccgtccatatttaacaaacattgcaagtcctttttatatttgggtaattatttgtaatttagtgaaggagactaggggatgttttcttccaaagggaatttaaaatcaattttatggtattttgaaagtaaaatactccttaacgtgtcaatatttttaaaatgttatctcgaagttttctattgctcaggtatataatctaataaaattttttgtttgctctaaggttatttttggctattctctattttggaattatgttaaaatttgtgtgccattttatggaaatgcccttt

SEQ ID NO: 376649 - DNA, 301 bp, Homo Sapiens
cctaagcctctggtatacatgactttggctgtgcacttcatttagactgtcacctttttgtttgctgttgttttttacactagattcctttgtcttcattaaagataatgaaagattcacatcacagtgcagctcttcgctttgtcctttcgtaagtccgtagcaactgccgagagttctggtctgctaggcatgtgtgaaatccgctttgtggctctctgtgatttgttccgcttaacagtttttatttgtcttatttacacatgccaaggtggcaacgtgaaaaatgtctctgacgcta

SEQ ID NO: 376650 - DNA, 481 bp, Homo Sapiens
  misc_feature (419)..(419): n is a, c, g, or t
  misc_feature (439)..(439): n is a, c, g, or t
  misc_feature (461)..(461): n is a, c, g, or t
cttagcacagggagaggcatcagggtgatactcgtaagtatgccagaggttaaatggtggtgatttttctgctgagaaactcagtgtcccttttaagtgtcttggcttctgttctctttctgtgagggaaataaatttgttttagttgtttgcacactagtcactataaaatgccactatgaggttgtctttccttcacttcctcaagcttctttcctgtctttagttattgtcctttagttactgtttgagatcaagccctacagtctaattttttacatttttatgtcctttttatacagcttatcttggctcttattagccgtgggtactggtggggattattcgccagtgtttccctctatttaaaaaaattaataggactttattttttagagcaggcagtaagcgtatagaanaaatgagggcagagtagganttcccgtaatacctcctcactncacccctactcacaatttcc

SEQ ID NO: 376651 - DNA, 439 bp, Homo Sapiens
  misc_feature (50)..(50): n is a, c, g, or t
tctcattctctcccttcttcccatgggcagccttatatatgattgaagancattagtgcaaagattcctcatccagaaataaactcttgtacttctatactaattaaagattcatgtaaattacctaagttccttggaaaacctatggagaactctgtgggggctgtcattcacactttagtatgaattggtttaatgacgactgtgatattggctacataaaaaaatggacgtttttatttggggttaggggatcacagatgtggactggcttaggtagaatggtccctgagcaaaggagatattgaagtttatgaggatgtgcaagataagcagatttacttttgcattttattttgggctatctcagcttcttttactagaagctcatgcctataatcccagcaccttgggagccaaggcaggaggattggttgaa

SEQ ID NO: 376652 - DNA, 497 bp, Homo Sapiens
  misc_feature (19)..(19): n is a, c, g, or t
  misc_feature (368)..(368): n is a, c, g, or t
caaaaatcctgtgccaagnaatattttaccggcattttattaataatttccccaaatcctgaaattaccccaagatgtccttcaataggtgaatacataaaaactgtactacatcccatacaatggaatattattgagcaacaaaaagaaatgagttatcaagccacaaaagacatggaggaaacttaaatgcatattgctacgtgaaagaaaccaatctgaaaaggctgcattctctaataatttcaactatctgacattttggaaaaggtaaaactatagagacagtaaatagatccgtggttccctggggcttgggggaagggagtgagagatcaatggtggagtgcaggagatttttaggtcangtgaaacgtgttctgtatgatacgggtaccgggtgaatatgtgccattatatatcttccaaaacccatagattctacaacacaaaggagtaaactctaatgaaatctatgcacattagttaataataac

SEQ ID NO: 376653 - DNA, 499 bp, Homo Sapiens
  misc_feature (26)..(26): n is a, c, g, or t
  misc_feature (32)..(32): n is a, c, g, or t
  misc_feature (42)..(42): n is a, c, g, or t
  misc_feature (59)..(59): n is a, c, g, or t
  misc_feature (64)..(64): n is a, c, g, or t
  misc_feature (97)..(97): n is a, c, g, or t
  misc_feature (107)..(107): n is a, c, g, or t
  misc_feature (178)..(241): n is a, c, g, or t
  misc_feature (251)..(251): n is a, c, g, or t
  misc_feature (405)..(405): n is a, c, g, or t
  misc_feature (439)..(439): n is a, c, g, or t
  misc_feature (471)..(471): n is a, c, g, or t
atggccaatggccaatggccctaatnattggnaggatttaanagggaaaccctggaagnagggntaggaaggatccaggccccccacaacctggttntccccccctncaatattggccatattccttccctccaataaaataccttattggagtaccttgtatttacctcctcctatnnnnnnnnnnnnnnnnnnnnnnnnnnnnnnnnnnnnnnnnnnnnnnnnnnnnnnnnnnnnnnnntttattagtnctacatgcacacattgacttttagtatttaataaatacaagcatgaaaataagtagaggtacattgcatattataaatcccctggttgaatgttagtgtatagtaacatattcatgtacatgtaagcactgtgtacatgaaagtgaaataaacntaagtgccttgattttttaaaatgaactcttaantgatattttctataatcttgtcttcccctttnttttcttcagtattttatttaaaaaaaa

SEQ ID NO: 376654 - DNA, 368 bp, Homo Sapiens
  misc_feature (30)..(30): n is a, c, g, or t
  misc_feature (356)..(356): n is a, c, g, or t
ggaaaagccagcatggtcggagggtcaganctatatggaggggaaactgggtgaattctgagcccactctggcctgagttaaaatcttctaaaggcagatcagtatcttgtttgagcccaaaagagtcctttgataatttaccatgttattatgcttattgtacacatttcctctttctctcagcaaacctagagtactatacatacattattgatttatctttatcatgttcaaatgaaaggcctggtgagtgaattgccttaacagactttacaaaatgaaaaattattaatgtgatatattagtgaagtgcagaagcttcacttaaaaagtaggagctgttagctttcctaangaggatactagg

SEQ ID NO: 376655 - DNA, 480 bp, Homo Sapiens
  misc_feature (421)..(421): n is a, c, g, or t
  misc_feature (426)..(426): n is a, c, g, or t
  misc_feature (458)..(458): n is a, c, g, or t
caacagaaggatggggaaattagacaggttattattatcaagcttaagcctaggcagctggtttgaaattagcctgggaagtcacacaaaggaaaataagaccctattttctgggttgcttaggactctgcttcagtgatcaaatcttagctgcagagctcataagatgtgctgtatttaggcatggacatagaggcagtgtggtaggataattacctgtttaaataccttcttcctcaaatacagattaatctgggactagggcaaggatgaatctgcaagttcagctgtgggagacctggggctgacagaagaaatagaaatgggagccagaggactggaaattccattgtagttctgttgtagttccctgtatcatcactattcaccacatccactgtttagcaatttggttaagganaaaancagtatcttgagtgtaccttggagcttttganttcaagatgctccaaaaccttt

SEQ ID NO: 376656 - DNA, 456 bp, Homo Sapiens
  misc_feature (39)..(39): n is a, c, g, or t
ccctggggccctcaaagtgatcccacccaaccgtggccntccccaaaagtgctggggattacagggcaagatgctcaaaaccttttatcaattgttgaccctttaaaatcccccacaatatatcttgacggtaaactaaaatggtatttagtttataatggaaagcattaataggatatgtagaatattagatttagaacccgggcgtatgaatcttagcataatgcttcctgggaaattctgaaattgattccatttctgccgttacaaacacacacgaagttcctagttcactgggacttcctgatttgttcttttagcttgctccttctcacctagaagctctgtttatttctgagcaaccctggggcttgtctcataggacaggatttatttatctcatcaaggctgagtgtgccttaggaagtcataaacataaaaagagaagaaaaaaaa

SEQ ID NO: 376657 - DNA, 548 bp, Homo Sapiens
  misc_feature (22)..(22): n is a, c, g, or t
aagacacaacaaaggtgacagnatatatatgatttttgtgtccgtgattatgttccctagactgtaagggcatcttgctaaggactcactctcacctgcctagctttgaggaagcaagcagccttattgggaagacctacgtggcaaggagccagccaaaagccaacaagatacagagattctcagtccaacatcccttaaggaactgaatgcctaccaacaaccatgtgaacttggaagcaaatacttccccaacagaatttcagatgaaactgcaacttcaggcaccacatcttgaatgcagccttgtgagatccttaagcagaaaacccacctaagccatgacctgattcctgacccacagaaattgtgagatcatgagataaagagtgtatgttgttttaagctgtgtaagtttgtggtaatattgatacacagaaataaatatcatttcaaatgctggcaaaatcttatttaaactattaatttataaaataaatctatccttcaaatatcgtaaaaaagtaacatttacttcaggtctgcga

SEQ ID NO: 376658 - DNA, 653 bp, Homo Sapiens
atgattcacccttcacaatatttatttttgaggataaaagaaaataatgttagtcttatgtgttaatcataaaaaatacatgcttaatgacaggaaaacagcaagtcattttttctagttctttaaaaatattttaatcgtgcaaaatcaccataatgtactctagcacaatgctaaaatgttatctaagatggagtggcttttattagttttacaggatgtatatttggcaatagttcttaaaaataattactcaaaaggaactctaactctattattttagaaacaatattttaaaatacagcagtaagcaacaaaaactattgctctttatacatttttggcataacactgccatacggttacagaattataaaataagtattttatagtaccatacagatccagaaactggttacaacttctaccacatacacatggtattggtactaacgaacatgcacagcattctgtaattcatactgcagttgaatacagagcacagagaaggcccagtggccactggagaatcagagcttatgttataagtaaaacacacatctttgtaacaatcgtaggcattttcctgaaatatttaaaatacaagggacacaatagtttccaaaatgacataatctaccatccttcttaga

SEQ ID NO: 376659 - DNA, 512 bp, Homo Sapiens
  misc_feature (46)..(46): n is a, c, g, or t
  misc_feature (70)..(70): n is a, c, g, or t
  misc_feature (91)..(91): n is a, c, g, or t
  misc_feature (467)..(467): n is a, c, g, or t
aacaacctaaaataaagaagggccttttttctgttaatgttaaaanaagggaacaaggcaaaagactcangctgttttgcccaaaaccccngtcgctttcccccaactgtgcaggctccgtattcctgctgaagctgctgttggttaattccctgggacccctgggcgatgcagtcacaggtgaaggaccctgggcgatgcagtcacagtggggtgggctcaggctgtgcttgtttcagagacgattttggcttgttctgctgtgtttgtctattccatctaaaggtcttttgggggctggatgagtatggggcgcataccattgttctgtcgtcagagcgccctgcagccatttctcgtgaactcactcagcacttatgcttcttgggtgtcaatgccaccaaactacttggctgccaggtccaagagcgtgccaggctgttgcccagggaaagaaatgggcaacnaaaaatggactaagtcacagcagtcaggtccccgtggaggaggtg

SEQ ID NO: 376660 - DNA, 470 bp, Homo Sapiens
  misc_feature (420)..(420): n is a, c, g, or t
ggcataagaaaatttgaattgctaaaaaactaaattgacaagataagtagaatacaattaatacagctttgattgatacattgttgagaaaataacatttaccaaacaatatgtccatttatatctaatgataagataggagtctcagtgatttttcttagtgtttttcctgtaaatttttaaaaaatctttttgacttctaatttcttgtctgctgcagaaactagttcaaaaggtaagctgctttcgtcaaaagttttgaagtaacatttttttgtgctttatatttaccttcttaactttttatcgaagcatactaaggaatacagataaatgaattttcacaaactcagtgcacacatgtttttagccaaaaggcaggaatatttctaggctcccaggaggcatgccctcccgggngctcccttcccggggtgttacacactggcacccctggaaggtaatccaac

SEQ ID NO: 376661 - DNA, 233 bp, Homo Sapiens
  misc_feature (167)..(167): n is a, c, g, or t
ttttacacataatatactttatgtaagttcctatagtgtcccaagaaacaagttttggaggcaaaatgtatccttgaattaacaatttctacacttgattctgtgtagtattagtgttgctgagcaattcaaattttacattattttaatgttatccaataacattnacagatattttcccagtgtttgaatatttgctgtagggtacagttgtgtacaaatacttaaaatgc

SEQ ID NO: 376662 - DNA, 253 bp, Homo Sapiens
cagcaaccacctgataagttctctcaacactaagatattacaaacggctctttcaggggcagggctatatgttcttaaatacattttccagggaatgaatacaaaccatttacaaaatggggaacaggagtttctaagcaaaaaaagccagagcccggcttcctcccctcgggcagactgcactgcctccacgtctacctgggcgccacgtgtagagagggccagccgcagcccttgcctggggggagggtct

SEQ ID NO: 376663 - DNA, 583 bp, Homo Sapiens
  misc_feature (513)..(513): n is a, c, g, or t
  misc_feature (528)..(528): n is a, c, g, or t
  misc_feature (537)..(537): n is a, c, g, or t
  misc_feature (548)..(548): n is a, c, g, or t
  misc_feature (561)..(561): n is a, c, g, or t
ttcacagctccagaggctgaccctcatccactgggagtctcaggaacaccccgtgttgaaggtgagagctccaggctgtcctgcacatcagctgtgacactctgggactgttcagtactctaggaagtgggtcaggcaccttgggggcccaacgctgctccgtggggatgtctgcttgcctgcctggttctcttttcctgctgtttcctccagcagggaggtatcagaggcggggacacccaagtaggcctggcatgggcagaaaggaggtcacagctaaggcggtagagtggggttggcaccagccactttgtctgtttcccttgtggatcttagcctgtcgtctcccaaccccagctgcccctctgtctccccgcagctggtaggtgagtgctgtcctcggctcactttcctcaagctctccggctgccacggtgtgacttgcttgacgctctggtcatgcttagccaaagcctgctgccagcttccataagccttggaacttacaagcanttccatgggtgaagncctgttgtncccaagggggnccttgaaaaaaanccaagggccggggttaaagggt

SEQ ID NO: 376664 - DNA, 351 bp, Homo Sapiens
aggaaattacaaaaaccggttggggcaagtcccatcccttgctctttagtggtcccacagaatgttggacccaactatggcataaaagctctacattgagtggcaagactccctggttgacactggagtctttatcgaaattttcccggattaaattgtcctaatttactaatgcctaacctgaggagagtcaggagggacaggggtacttttctgaggtagagagctgtctttgacttggcaagtccccacagggtataacaaggcaagcattaaatgcaatagtttgaggtgaagttgacttggttatgttaataactagatggtcagcaatagagcgatgaaagaaaa

SEQ ID NO: 376665 - DNA, 667 bp, Homo Sapiens
  misc_feature (46)..(46): n is a, c, g, or t
  misc_feature (107)..(122): n is a, c, g, or t
accctgcaccccaatagtgaacacagccctagatgagggaaaatangtaactatctcctattttaaaaagatacctcttttccctccccacaggctgaaacttttcnnnnnnnnnnnnnnnntccagatctagaacaccccgcaagtaatttcttcccattttccctagttttgctgccatgttaacataaaatctggatccaggtaggcctcttcattagctttctatttcagccataaaacaatactacacttacagctgaatactgactccaaagcaatgtgcatgcccacattttatctcagggagggattgattatgtttctgctccttcagaatgaaaactgttagctttctgaatcctatttatccaaggtgagggaagactttttaaagtggccaaaaggagcacaggacttgagtattaaaatataaaggtggcccccattccagatctttggtacagtcatcaactataataatctgattgcccaccccaccaaaacagcacattttgtaattagaagtgattttgattttccttttgaccatgtaaacaataggggaaatgccttgggaaactactttgcaatgcactctcatttctcttaaatacacaaccagttctccctttgataagttcatggggggaaagaatagagtagg

SEQ ID NO: 376666 - DNA, 310 bp, Homo Sapiens
  misc_feature (239)..(250): n is a, c, g, or t
ccccggggttggcaaacctacctccccacgggccgaatttggccccagtctgtttttgtatggtgcaaacctaaaaatgatttttacatttttaaagagttataaaagaaaaaaatatgtggtctgtgaaatctaaaatatttactacctggcctgttggaggaaaggtttgccaatctctgttttataccattaactatgagattaacaaaaacttttacctttgtgcagaaggtttnnnnnnnnnnnncatggttaaggaaaaggagacatgttacctcttcatacactcctataactgtggcattgc

SEQ ID NO: 376667 - DNA, 481 bp, Homo Sapiens
  misc_feature (34)..(34): n is a, c, g, or t
  misc_feature (39)..(39): n is a, c, g, or t
  misc_feature (45)..(45): n is a, c, g, or t
  misc_feature (70)..(70): n is a, c, g, or t
  misc_feature (82)..(82): n is a, c, g, or t
  misc_feature (126)..(126): n is a, c, g, or t
aaaccccggaaactaccctacctatccccccctncctangggganagtgtgtgtggtatgaaaggacccngtaccatattangaccatatatataccaccaccatatgtattaatatccccccccnagagaccatcccccctaccatatatgccaggcccctgtatatatatatagaccacacctcacatgtatcccctcctattgctggagagacaaggccaggtgaaacacttggcgacaacataagataatatacatatagttagatactacactgaatatactaaatattcaatagagaatcttatgatcagacaataaataccagtgggtatgatctgaaaggagagatctggaaacactttcataacttgaacacaataacatttatctttttgaattacaaacagaaagagctcatggtttttctgtgtttaaaatacctgtaagaaacataaaacaccagtgaaagtaatctt

SEQ ID NO: 376668 - DNA, 472 bp, Homo Sapiens
  misc_feature (117)..(143): n is a, c, g, or t
  misc_feature (322)..(322): n is a, c, g, or t
  misc_feature (402)..(402): n is a, c, g, or t
  misc_feature (452)..(452): n is a, c, g, or t
  misc_feature (462)..(462): n is a, c, g, or t
aacaattgttcaaaagctataaaacctgaatgaaagctgaagctgaatttataagccttgttgcatatgagccaaaagtgcaaaaagctctatataatgaactaacctgccactcgnnnnnnnnnnnnnnnnnnnnnnnnnnntaaaatcagactgttctacaaaattgtgtatttgtatttttgtgtacgtacaattttctgctaagcagaaggaggatgtagtataggatgctgtgagaagagatttggtttaatcctatttctttgttacttatttttgttaacatcagatgcctgtctttgtcttatatgtgtatgancactgtttgggaaacctgcagtatctctcttcctgaggtccagaggccattaaagaataaacaggggcttagaggtgtcntgggccaccaaacacaggtaaggccaacagagttcgggctcccgtacgtnggtgttcggnggggccccgg

SEQ ID NO: 376669 - DNA, 431 bp, Homo Sapiens
  misc_feature (306)..(306): n is a, c, g, or t
  misc_feature (411)..(411): n is a, c, g, or t
  misc_feature (421)..(421): n is a, c, g, or t
aatattaaacatcctgataccctcacatttaattcaaaaacttgtcctcatgatgtcattcaatataatatacttgaacattaaaatgtatataataaaatatatttattcaaagatttattcaaaataaaatgaatatataaaataagagacagggaaagagaggtgtctggggagtgactagtgattagtatcacagaaatccttgcttcatctttaccgaccccctggtgaaagacaatttaatctcccgacaaactctttctcattattgtataaacaaaaaacagtctctcttactttaangacaactaaaaggctgccatttacttcatgacccctatctcccttttatcagtcactcttctgttaagcgtattctttgcttccatgtttttatttgggtcaaanctgactatgntgcattgttg

SEQ ID NO: 376670 - DNA, 410 bp, Homo Sapiens
  misc_feature (355)..(355): n is a, c, g, or t
acaaaagaaagaggtttaatggactcacagttccacgttgctggggatgcctcacaattatggtggaaggtaaaaggcacatctcacatggcagcagacaagagaagagaactcatgcagggaaacccccctttataaaaccatcagatctcatgaggcttatttactttcatgagaatagcccaggaaacacctgccccccatgattcaattacctctcaatgggtccctttcacaacatgaaggaaatatggggagctctaatccaagatgagatttggggaaaggatacagccaaaccatatcaggagccaacaaaggatgataaggcaccccgggggaccagcaggaagangagttcaggttcccattttcccaccgtttttgaaaggaggaaaaaccaggggacc

SEQ ID NO: 376671 - DNA, 491 bp, Homo Sapiens
  misc_feature (29)..(29): n is a, c, g, or t
  misc_feature (441)..(441): n is a, c, g, or t
  misc_feature (460)..(460): n is a, c, g, or t
  misc_feature (481)..(481): n is a, c, g, or t
atggtgacaagtttggagcttttagcccnagccctcatcctgcaggaaggggtgagggattacacattgagttaaaaattgattatgcctacttgatgaagcctcaataaagaaccctaaactactgagttcagagtgcttccaggctggtgaatacaactatgtgccaagagggggcacaccccaactttacacatacaaaagctcttgcacacaggatcttgccagaccttgccctatgtacctcttcatctgggctgttcagctgtatcctttaaaatatcctttgtgataaattaggcaatagtaagtagaattgcttttctgaggctctgtggaaccactttagggaaattatccaacactaggaaggggagggccgggaatctctggattttgtaggccaaggtcaggacaggaaattgtgaataatctaggggncccacttacttgtggattngccttctgaagtgagggggcngtcttgtggg

SEQ ID NO: 376672 - DNA, 508 bp, Homo Sapiens
ttttcttgaaattttatactaatctgaaaaaaatattgcaaggaaattctgggagactggtggcaatactgcctaaacatcacagttatctgaggaattttttaaaaatacataggctttattctagaggtatgcattccattttgtttttacatccatgggtagaccctagaaaataatatttaatagggtgcactggggtaaagagaaaagtttactaatagactgtgaaagaggaccagcccatgtctgcctcagcaagcacacccagcaccccaagggctgagaagattcaaatcctcaatagattgcaaacttcttaatttcctaacatagcaatgttcccaggaacactggatgaacagctctactctagaacagagattataaaatttagctgcatattagaatcttcccaggagcttttaaaaaactctacgcctaggctataccccggaatgattaaattagaatatctgacagtaggatcaagacatcagtgatttat

SEQ ID NO: 376673 - DNA, 318 bp, Homo Sapiens
  misc_feature (249)..(272): n is a, c, g, or t
  misc_feature (305)..(305): n is a, c, g, or t
agcgttcttccgagagatggcatcgtgatgcgctatttattttccatagaaataggaagttagacggattgtctcttttctgacggggagggggtctttttgacaggagcagagttgatgtcctcaattttcatatttattggcaaaaggaagagaagaggaactttgggttggaaacaaagaaccaataacattaaaacattattatttatatattctagctgttattagaatcagactttttttgcnnnnnnnnnnnnnnnnnnnnnnnnagggaaatcaaagaaatcgaagcaatatcctgnttagaggcaagcc

SEQ ID NO: 376674 - DNA, 369 bp, Homo Sapiens
  misc_feature (34)..(34): n is a, c, g, or t
tttaaacccttccattatattttccttggattgncctgtgaagaaagtaccccccggtccgccccggaatacccctacagtagaaataactgaacacaaacaaactgatggaaaaaaagagttaactattttatttatttccaatatttaaaaggaaaaaagtgcctgacatggcacagtatttttgtttaaagtacctcctacttcaaaagttaaccgcaattttgtgaagacatgaaatcataagagtacttaatgtaaaataaaagactgcatattaactctaaagaaaaatgccccacattttaaataagaaaataaagatcaactctgctctctcaggctttttaaaaagccattcaaaaaaaa

SEQ ID NO: 376675 - DNA, 514 bp, Homo Sapiens
  misc_feature (420)..(420): n is a, c, g, or t
  misc_feature (461)..(461): n is a, c, g, or t
atgagaaggaaaaatgaagactatagtatcacaaacacagaggagctcaatctgcctgcagacattcccagctacttgtcttcccaaggaacgctgtctgagccacaggaaggctacagcaactctgaggcaggcagtcatcagcaacttatgcctcctgccaatggatatatacacaaaggcactgacggtggcactggtacccgggtgatttgctcagattgttatgacaatgccaacatctactccaggacccgagaatactgtccatacacctatattgctgaggaggacgttcttgatcagacactgtccagcctcatggtccaaatgcctaaagagacatatttagtacatcctccccagggatactacttgccctaggagagcctgattaccgttcagccaacagaggagccntttgccttttcccaccaaccatgaggagggtaagtgaggangaaatttccctccacacaggttgaggcggtgaaactttgcaggggccctgttg

SEQ ID NO: 376676 - DNA, 440 bp, Homo Sapiens
  misc_feature (177)..(196): n is a, c, g, or t
  misc_feature (232)..(232): n is a, c, g, or t
  misc_feature (425)..(425): n is a, c, g, or t
aaaactttttatttatttattttacttttgagccagggcctcactctgtcacccaggctgggatgcagtggcttcacacagctcactgcagccttgatttcccgggctcaagtgaccctcccacctcagcctcccaagtagctaggactacagcagcatgccacaatgtccacctannnnnnnnnnnnnnnnnnnngcagacacagggtctcaccatgttgcccagcctggnctcaaattcctgggcctcaagcaatcctcccaccttagcctctcaaaatgctggggattacaggtgtgagccacagtttttatactttaaataaaatttttaggatctcactaaattgagttatttaaaatctgtgatctgaggaaggctacttgtcaatattataactgggatattacatatattttgggcntttcaaaatttttac

SEQ ID NO: 376677 - DNA, 445 bp, Homo Sapiens
  misc_feature (13)..(13): n is a, c, g, or t
  misc_feature (407)..(407): n is a, c, g, or t
  misc_feature (412)..(412): n is a, c, g, or t
ctcgtgcagggtngtgttgagcactggtctgagcaatcagcaaaccatggcctaagggcaaaatctagtctgctgcctttgtacagcccagaagccagtaatggtttttacacctttaaagggttgtttaaaagcaaaacaaaataacagtaacacgtgacacaaacaggatgtagtttacagtctggctctttataaaaaagtttgatgaccctagcctagacctggaggcataaaagtaaacagttaaaacaaataggagtatgcattacaaagaaatgcctgagctagagaagcaacaaagtgacctcactttacatgtttagggtggtcagagaaggccatctcagagagtgggcattttaaagctgagaccgggcaggtgagggagctagccatgttgagtngcttncaaggcttgatgttaattcagagttgagggatt

SEQ ID NO: 376678 - DNA, 426 bp, Homo Sapiens
  misc_feature (11)..(11): n is a, c, g, or t
  misc_feature (108)..(108): n is a, c, g, or t
  misc_feature (205)..(205): n is a, c, g, or t
ccaagggaaanggaaaagtgtcaggccaggtaggtaaagaaaccactccctaaacttaattcctagctccctgaagccaactgccagccttggagccaatggctgtanttggctgtgtgttacaggttggccaaactgattgccatcaggtcagacaaaactgccttttatggtgtagtctgccagcttcagacatatgctgtantgttgttattggctagactatttattagactattgttggactattttttatcaaatgctttaccccacgcctgtttgtattgggagctctggaccaatagtgtctctcctagtgacagaaatatgagcatctgtggattacacagcctcatccctctctacaatattccagcccatccaaaatgctatattatgaattaaataaatatatatgtattcatg

SEQ ID NO: 376679 - DNA, 427 bp, Homo Sapiens
  misc_feature (44)..(44): n is a, c, g, or t
  misc_feature (389)..(389): n is a, c, g, or t
  misc_feature (409)..(409): n is a, c, g, or t
aaaaatgctcactgatgtctttctgtatctttcttaaactatanagtcatgcactgtataacaatgttttggtcaactataagccacatgtatgatagtagtaccataagattataacactgtatttttactgtaacttttctatgtctagatgcacaaatacttaccactgtgttacagttgcctacaatattcaatacagtaacatgctgtaaatgtttatagcctaggagcaataggccagaccatataacctatctgtgtagtaggctatactatctaagtttgtgtaagtgcactctatgaggtttgcaacaatgatgaaattccctaatgacaccttgcttagactatatcccatcattgtgctatagcccatcgttctggantacatgactgtattcagganaggaagggaagctcctca

SEQ ID NO: 376680 - DNA, 474 bp, Homo Sapiens
actttattttccttttccaatgaaggtaaaataaatgtttcctatatcacaaatatcatatgcataaagataaagtagtttctgtaaaccatttctacatgccagtatttcatggcctcatatggagaaaacacagccacttctccagaaggtgacttcactcccaaatgccaatgccatctacctcctgacaggctctatcaagcagctgctaccaaagagagaccagcccttgcatgtctaaactggctgccagtttgttttttcattgaaattaagtgctaccgtattatgaggctgggatctgtcaagccccatgtgcagacagtgggaccaattatcaagtggcaggcggcacctggttggctacagcagctgagagactcaaggcatcacacacagcacagcttaatatgattgctttgggggagctcaaaagtagtagatcaaaagcaacagaatgagtcaaccagc

SEQ ID NO: 376681 - DNA, 326 bp, Homo Sapiens
ccctcccttttctgcctaaaatttctctgcctcctgcctctatcactgtatcactagtttgaagtaaacccatctggaattactgattttaacaaatcacacagaattttcaagcacctttcctatgcaaatgacttgtgaagacatagagtatagtatgccgttaacaaacagcccagcagtgtgccttgcaccttgtaggtgtacaaaatattaagtcaattttataattgaaggaggtaattttaaaatgctacatcccatgttgtgtaattttattcattggtcattttaaataaaaacaaaagcccagaataaaccaaaaa

SEQ ID NO: 376682 - DNA, 585 bp, Homo Sapiens
  misc_feature (72)..(72): n is a, c, g, or t
  misc_feature (433)..(433): n is a, c, g, or t
  misc_feature (462)..(462): n is a, c, g, or t
  misc_feature (493)..(493): n is a, c, g, or t
  misc_feature (512)..(512): n is a, c, g, or t
  misc_feature (537)..(537): n is a, c, g, or t
  misc_feature (542)..(542): n is a, c, g, or t
  misc_feature (559)..(559): n is a, c, g, or t
gaaaaatgatgtgaattacacacgtaagaactcacttgaattttatatatgaagaaacacgtgacagtaacnttctttggaatgtgaagttcttatcagtacagtttggacaggcctaaaaggcatgggatgatgcagaaatgctgaattatttttcatacttaaactttgtgctttctccaaggtttaggttaatcagttcagatatgagcaaaggtatttctaaaatggctcttctatgaaaagcaatagtcacatatgccaaggccaatgtttccttcaaggtgccagtagaaacaacagaaaataacatcctgctgaaaggatggcaaagtgccccgccccaccccaccaaacacaatttgggtcttttccttcttttaataaagcagggctgttatttatcttgaatatatgtttgcttgtttaggancctattaaggatattatttattttggccnctaggtatttaacattttgtggcaccttttncataattaccttcttaccnttcaaattttgactcaaagtggganagggnagtgttggatattgggngtgccaatgtatatactcccaggagc

SEQ ID NO: 376683 - DNA, 382 bp, Homo Sapiens
  misc_feature (252)..(264): n is a, c, g, or t
  misc_feature (366)..(366): n is a, c, g, or t
gcaaattcaatcaaaacttactgacatcaattgaaatcacattagactttgtaaaaaataggataattatgcatcgtcttgtaagttgcaggtattgtaacaactctaaaatgtgggcctgtttgaataaatgcttatgtttgctggctctacgcaagcagatgcagaaatgtataatctgcataaataaatcaggagattatttttcccccttatagctctttagttctatgagattcaattaattcaacnnnnnnnnnnnnnaatgggcccaggggtaatgaggtaagcaggtgttagtgtgttggccactgaagcagggatagcccctgggtacaggatttgtcacatgggggttactttttnaaatctcccttggatt

SEQ ID NO: 376684 - DNA, 368 bp, Homo Sapiens
  misc_feature (34)..(34): n is a, c, g, or t
  misc_feature (321)..(321): n is a, c, g, or t
caaatgtgtttcccagttaactagggtttactgnttgagccaatataaatgtttaactgtttgtgatggcagtattcctaaagtacattgcatgttttcctaaatacagagtttaaataatttcagtaattcttagatgattcagcttcatcattaagaatatcttttgttttatgttgagttagaaatgccttcatatagacatagtctttcagacctctactgtcagttttcatttctagctgctttcagggttttatgaattttcaggcaaagctttaatttatactaagcttagggaagtatggctaatgccaacgnggtatttggttctccttaattccacatgactgagggcatatgatgga

SEQ ID NO: 376685 - DNA, 493 bp, Homo Sapiens
caatccacctataattggtcaaagtggttgagaatatattttttagtaattgcatgcaaaatttttctagcttccatcctttctccctcgtttcttctttttttgggggagctggtaactgatgaaatcttttcccaccttttctcttcaggaaatataagtggttttgtttggttaacgtgatacattctgtatgaatgaaacattggagggaaacatctactgaatttctgtaatttaaaatattttgctgctagttaactatgaacagatagaagaatcttacagatgctgctataaataagtagaaaatataaatttcatcactaaaatatgctattttaaaatctatttcctatattgtatttctaatcagatgtattactcttattatttctattgtatgtgttaatgattttatgtaaaaatgtaattgcttttcatgagtagtatgaataaaattgattagtttgtgttttcttgtcaaaaaaaa

SEQ ID NO: 376686 - DNA, 520 bp, Homo Sapiens
  misc_feature (319)..(469): n is a, c, g, or t
tgcagaaggcgtttagaaatgaaacaatcattgagaagataggaggcagagaggataaactggagtagtctttagacttgcattacctaacagggaagcagtgagtttccacagtgcactacgattgcttgtagacaaaacattttacattttacattttacatttcacatacaggcaacatgtgtctgctgtccctaaacagtctagagggccaagtttcggtaaaaattcaatctcaccagggatgggcaaatggcatgtgagtgagcaacttcaaatagaagagtgaaaagcagcagaatactcccacaaaataannnnnnnnnnnnnnnnnnnnnnnnnnnnnnnnnnnnnnnnnnnnnnnnnnnnnnnnnnnnnnnnnnnnnnnnnnnnnnnnnnnnnnnnnnnnnnnnnnnnnnnnnnnnnnnnnnnnnnnnnnnnnnnnnnnnnnnnnnnnnnnnnnnnnnntgcaggaaattctactggataacacttggcatagataatagttcagaaaaa

SEQ ID NO: 376687 - DNA, 538 bp, Homo Sapiens
gatttaagccacagacattgcccaaattatagcctagcactaacaacactaacattaaagtaatagagtactctttagcttgctgttgtgatggatttttaaggaagcagtatttccttagaaaccacattaaaacctaccaattttgtgaacatttataagaatacatctgagtcatttttgttagagaaatattgaacactaaaactgtagcagttctaagatagagtgctgttaaatgttttgaacaacaggagtttattgcatagactgaactaataaaggactgaaataattttttaatgttatgaaaaatataattcttcagcgaactaaggtatttaaatactttgtatatcttggcaatacagttacttccattgcactggacttaaaaggatgtccctcattttgtaacttattgttttgataatgaacttggcagagtttataaagtctgcagagtagaatacaaattgaccattaattttttggcaataagaatgacatcatgttatgacatattacagatctttca

SEQ ID NO: 376688 - DNA, 518 bp, Homo Sapiens
  misc_feature (427)..(427): n is a, c, g, or t
acctcaggtttctcctccggtaaaatggggctaacactgcctaacataaggtgctgctcttccatgccagtgagacaggatgtggggaaagcacctagccccttgctcaataagtagcatctgttgttattctacacacacctgcaggggtctgctatttgatactccttccttcaccacccttcactcacactttgtttttggttagagagtctccatgtccaataaagcttttaagttacacacaggtaaagtattgggcccagaagctgtatttttatttcacgggactttgatattttcaatatgcttcagtgtaacacaaagcttcctgtcaggccaagctggaatgctgccgtcttccctacatgtaaggaattacagtgctggccaacatgaggttaataccaccttacctaggcctccngggttcatttcctcccggggtttttctcccggggtcctcatgggtacaggccccccgtaaccatggaattcttggggccagtcccatcaaa

SEQ ID NO: 376689 - DNA, 375 bp, Homo Sapiens
  misc_feature (30)..(30): n is a, c, g, or t
  misc_feature (47)..(47): n is a, c, g, or t
  misc_feature (115)..(150): n is a, c, g, or t
ggaattattattcaaccccttaaaaaaggnaatggaagtccttgatnccattgcaacaaacatggattgaacattgaaaaacattcttgctggccactcgtggtgggtcaccctnnnnnnnnnnnnnnnnnnnnnnnnnnnnnnnnnnnnagattgcttgaaccccaggagttcaagaccaccctgggcaacatgggacctgcctgaaaccccatctgtaaaaaaatacaaaacttagctgggcatagtggtgcaaacctgtagttccagctacccagggtgctgaggtgggaggatcacctgagcccaggaggtagaggctatggtgagccatgatcatccactgcattccagcctgggtgacagagcaagccc

SEQ ID NO: 376690 - DNA, 470 bp, Homo Sapiens
  misc_feature (22)..(22): n is a, c, g, or t
  misc_feature (379)..(379): n is a, c, g, or t
  misc_feature (454)..(454): n is a, c, g, or t
acgagatagttaataaacgtantaactcaattagcatttcccctctctatgcaaccttcctcagctccctggcagacagtggcagcagtgtcctctgtgtccccacagcactctgcattcacctccaatggcacatttcaatactgctatggctatatgtctgctacacactcaggggcagcaattttttgtatcttccatctagttcatagtaagttcttacattctcaatgaatggctgacttgaagtcctagaaaggatttcacagaagatttcacagaagagaaagaggaaatgcactgaacctatcatctgaaggactgtgcttaaagataaggaggtgcttattgagatgaaggatatgaattagtaggaagngcagctgggagggagactggggcctctccttttccagatggctttaaccagtggggcagatgttgtgttctaaanttggggtcatgttcgg

SEQ ID NO: 376691 - DNA, 480 bp, Homo Sapiens
aagagtgtacaataaaagtgtccctccttcccccagaagcaaacacagtggccagttttttcggatccttcaagaaaatattctagacatatacagacaatcttcacctctcccctcactttacaccttgcttttcccactttgtgatagaccttagagattaagaaaacatgcctgttgcatggcaagagtgatgccatcttgatgcaaaaccactatgaccaccaatatctgactcccgcatcccaaagtgttgggtagcataaataattccacacaaagatgtctaccaagcctccccaccagctagtgctcataagtttcacaagaaagtataatgtgtgaccagctgcatgtttaaccaaaaaagcctctatagaaagcatactttctggagggtaagtgcagggatccaccatcttgcagccacccaagacatcatttctgttcctaagtccctattaaatgtttacttctgag

SEQ ID NO: 376692 - DNA, 224 bp, Homo Sapiens
ggtccgtgccaagctgctccctgcccttgccctttccctttccctggggtccaaaccacatgtgtcctgcctctcctggccctaccacattctggtgctgtcctcactcgcccctggcccagaggctcctgaagatgctgggcgggtcctggcacagggaggagcagctctgtaaatctgtgcacatggccactcttggcctaataaaggaggtcttcacagtc

SEQ ID NO: 376693 - DNA, 509 bp, Homo Sapiens
  misc_feature (26)..(26): n is a, c, g, or t
  misc_feature (56)..(56): n is a, c, g, or t
  misc_feature (87)..(87): n is a, c, g, or t
cccgggacggcttaatggtaaaagtnaccagggtttccaaccgccacaaagaaaanggtgaaatccctggacctcccgggaatcccngttaattggtccattttccccccaattcccctcctgtaaaatatccaagattaagtacttgcctgtttcctaataaagggaagggagcccgagaaaggcaaatctacgaaaacctaactactagttacatttgagagtgcctaaaaaactttttagataacgattagcagtatttaccaatagaaactttctagatttggatggatggcctaccagcagtaccgatatcagagtctgtggcaatggtgactcagtgttcttctcaaataccacaacttctaagttaaaaagaaagagaaagtggtggggaggagaaggagggaggagatatactaacaatactggcaaacagggaatagcaactgtctgattttttcccctctaacatctagcacactacaagctctcaaaaaagtttgtag

SEQ ID NO: 376694 - DNA, 498 bp, Homo Sapiens
  misc_feature (137)..(137): n is a, c, g, or t
gatgaaccaacaaagattttatagcagttttgttggaggaggtttcatgcttgaggaaaaccttgatatacagaactggaaaatgggtgagtctaaaggcagcaagacccagtagaatgcctgttgaagttacccantgtgtgataggctgggctggagtggtatagtgaagaaaccctgcaaaggataaaatacctgactaaatcaaatatacaaacgaattaagaaatcagttaaaaagctgacttctcagaatattttcttctagaataatataaaatttgatactaaaactacctgtagctgttttacatttttctgcagaatcacagggatattggacttgagcaacaagtgatttaaagttagcgtcttgggccgtgcatgctggctgacacctgtaattccagcactttggggggtgctgaggcaggaagatggcttgagcacaggagtttgagactagcctggccatcatagttgagaccttatctccac

SEQ ID NO: 376695 - DNA, 399 bp, Homo Sapiens
  misc_feature (380)..(380): n is a, c, g, or t
aacaatttaggggggaaaataaaaatgaaaatgcattctgagttacataagagcatgtttactcttcacaaagccatatttatttatacttccaccaaaagccattttttttaagtctgtagacatatgataaaggacttttagtggacttggaagcatttttcacaatgggctagaatactgaggttgaatgttatgtaggaaacccacataatataaaattattttacacttgaaaaagaaaacaatatgttgtacagtatagctataaacaaatagcattggtgggtctgggactagttaaaattatgaagcaaagtttatatctacaatcaactatcccttgggactcctcctcagttttgcttaactctctcatnctgcttcccttttttctgc

SEQ ID NO: 376696 - DNA, 692 bp, Homo Sapiens
  misc_feature (41)..(41): n is a, c, g, or t
gttgtaaatgtcctgtgtaaatcagggaagtaattcatatncaagcccagtatactgaggagaagttggaagccaggtatcatgattcctggctgaggactaggctacgtgttcactgaatgagactgcccaaggcttaccagagattagatgctacagaatgagagtggaattgtaatattagagatagagccgtggggaatctggagttccaacccagtcaacatggagaaatccttgttaacttcagttatctagctgagataacacaaaagataggtttgaggaacaaggaccatgctctaatataaggcctactctagacccaggcctaagacctagtaaaagaaggcccccaattaattccttacagggtagacccaaatttggacaatgagtctcacccgagatagagaagccctgggaaatatcctgagctttcagcagatcagcataccaaaggttaaatccaaacctatacaagttcaaggagtcaactattaactgacttatatgtactagaataaaaatcactgctcctcagaagaaattaacagaaccatatttgcaatatatcccatgttgaacttttaattaccagacatgcaaagaatcaggaacatatgatctatagagcagaaaagagcatgcagtagaaatcacctctgaggagtccatatttggtttaacag

SEQ ID NO: 376697 - DNA, 480 bp, Homo Sapiens
  misc_feature (21)..(21): n is a, c, g, or t
  misc_feature (42)..(42): n is a, c, g, or t
  misc_feature (57)..(57): n is a, c, g, or t
  misc_feature (83)..(83): n is a, c, g, or t
ccccatgttaaccccaggaanggccctagaaaagaaagttgnagattcctggctggnaaaccatgcctagaggtcctgccagnaaaagtggtcttgggtctgaaggtttaactggagttgtccgagggtcctagtgggaatcaaacccaaggccatctggagtgcaggaaacaagagatgatggccaaagtccctgaagacagagaggaggctctgggttatattagctggagggattcagcagcagatgccagcaggttgcacagaaaggccacacttcagccttgtagctcacagaccagtgtcaaaccagattccccacgggcttgttggcatgcctgaaaacctcacactttccctccctgatgctcagaaacatctcggaagaagaaagaacaaaaaggaaaaagtgctggtcctgatttaaattttgaaatgacaaaagttgtaccaaatccaaagctttttaaccaaaacaag

SEQ ID NO: 376698 - DNA, 397 bp, Homo Sapiens
  misc_feature (255)..(255): n is a, c, g, or t
  misc_feature (321)..(321): n is a, c, g, or t
  misc_feature (331)..(331): n is a, c, g, or t
  misc_feature (340)..(340): n is a, c, g, or t
  misc_feature (378)..(378): n is a, c, g, or t
gcatagcaaactctataatataatgggcaaaataattgaaggagaattggaagaagtttttatgtggcttttctattgataaaagccaagggcaccatttcaataactcaataaaggttaaactaagtgtgattcaacttcctgatgacttaacactttagataaagactagaggtgtggtgacaccaaccttcacttaacttgggataaagagttccttctcagtctgcttttgacatgagctaaagagaagantaaggtttttgttaccctaggtaagaggcatatttgtccatataatctggggaattaagggttagntaggggcctntctttgatnaatgccaaggttgtaattaatcctcttggaattatccncccataatataattttttg

SEQ ID NO: 376699 - DNA, 548 bp, Homo Sapiens
  misc_feature (435)..(435): n is a, c, g, or t
  misc_feature (489)..(489): n is a, c, g, or t
  misc_feature (501)..(501): n is a, c, g, or t
  misc_feature (521)..(521): n is a, c, g, or t
tggcacgagggttggccagagaaccagttggacatgtctgactatagctccagttaccaagatgtagcatgttatggaactttacccagggattctcctcgaaggaataaagaaggttgtacatcagagactcctcatgccttaaccgtcagcccttttaaagcattctctcctcagccaccaaagtttttcaagcccctaatgcctgtaaaagaggagcataagaaaaggatagccctggaagcaaggcctcttctaagccaggaggactctgaggaggaagaaaatgagctggaagtatttaacaggaagctaataagttcacagccttatgtacctgtgggagtttgctgacttcagtgtttacaattgccagcttgggagaacagggaatggtttttcctcttaaagtagatctgttcaaactcacgggtnttgggagaaagaagtgtccccgtaggcccttaccaccagcagtatttaccagtnggctactttttncccacagtgccttccaatgnccaccctgtcttgacatgggtgggtcc

SEQ ID NO: 376700 - DNA, 752 bp, Homo Sapiens
  misc_feature (15)..(15): n is a, c, g, or t
  misc_feature (39)..(39): n is a, c, g, or t
gtgactagcccttcnggggagggccatgcctgcctacantccgttcctttcctgttggaaatgtgccaagatgattcctttgttgactggaggagaagatgccacagttgttactttggaaaccctggagctatagagaagaccctttacaaagaaagagagtatgaaaatagcatccctctgtgcacccaacgagtacgagttcatagtaatgattcttataaaagaaggaaaaagcagtgataatgcatttggcactttgtttggtaggttttatagtttcaaatagtccttcttgtttactacccatggtagacatgtttaaagctttatgtaaaaacaagccagttagcaaacagtcctggaaaaatatggtgagaatggtttaattccggtcttcacatattctaaaaaattttaaagcctctaagtataaaatcagtgagttgaaagtaaaatttcttatttaaagaacccatctgttaatgtagtaaatgttggctttaaagaaatagctccgataaggactttttagaaggaaatacttggtaaaacttaataaaacaggtggttggctgcattttttaagcccagttttttacattttaaattgtctttattgtgtataaaaccagattagactatattcttcatctgaggagcatctatatgtttaatacacctaatgtattatgctggagtatttaaatgtaagtattttaatgagtaaatagaattaaccttttttacaa

SEQ ID NO: 376701 - DNA, 360 bp, Homo Sapiens
cctgttttatgtttggtttttgagaaggaatgaagtgggaacccaaattaggtaattttgggtaatctgtctctaaaatattagctaaaaacaaagctctatgtaaagtaataaagtataattgccatataaatttcaaaattcaactggcttttatgcaaagaaacaggttaggacatctaggttccaattcattcacattcttggttccagataaaatcaactgtttatatcaatttctaatggatttgcttttctttttatatggattcctttaaaacttattccagatgtagttccttccaattaaatatttgaataaatcttttgttactcagtagtgttctcataagtagcatg

SEQ ID NO: 376702 - DNA, 406 bp, Homo Sapiens
  misc_feature (116)..(116): n is a, c, g, or t
tgaggggtagtggtgctagggagaaggcaaccttcactggttttgaactcagtgcctaagaaagtctctgaaatgttcgtttttaggcaatataggatgtcttaggccctaattcnccatttcttttttaagatctgatatgctatcattgccttaataatggaacaaaatagaagcatatctaacactttttaaattgataattttgtaaaattgattacgttgaatgctttttaagagaagtgtgtaaaggttttatattttcacaattaacgtatgtaaaaccttgtatcagaaatttatcatgtttactgtttaaaatgattgtatttataaaattgtcaatatcttaatgtatttaatgtagaatattgctttttaaaataatgtttttattttgctgtag

SEQ ID NO: 376703 - DNA, 692 bp, Homo Sapiens
  misc_feature (31)..(32): n is a, c, g, or t
atgtgaaggaagataaacctaaaaccatgcnntcgtcggcagacagatggcattgtacttcttacagatcacagtacacatacggctgttggtgcatgtcacccacattaacaactctgggaagagcgatacacagctaattggacaccaccatggctgtttggaaacggaacgagttatggttactctgggagggaaggggtaacagatactatacaaccctgagtcatcaccagaagggaggaaatgcaaacttacgtacataggcgtcttcgggataaactacaatggccactgtgtcacagacagaagatccacacttagatctcggagacataaatgtgttagtttatgcagctctgaacaagaccatcgaagccgagggtgagagaaacacacatcaacatccaaagagattcctgtagctctccccacctgagggtccctcgggctttggctccagatgtgtcttggaaatgaactataatgaaggtagcacagtcatcacgaacacactgatttgctattctttaggggagcctggagttcttggggtgagcctgggctgtgatggaaggcataacaagaaagctgaaactgttacgagccaaacttcctaatctcttgcacatgtcaattcgactacagtgcagatgcattcttaactgtttttattttgtctgtgtcaggtt

SEQ ID NO: 376704 - DNA, 511 bp, Homo Sapiens
  misc_feature (114)..(114): n is a, c, g, or t
ccttttagccctttctaccttctgcccttccagtgcattccagaccttaatccaaccccagcaaggatcgcctcccattccctcatgagtctgggatgttttgcacatgaatgnaattaaaaagtcttccccagaatacagaagagtgatttgtcgtcaagccaaagaggctttctgtcttcctctggtgtcctctaaacccagggggctgccaaatgcccacagagacctccagggagagtgagagttatacttggactgacttcatcggtcagaaagccttcccctaacagcagcattatttctgctattaaccccatacatctctggataaagaaactgaaaacgtggcctttggaagaatcaacagtaatgttctgaaaaaaatatatattcttttcactgaccgaagtgttttttcaaataaataatcagaaatgttatgctacacaaagtttatggtatcccttctctactaattcaatgactcttcaatgtgatgatcccaagc

SEQ ID NO: 376705 - DNA, 484 bp, Homo Sapiens
  misc_feature (452)..(452): n is a, c, g, or t
  misc_feature (458)..(458): n is a, c, g, or t
  misc_feature (466)..(466): n is a, c, g, or t
gttagactcctcaaatgtctatcaatctgggctaccaatctcacagtttagacacctgtgtccctttctgctcctggctatgtggatgtctcttggggtgacactgctacaaatgaattttctgacaaattttagcaaatttgtcatttggcaaattatttgataaatggactgttaaacagacctattgcctgctcatattctctttcctttggaattatttcccaatcattttcattcatagtgactcttttctaatcccgttcacattctctctctgaactgcactgtccattgtggtatgctgtgctattcgccaattatgggatgctacataatgatcatgtttatgatgtagttcatggaaaatgatagccctgtacaaataaagtgctaaattctacagttacacggattaggaaaacaatgtaggtatatgatgcgctggattngcatgnggttgtcnatttggtgtggatatgtt

SEQ ID NO: 376706 - DNA, 440 bp, Homo Sapiens
ggaggattacctttgtctctcaaggccaaggcaaccttggagcctcctcttctccgagactcctaagttacccagctatccccctcagtaagaccctcaacctggaaatctcccaactggccgaggaaaaacccacatccacggatccatcccacaaacccagtgggccctgcttcccttgccaggactctggtaaagggcaagcaagtgcagcccaaaaggggcatcctgtggctcacatctgcatggccatcctgatttggtttgtcttcatttctcttcctcctctcttccctgccatcccagatgccaagggctctccaaccctagtgaggtggaggtcctgcgggagaaagtgtattgcattcactgggagaccttacttgcaaacaggaagtaccctggaggcagcaggggacggttttgccaagctggttgtt

SEQ ID NO: 376707 - DNA, 494 bp, Homo Sapiens
  misc_feature (119)..(119): n is a, c, g, or t
  misc_feature (128)..(128): n is a, c, g, or t
  misc_feature (417)..(417): n is a, c, g, or t
  misc_feature (461)..(461): n is a, c, g, or t
  misc_feature (472)..(472): n is a, c, g, or t
aggaactggcaagcatggaagaaaaaatcgcgtatcagtcctatgaacgggcccgggacatccaggaggccctggaggaatgccagacgcgcatctccaagatggagctgcagcagcanaggcagcanggtggtgcagctagaagggctggagaatgccactgcccggaaccttctgggcaaactcatcaacatcctcctggctgtcatggcagtccttttggtctttgtctccactgtagccaactgtgtggtccccctcatgaagactcgcaacaggacgttcagcactttattccttgtggtttttattgcctttctctggaagcactgggacgccctcttcagctatgtgggaacggttcttttcatccccttagatgatgctggcacagaaggcattgttccctaccctctnggcgagtgcatgcagcagagagttagacagcaacttacctactnttgaagttttnttacaacaaaaaaaggagtttg

SEQ ID NO: 376708 - DNA, 479 bp, Homo Sapiens
acaggcgtgagccacggcaccaggccctctttttctatttaaacagtgcttccgtgaatgtccttgtgtacacctccttctgtacacaatgatgtttatctgatgcacattgccaatcagtgcacttgctggattgaagaatgtgagtgtttgtatcactctttcagtaggctgtaccaatttagacttgctctaccaatttagatttccatcagcagtaaacaaagacattcctgcctggcagtcttgaactcctgctattatctcttaaatttttgccagtgtgtgaaaagtagtatcttactttaacttgtattttcctggtccaatagtgcactaaatgcccgagttctgtatttattctatttggatagccattagatagccattaagtccactcatagagttattttaaatgttttcctttagtttccaaccacattttcaaataaaatttagaattagcttgtcaaaaaaaa

SEQ ID NO: 376709 - DNA, 383 bp, Homo Sapiens
  misc_feature (256)..(270): n is a, c, g, or t
taggagaaagataagagaatcagaggatcaactcagaagatccagcatcaaactaatagaagttccagaaagcaggaagagaaacattaaaataaataagaaaaaattttcagaactgaaggacacacatttcctgaatgaaaatgcccacagagtatgccacacaatgaatgaaaaagatccatcaagctacacccctgtggaatttcacaacactggggaaaaagagaaggtcctaaaatctatcacaaggggnnnnnnnnnnnnnnnggtcacaaaggactaaagaatgtctttgggttgctcaacaacactggagactagcaacactgaagataaaccttccaaatctgagggaaaatgatttttcaagctagaatgat

SEQ ID NO: 376710 - DNA, 785 bp, Homo Sapiens
atcctgtttgggaggaatggagggtccctgtccctgccttttcaaccccatgacccccatcctagcctccagcctgtatcccaattttccttcctgagccccatccttcccattgtccctcaacgagtttcctttggtctttactgaaagaagatagtagaaatttaaaagttgagagaagactagaaatggaactgattagaaggggaggttcaaactgtcaatgcacagacttttcaaagaagttgtttatattttccaatggcaaactgccctttctggaatgttcagagatgatgtgtcatggaaccttcaaacaagtctcttgttcggatgataataggtagtgtccttttagtatgctggttgatctttcatagtgttagtgttttgttacttaaaaaggaaatcagctataaataaaatgtatttttgtaattcccgtgtgtatatatggtatatttctatcaatggccagttgttgtagtccaaaacctaaatcagtttgcaaaacactgtggacagtgcgagattttattgacaggttaacacaatgcctacgtctatccacataggcattcaatgcacttgaatgaacaaagagccaaagaaactcagcctgttcatgcaaatgggtatgagtctggataaaatcagctacattgtcctgctttatcaataataatatttcattagtgcaatgatatcaaccagtactttgtctacttggtaaatgcctggaaatactgtatgtgaaaatgatgtttcaagatcttactgtaatt

SEQ ID NO: 376711 - DNA, 520 bp, Homo Sapiens
cctactgttacagagtccctacgtgtgaggtgcctgtagtatttgaagttccaaatgcccctaagatacacgtgccttattgtgaagctgagagtgacccatggtagccgagaggaggaagggagggagggaggaaaaaatggaaaggaggattgtgaattctgagaaccatggcctaatgcaaagcagcttttgatgtccagtaatcagacatttcattatttcaaattaatttctactccaattaattcaaataattacagttttggagtatgtgtaaaattcagatatacttctttaaacaacagaagtcaaactaaatcaatggttggtgggaatataaaatggtacagccacggtagaaaacagtttggcagttcctccaaaagttaaacacggaattaccatatgatccagcaaattccactcaaaagaactgaaagcagggactcagatacttgtaagccaaagttcacagcaacaccattcacaatagccaaaaggtggcagcaactcaaat

SEQ ID NO: 376712 - DNA, 469 bp, Homo Sapiens
  misc_feature (18)..(18): n is a, c, g, or t
  misc_feature (55)..(55): n is a, c, g, or t
  misc_feature (94)..(94): n is a, c, g, or t
  misc_feature (109)..(109): n is a, c, g, or t
aggttttccccctatccnctgaattttaacggttttccctctttgttgctgaaantccggaaacttgactatgatgtgtcctttgtgtggtttncctttgtggtttttntccctgtggaatttattcaaacttctgggatctgtaggttatagttttcacaaattggaaatttttgacattacttcttcagacactttttctgtcttcccctccatcattctgggatttgaattacatgtatacagtaactgttgttgtttcataggtgactaactgggtaggggaatgtctggttcccttactatccggtgaagtagcagaaccaccttttgtaggaatcagttatcaggccctttactttcccttgaactctaggctagttccagaacctttggtggactggaaagaggaaatagttatgccacaatttttagtacatgcaaatgtacatgtaatgtttaaaaaaaa

SEQ ID NO: 376713 - DNA, 477 bp, Homo Sapiens
  misc_feature (20)..(20): n is a, c, g, or t
  misc_feature (35)..(35): n is a, c, g, or t
  misc_feature (67)..(67): n is a, c, g, or t
ggtttttcccaccaattaanacctggaaaatatanggtaataaattatggaaaaaacatttaataanatccaggatcatataatataatatccagtgtaatccagattaatgtgatgccctacttaataagcacccaaagttatttcctaagagaatgagttaatgatccaacatctgccttaagaattctagtaaacaaattatgcttaactttgaagctactgactatatatattgaattttatcctggatatattagaaatataggaagaaagtttcctggaatgaggaggtatatccccattttctctgtgagatggaagagcaaatatgtcctgatgatccgtagtttcttaaccttcaaagtccacatgacgtcacagtgctttgctccatccagaatctctgtttagccaaggtcaagaggtgtcaggcccattttagcaacgaatttgaatgcatctccattaaaaatt

SEQ ID NO: 376714 - DNA, 462 bp, Homo Sapiens
  misc_feature (12)..(12): n is a, c, g, or t
ccctcaaaaaanggggccctggccccccggccccccgggaaaaataacctccctgaacccctggcctgaaaaataggagtttaatgccccaacagtgtgaatttaatggccaaaaaacctgtttttgtaatgccctgaggctttgggatcatgctgtacccaatttggatctgaggccctgaagactggtagcctaaggtgctgcatgccctacatgactgacctccagtaaaaacccctggacacatgccctcaagtgagtttcgttggttggcaacactttacatatgttgtcacacgttgttgctgagaaaattaagtgtactccatgtaatggcactgggagaggacaactggaagctggtgcttaatttctcctctactccacgctatccaccttttcacttcgctgagttttttctgtatcctttcaatgtaataaactttaaccatgagtataac

SEQ ID NO: 376715 - DNA, 543 bp, Homo Sapiens
  misc_feature (29)..(29): n is a, c, g, or t
  misc_feature (43)..(43): n is a, c, g, or t
cctgctgcagtgaaactcaaccacgattncctttgcacaaaanccttccctacttccaccactccctaacaaagttccccagtgccaaaagaacactgctggggtgggggtggggaacaggaagccccagttattgctgtgttctaatttaagggggcacttccctcaagagtccccttgaaacccgttacccagccctggaagggaggatatcttgccttttacaaaatacggtcgatactcaatgcacagcctctaaaacaagggctactccagtgttctaaaagcacacgccaatcctgagtttagtgaccacattttaaagatcatcaggaaaatgccaagttcccattaagactttaaagctccttgagatcccaggttgcggggtgcataaatggcccaaatcggagagtgtgctatagcaggtagacaaggtttcgctaacacgaacagctatcagtaaaatgcctttattcagctaattctatagaagcggagttttgagagtctttggttcatgtgaggcaaaatcaggtttat

SEQ ID NO: 376716 - DNA, 538 bp, Homo Sapiens
  misc_feature (457)..(457): n is a, c, g, or t
  misc_feature (479)..(479): n is a, c, g, or t
  misc_feature (484)..(484): n is a, c, g, or t
  misc_feature (519)..(519): n is a, c, g, or t
cgccagcttggacgaggatcatccacctctaccacctgctctggtctgccaccatcctcaacattgttggcctgttcctgggcatcatcactgccgctgtccttggaggctttaaggacatgaacccaactctcccagcactgaactgttctgttgaaaatacccatccaacagtttcttactatgctcatccccaagtggcatcctacaatacctactaccatagccctcctcacctgccaccatattctgcttatgactttcagcattccggtgtctttccatcctcccctccctctggactttctgatgagccccagtctgcctctccctcacccagctacatgtgggtcctcaagtgcaccgccccgttactctccaccctactatccaccttttggaaaagccaccaccttacagtccctaaagagggaatgcctgctgggttatttgaggntattgtggggtttttgtatttnctggnttcagtgggaaggtgtgtagggggtacaaaatttnaaagtgtggaatcttgatg

SEQ ID NO: 376717 - DNA, 491 bp, Homo Sapiens
  misc_feature (21)..(21): n is a, c, g, or t
gcatccagtatccacatttgntgcaaaggcagatttatccagataaattcctttgcaacttcctgagggcttcaattaagtaacttaaaactatgaacttacccaactatgtagtaatttaatcaaagaatgttttaaggcaatcccagtagcttctctactgctcatttcattaacattaatctcaccatagtgtcaatttctgtggcagatggcttacccagaaaaataattcatacaaaataaccatgaaaattctacatattgaaaaaattttctcagctatcaccaattgagcaataaatcagtttaaatatttttaaaaggatattaagtcaaaaatactttgacatgaaccataaatttagacataactataaaaccaacttgatgggaaagtaatagttgacttttaggaaaacaatgttcaaagcaaaaactaaagatggcacaactactaaatgtaacaaaaggaaaggaccatttgagcc

SEQ ID NO: 376718 - DNA, 612 bp, Homo Sapiens
  misc_feature (325)..(325): n is a, c, g, or t
  misc_feature (384)..(384): n is a, c, g, or t
  misc_feature (452)..(452): n is a, c, g, or t
  misc_feature (476)..(476): n is a, c, g, or t
  misc_feature (500)..(500): n is a, c, g, or t
  misc_feature (508)..(508): n is a, c, g, or t
  misc_feature (561)..(561): n is a, c, g, or t
  misc_feature (583)..(583): n is a, c, g, or t
  misc_feature (598)..(598): n is a, c, g, or t
ttttttttcctttaatatatacctctttgtcacacaataggccaaagactttgcacttgcccgaatccactgaaggcagttagttgggaagctcactatgggcagttgtgccagtcaatgctgtacttcctgggggcttattaatttttaaaacaagtatttgtaacaaaacacatcttttcacaataaacagcttatcaacctataatccttattcaattgtaaatgtataaatccaaaatgaaataattacagtaaacataatcaaaagggaaacagaaggaacacccattttgtttctttattaacaaatcagctatggggnggggtattttaaggtcccttctggggtgaggggcaaaccccaccaggcttcctacaggnatttagggtattaaaaggtttaggtggtggatgggaaacctatatttcccactggggggcttgagggntccaattaccttccttaccaaccntccttaccttggccttccttttcnttaccttnaattattgggggtttgtccagggttattcccccttcccccatccccgggggtnccctttgggggccctttccctntggggggggtctttnttgttggggtccct

SEQ ID NO: 376719 - DNA, 466 bp, Homo Sapiens
  misc_feature (11)..(11): n is a, c, g, or t
  misc_feature (382)..(382): n is a, c, g, or t
  misc_feature (406)..(406): n is a, c, g, or t
  misc_feature (418)..(418): n is a, c, g, or t
cctcgtgcatngtaagacttccatgaatacaatgaagatagaaaaggaaaagcttgagttgtttgaaatcatgtaatgtaattgtctttcccagaaactgactgtcgttttctcttacgcacagcggcttgaggtatggaatatgaattggatgagatgtttatctctgatgaatacatgttgactggtgtgagtaattgctgcctaggaaaaggactttaatctccttcatacctcctgggtaaattctgctgatttagtaggaggaaggaaaatttagagacaattgggtgtgttggaaatcaacttggtcagcacaatagcccagaagtcaaggaattgagggagtatttccagggcttaccattggactctcttgggntccacatccagtttaataatttcntatttactactnccgagggcactccatgagccagccggaattcacctctggttccaaaat

SEQ ID NO: 376720 - DNA, 524 bp, Homo Sapiens
cggaaacttcagagctgtcagacactgctgcgcctcctcctgctgctgcctggctgctgagattggtgcatctggatgaatctgatgtgtatgttttcattcctttccttccagaacccttggtaaagaaagtacacagagggattcatgagtgcttggccaactccaaggtcctgggaggacatgaaccagtgactttgaatgtgatgctgagcccagcagggagccagtatgactctccccaaatcacaagtgagactcagaggccccactgggctcccacatggactcaggccaccgtctttgcttagaggacgcagcagaaagacttggctcattttccaggggcagacttggagagttctggcaggtccatacatttcaactccctcctcccaccacagcaggcctgctcttttatgtatccaatgggaatatttttcattatcttccctctcaatttaattaatccacattccgtaatgaaccttgaaatttcattaaacacatcattactaatcagc

SEQ ID NO: 376721 - DNA, 471 bp, Homo Sapiens
  misc_feature (421)..(421): n is a, c, g, or t
  misc_feature (429)..(429): n is a, c, g, or t
  misc_feature (446)..(446): n is a, c, g, or t
ctcataaaaaatcattacaaatttccaatttctacaattgctcatggaggacaactaaagccttggctaaaaacgttagccgacgttaagtgtgaaacaaagacacctccccagtaaattgtttacttgtccagaacgcccacctccagccatgtcacagaaccatgtacaactcttccttagagaagcggctctccgccttcattttcttgtctctgttgtaggtaatatatttgacaccagggagagaaaacacggaggacacagaaccaggtttcattgcctagactttgattttagtgacattgttgagtggcatatgtaacttccgtttgaatttccacaaagatccacgtaggcatttcaggttcctgccaaagtgtggggtgttctgtccaagctttacctgttcatgttttgnatagtttncatataactttcctttngtaatgtgtggattaacccaaggcc

SEQ ID NO: 376722 - DNA, 466 bp, Homo Sapiens
  misc_feature (373)..(373): n is a, c, g, or t
  misc_feature (401)..(401): n is a, c, g, or t
  misc_feature (420)..(420): n is a, c, g, or t
  misc_feature (439)..(439): n is a, c, g, or t
  misc_feature (445)..(445): n is a, c, g, or t
ggttggctacataggtaaacatgtgctatgctggttgatcggcaatgttgtaagcaaaaaagtcaaaaatgattacttcagtcttctcttagttcaggccatgcatgttctgcttgatattcatgaacattcaagctctccatgagactcctgaaagtttttcttctaatgtcacaatctccaaagttatcagaaccttgcattcaagaacacctgttagagtttcatagctgattataaaactaccttctaaagaggaccaaaaccaaacaacaaatgtccatagctgacaaaaagtgttagggcagccacagtccaaaggacaaaattgacaagggaaatttgttacctctgtggggtaaataataatttngccttaccattattattatttactggtnatgtacactaggttgtatncgggattttggggggtttncccctnattttgggggccccctggccc

SEQ ID NO: 376723 - DNA, 431 bp, Homo Sapiens
aaaaccccaaaaaaaacccggtaaaccggacaaaggggcccccaaagccaggttaacatcagtgtgcccttggacaataacggttaattccatagagaatgaatgaacttatggaatgaattaattccatcccctcaaaattggccccctataatcctcatgcaccccacctcttctgtgatagtccccgggccctgaggagttgaatggctttaatttttggccctgtgtttccatgaacgacgtttattttgattggcatcttctactgggtttgaatatgaggctttaactgctatcagtgttaagatttagcaggacttggtgtcctttttagacccaggagtcaaagccctataacttatggcacaaggactttaaaagcacatacagaaagttacatggatgtaataaccttaattcaaaaaaaa

SEQ ID NO: 376724 - DNA, 489 bp, Homo Sapiens
  misc_feature (82)..(82): n is a, c, g, or t
  misc_feature (414)..(414): n is a, c, g, or t
aaaaaaacaactgtacaatgactatcatataagttattcctataaaagtattcaattgggtgaccctgctgcccaaggcagnctgtttttacgaggctgtttgacaggaaggttctgagcagcccatggggtgagagctgacttgccctgcatatgctgtctccctgacctgctcacctcactccagatcccttcctgtcttccgcagtgccctgggtcccggagagcttcacactcagcaggcaagccaactgggtgcacaaaccttgggtcctctgtacttaggcacagctggctgtcttttctgggtgcctcagggctctttttctttgaagtgcaaatgctaaccagggagggtttctggggtaacacagattcagttccccctcactgcagggagatgcacttccattnacaaaatacttcctttctgttcatccatcagtgtttccagaaaacccagcaaccctcgttctgggatcatctctg

SEQ ID NO: 376725 - DNA, 305 bp, Homo Sapiens
aaagtcaactgcaaaaaatgaagcgtgcctatatcctccgtgagcttgtatactatcccacttacctccagaattttacctgaatgcatttctatgctttcaagtcttttatcaccctagcatataaaaatatgtacataaacttaacttttatttaacttctaggcattaacatttttggtttgaactgttacaactgcaattattagtaatgcaaaacaaatcaaaacaaaatatatcagaaactttgtatagataattatgatattaaaagcaaaattatattaaaaatgcttttcaagagg

SEQ ID NO: 376726 - DNA, 453 bp, Homo Sapiens
  misc_feature (34)..(34): n is a, c, g, or t
  misc_feature (69)..(69): n is a, c, g, or t
  misc_feature (80)..(80): n is a, c, g, or t
  misc_feature (123)..(155): n is a, c, g, or t
  misc_feature (161)..(161): n is a, c, g, or t
gccctaacaaaatcccccggaccataggccatgnaaggtgaggaaccatgcctggtgggaaaaaggggngccccaacagncctggctgggatacagggtgggcccacaacccctcaatttggnnnnnnnnnnnnnnnnnnnnnnnnnnnnnnnnngaagcngtgccctatatccccccgtgagccttgtatacctatcccccacttaccctcccagaattttaccctgaatggcatttcctatgcctttcaagtcttttatcaccctagcatataaaaatatgtacataaacttaacttttatttaacttctaggcattaacatttttggtttgaactgttacaactgcaattattagtaatgcaaaacaaatcaaaacaaaatatatcagaaactttgatagataattatgatattaaaagcaaaattatattaaaaatgcttttcaagagg

SEQ ID NO: 376727 - DNA, 429 bp, Homo Sapiens
  misc_feature (385)..(385): n is a, c, g, or t
  misc_feature (397)..(397): n is a, c, g, or t
aaaagtgttgggagaactgggaagccacctgaaaaaaaatattgatagattccgtattcatacacccaggataaattcccaagtggaacagtcatgaagctcccaaaccactcaagccccctgccttggcattacacttaatgacctatacttaagtcaggccatgacatgaactaaacactggtactaatatcagaatctttttcatagggggcttcctggaacttgacttggacctatgggctagaatttaccgaaagcagctgacccgtgctttgcttttactattccaggaatgcagataaagtctaacttccagctagacatggtggctcgtgtctgtattcctagctactcggagcctgagatgagaggattccttgancccaggagtttnagtccatcctgggaacatagaagccaccatct

SEQ ID NO: 376728 - DNA, 727 bp, Homo Sapiens
  misc_feature (74)..(298): n is a, c, g, or t
tatagatcactccccaaaagtttccctgtagtcttttgcagtcctttcttcatggccttcttccatccatccannnnnnnnnnnnnnnnnnnnnnnnnnnnnnnnnnnnnnnnnnnnnnnnnnnnnnnnnnnnnnnnnnnnnnnnnnnnnnnnnnnnnnnnnnnnnnnnnnnnnnnnnnnnnnnnnnnnnnnnnnnnnnnnnnnnnnnnnnnnnnnnnnnnnnnnnnnnnnnnnnnnnnnnnnnnnnnnnnnnnnnnnnnnnnnnnnnnnnnnnnnnnnnnnnnnnnnnnnnnnnnnnttgttccaatgtccattgggttacttccagttttgggttatccccaagtaaagctgtttgaacaagtacaattatttgaaatagacataaagcatggcaatgttaatttccaatgtagaattcaaacccaaaatgtattaactacaataagagagagcctttatattgcctgtctacccaaaaagatacaggtcaatagctttcatataagcctttacaacaactttccattgttgtaaaagatctattctgaacaaaacaccaggcccagataatttcaaagttgtgccaaactttaaagaaatgatcatttccagttttcaaacagtttcaaaacatagggaaaaaatagtaagcttccaaattatcttgaggctagcacagccccgatccaaaaacctgacaaagtggcaacctccttcccctatt

SEQ ID NO: 376729 - DNA, 452 bp, Homo Sapiens
  misc_feature (12)..(12): n is a, c, g, or t
  misc_feature (82)..(82): n is a, c, g, or t
gtatatggaaanccctcaagtggactgcagaaagtccccctttgttgaaggggccaggtaggcgaggaagtggcaaatattnatcggaagtgacaaagaactatttttccctctttctgagcccccaagtacagaaatatattggtttgcctcagctttacatcagcataaactttaatgaaaagtcaagaatcccaggagaaatccaagaatttatgccactgtattcaaaagaatgtttcctgtgataggaaaaattccctgttattttcacaaatacctgggagtgcagaaggatgaagcaactcaatctaacagaagactgctaaaatcattagaaatcatttaatcttatttagaatcatccagaggtttgcatagttaatttttgttgatttgaaggcttacaaatattctgcaatgttttatttttgcaaaaagagtcacatttg

SEQ ID NO: 376730 - DNA, 378 bp, Homo Sapiens
  misc_feature (73)..(73): n is a, c, g, or t
  misc_feature (133)..(133): n is a, c, g, or t
  misc_feature (136)..(136): n is a, c, g, or t
ctctacttattttactgtggctgctaggtggtgcaatatcaaaagtcccacatgacacgtctgctggggagantctttggggtgtacctttatcttaaatcatataaatatgagttcattgacatttagaatnacnattattattaagcaatatgctctaagacaaaggatatggaaaaataaaaacttttattcagaacacaatgaatagatatgtttatacaatacatagtatgagttaaaagtcttgggtaagatatttgaaaaaaaataatcaagattcggaatatcttgatcttgattaattttaatagcaagagaagcttaaataataaggttcttgtagaaagagtttgaagaagatacttggaaaaaaaa

SEQ ID NO: 376731 - DNA, 414 bp, Homo Sapiens
  misc_feature (306)..(332): n is a, c, g, or t
gtgtgatggtacagaaatacagtcacatattatattaatatatatagatggataggaaaaacctacagccataggtattgtccaataactgattctagaggtagaactatagagtatacatttccttttttcttgctttgatgatatttttatacaattttatatgctataaaattttcaaaaatatatttgctattttcatttgtagagcttggttaggtttttatcagctcttgtgcccactgtacaaccagattcccctcatctaatttaaatgtcttccctttttcaaactctcctttatgnnnnnnnnnnnnnnnnnnnnnnnnnnnctacccttcacaaattccttcttttgctttctgtccggggaaccccattctgcttgcggtattcattttaggcacggtacca

SEQ ID NO: 376732 - DNA, 421 bp, Homo Sapiens
  misc_feature (338)..(338): n is a, c, g, or t
gaaactagctcccagcccccatgggcaagcagctgggtcacaattgcccctttccgttttctaaccccgactcagatttcaccacccacactctttttaggtgtaaaagatggagtcccacggaggaggggcagagcaaggaggcagtggggctgtgggctcagagctcaggagtcgtcttacctgagagagatgttctagctgagagggcctggcccgggggtgggctccaggaaaacgctggttaggcctgggattgagctaacctgaaacaaaggtagtaggcaggacctaatgaccagaggttaaatcctcatcaagagagaccagggcggctngaggacaagcggctcttaaccctggggggcggccatgttgtcccagggcccaggccccttcccagggatttttgcttgccttc

SEQ ID NO: 376733 - DNA, 296 bp, Homo Sapiens
  misc_feature (37)..(37): n is a, c, g, or t
aaaggccccttctggcccctggagacttcacgccaanggagcaccagctctctgtcctcgcaatagcccgagtgcaggcagaacgcagtcatttgtgtttatctgagaggagctttgggatataaatagtttcaaggctcacctgcgctgtcattccagcccagcctccttgattgagctgcttccgggcgggctttcttcttgttggcggtcccatgctgtgttcagatgggcttcttgtgacaggtttggatgttttctatcacttgaataaaacttttccacttttggaacat

SEQ ID NO: 376734 - DNA, 424 bp, Homo Sapiens
  misc_feature (38)..(38): n is a, c, g, or t
  misc_feature (59)..(59): n is a, c, g, or t
aaggtaaatattttcctgcaactttcctgtaacaaccngtgtaaatatataaaaatganataaattttaaccctttaccttccatacctgtacacaaaaattaatttcagatacatcataatccctacatgtaaaagttaaaactatgaaatttgtagaagaaaacatacaagaatatcttggtacaggcaaagatttttttaggtaagacacaaaaagcaatgattataaaagaataaaaaagttaagttagcctcccaaaatttaaaaatgcctgctcattgaagggcttaagaaaattaatagccaagtcacaaactaggagaaaatattcataatgcatatattcaacaaagaatgtgaatccataataccgtgaaagccttctacctcatctcaaataaaaggcaaaaaataaattttt

SEQ ID NO: 376735 - DNA, 161 bp, Homo Sapiens
  misc_feature (41)..(41): n is a, c, g, or t
acccccttcctgcccagattgtcctaacatcgacttgtttncctgggcactgctccttcaaatgtctcctccctcgtcatctggcactggctcagatgcactcactcccatcaagttgtcttctgttaattcctctggtgtagtgtctgttaggccttaga

SEQ ID NO: 376736 - DNA, 489 bp, Homo Sapiens
gaccagtttaaaactcataacctgaccttacctgaatccctgggccgtggagaacaaatgagaacaccccagatctgtgccgtccccactcgttagccactaccccatatgtggttacttacatttaaagtaaaacggagatatttccttaggaccatcaaccatatattctaagtgcttggctgccaaatgtgactgctgactaccatactggcccagcagacacattttccttcccttgaagaaaattgcatcgaacactgctggtctacatttgtcagtacaaggacactttggcagcgggaacaagctagaacttctactactaataaaatcaaagggcttttgataatttaagggcaagaaaactgactgccctaaaccacaggggtaaaagcaacggactgacaaagatggctggactggttccaatgcccaacgggtcacacagcctttggacagtccacgaagtttgggcctccattttct

SEQ ID NO: 376737 - DNA, 355 bp, Homo Sapiens
  misc_feature (25)..(25): n is a, c, g, or t
  misc_feature (57)..(57): n is a, c, g, or t
  misc_feature (94)..(94): n is a, c, g, or t
  misc_feature (193)..(193): n is a, c, g, or t
  misc_feature (203)..(203): n is a, c, g, or t
  misc_feature (290)..(290): n is a, c, g, or t
aaaatgggccttccagggggcattngtaaaaggccctacattgagccttaggcccantgtttttaaacccccgctgtgctcttttaccctcaanaaaatgtggtgtttgtatacatataaattatacatagctcataaattatgtatgcatatgtacatagctgtagttggactaaaattcagtgtgttttancctactaaantctccttttaaaataatacacttaccataattctatgaggttgtagaaaaaagtactcattataaggaagccttgtatattatgacntatggttatctcttgtgttttccacatttccaattataacactaaataaaacaacaataaacatg

SEQ ID NO: 376738 - DNA, 539 bp, Homo Sapiens
  misc_feature (17)..(17): n is a, c, g, or t
  misc_feature (32)..(32): n is a, c, g, or t
  misc_feature (38)..(38): n is a, c, g, or t
  misc_feature (50)..(50): n is a, c, g, or t
  misc_feature (93)..(93): n is a, c, g, or t
  misc_feature (100)..(100): n is a, c, g, or t
  misc_feature (106)..(106): n is a, c, g, or t
  misc_feature (284)..(335): n is a, c, g, or t
ctggaactaagaaggcncccctctggcaagcnaggagnaaaaagcagcangcctttcctaagcttaacggccctaaaatttaaaacccccaangagcttnaggttntcctaccgggaattccttggctgcagtgcttcccctggaccacgatgctcagactcacctgcttcacaccatgacctctgttgtttgccctggtactgggagtagctgcctactctgtatgccaccttttccctggtgccgtatgtagattaaaaaaatgtgcataacaaactcttcnnnnnnnnnnnnnnnnnnnnnnnnnnnnnnnnnnnnnnnnnnnnnnnnnnnnccacagagaacaagtggtacattgaaaaatagaagccaagtttggattctcctgagccattcctctcccctgaatttgcactgctttggttacctaatctgacccagcaaaatacaaaacaaactccacttcccttgcattctagttttgtgatatgctctccttaactggcttcaacgatcacactttttctgagtgttgtaa

SEQ ID NO: 376739 - DNA, 440 bp, Homo Sapiens
  misc_feature (13)..(13): n is a, c, g, or t
tgcaccttccacnagcaccttgaagaacaggccagggacattcacatccaccatggggatgcagacccccacatcccatggcccactgggtgcctcaggccccctgaaagcaaaatgcccaggcaggccaccttgagtacctcgtgtttcaactcatctatgaggtcctgaggtcactaaggataaatttagttcccattttatgacacaagtatctgagggtcagatatcccaggatttatgagccctatgaggattagcaaatgtacatacccatagagtgataaaaatgaggtaatgaagcaagcagtagtttgaatctttgcttcataacatgctaattttgctactttagaaaaatttatagactttttcaaagcttaatttcttcattatgtcttttcttatataaaacttcatcatgggtttgtgtaggggtg

SEQ ID NO: 376740 - DNA, 512 bp, Homo Sapiens
  misc_feature (402)..(402): n is a, c, g, or t
  misc_feature (479)..(479): n is a, c, g, or t
ataaatggaaacagacctggcaagtaagacatctctgatttggaggatatattttttagtctacaaagaatccttgaatacatcaagatagagcatatcttacaaacatatgggcaaccatatgacatcatcctgtgtcactactagttttggtcatgtgaatccaaagggccctttggtgatgttactcaccaatacacttcccagtcatataaaattagataccttcccatccttaaccacttttagtagaaagaatgcccttcagtccacactgtgttactaggcccaaagcagtgttactagtagtctatttcttacagcatacaaaactgctctggtatcagtttgccagggctgtcataacaaagtaccacagactgtggcttaaacaacagaaanaacaaagtaggcacagactgtggcttaaacaacaggaaatttattttcccacaattctgggagggccgaaagtctgnggtccaggggggcggcaaaggtgggttcttctg

SEQ ID NO: 376741 - DNA, 395 bp, Homo Sapiens
  misc_feature (30)..(30): n is a, c, g, or t
  misc_feature (56)..(56): n is a, c, g, or t
gtccacatcccgaggtaccggggaagttgnaaccttcaatgcagaagcctttaganggccaccacaatttatccccacaacatgtcacttgcaagacttgctgtgctgttgcatatttagaaaaggaaaggtggtcagtaggcaagctgagaacacatgttaaactgcatcattcatggatcttgattgaaatcccttatttatgaaacaagcttgtatgtacactttgagtctgttaaatattatggtgaaattccatttatgcagtgggtcacacccaagacttcctgaaaggttagaggtgacccttgctcctaagttggggcctaaatcttggcagtcataaaaaagtatttcttaactaggctatacaatcaacattctcaattttattg

SEQ ID NO: 376742 - DNA, 711 bp, Homo Sapiens
  misc_feature (23)..(23): n is a, c, g, or t
  misc_feature (34)..(34): n is a, c, g, or t
ccagacacaagagtgccatattnatttccatttnatttgaagttggaaaaacaggcaaaataaatcctatgctgttgaattaatagaccacccttgggatagtggtatagtaactggaagagaacatgcatggggcttctggagtactggtgatgttccaactcttaatttcatactagtttttgcatgtattcacggtgtgaaaaatcacacctgtacacaatttgtgtgattctctgtatgtaaattatacttcaataaaaaatttaccaaaaagcaaacaaacagcaagtgagatatcactacacacgtattaaaaagcctaaaattaaaagagaaatcaatcaataccaagtgccagcaaggatgtggagcaacagaaatgttcatttacagatagtgagaatataaattagtataatcacttcagaaaaatggttggcagcctctatatctaaaggtgaatatgcacatattctatgaaccagtaattccaccccattacatacccatcacaaatgtacacatgcgtgttctcaaaagacatgtacaggaatgttcatagtagtattatcccaaactgaaaataatccaaacgtctttcagtgctgttggagcttattaaagtcaattacagctcagaattgcagtgaagttaacttccttgggggcatccctcaatcaattggaaacaggagccagcggataaat

SEQ ID NO: 376743 - DNA, 596 bp, Homo Sapiens
  misc_feature (429)..(429): n is a, c, g, or t
  misc_feature (463)..(463): n is a, c, g, or t
  misc_feature (490)..(490): n is a, c, g, or t
  misc_feature (498)..(498): n is a, c, g, or t
  misc_feature (512)..(512): n is a, c, g, or t
  misc_feature (518)..(518): n is a, c, g, or t
  misc_feature (548)..(548): n is a, c, g, or t
  misc_feature (564)..(564): n is a, c, g, or t
  misc_feature (577)..(577): n is a, c, g, or t
attgttgagtaggccgagatagagcatacaaaagcataacaaaagatggggctaggcagaccaggtaataaacctgcactttaaacctgcacttgatcctgagcacagtagagagccactgaaagattttaagcaagagagtgccatacagtgttggaatgattcactcggacagcaatgtggaagatagaccagaaagggcaagtccagaggccaacaataatcttagcctcagagttctttttttaatacccaagaatactatttcattttacttatatttttaaacttttctctataacgctctctctgctcccccacattgttgtctggatggtaaacctaggactggtctctgagtcctggtcacagcctggcaacagaatgttttgagcaaactggggaaggctgccccatgggatccctggntttcttattcaccatcctctttaatttcttacgntttggcccaacccagtcttcttagggnagccagcntgcttctttgcggncccttncccacccagggtttcccagtttgctaaagngttgtcatgttttgcnttttggggattcntcttgcatgagtggaccca

SEQ ID NO: 376744 - DNA, 347 bp, Homo Sapiens
  misc_feature (73)..(73): n is a, c, g, or t
  misc_feature (246)..(246): n is a, c, g, or t
acccagaccccccggtttagaggttgcccttaattttaccttttgtcattttaagagtaaattattttgtttnccttgttcaattcctcaattatttgggcttattttactgcctcttgcatgcttttttatgcttgaatggtttttgcagtgttagaacagtaataattgaagacttgggtggaaaaaaatcagcacctgattgaaaatgaaaggtttcaacaaaagctcttgataatgttaccnccaggtgtaccatcatgccaccattattggtgcttacaaatctgttaatttatttatgcttaagtatgtaaactttaataaaactttggatcatctgcatt

SEQ ID NO: 376745 - DNA, 507 bp, Homo Sapiens
  misc_feature (327)..(327): n is a, c, g, or t
  misc_feature (343)..(343): n is a, c, g, or t
  misc_feature (345)..(345): n is a, c, g, or t
  misc_feature (377)..(377): n is a, c, g, or t
  misc_feature (451)..(451): n is a, c, g, or t
  misc_feature (491)..(491): n is a, c, g, or t
gtccacactgtgaaactgaaggatttcacacgagggaatctgtggtggtttcgatggtcttggactcgtttctctctaagatacatgatggaaatgccacctgaggttcacaggccattgtgagtttgttgcaaatgagctgggagtgtttagccttccctgtgagcggtttccggctgcatgtcttattcaagtgtttctctaaaaggccgcagctccccgtggtgacttgcctggtggacatgcattcacaaggatacccaaatgagcagcaccttcaccagctgtgtgcaggcagacattcagcagggatgagctgccgaggtngcggccctgaggccgntncccacctctggcgaaaatagtgacttggtctnagttgtgggctggccattattggacctttgggaaaaagggaaggggaagaggtaaagggtctcacctttttcangccctggcagaaagggtgaaggcaaaggccccagacacanggatagaagagatggt

SEQ ID NO: 376746 - DNA, 545 bp, Homo Sapiens
  misc_feature (493)..(493): n is a, c, g, or t
  misc_feature (513)..(513): n is a, c, g, or t
tgaaccccagctctctcacttcggtcccacccttcccaactccccacgcccaagtctttcagtggaacccaagactgtaagaacgtaggccttgtgagagtgaaggaaggatgctcgaacttgcccaggactcaggcttcagcttcacaatcccgaggaaaggaatgacatttccaaactgtcacctttgtagcgctgggtcaaagtctaaagaggacaaataaatagagacttctgtggcctcgttgtgcctattgaacaggagagctgcatgtcacaatcaatgagacctgcacagcttgtgaatcatcactgagactagttgtgtttttaatacctttaaaatgaagccacagcatctattctgggaaatgtgggcgtaggcttaaaaaccttgctccaaagaggatatcgtttcagccagcatgcagtgaatatctgtgggctacacaaaaaaacaaactgtcccgaatgctgggagggagggaatttngacattgtggatgccagggnagttttctgtgacactcagggatctcttccaa

SEQ ID NO: 376747 - DNA, 433 bp, Homo Sapiens
  misc_feature (45)..(45): n is a, c, g, or t
tgaaattggtggttggccaaaggaaagcagcttcaaacaagtgangggagtgctagggacccaggtctggcctgtgtcgggatccccagggcttccttcatcaaggctgctaaaactttgtccttcagtcagcaaatcccgcttctcatccttccattccctggctaattgaggacacaatctcctgtgaagtggcctttagggcggcgattgaattgcaccgtttcttagacggtgaagccttcaaagcttgaattttcttgaaaactctggaattcatgaacttaagaaatctgtctgcataaaagcttggtctatgaacagaaacagtgtccccatcataaacaagagctttccaggaatgttctaacttcttcattaacctatatgattgcagaatgtcaataatgcccataaataaaagtagtttttc

SEQ ID NO: 376748 - DNA, 361 bp, Homo Sapiens
aatttcaggaaatgaaactgtcagaaaactgccctaggtctattatcaatcagagcccctgtgagtggaagtcctcagattctggaatccatccagtgtctttcttttccttccattcatcctgacatgaataagcataacataactgtaagaaggagtgtagtgtcccagccctgacaacgagtaccgccaggaacctaccatctaacaccatctgggaacactattttttctcagtccttccagttgacacaaggaaaccctttataaaataggacaaaattaggagattagtcccaagccaagaccaaaggtgaaggataattgtgttagtgattaacgcctgggtcttattttaacg

SEQ ID NO: 376749 - DNA, 480 bp, Homo Sapiens
  misc_feature (21)..(21): n is a, c, g, or t
  misc_feature (33)..(33): n is a, c, g, or t
  misc_feature (55)..(55): n is a, c, g, or t
  misc_feature (64)..(64): n is a, c, g, or t
  misc_feature (70)..(70): n is a, c, g, or t
  misc_feature (80)..(80): n is a, c, g, or t
  misc_feature (90)..(90): n is a, c, g, or t
  misc_feature (114)..(114): n is a, c, g, or t
aaccccttggtccccccggcngggcccccggancccctcccaaattactgagggnccagtaagncccccnggcactcagncacatggccnggaagggtcaccttaaccccgggnaaataagtatccagtccaagttaatgtttccccaaaatatactcccttgtaacagacattaccctaaatttggaaaagtgacacaatttcaagcagcagtcaactaaaacgattcccttttgcaatttaggttaatatcataactataccactggagagaaaggacaatgaattagacgtgtgccacatacttctctcaaaaactttatgactcagttgtctggaagttgttttgtaaccttctaaaattcacacgtcacaaattcagaatttactataattataatcctgaacaatcaggactgttagcttcccacgatgaaagaatgactagctatgatgatttatatttcccaagaaattaac

SEQ ID NO: 376750 - DNA, 434 bp, Homo Sapiens
  misc_feature (118)..(118): n is a, c, g, or t
  misc_feature (342)..(342): n is a, c, g, or t
  misc_feature (354)..(354): n is a, c, g, or t
  misc_feature (357)..(357): n is a, c, g, or t
  misc_feature (385)..(385): n is a, c, g, or t
gccccaaaaaacaaggtggaacaggggcatttgcctgtggaagacccagagggcccagaagaagagtacagggaccctggatagatggctcccagcaccctccttccttctcccctanaccccatatgcccatcttgataaacagcagggaaatctgaaaaataccaagtcttcccatagggacagtgttacctcccaaaaactgtttgaataattggcttgaactggattttctgaactgaactaatgctattgttttgtgggtttttttcttcctactgagtagagtagttgtttatgggggacatctgatcctttcattttcttccagagagctaaccncctgttctgacnccntttattgaatagtacctcttttcccccnctgatgtgagaggctgcatttttcatctaataaaatcgaatatatattt

SEQ ID NO: 376751 - DNA, 329 bp, Homo Sapiens
  misc_feature (14)..(14): n is a, c, g, or t
ccacctttgagccnggaaacttgtacctccaaacaggatcaatcccgaaaaccaattaaaaaagaaccagaaccacagttttaaaagagtttagtccaagcaaaaacctgggagtagccatccggaaaagagactcccacataaacgggtcagcgcttcaaagttaaaagttaagatcttgcttatataggaagaaaacaaagaaatgtaatcagattacattttctgtgagttacaaccgtgtaattagttgcagtttgttttcttttccatacagctttttagttcctttccaatttaaaagagtgggccaggcacagtggttcata

SEQ ID NO: 376752 - DNA, 386 bp, Homo Sapiens
  misc_feature (185)..(185): n is a, c, g, or t
  misc_feature (233)..(233): n is a, c, g, or t
  misc_feature (272)..(272): n is a, c, g, or t
  misc_feature (283)..(283): n is a, c, g, or t
atacactgacacctggatccttctcttagagagtctgaattaattggtctgtggtatggcctgggcattggacttctggaaaccttcccagataattctattaaaaagctgatgtggagaatctttgacatgggtcttggtacttacaagtgtggtttgtgtgccagtggcccaaaccgagaccnggggaacttacaagggagggcaaaacctcagaccccacccaagatccncttgaattcaggaatcttgcattttttgatggggatccncaaataacctngggtgggacatttcaaggttttgaggaaacctttgttcagttaagggtagtttgaattagttaagggcagggcgaattgtttattccctggaaggttccccta

SEQ ID NO: 376753 - DNA, 489 bp, Homo Sapiens
gaaaaagtctttttacctaaagttagtctaaaagtatctatatatgcatgtgtatgtgtatatgaaacacttaagagagagtggcaataacataatcattttttacaaactgccaaattatagaaaatattggtaagaaatttttccagaatccatgaagcccatgtgtattcacaatacagttcatattatcatgtttcatttgaaaaatttatgatctctatttataattgttaagaacttacagcttatttcacaaaatcattgctcttttccactgttatttgtaccatacgtatgtaccatagtgtgcaaacgtgattatttgaacgtctagttttttggatggtatgagcattctaatctaaatcaataatgaagttttatctttggggtagtttttgtttcataatgaattctaattttatgtttaatttaaagcaaacaattattgttagaaaactatgcacaaaataaaattcaaggatg

SEQ ID NO: 376754 - DNA, 437 bp, Homo Sapiens
  misc_feature (19)..(19): n is a, c, g, or t
  misc_feature (132)..(132): n is a, c, g, or t
ttaaagacacagaaggacnggcatatttgggatacccagtatagcctatatcaaatagacaaaaacagcttcactttagcaatgatcagattgttaatcctacagattttattttttaaaatttggatgtanagtagagactttcaagtatttgttttctcttgattttgaagtcatttcttcttctcacgtctgtgacaaatggttgaaaaggagtcaacatggccccaactatagtgccggaaccttttcatcattctgagctttgccccacacatggtcctcactcatatctgtcaccttctgaagcctagatcttgttaacccatcaggtgcagtgtcagtttcaaatcaaattatctaagaaaacaagaaaacaaaggcagcagactattggtacacattatagtccaaagtgcttagcgaagtaaaaaaaa

SEQ ID NO: 376755 - DNA, 653 bp, Homo Sapiens
  misc_feature (114)..(306): n is a, c, g, or t
cgaggggatctgctgatctgtggattgcaaaaatctgtgggaaaagcttagtacccttggtgggtagcactgtccctcaccacttcccttggctggggagggaggtccccctgnnnnnnnnnnnnnnnnnnnnnnnnnnnnnnnnnnnnnnnnnnnnnnnnnnnnnnnnnnnnnnnnnnnnnnnnnnnnnnnnnnnnnnnnnnnnnnnnnnnnnnnnnnnnnnnnnnnnnnnnnnnnnnnnnnnnnnnnnnnnnnnnnnnnnnnnnnnnnnnnnnnnnnnnnnnnnnnnnnnnnnnnnnnnnnnnnccgccgaggtaagtttaataagtcttctaaatttgtccttgccataatgatcagtgatgatctgtcttttaataagttaaatgctttccagacttcaagactctcacccacatcaaaaataaaattatatatcggccatattacccaggattttagaatgttgtattttatcctctaattataggtcaaataactaaggtagaaaggagtaaagcaacttccatgtatgtagtgaggatgttggggggtctgggactaaaattctgccttgggattcccaagaggttggtgattatgatttttgtactcttagacacaaaataaaataacattctgttttgttcaaa

SEQ ID NO: 376756 - DNA, 493 bp, Homo Sapiens
  misc_feature (15)..(15): n is a, c, g, or t
  misc_feature (151)..(151): n is a, c, g, or t
tggggccccaccaancacaaagtgccgtagcagccctgtgaagggtttgctggggccccaaccggggtgtaagtagagattcctgaaaagagcaagaaataaaaacaaagattggcaattggagggtattcccaagccccaaatattaccncccccgggaaaagtatacatatttgcctcatatcatcaacatgatttacatttcaaaaatagaacatagttataattgactcatttctcagtaacattatttgcttgtgaaagcctatggacatgtggtaattttaacgttttgccatgttttccatgatcacatttctgtgtattgtagctgtctttcaaggctgaaatttaccacttacatgtaaagcctcagcagtgaattttcatgatctacctatgttttttaaagttaatttcacctgggcctcacttataatgtgtactttgctaagaaggaggaaagaaattttagcttccacactaaaaaaaa

SEQ ID NO: 376757 - DNA, 325 bp, Homo Sapiens
acgaacaaaaaaattccagtactttacacacaaaaagtcattggattttccaatttcctggcactaggatgttacattgacaaaagcagacgtaaagcctggatttgggacaatcaaggaatagttacaaacacattattcaaattccaaaacaaagaatctcaggttggaaattttccttaatctattgggaactactatgtagaaaacattagttaatactagtgaagtgttttcattattccaggatcaacctagttcagatgactgatgcacattaaataggcaaatgtgcatcagccaaccgtggactagtgggtaccga

SEQ ID NO: 376758 - DNA, 427 bp, Homo Sapiens
  misc_feature (38)..(38): n is a, c, g, or t
  misc_feature (111)..(111): n is a, c, g, or t
actggggcccctgggaaaaatagccctgggatcccttncccaagtgtgaaaacctaattaaatacctttaatggtgacctgggtagtaggtcacagcctcccttgattgantcctagttcccttttcaaaagtggagagaccctgaatatagattgtaacaggatgtccaaccttgccagacaagcaggcatatatgtctctgggatgcagaagcagttacaagttaatatatttaagcataatgttagccaatcctaggtgataccagagatgtgaatatttgatcatatttgagttcattccttgaaagtccaaacctaactggtcttaattgattacttcttagtattccgaattttagaatttaaaaccctatgaattttcagtttgtgcttacattttctaacattggatgtttgctttggc

SEQ ID NO: 376759 - DNA, 383 bp, Homo Sapiens
  misc_feature (18)..(18): n is a, c, g, or t
ggaagaggccaaaagggnaaaaaatatgtatttgcctttttttggtaaagcaatagaagaattaggttatccccaataacctaataaaatggatctcccttgttagtggtggtagggagctagacaaggatggcaactatttctgtatcttacataccttttattttgaggccctgtcaatgttttatataataaacattttttgaaaaggcaactcttaaaactaaaacaaacttaacagtcttgtcaagttggtgatataaccccacagaagacttacttcaagtgacttgaaaacttagtattttgtctgtactttgcataatggaatatatcctacagaccaaacaaccacaaataaatctttaaacatgcaaaaaaaa

SEQ ID NO: 376760 - DNA, 187 bp, Homo Sapiens
aaactaaagcaaaaaaatttaagtagtttataatcctagcaaactacccaggagttagaaaatgaatgaaaaatgtttgtttcaagacttaatagcatcttaaaatttttttaaacataaagtctaaaataggataaaaatgaggctgagcatggtggcctgtgcctgtaattccagcactttggga

SEQ ID NO: 376761 - DNA, 388 bp, Homo Sapiens
tggcacgaggttcaggttgatgaaaaaaccgtagaagaacctggttggctttatggtagttttcaaggaaattttggctggtttccatgcaattatgtagaaaaaatgccatcaagtgaaaatgaaaaagctgtatctccaaagaaggccttacttcctcctacagtttctttatctgctacctcaacttcctctgaaccactttcttcaaatcaaccagcatcagtgactgattatcaaaatgtatctttttcaaacctaactgtaaatacatcatggcagaaaaaatcagccttcactcgaactgtgtcccctgggatctgtatcacctattcatggacagggacaagtggtagaaaacttaaaagcacaggccctttgttcctgg

SEQ ID NO: 376762 - DNA, 1059 bp, Homo Sapiens
catactggaccttctacaggccagaggaaaaaagcgacagaaaggatggtttcctgccagtcatgttaaacttttgggtccaagtagtgaaagagccacacctgcctttcatcctgtatgtcaggtgattgctatgtatgactatgcagcaaataatgaagatgagctcagtttctccaagggacaactcattaatgttatgaacaaagatgatcctgattggtggcaaggagagatcaacggggtgactggtctctttccttcaaactacgttaagatgacgacagactcagatccaagtcaacagtggtgtgctgatctgcaaaccctggacacaatgcacccaattgagaggaaaagacagggctatattcatgagctgattcagaccgaagagcggtacatggctgaccttcagctcgtcggtcgaggtgaggaggctgctgctggctagctctcgggggtatctgctgtctctcatgagagatggtgggcatcagactcagggctgcctccacgcagagtcaaagcaaggcatcacttttgatgtgtgaattcacaaatagtgacggaagctctcacatcctccaaatgctgtctctgcctgccggataatgcttgagattgaaagtctctaatgagctctttcccccagatgaggtcactcagagtgaagcgggagaacaagagggcattcgcatggcttcgttggatgtggcaggagccccatcaaggaaggacggggatagagtggatgggaagggcctatggcagaccgtagcttccttggatatttgcctaatatctgttttaacatctgacattttcataaactggtatctctggaggaactgtgaaacagtgaaagtgttcacctcatggttgtatcagtttggaaaacccaatgggagcatattgtaaaatagttcccaaatatcatatagctactgtttgtttataccagtgacctctacgctgatgacagctatccttattcgagtagcactttaaaatgatttgtgcttgagtgaacaaaagaagactttccatttcttactt

SEQ ID NO: 376763 - DNA, 424 bp, Homo Sapiens
  misc_feature (33)..(33): n is a, c, g, or t
aaaacctggccccccctactggatccagccctnaagaaaccccccaccctgccacaggcctgattccccactgcccaacacgtgggcccccatgtggggtcccggcgggggttcctttggtaaagtactgggagaggaaggagtcttcctatctgagtatcttgggttgtgatttggtgtgggctgcactggcagtgcaatagcagcaactcaacaaaacaggactgttacacaagcggggcggaaggcaggtgggctggcagggaagttggtattcgattacttgaaatattaagttgtccagagggcaaggacacgcacaaatcaaagggccacctctaggtttcaaagcaggtcgagatctgtgtaaagtcccctttgacttcataaaatctcacttcaaaaattctaccgaatgctcatc

SEQ ID NO: 376764 - DNA, 548 bp, Homo Sapiens
  misc_feature (31)..(31): n is a, c, g, or t
  misc_feature (398)..(398): n is a, c, g, or t
  misc_feature (439)..(439): n is a, c, g, or t
  misc_feature (454)..(454): n is a, c, g, or t
  misc_feature (469)..(469): n is a, c, g, or t
  misc_feature (481)..(481): n is a, c, g, or t
  misc_feature (530)..(530): n is a, c, g, or t
gggactgcccaggccagcttgaaactagggnaggcctactgcttgggtctgcagggcctagcctggcaccagggttaactggagaaggcctgatactggggttcactatgaactcattgctcgatccattcttctccccacatgctaaaggtatcattctccatgttgtgctgcatggttttcggggaaggttgatgcaggtaatataaaactgtcctccttaccatctgctgtgcatcttttcttattctcgtgcttcgctcaagtgctgtaatctttcacctgcattccttagagcatggtaaggtattttctggtgcggatggttgttcaaatgggatatttttgtgaagggaaactcctattccaccatgttgctggatgatacccctcttctntatttaaattatttttaaaatcatggcagctttaaaatacnggaacatctgggganaccctccccccaaancaacataggggncatgttccaggtaaaatttaaggcaggcttgtgttagggacaggcagcnttaacatttaggaatttt

SEQ ID NO: 376765 - DNA, 475 bp, Homo Sapiens
  misc_feature (34)..(34): n is a, c, g, or t
  misc_feature (41)..(41): n is a, c, g, or t
  misc_feature (54)..(54): n is a, c, g, or t
  misc_feature (59)..(59): n is a, c, g, or t
  misc_feature (119)..(128): n is a, c, g, or t
acctccaccttggggaaccgtaacaaaaatttantatccanctttgggaacggnaattnatggaaattgaaaacgggaaatcagagaaaattttaaacatccaaaagctggttctttgnnnnnnnnnntcaataaaatcaataaaactttagcccggctaaacaagaggaaaagaaaagagacacaaattcccaaacatcagaaataaaggaggggcatcactactggtaacatggctaataaaaagattaaaaggaatatccatgaacagccctacacccataaacttggtaacttagataacattggccagtttcttgaaaaacgctatctaccaaaactcaaacaaggagaaatataatctgggtgggcctacatcaattaaaagaaatggaatccataattaatactcttccaaaacggaaagcacaagactcagatgttttcactggtgaattctaccaaacatttaagg

SEQ ID NO: 376766 - DNA, 603 bp, Homo Sapiens
  misc_feature (16)..(16): n is a, c, g, or t
  misc_feature (22)..(22): n is a, c, g, or t
  misc_feature (43)..(75): n is a, c, g, or t
  misc_feature (116)..(116): n is a, c, g, or t
accaaccaagtcaacncctgtngacttttaacccaaactgccnnnnnnnnnnnnnnnnnnnnnnnnnnnnnnnnngagcccaattagacaaaggttggcaaaaacggaagtaaccnaagtgtgaaagattttgtgggaaacccgtgtcatggtgtctctaacttttgggccactggctcaatttcctttcctcttgactgatcaaaatgtgtttacagcatgctagttgccatcaggtgtctgcgccggggcaggcgtgggcagtgggaaggacctcctctaactccctcgtggtggcccccaaagctgggcagggcagtatcccaacttgcggcaactccagggccgcatgctgacccttcactcatggggtcttttccttttctctcccaggtgttccactgtgtccactttgagtgtcacaatcccaaagtagtaacctatcagccccttctcaagagtgaaggttttgtttgtaaacatacattcaaaagccacaatgtgaaaaatcttgttcactgtgttgtgagtcccaacaattcgaatatacctgcagacacgggctggaaaatataatttctgccaagaacgacacagatattg

SEQ ID NO: 376767 - DNA, 332 bp, Homo Sapiens
  misc_feature (23)..(23): n is a, c, g, or t
cagcaggtcagccctggaagcanccatgaactctgtgcccaacacccgtgccagcactgtgcagaccagggcacagcaccgagctcagcgccccgcaagcaagggtaagccatggccctgacctggagagtagacaacgtgcttcggggggtcctgacatgcatgtgtgagctgtggggtgcaggagagaagggcggggtgggggctgtcgttgccactgcacgagcatgtgtgcacatacatacacacggccttctaccgtagaatcaagttcacagagacaaatgtagtatcaactgcagaattatattgaaaatataaattccacgctt

SEQ ID NO: 376768 - DNA, 312 bp, Homo Sapiens
cagccagctcctaagtcttaaggctctgtgttagtgatagatgtggccatggtgtaggcagtgcaatgtcttcgagtgagagtgaaggtggtaactcattgcatggattctagagttctgtttattctaatccaagttcttccacttaaaaacaatgttcttcctctcattgagtctcattcctcatctataggatgggaataagagcatgtacctggcaggttgttgtaaggattaaatggtgtaaaaaaatgtcaagtgcttgcaactttgaataccaaacttgagtgaaagctcaataaattgttactt

SEQ ID NO: 376769 - DNA, 467 bp, Homo Sapiens
  misc_feature (387)..(387): n is a, c, g, or t
  misc_feature (434)..(434): n is a, c, g, or t
gcactgtccagggcccatgtagctggcaagctgcaaaaggcctgtgatccaggaaagatgtcccacagggatcacatccaccccagccccactgccctccaggcaaggattcaggcctctgaggagcccacgggacaaagctgctgggccagtggcactctgtgtgggaaaatggcagaaagatggagaggcatgggggcccaaaggggagcgtggggaggggctgaggataccccaaagtccaggctaattagaggatgtggcaggggcagtggcctggatgcacagtgcctgatgggagtaggctccagacaggaggagttggacagacagcagctggacttgaaggtttgatgccaaagcagacattttcctcacacccacctncttgctgtatgaattagctgtgtatctgtttttccattaagattttnataattatattacaaaccttttagcttgtgaat

SEQ ID NO: 376770 - DNA, 317 bp, Homo Sapiens
caagggaggaagctatacttaaaagctttcgactgaacttttagaaaaattggttgatcaaaaagagaccgtcaaatgaaacattagggcaaagaaccaaatcactcccagaggcctatgtgaacaagaccggtcaagcgatttcaataatagtatgctattacagggtataggcttgggctggagcatgaagtatagatattttgtgttcaaatacaggttaagaatgtgcaagtaggtctcttccacatttctagatattttcagtagaattcagatcttgtagatggctgggtcatctgaaaaccatgtgtgca

SEQ ID NO: 376771 - DNA, 564 bp, Homo Sapiens
  misc_feature (50)..(50): n is a, c, g, or t
  misc_feature (95)..(95): n is a, c, g, or t
acaatgttgagttgaaattttaaaagcctactgtggacctcagagcaagnactgaaatttcctggactaccctctcccagcctatggaaagtaanagaatatcctaatagaaccctttcaatttcccaaaccctgaaggtgtgacttaaaagtcatgccttcccaaggtagctaggcacatgcccaaatggggtccactaggaatagattccaccaagggcagtggaaaaagtggtttggtccagcctcgatggtcctacctgttaaatggaagatttggggtggatttgactagatttttcttatcctgggtaagtacatctccccctcttctgcaaatccagagcaagaggttgggagctacctatctctgatgctctggcacttcatctgtgataaagaggagaatagtggggctacaatatggtgtagagtcttactggttgaggggttaggtggaaaggcaatgcccagagtggtaacctagtagtctctttggggtgaaagaaacaaccttatgtaatatgccccattgaaaacagagcaccaaagactataattctg

SEQ ID NO: 376772 - DNA, 611 bp, Homo Sapiens
  misc_feature (469)..(469): n is a, c, g, or t
  misc_feature (486)..(486): n is a, c, g, or t
  misc_feature (494)..(494): n is a, c, g, or t
  misc_feature (518)..(518): n is a, c, g, or t
  misc_feature (541)..(541): n is a, c, g, or t
  misc_feature (591)..(591): n is a, c, g, or t
  misc_feature (600)..(600): n is a, c, g, or t
tatatttttttcggtttatttctgattatatttggagaggccaattttacatgatagcttcaaaccaaccattgtacattaaccaaattttacacaagccatttgaaaaaagatctaaaaatgtgcttagttattggtattatataacataacatttatcaagcaccaagagtgtgctgagagctgtacagaacaaacatagaaaagacagtccctgccttcaagaatacccattccttcaggatcttgcacataaaatttcaccttacattccacactcttttattcataaggcataaataaggaagtttgttgcatttctcattgttacttaataaatattggaatacccttttccccaattataccaacaattacttgtatctttgcctttaaatacaaattttcatagtacagtatacagtatatactggatttgggtattcacacaattggaccacaatattcntggcagggtgggttatnatatggangcatggttggaatttcaacattcnccaatttttataccacttaacanatccttttaatggtgggcaggcttcctccggtttttccaattccagaaanaaaaaaccnccaccaagggg

SEQ ID NO: 376773 - DNA, 481 bp, Homo Sapiens
  misc_feature (404)..(404): n is a, c, g, or t
  misc_feature (452)..(452): n is a, c, g, or t
  misc_feature (463)..(463): n is a, c, g, or t
ctggatagggaagaaacaccaaaccacaagttactggttttggcaagtgatggtggattgatgccagcaagagcaatggtgctggtaaatgttacagatgtcaatgataatgtcccatccattgacataagatacatcgtcaatcctgtcaatgacacagttgttctttcagaaaatattccactcaacaccaaaattgctctcataactgtgacggataaggatgcggaccataatggcagggtgacatgcttcacagatcatgaaatccctttcagattaaggccagtattcagtaatcagttcctcctgggggacttgcagcatatcttggacttatggaggtccacaaaaggaatatgccattaaattactgggctggcagatgctggggcaaacctccntttggattcagtccggcatggttcttccatccaaggtggaagggtggnaattggccatngctcccggtttttcaccc

SEQ ID NO: 376774 - DNA, 292 bp, Homo Sapiens
  misc_feature (41)..(41): n is a, c, g, or t
  misc_feature (146)..(146): n is a, c, g, or t
agtcggtgaccaatgctacactgattaatgaactggtgcgnaaaagcactgaagcaccagtgaccccaaatactgagatagctgatgtatcctcaccaactagtgactatgtcaagatcctggttgcagctgttgctggcaccatnactgtcgttgtagttattttcatcactgctgtagtaagatgtcgccaggcaccacaccttaaggctgctcagaaaaacaagcagaattctgaatgggctaccccaaacccagaaaacaggcagatgataatgatgaagaaaaaaaa

SEQ ID NO: 376775 - DNA, 484 bp, Homo Sapiens
  misc_feature (359)..(359): n is a, c, g, or t
  misc_feature (407)..(407): n is a, c, g, or t
  misc_feature (413)..(413): n is a, c, g, or t
gcctttgtaacaataaatagtgatagtgttgttttcattcatctcatccatttataagtctaggtattagatctaagagaagataccctctgcatccaactgctaaagcagggaactgggcaaggagctacatccttcatcaactatccagtcaaatgcaagggaaagggctgaagcagcaagcaaatgaactcagaagaggtgaaatcaatgaatttcatgttctttccattaccatttgctaggtcagcctagctatcctcatggtcaaagattaataaacagaaataaaaacaaattcaccattgctaggcactacagggaagctaaaaagggaaatacttggaaggttccagganaaaaataaaagggaacactttacagtggattttacttacccaaaatanaaaacnttttgtgttttctcgggttaggtatttgtatttcccgggcttccctaaaattcttttggtatggacgggtg

SEQ ID NO: 376776 - DNA, 410 bp, Homo Sapiens
  misc_feature (43)..(43): n is a, c, g, or t
ttcccggtttgcccttgcaaggacgctgtgtctcctgcgtgantccctgcctcgggtctaatcctgggagtggaaggcaggtcgtgggtgtggctgcatcctcagcttctctggatgatgcccaggaacatgcccagagccagagggcccagctgctcggctccctcacactgggctgggcacttggtcgccagccgtttggggagtgtgttctcatggtggtttcaggtgtgagtctgaccaacaaccccccgtgcccgctggacactggagttccttcctctctggcggtgtttctcatcagggttccccaccggcctactgcacgctgcgtctctcctgacctgtagggagtcccctacacctctgggcttgctcgaatttgttggtttaaatgtttttgcaaatgt

SEQ ID NO: 376777 - DNA, 431 bp, Homo Sapiens
  misc_feature (15)..(15): n is a, c, g, or t
  misc_feature (361)..(361): n is a, c, g, or t
  misc_feature (408)..(408): n is a, c, g, or t
cagtgaactgcctgnctagatgccaggcaagtttaaaggaaaggtcaatgagaaataaagtgctcaagggcagattcaaggaaaacatggggagcattgcagagcaaccaggtcttaaaagagaagttaaggagaacagcaagaagcaagcacacaggagcaggcagaggcacactggttgagaaagtaggatgcccagcagcctggtctgattaaatcagaaattccctctgtaggaggacaagcaaagcatattatcataggctgggcagaattccaaaggtcatttcatccaacactcctcagacgctgaaactcaaggttttcggaaggccaaaagtgggaagtgttaggacaattngcttacagattttgaagccccaacatttttgtccttttgccttttcntaatttttggaggaccaaatttt

SEQ ID NO: 376778 - DNA, 524 bp, Homo Sapiens
  misc_feature (26)..(26): n is a, c, g, or t
  misc_feature (35)..(35): n is a, c, g, or t
  misc_feature (46)..(46): n is a, c, g, or t
  misc_feature (73)..(73): n is a, c, g, or t
ccttaaaaacaaatgtcctaaacaangggaaattncaccctttccnccccccaactgaaagcaacctttccangggccaggttcccctatcctattttcccccttccccacggggccctaaagaggtaattaaaatacctaagcttgaaaaagtggatgcctatggactggaatgtttgtgtccccttcaaaattcatctgttgaaatccttaacccccaaagtggtggtgtttggaggaggggcatttgggaggtaattgggtcatgagggtagggccctcatgaatgggattagtgagcttataaaagggactacagagagctctgtcgctctttctgccatgtaaggatacaagaagtccgtagtttataacccagaagagggccctcatcagaacctgaccacagtgtcaccttgatcttggacctccagactacagaactgagaaataagtctctgttgcttataagccatcagtctacagtaccttgttatagtagcttaaactaagacaactgattt

SEQ ID NO: 376779 - DNA, 347 bp, Homo Sapiens
  misc_feature (229)..(229): n is a, c, g, or t
catttacctaaacaccccccaaggtgcaaggctgcaaagagaatccgaagcgccccaaggcgagcttatcttccacaccctggtacagtgccccaggacagagaaggtgtttagcaagtttctgctgaatggaagagtgagcgagaagggaaagtgcatctaaaaagcacagggaacctacaaaatatttgggaaagggtttcatcagttcgggtgaaatcttgaaacngcaaagcaccatgggggtggctggacaggcttgttggagtcgtataatgcaatgaataaaaacttacggctgccttaaatgcaaatgtcaagcccttaaataaaattaaatcatattc

SEQ ID NO: 376780 - DNA, 495 bp, Homo Sapiens
  misc_feature (18)..(18): n is a, c, g, or t
cccctggaacctgtgcgnctggcccctcttcaagccctccctggcctgctgtctgcctcctccccctgcacctgtgccgtcctgtcccctccttccatgtccctcccttgccctgctgtctgccctgttcctcagagcccctcagccctcaggccttcatctcccctggcccatccttccctactctgacgctgacatgtagtaaaagtctgaagacagagaagagtgcatgtgcgtttagcataggaggggcagctttcagtcagtgcagcaagggcatgtagttgttcagagatggtgctggaacgactgatttggagaaaagaggcccttcttcacaccatctgctaaaataaacctcagatgggctcaagagttaaatatttaagaaaaggaggaaacaaaaaaattgctacaagtttatttgttgttaggatgggaaaggtttttctaagaaccaagttcataatgaagctgtcaaataaaatacttgac

SEQ ID NO: 376781 - DNA, 411 bp, Homo Sapiens
  misc_feature (387)..(387): n is a, c, g, or t
  misc_feature (398)..(398): n is a, c, g, or t
tggcacgagggacttctgagatacaaatgtcagactgacagtagtgactcagaagcagaaattcaaaaaatgcacttgctgtaaattctgctacactgcccagggcactttcttggtctgtatgtgtaacatgtattcagctattgtaaagtttctttaacagtcctggaagtactatgacagtaacaaggaagattgatagcagattccatgcctctttgttaatcacattaagaactctgcttggtactctttgatgttgtgtctgggaaacatacatccccaccacaccatattgaaaactttcatcctatttacccatctgctgccagcaaatgatcagtttaaagggcaaaaatggggtgaggggggtgtggaaagtccaangattttgccangcataccgttttt

SEQ ID NO: 376782 - DNA, 429 bp, Homo Sapiens
  misc_feature (29)..(29): n is a, c, g, or t
  misc_feature (68)..(68): n is a, c, g, or t
  misc_feature (89)..(89): n is a, c, g, or t
  misc_feature (95)..(95): n is a, c, g, or t
  misc_feature (103)..(103): n is a, c, g, or t
gcccctaataaaaataaccccctaacagnggattccaattattcccatatccagtaaggtggtccatncagaaatatttccaccaaagncctagnccctgaancctaaattgggaggcaaaatcattcaattcaatagagcagttgcacttttctcatatagtaaaatgaccagttgcacctagtaaacagtacagcacaacccctaagtgcaggggatctggaggcaaaacatgagggtcaaagcctcactgtaccactttccagctgtgtaatcttgggaaagattcttcatctgtaaaatgatgcttaaaagctatacctgacttttaggattgttgtaaacattaaatttgtaaatgagaatgatcttataactgtacatgttaaccattgtttaaacctatatgaataaaattctagatgagtc

SEQ ID NO: 376783 - DNA, 390 bp, Homo Sapiens
  misc_feature (180)..(202): n is a, c, g, or t
aaggtggtgaacctttatggtagcccgaatggaccatagacaaaggagaatagcaaactcgggcaaagcagagtctctctctgttcccttacatccttcactgcttaggtccagctttccgtggacttaagtctgacttaaaaggaatttctggccaacaatgcagtgcttctcttgtcnnnnnnnnnnnnnnnnnnnnnnnaatcagacccttgcttatatttatatccacctttcctatctcagcaaattgagagagtaactgtttaaccatttgtatagatgcatgcatgtatagaaagatgaccttccagctggaaaatttacatcattctgaggaataaatttaaaggaaaattatctcatccaaataccacttttattattttc

SEQ ID NO: 376784 - DNA, 282 bp, Homo Sapiens
  misc_feature (17)..(17): n is a, c, g, or t
  misc_feature (62)..(62): n is a, c, g, or t
  misc_feature (78)..(78): n is a, c, g, or t
  misc_feature (213)..(213): n is a, c, g, or t
gccctttggtcccattncccctgttgaattgttttatcatttcccttacctgatttataganggaatgggtttagacncataagtgatttgggaaaaatgccttacattcaaagtaactgacatttttcacaacagtttgtgtgtcacatcattatttcaatgtatatagacaagccacgatgagttctaaattaaaaataaacatatgctangcgcggtgcgcacgcctttaatcccagcaccttgggaggtaggcggatcacccgaggtcaaggagtttg

SEQ ID NO: 376785 - DNA, 482 bp, Homo Sapiens
tgttccttcctactctgggaattctggcaatcactgtcctgaggcacattcaagctctccttgttatcctcaacaacacccccaactgcagccacagacacagtagaattctgaggattcagcccactgttgttaggaaagctcccaggtacagggggattggccagaggagtgggactgaccaatacatttctcggcaactccacattctgcaatagggctgcatttgtctgagaggccagagtaagtttaggggcttttgaattttgcctcccagggcttggagtggttttcctactggacccaggactagacctgcgactgttgcttggacttgcccgttttgttgctccagaattagactgctttccagaattcactaccacagaatctaatttgtgagtttgtggggtagcaaaattggaaggattcatggtaagatttgaaggtgcttgcccgatggccttcaaaattgttggatt

SEQ ID NO: 376786 - DNA, 185 bp, Homo Sapiens
catctttgttaaggtataatttacatagagtaagttactgtttttaaaatgtatagttcaaattttgacaaacacatactgtttatttaccacggttaatacatacaacagtttctttatcttctctaatcatttgtacccctttatactcaacccttcttccagcccctggcaggatgatctct

SEQ ID NO: 376787 - DNA, 446 bp, Homo Sapiens
  misc_feature (38)..(38): n is a, c, g, or t
gcagattttattctcacctgggccatttgcagatgagnctgtagtttgcagatgagactgtagtttgcagatgcccgtggaagcatccatcaggggagataacccataaaggatttggccctaattccccatactcaattgtcagtttacgtggttttgtgaatactggcaaaagcaattgtttttaaattaacaatggagagaatgataagatgagggaaggaaaaggcattcattattgacttacatgtcagtaaggtctgcttttatttctatgtactcctgtttgccaagctcaataatggacaaaggatacaaacacacacacatctactattttagataaatgtactgttatatatatatgtaaactactattgctctctttataatgattaatcactttattatgaatgaatgaatgaatttgatggatttaaaaaaaa

SEQ ID NO: 376788 - DNA, 446 bp, Homo Sapiens
ccccggccaggtggtggatgaaaacccaattttttccccccttaaaccttttgaagatgtaattaagtttttagattaagcgcattcctcagctgcccagcatgaagaagaactagtttttcctctctgatattatgaggctaacttgttaccctcaaggataaaggctgtattgtggaaatgcccccaggcagattaaaaccccgctgtactcggggttgatcatgctgagagacaagttggcctctgccctgtacattatctgcaagcactaccacgctgttggagaatggaggtctcccccaaacagtgaacggccattgccaacctttttattattcattattatttttagtattatatccaaagagaaatacccatagtaagttcatggttctttactatacacatgaaatttctagtcttttatataaaatgaaaatgcc

SEQ ID NO: 376789 - DNA, 383 bp, Homo Sapiens
  misc_feature (124)..(124): n is a, c, g, or t
gaaacccaggataccccagccctttgacagttcaacggggagaagcctgtaggcagagagaagtggtgtcaaggagttggtctttttcattcctcgtcctccaggtcctcctccctttgccccnagctcaaagccctggcccttctggatactggcagggctgtgctaagagtggaagggataatgcatgtgccactcaaggggctgttagcaccgcatatctccaaagagcacaatcaacactggagcgcacatctcactgcagacaggtcagtggcgttcctgccctgcacgcgattgcttagcagtgaggtgagctcatggctctcttacagagaaatgggccttaaaaagcaaaactgccaccgggagtggtggctcat

SEQ ID NO: 376790 - DNA, 313 bp, Homo Sapiens
  misc_feature (163)..(163): n is a, c, g, or t
  misc_feature (177)..(177): n is a, c, g, or t
  misc_feature (179)..(239): n is a, c, g, or t
  misc_feature (242)..(242): n is a, c, g, or t
  misc_feature (281)..(281): n is a, c, g, or t
  misc_feature (285)..(285): n is a, c, g, or t
gaacaattgcgtacggtgttcagtgtaaattgaagatctggagttgcaggattgttgaggcaatttttagttgctttgctccatctaaacacaaggccataggatagtgtgactttgtagcttcatcaccgtatccacatcagaagtacaatgtccacttaanacatatatacacanannnnnnnnnnnnnnnnnnnnnnnnnnnnnnnnnnnnnnnnnnnnnnnnnnnnnnnnnnnnngtntgtatgtatacacatacatatatgtgtacacatatacanatgnatgtatacacatagatctaggtgtacac

SEQ ID NO: 376791 - DNA, 590 bp, Homo Sapiens
  misc_feature (400)..(400): n is a, c, g, or t
  misc_feature (412)..(412): n is a, c, g, or t
  misc_feature (423)..(423): n is a, c, g, or t
  misc_feature (475)..(475): n is a, c, g, or t
  misc_feature (481)..(481): n is a, c, g, or t
  misc_feature (495)..(495): n is a, c, g, or t
  misc_feature (506)..(506): n is a, c, g, or t
  misc_feature (512)..(512): n is a, c, g, or t
  misc_feature (517)..(517): n is a, c, g, or t
  misc_feature (522)..(522): n is a, c, g, or t
  misc_feature (538)..(538): n is a, c, g, or t
  misc_feature (544)..(544): n is a, c, g, or t
  misc_feature (554)..(554): n is a, c, g, or t
  misc_feature (560)..(560): n is a, c, g, or t
ggattaattcatgatggacaggtgaactccagaaaagcagtcacccttggcagctttcggtccatcgagcgattctgagagagggaacctctggggtgagccccgaaacgttaggttgcgctcagatcagccctgcactttgggatgtcactgagcagacttcccgagtctccatggcttcctgtaacctgccctttccattggctctgatttaagctgcagcctctggcacaccgatggaagctcgcggcatcgtgttttccatccacgtgctcccacagagccaggttgtccaaaaggaaaataatcccactctgggagaagcaaaaacttgctgggggctgcttaaggagggagcacacttgagttaaaccacccacctttccaacaggaatccgcntttttttgttantttttccattngcaggaaagacggatgggcggggacagggcaggggtttttttgagggaggtnttgggntttcatccttcccntcataaaacangcagtnggttncaggncagttggatgtttttncctcantggagttccnttcttnttggcacatggaagcgggaagatggggggc

SEQ ID NO: 376792 - DNA, 414 bp, Homo Sapiens
  misc_feature (359)..(359): n is a, c, g, or t
  misc_feature (382)..(382): n is a, c, g, or t
cctggctcctcccaggtcaagctgggaacacgaaagaaggaagccagcagagggcaagtacagacaggttcattgcagagcgtacccttggggttcagcccctcaacctgaggctgaggatctcttggagcttggggagcgtccttggggaccacattcagtagatggaaccacagggccgtaagggtgcgtccatgtgcattgcctggaaggtgaagcttgtagaaagcaaaggtttgtagaaggcgaaggtttgtagaaggcgaaggtttatagaaggtgaaggtttatagtagcctacagcgacttcatttccactctctctcttctagccatgtgttgaaatcagttattcgttngggaatgactaggctgttggatngcttttcagtgtgccatatctgggacttccct

SEQ ID NO: 376793 - DNA, 373 bp, Homo Sapiens
  misc_feature (70)..(70): n is a, c, g, or t
actctgtctctgtctctcttcatacgtttccagctgagctgggatccatagtctgtttccctctccacgnccaatctatttatcttctctggaacttcttgtaatgccgggagtgcagagcttacaagttggggcaggaagctttagaagcccaggcagccctgagaggctctttccttgtaagtgggtctctccccaggagcctcttggaatatttagcagggacttttacccatgctgggtctagagaccctcccgcccctctgtttcctgccctcctacttagactgggatctggtttccctcagctggttcccttgctagcgtgtgactctgtgtgtctgtctgtgactggtttagatttgtatcaaat

SEQ ID NO: 376794 - DNA, 492 bp, Homo Sapiens
  misc_feature (462)..(462): n is a, c, g, or t
  misc_feature (467)..(467): n is a, c, g, or t
  misc_feature (478)..(478): n is a, c, g, or t
ggaggggatggagatcttccccttctaatactcaattttgttttggtatttgattgtcacaactagaggatataacaggaggtcagtttaaaaaatagcaaacagtctaaaaatgaaaactattcaatttagtgatggcttataaaagacactccaacttgtcttgcccaaactcccttcttcacagagccagggggctagatttcttgccactttttttctgaaaggcaaatgcatgacttttattcttttgggtctcagtgtgtttcttgaactgtgtgacttcaatatctgtgacaagtttttattttcccttagttgtatgtgaagaaatttattctatagtcgtgatcatgtagtcctccattgtttgggaagtgcagaccatgggattcctatggcagcagatggggggttgtcctgtttgtggcactttttttcccaagctgctggaaattcccnccgangtggatggggnccatagtaaatctt

SEQ ID NO: 376795 - DNA, 530 bp, Homo Sapiens
gagaaagagaaaaatccaggatgactcttagaattagagtttgagcaaacaagcccaagcaaacaagcacaatgtggcagtgccataagtctgtgatagcagagcttagagaagcccatgcatgtttgggggcattgtggaagggagttctttcttgagcatacgaagtgtgagatgcctgttacaaatgtatatcctaccacactcctgacctcccagcttggggtcaggccctatacccaattgcccatccaaccacatggcagatcaccagggatgtgagggagcccagtgtacagactccccactgactgaggggcatcaggatgctcttcactggggacttagcataactcagtgtgaccctgggaagccctcttgagccacccacaaaggattcttgttcctcatggtgactgtggtcacccaagcctgtgaccaacactggtctcattaagatgggtatcaacagggaaaacccattgcccccaagaaagcccgagagagacattcgataaggagcagccaca

SEQ ID NO: 376796 - DNA, 425 bp, Homo Sapiens
  misc_feature (45)..(45): n is a, c, g, or t
  misc_feature (77)..(77): n is a, c, g, or t
  misc_feature (136)..(136): n is a, c, g, or t
  misc_feature (218)..(218): n is a, c, g, or t
cagtagcgaacacctccaaaagggtcccaaacccccagccccgtnactggcttggttgtaatcaacctgcccttccncccagaacccccgccaaaagacacatgttaattaatccaatcgtgccctaactgtgaanttgggcagctgcccacctgcccacttggagagcctacaatgtgggaaagacataagacttgtcctatggacctcaagagttnccagaggctggagccacaaggaggagagtgcaataggctgaatttaagacaggactctgtagtagtcagagcagtggactaagttaaaccagtcactcatgagttcttcaccttgaagtcccaataatggactgcagtttgcaaaataatcttgtttccttatgttaagatgtgttacccaataaaccccctgtttatagggtatgt

SEQ ID NO: 376797 - DNA, 563 bp, Homo Sapiens
  misc_feature (75)..(75): n is a, c, g, or t
  misc_feature (439)..(439): n is a, c, g, or t
  misc_feature (498)..(498): n is a, c, g, or t
  misc_feature (510)..(510): n is a, c, g, or t
  misc_feature (521)..(521): n is a, c, g, or t
  misc_feature (553)..(553): n is a, c, g, or t
gaagaaccctcctgggatgccacataaccctggcggttcatgaaggactgtgtgcagtgcaaggctgtacctagncaatagtgcagaagcaatcagagctagatgtgggcagatttgaaacaccactaaaccacatacggaataatccacaaagggcagaagcctcactggcactagaggcttaagcacaaacttcaccacagctggctgaactgacccagagggcaactcctaggaaagcaggcttaagaagaaaaaccatgctgatccctgggcagcctgaaagtccctgtatacacccaagactgtgccttctccagagtgatgggagaagaaaaatccaagctagtagtccgtcacaaaatgtgaaggcaaacacataattatttaaattgcaatagcagcctccaagccacaaacacatccaaggtaaagagtnaaaagtagaactggctaagcggtcttaagcacaatctatgaccagtgattttatgctgnccggagaatttncatagccaggntcaaaggtgtaacacgaggctgcacacttgtntgggaattga

SEQ ID NO: 376798 - DNA, 390 bp, Homo Sapiens
tggggagaaacacttcatcccataacatattcagctcatagtagatacacagacagaagaaaggcagggaatagaaactgcttttgaaggagccctaaataattgacttagcagacaatgacatcacacattttaaataagttcagagaactgaatgagatcatgtctaaagaattaaagaaaatgtatgataacaatatctaatcaaatagaaaatgccagtaaaagagaaattatttttaaaggtaccaaatgaaaattctgaatttgaaaagtacaaaaatataaataaaacaatgactaaagggtctcgagagacagtctgagctggtagaagaaagaaactgaccttgaagaagatcagtagagattatgtaatccaaaaaaaaa

SEQ ID NO: 376799 - DNA, 504 bp, Homo Sapiens
  misc_feature (252)..(252): n is a, c, g, or t
  misc_feature (335)..(335): n is a, c, g, or t
  misc_feature (458)..(458): n is a, c, g, or t
  misc_feature (469)..(469): n is a, c, g, or t
  misc_feature (479)..(479): n is a, c, g, or t
  misc_feature (492)..(492): n is a, c, g, or t
ttttttttccttttgttagtggaatgttaaaataaatgtatgactagacaaatatttctgacaaattagccattacaactcttcctgttactgaattagggcctaatgcttaaccttcaaataactaaggttcccaaacccacatacagtttagcagaaagactaaaatactctcacttcgaggataactgttaaataataaatcagctaaccaccttaaaactccaaacacctaaggcacaaccactggantcacacaaggaacttaatacaccagagttttctgggaaattttcaggttttcctcaaaaggtaggctaatgtggttccaaatntccggggtcttacacaggtaaaacttacatccttcacaggtaacccatttctccttccccgtcctctttttttaggtaggcggttttttaggggtggcttccgggcacctttttggttgggancttttgggggntccggttttnccctttgggcctnattttttgcggg

SEQ ID NO: 376800 - DNA, 412 bp, Homo Sapiens
  misc_feature (15)..(15): n is a, c, g, or t
  misc_feature (37)..(37): n is a, c, g, or t
  misc_feature (51)..(51): n is a, c, g, or t
  misc_feature (66)..(66): n is a, c, g, or t
  misc_feature (80)..(80): n is a, c, g, or t
  misc_feature (90)..(90): n is a, c, g, or t
  misc_feature (109)..(109): n is a, c, g, or t
  misc_feature (115)..(173): n is a, c, g, or t
  misc_feature (186)..(186): n is a, c, g, or t
  misc_feature (189)..(189): n is a, c, g, or t
  misc_feature (196)..(196): n is a, c, g, or t
  misc_feature (198)..(198): n is a, c, g, or t
  misc_feature (217)..(217): n is a, c, g, or t
  misc_feature (254)..(254): n is a, c, g, or t
  misc_feature (283)..(283): n is a, c, g, or t
acacggcccacccangccccagcctaaatttaaaaantttaagtaagaganggggtttccacccangttgggccccgganggtcctcaancctccttgaccctcgtgancccacnnnnnnnnnnnnnnnnnnnnnnnnnnnnnnnnnnnnnnnnnnnnnnnnnnnnnnnnnnnttgttcatcttcnaantaaatancnttgaatgttttgtaataantttaatgttgacaataagagtttaaaaataatttgantttggactgtatttagatttccctttaantttgctgtagaaatagtaaatgatttaaagtggttatgatgtgttttatgaaggcttactattttatattgtacttatttaatttgtatttgagtctgtctaattttaaataaaaggtttatacatttg

SEQ ID NO: 376801 - DNA, 370 bp, Homo Sapiens
  misc_feature (324)..(324): n is a, c, g, or t
tgatgatgaagaaaagaagcatgaaaaattgaaaaaggcactgaacgcagaggaggcccgccttcttcatgtcaaggagaccatgcagattgatgagaggaagcggccttacaatagcatgtatgaaactcgagaacctactgaagaggaaatggaggcatatagaatgaaacgtcagaggccagatgaccccatggcctctttccttggacagtagcaactagtcagaagaccatccaagatagatgcagctgatacattcttttcagcttcttattgatgattgtagataggaaaaatccttgtttattcttcttgctgccnggcttttaataaatatttcagatgcctcacagttaagttcactcct

SEQ ID NO: 376802 - DNA, 443 bp, Homo Sapiens
gcccaggacccgaagccccctcctcggaaacactgtgaaggataatactgacagagtagaatccagtgaaaacagccctaacaaaaccctctgacatcagtatatcaacttttaacagccccactcactggcttttcctaaactacccaaaaacccacctgtaggatactgcattaagtcagcatctcagaaacagtggtgtgagtaactgagtcaaattgtcaagtactttggatatacatagtgtcgagctttagattggtatgaaattaaacagcaatgcaaatagatttaattcctatttactttaagaatgaaaaacaatgttcattttcctacctaaacagggtggttcaacataaaggctgatgttgtgtccgttttgtattttatcttttgttaaagatacataaatgacaatacttaactgtgagtggtttgta

SEQ ID NO: 376803 - DNA, 110 bp, Homo Sapiens
gccacccctttttatccctctgtatagacatcctagagttgccaatgtctgtgatgttgaaagaaagaatgcttcttattgtctcttcttttcagtgttggtatgatttg

SEQ ID NO: 376804 - DNA, 564 bp, Homo Sapiens
  misc_feature (509)..(509): n is a, c, g, or t
  misc_feature (529)..(529): n is a, c, g, or t
  misc_feature (536)..(536): n is a, c, g, or t
gcgtggaaccagccatacaagagctgttcagctgtcccacccctggctgtgacggcagtggtcatgtcagtggcaaatatgcaagacacagaaggaaccagtgagaaaggcgaaggacagagttccaggatctgataaaagcattaagtcagctccttagagacgcagacactcttggcagcgaaggaaaactgtttccatcccacacattgcccagcagggatccaagcttactcaacatctttgggccctgatacaggtcatcaggccagacctcctaggaagctaacaaatatgacaaatatttatcttcagaaacgtcattattagccagtcacctgaatttgccttttgcttttcccaactgaggtttttgtcttgtgatattaggcatataaatgacaaaaacacggtgaattttataaggcagggctaggaagtaatgcttaacatcacgagtgaacgtggctcatgtgggtctttcctgcacatgggtcacctgtgttttntgcgcccttgttaggtgggntgcacantgggctcagccctttcagttgttccggg

SEQ ID NO: 376805 - DNA, 381 bp, Homo Sapiens
  misc_feature (147)..(147): n is a, c, g, or t
  misc_feature (152)..(152): n is a, c, g, or t
  misc_feature (159)..(159): n is a, c, g, or t
  misc_feature (192)..(192): n is a, c, g, or t
ctttgttttctctttgggttcctatcccacagtttatgtttttgcccagtcagttcactctgctttccttcatgatgtcttcatatcaagatgcacactgagagagcagattgtacctgggaagctgccgtccttgtgacccaaagnaaagnacaaggnagaaccaggcaatggctctcaaagcctccaccnttttacaccacatttcattgaccaaagcaagtcatatgaccaagacagatgtcagtgggtcggaaagttgcatccctctgcaggagcaggcttggtagggatgagctccgtaggagaggcagaggatatataacgttctgtcttcagagtttctcctgcgtctgctatttctcaaaataatcagcttaa

SEQ ID NO: 376806 - DNA, 414 bp, Homo Sapiens
  misc_feature (14)..(14): n is a, c, g, or t
  misc_feature (21)..(21): n is a, c, g, or t
  misc_feature (34)..(34): n is a, c, g, or t
  misc_feature (45)..(45): n is a, c, g, or t
  misc_feature (225)..(225): n is a, c, g, or t
  misc_feature (324)..(324): n is a, c, g, or t
  misc_feature (328)..(328): n is a, c, g, or t
aaggttaaccttgnatatatntcctaaattttanattggcacaantttggaatttggcatgtcccttccctggacttgtcttcacttatttacagctctatttttcttttccttcaccctgatccaaccttaccaagcttgttttgggtgaattactccaaaacccgaaggcaggatgagggagtcttacagattcaaggccttgttcatcaaaaagaggctgtnctgtggctgctgagtggaataccaagactaggttcagatagtatccaaatcatcaaaaccagcttaaagattaatttttttaaaactatggtccaattnaaanaaaatcactgttgcaaaaatatatgtactattgaaaaccagtaattagaaataataaagtgaaacatataacaatttcaaaaaaaa

SEQ ID NO: 376807 - DNA, 777 bp, Homo Sapiens
  misc_feature (28)..(28): n is a, c, g, or t
  misc_feature (51)..(51): n is a, c, g, or t
  misc_feature (107)..(107): n is a, c, g, or t
  misc_feature (553)..(554): n is a, c, g, or t
  misc_feature (672)..(672): n is a, c, g, or t
  misc_feature (711)..(711): n is a, c, g, or t
  misc_feature (727)..(727): n is a, c, g, or t
  misc_feature (732)..(732): n is a, c, g, or t
  misc_feature (752)..(752): n is a, c, g, or t
actgtgccggaaaagtttttatgaacancccaccttttaaaattttccagncccctgaaacaggaaagttggctccctgaagttaatgtttcccaggccttagaaantcccctctctcccaatcatcctaaaattgaagatgactgaatctattttaagatcctaaattagcatctcttcagacacacacttcctgattcagtgtttcccaatcatgattagaattagactgcaaagcacgtcatgggctgggattgagaactccatgttgctctgtatcttaggcttatatacgtagggatagagtaagcagtacaaagtgtatattttggaaaagacaggtaacaggtaacagcatcgctaatccaattactgtgccttctaaacggagacactcagacacttgaactcatctttttatgactaatagttttttgattaaaaatgtgaacaagaaaatactaaaataaaaatcctttcgatttagccaactctttttgctgtaggctaggaatacacactttttaaattaacacactgtagatcctttttnnctgttttaacattcctctaactcccccatttatcttttgtctattaatattcactaggccaacataggtatttttgcagcctaagggttccattatttaaaagttaaacttaaagganatatgtccacctttgttcctgccttgggtcttaaggggngttgtttctaggaggnaacangttttatggggtctgttttncatttggtttcattttttggaaatt

SEQ ID NO: 376808 - DNA, 148 bp, Homo Sapiens
ctttgctggggggttgaggggtaacaagataccatctgtataaagtgcagtttgtgtcactcaaaatatgcactgtatggctacacaaaagcagcttgatgaacaaatcaccccatggctcattaaagaacaaagcttccaaaaaaaa

SEQ ID NO: 376809 - DNA, 643 bp, Homo Sapiens
  misc_feature (189)..(189): n is a, c, g, or t
  misc_feature (242)..(242): n is a, c, g, or t
cgagtcggtgccctgaggggtgggctgtgctcagagcagggagcggggggcccaatcaggctgcctgcggggacgggagggggctgccctctccccgacacaggcgttttcctgctttttccctcccgtgtctgtccagcagtgtccgaccagagcggggagggatcctgcccgagcccggggggtccnctgagctgcgacggggtgaggtccggggatctcggtgcagccactgctggctncccacgggcctgcgaccgaaagcccaagtcagggttcatgtttgtgtcatcctgggggcaggcttgccgggggctgaagcgtttgggcaaagtcgaccaccctcctgcgtccccaggcttcacagcgagctaggcaggccctcaagggggcagccccagcctcggcaccaaagcccgctggcaggcacagcctctgggctgtcttgtggaggtgtgagtggcatttgtgcccgcccttcctgtggtttgggtcaccattttggggttggcgctcttatggcaagatggccactttctgggagtgagagcacatccccgggctcatgttaccccgtctctgtccacagccctcggggggtggggtctggtgccgacggtactgtcctgcagctgtccattgt

SEQ ID NO: 376810 - DNA, 465 bp, Homo Sapiens
  misc_feature (384)..(384): n is a, c, g, or t
  misc_feature (412)..(412): n is a, c, g, or t
  misc_feature (427)..(427): n is a, c, g, or t
gtccttagggtgtggattaggctctggcttctgtgatggtgcaagaggcaggatggtctccagacaccttcttgcagagtgattttgaccaatgcctttccagcaccttcccctggttatgacagggagctcccaggccaggccacatgaccccacaggtaggctgaccccatggacccactggagactttgagggcagagctcgggcacctttcatcttccttgggtggtcctcatggtcgctgtccgctcatgttcctggtgttctgggcatcaccttgtgccggttggggctgggctcccgtgaagtcctaagggcagaaggaggtgctttcagggcctttcgctgctactgggacatccacaggacctaatgtttatgtngaatctccagggttccattcgaaggttnctgagttcattcttnaagaacccagggtccattttggggtttggttttgggtt

SEQ ID NO: 376811 - DNA, 249 bp, Homo Sapiens
ctgcccaaggtgtggccacttgtagggcagtgagaggaagccgtcgcggggaccatgctgccttctctgggctcacgactgttctggaaaggaccccatggcagacttggcaaggtctccacttcaggggcaaacatctccatcatcagcaactccaaaccccagccacttcctgggagttcaggaactgtgtttagccataatgtcccttggggtttggtgaaaaacaacttgctttttatttgtggg

SEQ ID NO: 376812 - DNA, 720 bp, Homo Sapiens
  misc_feature (299)..(299): n is a, c, g, or t
  misc_feature (305)..(305): n is a, c, g, or t
  misc_feature (310)..(310): n is a, c, g, or t
gattataaaccgcagaccttcttgtggattcctgatactgctgtattaaaactctgtgactttggaagtgcaagccagctgttccgaggagaacccattgtttcgtatatctgttctcggtactatagggcaccagagttgatctttggagccactgattatacctctagtatagatgtatggtctgctggctgtgtgttggctgagctgttactaggacaaccaatatttccaggggatagtggtgtggatcagttggtagaaataatcaaggtcctgggaactccaacaagggagcnaaatcnagagnaaatgaacccaaactacacagaatttaaattccctcaaattaaggcacatccttggactaaagtcttccgaccccgaactccaccggaggcaattgcactgtgtagccgtctgctggagtatacaccaactgcccgactaacaccactggaagcttgtgcacattcattttttgatgaattacgggacccaaatgtcaaactaccaaatgggcgagacacacctgcactcttcaacttcaccactcaagatgctaatactggagaccgtggacagaccaataatgctgcttctgcatcagcttccaactccacctgaacagtcccgagcagccagctgcacaggaaaaaccaccagttacttgagtgtcactcagcaacactggtcacgtttggaaagaatattaaaaaa

SEQ ID NO: 376813 - DNA, 476 bp, Homo Sapiens
  misc_feature (34)..(34): n is a, c, g, or t
  misc_feature (111)..(111): n is a, c, g, or t
  misc_feature (187)..(187): n is a, c, g, or t
  misc_feature (207)..(207): n is a, c, g, or t
ggagcccacattcacctagccctcttttttaaangtaaaaactttccagcacttacaggagttaactgaagctggggcatcatggtgtaaagacgccctgacactggtcancctggaattcatttagtttgtcagtgggtgccctgacaatctgtcacaacatcaatttgggaacatggcattatanttttatctttgaactttttnctttttggatgacatttgattaatgcgtcatcttggaacacattatcttttttcttggttatgtgatcaggaagattaatcagtttttcctgttcttggtataattcctgcttttcacatacctgtcccttacagttctctatatatacccttcccttattacacagagagaaatatctatctatactttttacacaaaatatacttcaaaagaaacaaaacagccacaattattaactttttaaataaatgagaatttaattataaaa

SEQ ID NO: 376814 - DNA, 579 bp, Homo Sapiens
  misc_feature (11)..(11): n is a, c, g, or t
  misc_feature (25)..(25): n is a, c, g, or t
  misc_feature (34)..(34): n is a, c, g, or t
  misc_feature (49)..(49): n is a, c, g, or t
  misc_feature (74)..(74): n is a, c, g, or t
  misc_feature (93)..(93): n is a, c, g, or t
  misc_feature (140)..(153): n is a, c, g, or t
  misc_feature (508)..(509): n is a, c, g, or t
  misc_feature (512)..(512): n is a, c, g, or t
  misc_feature (524)..(524): n is a, c, g, or t
  misc_feature (537)..(537): n is a, c, g, or t
acaacccaggngtacccccccggangccataggncattaggccctaaangtactggcaaaggctatcctatacngtccacaccctccagcatncccatgtaatacgtgtaaagcaacaacaatccttaatttaatattcnnnnnnnnnnnnnngtttcctgtgtttacttttccttacccataaatatatgaaccttaaacccactgtattggtcaatatagtcagttacattcatttctgccctcaagttaaccgtaatgcaattagttcattttccacaacagtaataatttgggtaaagtcatggattgataattttggtcatctttaaaagaaccaaatacaaatcacaattcactccataagtgggtaactaacctgtaaccaggcaaactggcaatggaatacagaggtactgaagggtttctaaaagtatttgagcagatagttaagactgaatattagtatttgcttatctgaagttatgtcagaatccaactgattcannagnatgggcaagaancaaagcatgttgngcttggcactgtcagactcttctccaaaggggctgccagtgg

SEQ ID NO: 376815 - DNA, 451 bp, Homo Sapiens
  misc_feature (396)..(396): n is a, c, g, or t
  misc_feature (403)..(403): n is a, c, g, or t
  misc_feature (422)..(422): n is a, c, g, or t
agctgcacttcagagagtcccactgtaatctgttaatagaatctgctttaaatgagtcactccttagactggcaatgacacccagcttagtctgtaaaatcaggaatctttgtgttggctgaaggaacttagtaatcttagttgaattcctcttccccatgtctttcaaaaccagagcactgggtcgaacctaacccacaaaataattcgtccaaattaaattgacttttttacataacatcagcaccaccccttacacttttaaagttaaagaccctgttgatcaggttacctgggaaattttcaagtgcatctgaccgggggattatcaaggtccttgtggacatctgtttctggatgctgtggaatgtggatgttcaccacaaataggagggntctggantttggctgggtactaatgntggagtgggtgacttattggggggccttg

SEQ ID NO: 376816 - DNA, 551 bp, Homo Sapiens
  misc_feature (257)..(277): n is a, c, g, or t
  misc_feature (304)..(357): n is a, c, g, or t
  misc_feature (404)..(404): n is a, c, g, or t
  misc_feature (457)..(457): n is a, c, g, or t
  misc_feature (474)..(474): n is a, c, g, or t
  misc_feature (483)..(483): n is a, c, g, or t
  misc_feature (509)..(509): n is a, c, g, or t
gggtggggctttaggtgatgtgcctgtcattgacttgcatggaaggagaattggtctgagtacagtgggcagaggttggtcaggggtctggaagagaaacaattgaaaataaaagactaaagggtctgagttagaagaatgtggttagacacatgagagtaggtatacagtatgcctactagaaaggattcaccatggaagaggtacgaaacaactaagcagacaaaatgactcagccagttgatgtcagccaatcnnnnnnnnnnnnnnnnnnnnnagggcagagtttcactctgtcaacagnnnnnnnnnnnnnnnnnnnnnnnnnnnnnnnnnnnnnnnnnnnnnnnnnnnnnnggttcaagtgaatctcctgctttcagcctcccaagtagctggggacntacaggtgtgttgccaccatgggccagcttaatttttgtaagtttttagtagnagtagggggtttcaccngttggggcnggggtggtctcgtttccttttgaccncctgattcaacccttttcgggccccccaaatgtcaggggtta

SEQ ID NO: 376817 - DNA, 466 bp, Homo Sapiens
  misc_feature (421)..(421): n is a, c, g, or t
cctgactgactgtataattttaatatttgaaaaattgcatccagaaattaatacaatacagatttgtacaaaaaaggaaggacgtaaaaacttctaatcatacagacaaaaatatgactgactaagcaaagattttaaaaaaggacaggatgtttaaaaaatactgataaatactgtgtaatgctttaatttactgtggcagatacaaaaatcaataattcattaacagattatatatgtaaaaaaagtaactacatgaattttctagctttttaaattaataaaatgtaacagtagtggtttttattttttaaatgaggtattattacactgtaaaccaaaaacagagcacaaataaataaaggcaatgtgcaatttagtgataaatggattatacatttcaacttaacaacagataacnaaaattctctagttatttatggacttcgtcatctaaaaatttggc

SEQ ID NO: 376818 - DNA, 493 bp, Homo Sapiens
  misc_feature (16)..(16): n is a, c, g, or t
  misc_feature (56)..(56): n is a, c, g, or t
  misc_feature (62)..(72): n is a, c, g, or t
aaccccccccgacggntgccatcaaaccaaggacaaaaagccccggttaattaaantgtttnnnnnnnnnnnggccggaaaaccccacccagggaaaaaaaaccatttttaaaaaaccgaaagttgccccctttccccgtgtggtccttggggaggagtcctagtaccaaaaactgaaaacccttggcccccgggaatttattttccatggctgttgtcatggctgagtagttttttgatgaattcaatcaatgcagagaacgcttttagataaatcagaactctccttaaaatgcatttcaatcagaagcaaagtacacccattatttatgcagacatgtaaaaaatctaaaaattcttgcaatgagtagtataagccacctatttttacttccttctctgaaatattccagttaactcagcttgggttctgtgctcctcctctcttcctatagaacactgtgcataccttgaataaagagcttattatact

SEQ ID NO: 376819 - DNA, 462 bp, Homo Sapiens
  misc_feature (34)..(34): n is a, c, g, or t
  misc_feature (39)..(39): n is a, c, g, or t
aacagatagagatactatgtaaagaatgggcgtnggatngttccaggaaaactttatttacaaaagcagatggagggctggatttggtccatgggtcatagttagtgaccctgatcccaagtttattttgtgttagaccctctaacctttgatctgcgtcttttctgttttgatttacataattcatttttaaatcaaaaagatgtgcgtatatatggttgtgtgtatctgtataacctaaagctataatattttgttgtcttgaaagcagatacactcttcctgggagtctgttcaggtttcaggacgattgactataatgaaagagacagaatagggtaagggaagatgggtatgctatcagccatttcctttcccttgtcatttaatgccataaatttgcagattctctatgtaaaaagggaaggtctgtgtattgtcaaaataatatactctccaagt

SEQ ID NO: 376820 - DNA, 213 bp, Homo Sapiens
ttctgagaggtggctgttggtcaggacgggaagctggtgaccttggcatgtcttggcagcagctagatcaggccctcggcagagacacaggaagcggaactgctgtgccttaacttggctgtggagctggagctggagaaggcagcatactgaccagtggctttttgattgattgtttgttatgaggtggagttttactcttgttgtctaggc

SEQ ID NO: 376821 - DNA, 420 bp, Homo Sapiens
cacatacatataaaaatagtgggtagttgtgactttataatctttgaggaagaactttcctcaaagttttccacagtgctttgtaagcattgtctccataaaagtcaaccttacttccttaaaattgctggtcataactgatcttaggtacactccctaaatatgatattccagtaaaaaccttgataatataaccaaaatttccaattatgtcctgttataagatgaatagattcttattggacttttgctaacaacaatatcatcgtggaaataagagtattcagtaaggatttcaaaattctggaaaaatcaggcaagaaaaaaagataaacgcttcatttctgtttacaaaagtataatctactaaattgttgtaagttacagttaggagtaaggggaaaggggtttcttaaatcc

SEQ ID NO: 376822 - DNA, 470 bp, Homo Sapiens
cctggttgtttgcttttgctagtccttaaaaccccaaacaagtagaacttgtacttattccatgaggtccacgtagatcaaaggttagatttatacccgtgagtacaattcagtgaaaagtcaggaaaatagaaaagtgattgcgaaaatggagtttagactttcccttggggttctcagaccaggaagcttgctattctggtgatgagaaatggcacactgatttggctatctaatttcttgagagtcttattgcatgcccaggaaccataaaagtggaagtttcttctgctcttctgtcggcattctatggccatagagttaatacttgggttacactcaggaatccgagttaagaagtgcctccaaaatgcatcaaggtacctacttttagcaagtcccaaatattgagaccacaaatggtctttatccaattctaaagcaaaactataaatatggatctgaatttc

SEQ ID NO: 376823 - DNA, 466 bp, Homo Sapiens
  misc_feature (97)..(97): n is a, c, g, or t
tcatttataaaatgagataataataacttgcctcattggatgtacacagaaacaatgataacattttactttaaggctaaactgctttttggatacnaacaacaaacaaaaatacagctaatttttatcacatgagaatatggaaaagggtaatttcaagtgataataggaaatgaagttgtcctcattatcccagtggtgagttgacttctcaataaaataccagctctacttatcttcattgttattattatattttcaaagactattccaagccaggcttcgtggctcatgcccatagtctcagtacggagcagacgaatcacttgagcccaggtgtttgagatcagcttgggcaacatggctaaatccttttctacaaataatacaaaaattagctgggcatggtggaccacacctgtagtcccatctacttggaaggctacagtgggaggatcacctgagt

SEQ ID NO: 376824 - DNA, 327 bp, Homo Sapiens
ggaggagtgagacttcagaagagaaacgcagcacatcaaatatctgctgtccatctaagatcagagccgggctgcaaggccacatggctggattggccccctctccccacttcgttctcccaggccagcctacagccgctgcacgcgttcatcttgcagcctgggccctgccagcaagactgtgcccgccaagacagcctctacacacccagaggacagtgggccccccagcatggccaaactgccaatgagacaatgttttcccttcatgaagaggtaactgggacaaggaaatcccttaaggaaagaggaaaagacctgcggtgt

SEQ ID NO: 376825 - DNA, 382 bp, Homo Sapiens
  misc_feature (81)..(81): n is a, c, g, or t
  misc_feature (136)..(137): n is a, c, g, or t
  misc_feature (281)..(320): n is a, c, g, or t
atggaataccggggggcccatgatggtgtccccgaggcggggtgtgcccaaggtggcagtgcttctcccctgccccagctncctgctccctccccctcccccagtccctcacatacccagctgcagagcatttganncccggcatcccacaagacacagaccctgctcctcagaatcttgggctcatccgtggaaatcaaggaacaatacaggggaagacagaatatgagtctcagaaagttgtctattttgtcccttttaaaaacaagatttctcatacnnnnnnnnnnnnnnnnnnnnnnnnnnnnnnnnnnnnnnnntcagagcccaggagttccagataccagcctgggcaacatggtgagtgagaccccgtcttcac

SEQ ID NO: 376826 - DNA, 308 bp, Homo Sapiens
acaagttccactcagttcccacaggttctactcatcctagcaagttccttgcttcccccatttcccatgtcttccctttccaactgccagacacaaaagaaaccgcctcctataatccctataataagccccttattttgaatattaagatatgtgtatgtgtattagatcctagtggttcttttctgatcagaccctgattaaccataccatcctacctaatgctattcccccatcctagttctatcatattatccctttttttgtttgttggtactttagctgggtttatcttttgtcatctctca

SEQ ID NO: 376827 - DNA, 535 bp, Homo Sapiens
gtaaccccattacctactcatagaggaggaactggaagccagagagggagatgccttattgacacagagcacaagtggcaggagctggcttcagacctcagtccatccggtgtggcagtccctcttcccaggaccaggtggagctggagagaaggaggaagaggagtctgtgaggtccagatggagatgctcggcaggccctttccaaaggtgggaggtgaggtcggcctggaaccctactggatgcttaagtgtcctgccgcactgctgatgaaagcaggtccccaccgcagtgtatatacattgtgtgtttgcatctaaaacgtctatagttgtttgaaatgtttaaatctttaacccatctggagatgtgttttcatgtatgggtgtgacacagagcttcttaatttggcttctttttccagatatccagttttgctaagcaccatttattgtttccaacaccatcttttctctcaattccctgtctagactccggttctgttgatctatttgtctatttctgagccaatag

SEQ ID NO: 376828 - DNA, 501 bp, Homo Sapiens
  misc_feature (472)..(472): n is a, c, g, or t
gcgagggataccagaaacctttaatccagatcattcctgttttccattcaattggtggtggtttgcctaggaccccaaaactgtacttgcagatgaacttactacttttcttcctaatggcatcttcagacttagaactaaatctcagacttcagttgcttcccttaataactgaaaatatactgcattatattccttgtccttcaaagtagcttttgatgtgttggcccaacggtcttttcagaaataccgtgcgtggatgatttgtagtaaaactgagatgctgtatattttccaagtaccagattcacaaggaataatgcgataatgatgccttgttttctcaagctttcagacgtgccggcctagagctggcaacatgcaatctcgtactacttcatctggaattactggaaatggggagacttctgtctggcattctatttactgattttccgtgttttcacaaccnggcagtttcccagtcttcaggggtaaagt

SEQ ID NO: 376829 - DNA, 486 bp, Homo Sapiens
  misc_feature (19)..(19): n is a, c, g, or t
  misc_feature (35)..(35): n is a, c, g, or t
  misc_feature (51)..(51): n is a, c, g, or t
  misc_feature (77)..(77): n is a, c, g, or t
  misc_feature (93)..(93): n is a, c, g, or t
  misc_feature (101)..(101): n is a, c, g, or t
acccctggagcccccaaancctgccagagtaaaanaaaactgttaaaaaanggccagtccctaaaaaacgaacagantgccttataaaacaangaagccgncccaaggtaggaagcaatcattaatggcctaattgggaaagacttcctcgggtttgtgtgttcacctgaataatgtacatttcctcgactcttttgagtttgtgttccctgtatttttctgcagggcatgaactgtgcatcaattccctttgtattcccaacaatgaatgagtgagtgaacaaatgaatgaatgaatccatttgttgtttcttttattccatagcctgcttcattgggtatgcaaacttcctcttttaatgttgacattgaaatgccatctgtaccaagactttttagatgccattatgaaagtgactccctgctgtccacgttttatggtgccctgtgtctattaaacttatgtctataaatacctaaaaaaaa

SEQ ID NO: 376830 - DNA, 347 bp, Homo Sapiens
atttcataacaaaaatttaaagtacgtctgtacttcctgcataacatcaagacatggaaggaagagatgctactaaatggaactcaagtcaacatcagaaaacacaacacgtcgtcaaaggactactcagaagggggaacacagcgctcaaaagtggtcttatgcatacatatagtgcagtcattgggagtaaaacaatcaaatctggaaggtataaacaagtctaagatgatctagtttaaagcaaaaaagtgctgaagtatatttagttacttttaaaatctgattgcattcattcttagaatagtcacaagaaatcaaacaatgaggctctgcaaatgctctat

SEQ ID NO: 376831 - DNA, 541 bp, Homo Sapiens
  misc_feature (365)..(365): n is a, c, g, or t
  misc_feature (393)..(393): n is a, c, g, or t
  misc_feature (430)..(430): n is a, c, g, or t
  misc_feature (455)..(455): n is a, c, g, or t
  misc_feature (496)..(496): n is a, c, g, or t
  misc_feature (502)..(502): n is a, c, g, or t
  misc_feature (520)..(520): n is a, c, g, or t
attagagtgagaggatggacctcagccttggggtcagaactcccgtgcttgggatgggggttggcaaaaataaagtagaattaataagacatgggctgaaggtccagatgaagacagaagccctgttatcagaaccaaagcccagtgctagatatgtgtgcatccaggagggctgggttctaaatcctggaggatggggatgcttaggctccctacattcctcccactaataatggtcagtatgaatcatgtggctggctgaggtgaggtttaacttagccatatagtcttctccctgacccccaggtttccttttaaagcaaaatacctgcttcatcatggaaacagagtctttgacttaacantggactattacaattccacatgagagcnttagagacctaatacaaggaagcaaggaagtgaattncagcttcttggctccagacaacggntgggttggtcctgggacattgaacccttaacattgttgggnattcgnttttcgaagttgcagagnggaattattgttgttttaatt

SEQ ID NO: 376832 - DNA, 425 bp, Homo Sapiens
  misc_feature (12)..(12): n is a, c, g, or t
  misc_feature (60)..(60): n is a, c, g, or t
  misc_feature (79)..(79): n is a, c, g, or t
  misc_feature (84)..(84): n is a, c, g, or t
aatgcctttacnaggaaactgtcataaacacagcaactttacctgtttaggggatgtaanccactcatagccaggaacntgtcnaccccaaaatgccagttcattcacagatcactaacccggggctatccctgcaagttaacaacccctggttacttttatttatgttcttccttgaacaagaaggattaaacctccccttctcctccctaacacccagcacacagctggacctaggcaaaatccttaaattagagtgtggattttaagaggctgaggcaggaagatggcttgagaccaggaatttgagacaagcctaagcaagaccctgtctttacagaaaatacaaaaattagctgggtgtagtgccgtgcacctgtagtctcacctacttgggaagctgatgtgttaggattgcttgaact

SEQ ID NO: 376833 - DNA, 443 bp, Homo Sapiens
  misc_feature (34)..(34): n is a, c, g, or t
tcacctcagggaaccccatatgtgacccttccanacactgttggaataaaggcccagcccccccagtcaaggccctgtgaacacctgctggacagcaggcattcccaaggccccctaagcactgagttaagctggtaaaggttaaggaaaaagctgtattccttactactttactcccaaggtagtaaagtgtatggaagatgtacctgacagaaataacttaagcatcccctgagaatgaccctgtatggcagatgcatctgacagcaataacttaagaagtgagggttgccacgtggaggctgctgaggggagggtgctgagtgaaagtgctatgtaaactgcatgctttttataagtggttgcagttctgtccagcccgcggccactggaccaccctgtaagattccccaaataaaccctatgtttccttcactagctcc

SEQ ID NO: 376834 - DNA, 535 bp, Homo Sapiens
tgtcgtttttaaattgagaattgcttctaaaacagaagacatgaaaagagaattaaaaatacaatatatgtgtaagatagaattattcaacttagcatttattaaacatctaccagatgatagacattagaaataaaatgactagcaagacctggcccttcccctcaggggttcacagaatggctggagcaactgtcatataacctgttatgaagtgccagaaacctacacagacatttgtgcgggttccagaccagccgcaattagagatgggcagagtgggatggggtaggggtaaggtgcttgaaatttgcctgggtgggaatttttgaagtataaaaaggacttctacctggggggctgcggcagtagagggaagagcacggtcggtacaaatgcatggcaggtgtgaaacagtttgatttgttcaaagaatgatgaatcacttagtgttgtataatggatgggaggagagaaacacagcgatcacaaagggccatgtttgccaagaaataaaatatacttggaaaaaaaa

SEQ ID NO: 376835 - DNA, 496 bp, Homo Sapiens
  misc_feature (30)..(30): n is a, c, g, or t
  misc_feature (434)..(434): n is a, c, g, or t
  misc_feature (457)..(457): n is a, c, g, or t
  misc_feature (482)..(482): n is a, c, g, or t
ccttttagtattttccctagcctgtggtangccaggttgaaatagatatataacattgactttttctattacgtggaagctgttcagataattaacaaaggaaatcaatgacacacaactcagtttaagtgttgttttttctttagggtatgttgtgcagaagaaagagagctagcctaagagcattggacttttgggagctgtccagactcccccgccccccagaaccctgctgaagcccacctgcctagtccagtgaataaaaaaagtgcatgtctcacttcttttcagtgtccttcagagatgtgccattattactattttcttggacacattctgtggaatttactaggatcagggcaacaatattggaaacattaaatattcaaaatacaatctaaaataggatatgttactggctgggcaaatggggntttcatccattcaaaattttccnttttgaatttccctttcctttacantgggttgagttgga

SEQ ID NO: 376836 - DNA, 551 bp, Homo Sapiens
  misc_feature (48)..(48): n is a, c, g, or t
  misc_feature (64)..(64): n is a, c, g, or t
  misc_feature (83)..(83): n is a, c, g, or t
  misc_feature (93)..(93): n is a, c, g, or t
aacatattgggaaaagtaagacaggatgtaggactgtcgtaggactgncattttagtaggatgnacgatgtttgctgtgtgancgttctgtgntctaactgaaagcatgcttatatgtcttgtgtcttctgctgcacttgtagcattaggtgtgtttcagaggatatgcagtgctgcgtaatggactgtgtctttagagggcacagttcatgtgcattttatttgtggggaatctagagagatttgggagttggtgagcctgggaatgatgtgatgatcctttttcatggaggcataggaaggaatcattgtatataaatcaaatcaagacaaataggaagtttcctaccatttactaactagttactgggtgccaagctatgtgccaggcactttacatgtattgatttaacacttaacagccactctatattattccctttttacagatgaggcaatttaagctcaaagcatttaagtagacaaccaacctagaatcacatagcaaatgacagagccagagcttccaagtctctctactccaaccctat

SEQ ID NO: 376837 - DNA, 787 bp, Homo Sapiens
  misc_feature (23)..(23): n is a, c, g, or t
  misc_feature (625)..(625): n is a, c, g, or t
agtaaaagcccagcacggaaganggtgacctggagttccacaagtcacctgtgtaagggagagaagtaactactcacctacaccggcacaaagaaaaagtgcccggaattaagcggactggcacaatgtgagtttgttaattcatcctccccaacagaaagttaaatggctgtaaagaaattgtgcttgcatttcatttgatcagacctcatttccctgggacctcaaacaccaagttctcccaaaatatggctaaaatgctggcaatatttgcagataccagttgtggaaattaaacccaaataaagttatatacaaacttagtttacagaataactatcccattccgtttctttgaatagagcaaaacagaaataaatatccttcttaaatgtattacctaattatcatggaaagcctaggagacataggagaaaagtagatctctatagatgttgctcaaatacttggctttctagatcagagtatcctcaatgctactatgtcaattttcgagtggaaaatatgataggtgatacttttaaatgcaaaaatatatacttcaagcccaatcttcatataatgactctaacttccagccaagttgatttgttaagttgttggntccaaggagctttctggaggaacctgggtgtttctgaccctctaattccttttcaaacgcaagttaagtccttgcacttgacttagagaaatgcttctcctcgcatagtgtgtgcactcactggagaatcctctccctgccttggactgggaagacttgaag

SEQ ID NO: 376838 - DNA, 536 bp, Homo Sapiens
  misc_feature (322)..(322): n is a, c, g, or t
cttgaaagtccttggccttcatcctgaaggcagtgctgaggggcttgcgcagagagttgggctggttttgagtttactgtgtgccagtcctatgccaggctcttggcatgtcttacatcagagttacccacacggtaagtctgtgaaggaggtgtgatgctcatcttacagagaaggcaaccaaggcctagagaggttagagaacttgtctaaggtcacatggccagtaggtgacaacctggggcttgggaacccaagtctgactctgaagcttgggctctgaaggtgtgcaccacacttgccagactcatcagggcgtgtnggctgggtcagtgcaatgccagggacagcgaagacactagtctgcctgcaccagaaggctagcctcaggatatcaggaaatctttctggaaaggtaggtagcagtcagaatgggaatggcgctgaatgccagggctaagcaagatgggatttaccctgagatattgatgagcaattaaaggtttcagaacaaggaaaggacaaaatgacagtaa

SEQ ID NO: 376839 - DNA, 471 bp, Homo Sapiens
  misc_feature (16)..(16): n is a, c, g, or t
  misc_feature (26)..(26): n is a, c, g, or t
  misc_feature (46)..(46): n is a, c, g, or t
  misc_feature (62)..(62): n is a, c, g, or t
  misc_feature (71)..(71): n is a, c, g, or t
  misc_feature (85)..(85): n is a, c, g, or t
  misc_feature (114)..(114): n is a, c, g, or t
caaaaagccaagggcnccctgggccncccctaaaacttaatgaagnggcccccaaacttggnaaaaaaganctttggaaacatanaacaacttggttgggtgcgtccccaggcnaaccctcaacatttgggctttgattagcctttaatcaaaattattctgcctcaacagacttaattttggtcaacaatttaactgaggtactttatagataacagtgtccattataccacaggaaatacttcagtgtttaaataatgagaaaagcaaaagctgttcccaatgacagctgctccccaactcaccacaaggcgaagtcttaccctgttgaaaactgtaacaaacctccatcagacaaagctaccaggtgaccataatggatcaaaatgaaattctgtaaccatgtctccgataacctaaaagaaaacagactccaaactttaaaaatgaccagaaatctcctaatatgac

SEQ ID NO: 376840 - DNA, 413 bp, Homo Sapiens
  misc_feature (15)..(15): n is a, c, g, or t
  misc_feature (67)..(67): n is a, c, g, or t
taaaacagaatattnccccagccctaaaaaggaaacccctgacattgtccaccatgaaataaccccnggtggaccaccataaaataaggccagaccataggcaaatacctccatgatcccacttaattgtggaatattaaaaacttaaacccccgaggcagagggaggaacggtggttacctagagtcccagaaggtagggaaaatggagaaatgttggtcaaaggttaaaaaccaagttgtaaggtgaacacgttctggagatttaatgtacagcatgggtggtcatcaatgtgttaatttgactgtggtaaccattacagaatgtatatatatacatcaaaacataactgtacatcatgaacatatacaatctttgtgaagtattttaaaataaaaaaggaatgtttactg

SEQ ID NO: 376841 - DNA, 496 bp, Homo Sapiens
  misc_feature (15)..(15): n is a, c, g, or t
  misc_feature (23)..(23): n is a, c, g, or t
  misc_feature (56)..(56): n is a, c, g, or t
  misc_feature (87)..(87): n is a, c, g, or t
  misc_feature (108)..(108): n is a, c, g, or t
  misc_feature (142)..(142): n is a, c, g, or t
aaccaagccaaaccntctttccntgccaaagggaaataatgtcaagccaaccttgntaacttaaactgaaaacatgtcccttctggnagcttccaccctggcccaggnaggacggaagactttgaccctactcccacatggnagaggcaaacccatgtctggaaagtgactatgccctgagtccccagggtgcggcaggtaggaaacattcacagatgaagacagcagattccccacattctcatctttggcctgttcaatgaaaccattgtttgcccatctcttcttagtggaactttaggtctcttttcaagtctcctcagtcatcaatagttcctggggaaaaacagagctggtagacttgaagaggagcattgatgttgggtggcttttgttctttcactgagaaattcggaatacatttgtctcacccctgatattggttcctgatgcccccccaacaaaaataaataaataaattatggctgctttattt

SEQ ID NO: 376842 - DNA, 527 bp, Homo Sapiens
  misc_feature (381)..(381): n is a, c, g, or t
  misc_feature (428)..(428): n is a, c, g, or t
  misc_feature (468)..(468): n is a, c, g, or t
  misc_feature (478)..(478): n is a, c, g, or t
  misc_feature (492)..(492): n is a, c, g, or t
  misc_feature (501)..(501): n is a, c, g, or t
cttagctatagtcgagctgtctgggaaacaggatgaaaaacaggagggttattttcttgtgccctctttgtcagctgatcccctcttctgctaccagctatttggccagcaagccgtttttagtccccactttgcccatttttctgttttggttcatcgtttcttaaaagccatgttataaaacatggtagtttgaatcctgttgctaattttaaactttcctctaaaatgtactgaattttgacaaaaatttgaaaatatcctcaggctaactaggaataaaaaggattcataaaacaatgattttaaaactggaaatctctaggaaactccaacatccaagtcagccgcatttcttcattcagagtgtgtgtgtcacanctgccaaggggctgcggtactctggctaaccgaggctaggagtagtngaggcaaaggccatttttctctggattcacaaggattttnacattttttnggggttttggaccnggcaaagtngtctccgttaggggcttttgaggggg

SEQ ID NO: 376843 - DNA, 736 bp, Homo Sapiens
  misc_feature (15)..(15): n is a, c, g, or t
  misc_feature (41)..(41): n is a, c, g, or t
  misc_feature (52)..(52): n is a, c, g, or t
  misc_feature (71)..(71): n is a, c, g, or t
aggggaaaacccccntcaatcccccaaaattccctccccanataacatacangttaaggggcccagccccnaggggtgggccccactgccagcccttgtagaaaatgagagtccaaaaacatggcccaataatccatgttaattacaacgcagttggggtacccacttgagcttcactgcgataaaattcctcacagaaggcatcccactcccctctcaagacccttcagagcacgagaaaaagctttgctcatgttgtatgcttctctccatcctgagacctgttcctgagttataccataataagtgagttaacacagaaaagtacataggtggggaaatcacagagaccctgcagaaaagcccaaactatttgacagaagcttgaaacaaacactgctctgggaaatcatttgtattagctgatgactggattctgttttcctaacatggacatgcaacatattcaacactacgctcaccgcagtttgcttggaaaagccttctgtcatacaacaaaatacattctgtctcatgaatgattcctgcatattcaccacaacgcctagactcagaagcatgggaagtgtgcactggaactttctcccacttgcatggatttggacatatgcaaagcaccagaaactgcttcctttctggaactcagttctgttggtgtgcttactgctgagatgatctgctatcttaaactgagaacacacaatagcactgatcc

SEQ ID NO: 376844 - DNA, 735 bp, Homo Sapiens
ccattgtgataaattctcgattattcgcaaaatcatccttgtctgttatgtgtctactaagcaaaacccaaactgcagcacccccctgtggacactgcacctccagtttgtactgggggttgttggccaggctataggcatctttcacaggtccttgcttagcatcccaagtactgtgaatacatgttgattctttaaaaagacctggattccaactcaaataaatcacatcataatactggcagagatcatcccaggaaatccaaaatattccgttgtctattttctgagctgttcggggatcaaagtttaaatacttttgcaactctggagtccagttttttacatcattttcactgtatcttcctttccaacgtaaatgactccaaggatttttcaactggataaatcgcagccccttgaactctctaatatccaaaacagcatatgcgtgtgtgggaaccagaccccacttctctccttcagcttctgtcatcattccagttgacgcagtgatgaggacatctcctttgtgaaatctttgataaagcattctgaaagaattatccttactgaaagtttggctatctgaatgcatagcaattctttctggtatccagccagtcagtgcatgaagatcaatattggagttggatcctggaaaatcatatcctcccatgactttcatgtagctttttctatgagagaaacccataattcacttttgttgttgga

SEQ ID NO: 376845 - DNA, 280 bp, Homo Sapiens
  misc_feature (240)..(240): n is a, c, g, or t
ggttggtaaagatagtggtctgacttcctacaagtctgacttgtggatagtaggctggcttcctgtgctggttgctgctattgtgcgtcagagttctgtttttctacatggtctagccattgtctgtttgtatattcagcctctcccaggcaagggccactgtcagtcacttcacccctgatgtatatggaagccattttggtccttcactgtcaggtgtctctgctccaaagcagagtnggaagagcctaggcaacacaggggagaccctgtttctaca

SEQ ID NO: 376846 - DNA, 521 bp, Homo Sapiens
tcgcccatcctctttccactcataccctcgtctccccagagcagcttcttctcaaggggtgtgtctcaggccatcgagtcagcatcacctgtgtgcctagtaacaattactaggctggccccagacctagaaactagtgtatctgggggcgggcccgggccctgcactgacatcaatttatattgactaatttttgaaaatcacttgtatgaaagcattcgagtctagatagtagccttactgattagagtgataaaaatagctatgcatgtttgaaaatcaagataagcttaaaaatcaagatatgcttcaataagtccatttattttacaatttaatgtaaatctagaatatctaactatttatacaaacttaactttaaaaatagccacttgctattttacatacaaaacattcaaaagaaaattcttcatttagagtgactgaggcttcacattccagcccagagaatggcagcgaggagggtggcggcgggaagcagaggccttgggtggtccgtg

SEQ ID NO: 376847 - DNA, 393 bp, Homo Sapiens
  misc_feature (204)..(204): n is a, c, g, or t
  misc_feature (271)..(271): n is a, c, g, or t
  misc_feature (275)..(275): n is a, c, g, or t
  misc_feature (277)..(277): n is a, c, g, or t
  misc_feature (306)..(306): n is a, c, g, or t
  misc_feature (338)..(338): n is a, c, g, or t
  misc_feature (349)..(349): n is a, c, g, or t
  misc_feature (355)..(355): n is a, c, g, or t
gagtcttgcctctggcctgcccctcaccagaggggtgtctctctgtcagcaaggccagtacctggggacccaggtcccaccgatgggaccaagctcccagatctgggctttcaggcctccgtaggccaggtcagtgacacctcctggctgggttgaaagagcaggtgcattaacaccacacatggccaggaacacgtgcctctnacgcacagggctgctgcctgctcgtgctgccaggacagtagaaaccaccgcctatagggaccctttnacantnagacccttgaccacgtgtttgcggagctnttttgcttggggactggtgagggagatgactncttgcactctnctttgnccgcaggattgggatggagtttgatgggaggtgtcttt

SEQ ID NO: 376848 - DNA, 466 bp, Homo Sapiens
  misc_feature (19)..(19): n is a, c, g, or t
  misc_feature (350)..(350): n is a, c, g, or t
  misc_feature (386)..(386): n is a, c, g, or t
  misc_feature (395)..(395): n is a, c, g, or t
  misc_feature (409)..(409): n is a, c, g, or t
  misc_feature (430)..(430): n is a, c, g, or t
gtcataatacagccccccnatcgtgatctgatggtaagtacagaactccttgcccagtggagaaacactctcctctcatgtgtggaatatccacacactaaccatgaactgggccataagaaaccttacattccaaaggatcctgctgttcagaactcactcactcactgatgaaactggaaaaacaaccaatgataacaagctaaagaatgcctctagaagctaaaagacacacccatgactccacagtaattcatgggttaaagagaaaaaaggaaacgtgaagatacttgtaaccaaataatgatgggtgcagcgccacgtcagaatctctgtgctggcagcttgcngtgggtacctaggaggggcatttattagctgttaantacagtgcnttgttttgttttcnttgtttttttgaggacaggtnttgctctgttcacccggggttgggagtacagtgggg

SEQ ID NO: 376849 - DNA, 128 bp, Homo Sapiens
gccaatggcaatcaggttttaattaaatacaggcaaacacagtactaatgaatgcacactgcttcagggtttattttctactatttaaaattgtttgagttggaatcttccctaaaaactgtgtttaa

SEQ ID NO: 376850 - DNA, 284 bp, Homo Sapiens
gtccatgctaacgtacagttgctccgctctgctgctgattggtctgctggtataaagtaccatgaagagtccatccacgccgcttacgtccatgtgatagagaacagcaggcactatatctatatcgaaaaccagtttttcataagctgtgctgatgacaaagttgtgttcaacaagataggcgatgccattgcccagaggatcctgaaagctcacagggaaaaccagaaataccgggtatatgtcgtgataccacttctgccagggttcgaaggagacatttc

SEQ ID NO: 376851 - DNA, 357 bp, Homo Sapiens
  misc_feature (99)..(99): n is a, c, g, or t
gtcctgaaagaaaaaccctactgcccttcctgttgggacccaaagaggcccatagtgccccatggaggtttggactttaagagatattcattggcagcntcaaagacttccaccctggagaccacactgcacacagtgacttcctggggatgtcatagccaaagccaggcctgacgcattctcgtatccaacccaaggaccttttggaatgactggggagggctgcagtcacattgatgtaaggactgtaaacatcagcaagactttataattccttctgcctaacttgtaaaaagggggctgcattcttgttggtagcatgtactctgttgagtaaaacacatattcaaattccgt

SEQ ID NO: 376852 - DNA, 525 bp, Homo Sapiens
  misc_feature (405)..(405): n is a, c, g, or t
  misc_feature (439)..(439): n is a, c, g, or t
  misc_feature (445)..(445): n is a, c, g, or t
  misc_feature (485)..(485): n is a, c, g, or t
ggtattttgtggatgtttgcttctcctagtttccttctagaattaaccccagctgtgaagccagctttcttctcaggtcctcgttgtgtaactttaagtggcgtggacgcagagaatgaagcagatgtgagtaagaatgaagggctcaggcatcctcaatatccccttttgtgggagagagggagagagcagagtggttttgctttaccaaaatttggggctcctgtttctttcctcagacggctcccaaagacattccctttattttcctgggctgtcctccctccctgggagggcagcaaggaggagggcaatgcttcatgctgtaggaaaggacacatttgttcttccttgagcagtcccggggaaccttctgggagtgaatgcctttgagcatcctgagtnggcacatgcaactgttgggcacggccaagggggnagagtnggagacaggcatgaagcctttgaatggtaggattttaaanctgtctctgggggttttatgtatgaaataagtatgaacgc

SEQ ID NO: 376853 - DNA, 579 bp, Homo Sapiens
  misc_feature (11)..(11): n is a, c, g, or t
  misc_feature (44)..(44): n is a, c, g, or t
  misc_feature (323)..(348): n is a, c, g, or t
gaactaagggntgatctaaaccaccaatccaaattgtcctaccngtagaaaacagtgaacaacttaaaagatctgcaaaagatcaagagcagagctggctgaaaggtgccagcattcctaaaacatgtccctccatggaaccttccagaaaaggttaataagatgaccccactcattctggttggctgtggcccatagacagacaccataaaccctgggatgtggtcaagtactgaactgggggcaggtctgagcttgccttatgatcctccgactagccctggaacagatagtgaagaactacacagaatcccacagctagnnnnnnnnnnnnnnnnnnnnnnnnnnacctttgagaaccatccatgagattaatacaatattaatcaaatctgacacagctgagtgctggctcacagctaactatctggatatggggttttgttggctcttagctgactgcattatttaatcaaatattaagaaaggtataattcacatgcaacccttggcaaaaagaaaagaaggttaatttcttataaccagcacaaactgttaacctgttaagaaaagcccaac

SEQ ID NO: 376854 - DNA, 468 bp, Homo Sapiens
  misc_feature (117)..(117): n is a, c, g, or t
  misc_feature (258)..(285): n is a, c, g, or t
ataaaaatagatgctttttttaaacccacatcaaagaggctcttatctctttggcaaggtactgctttacgaaaagttctccagtattcttacaataagcgtttataatgtagcccnccccttccccaacccaaatcataattacaaaataaatactgttttaaacttcataaataaaaatgtaaacttcaaaatacttttcttaaacagacataacagcaatgctttaaatgtaaaccaaacacaaagctaatcagnnnnnnnnnnnnnnnnnnnnnnnnnnnnacacaaccaactgaagaattacaacacaaagcctcaatatttactcacaggttcaaggcagttatgtaaaaagaaaagaaatgtcttcccttagctgaaacactttaaaaggtccacttcttcaaagaaggcaatagaatgcaatgtgacaggtaaaaaccctgtacctgcccgggcggccgc

SEQ ID NO: 376855 - DNA, 470 bp, Homo Sapiens
  misc_feature (123)..(176): n is a, c, g, or t
gccacagcaacaaacccccaggtgcaacccgcggcgcccaaaaaactggtcctccagcgcctgtcctgcggaatttaacgcatttgtccctcaagccctctgtggaagtggcccactactgtnnnnnnnnnnnnnnnnnnnnnnnnnnnnnnnnnnnnnnnnnnnnnnnnnnnnnnacctcccagccgggcctggccatggggttttgggaatcaggctctcacacactgcctggcatggcctttctgaaaatcactatttatcagaagccttggaattcatcctaagaaataaagatagggaaaacaaggttgcttatcacagtgctggtggtaggagatgaagttaataaattatagaacacctgtgcaaaatctgttcagggctgaagactctgctgccaatcatgcctatggaaaaaccctgtgtgcactatatcattaaatgaagataccaagttcctgaataaa

SEQ ID NO: 376856 - DNA, 515 bp, Homo Sapiens
ttccctttaaaaattttttaaaaaagggattttggttactacatgggatacccttacaaattaagaagaaagtcaaacatcccaaacagaaaaatgggcaaaggaaaagaaaaatcaattcactaaagaaatacaaccaactatcaaacgtggaaaagtacataacccatctctgataaaaatacatgtatataacagtaacaaacaatcatttcctctttatcaaagtggcgaacatttcaaagccttatcacttctgatattgccaacagtgtggaaaactttaaatggtgcaagtataaagcttgagatagggcaatttggcagtatccatgaaaactaagcagggtgcttagtgttactaaatgatacattacttgaggatacaggagtagtatatatcatagtgacctaaagcataggctctgggattagatggccatttcctagctttgagacactgacaaatttcttaaatttatggccttagttttttcatttataaaatagagatt

SEQ ID NO: 376857 - DNA, 518 bp, Homo Sapiens
  misc_feature (340)..(392): n is a, c, g, or t
gagctgcccactcatggttacaaactaaggcatcaaacacaagggaggccccgcccccccaggaccacacctccaggacctggtcgacccagtatgccagcacctgggactcgtcaggagaatgggatggccacccgcctggatgaagggctggaggacttcttcagccgaagggtcatggaggaaagttctagctacccccggactctgaggaccgtgcggccaggactctcggaggcaccgctgcctccacctccagaagaagaggcgccggggcctgtttcactttcgccggccccggagcttcaagggggacagggggccgggtccctaccactgnnnnnnnnnnnnnnnnnnnnnnnnnnnnnnnnnnnnnnnnnnnnnnnnnnnnnagcccagaccccccaagcctcggcaataactcctctccctgctggagcccagaggaggagagcagcctcctccctggatttggtgggggccggggaccttccttccgccggaagatgggcccaggc

SEQ ID NO: 376858 - DNA, 500 bp, Homo Sapiens
  misc_feature (289)..(353): n is a, c, g, or t
  misc_feature (475)..(475): n is a, c, g, or t
  misc_feature (489)..(489): n is a, c, g, or t
acacgatgaagctcctgaggctgggccttgcaactcttgatagttacaacccttagttttaaaactttgcagcttctactttcactctcttgaaatgctgcccccagactgccgtgtaaggaaggtggtctaggccacctggggaaagaactgagcatcaccagaatgaggtcacgtgagggtacctcagaccttcccacccagccaaatctgcatctgagtgcagccttatgactcaactaaggtgaaatcagaagaggaaattggcacagctatcccatcttctcannnnnnnnnnnnnnnnnnnnnnnnnnnnnnnnnnnnnnnnnnnnnnnnnnnnnnnnnnnnnnnnnaacaagtatagattagtgaaacaagtatgtactcttattttggtcaggcttctgttgctgcaacacgtttgtaaaggattgttccagattggctgcatgtagttgaatgaccctttcgctcncattgctgtatccnattgccattgt

SEQ ID NO: 376859 - DNA, 405 bp, Homo Sapiens
ggccctccgggtgaaacatccccaaaaaaacccggggtttaattaccataaaatagccagaggacttgctgggcccgtaacataggggaattcaacatgaatcagttttaagtatatactgtcaattttcccaaagaggttgtaccaatttacttcccagcagctgtgcagaagcattagtagagtttcagttgttcccacgcccttgtcaacgctttgtgcccttgacctttacaacactccattttaaagatgagtgtgtagatgttgaaaagtgcacaaggggaatgtttgctccatgagccaatcacggaaggaagctgggccagctggttttggcatctaccttctccctgacagctccagggaagaggccagactttaacaataaaaacttctatgtgt

SEQ ID NO: 376860 - DNA, 389 bp, Homo Sapiens
  misc_feature (354)..(354): n is a, c, g, or t
caattacattagtcagtaaaatttccctgtaactataacgcttgggtccctgctaaaagggagttttgagaacactacctagatctaaggctgaagggcatcctctgacctcccattctaaattagaatttgaaagccacagaggagtgtgtacctcctttgaagagcacacaccgtcccatgaaaaccactctcagggtcttgcccagaagtgcctccagcacagggtttgggaagcagatagtcgaagcatagcagccccagatgtgaaagcaaggaaaaagtgctagctgtgcctgagtgcagcagctgaaagaaaggtaaaataggacttgatttttgtgactgtgggancattagcttttgccactcatgacacgtggattcag

SEQ ID NO: 376861 - DNA, 431 bp, Homo Sapiens
  misc_feature (195)..(195): n is a, c, g, or t
  misc_feature (301)..(301): n is a, c, g, or t
  misc_feature (307)..(307): n is a, c, g, or t
  misc_feature (406)..(406): n is a, c, g, or t
catataaatcaaataatttaatcaatatccacccactctaatttacatccagcttgaaaaacactgtatttagaaaaaggattagagtgagcaatttcattatccttatctgcatggaccaagtctttgggaatgctttttctactagataataatacacgctcttgaggagagaaaatcctacactgctttgcnggtcaacattttgattgtagaaaacaaaatctagcaaacaatcatctgttacatagtacttcacaaaggaaataatgctaagacttataaatggaagcctagccangttacnggttaaaaaacaaatgtggcctggagcagacccatcagtccatgttttatgaacagactgaatgtggtccgtagcatccaccattggtttattaccaangtaaggggttaaaagttgggccttc

SEQ ID NO: 376862 - DNA, 399 bp, Homo Sapiens
  misc_feature (121)..(266): n is a, c, g, or t
caactctgatctaagcacaagagagacatcagtgaatgccatcatcaaaaagtctccctgtcctcatcttattaggtaaaaccatatgaaattgctgtttttctagttaaaccaattgaannnnnnnnnnnnnnnnnnnnnnnnnnnnnnnnnnnnnnnnnnnnnnnnnnnnnnnnnnnnnnnnnnnnnnnnnnnnnnnnnnnnnnnnnnnnnnnnnnnnnnnnnnnnnnnnnnnnnnnnnnnnnnnnnnnnnnnnnnnnnnnnnnaaaaacagtgatatgtccataggaatgggaatacttacacaacaataaaagggagtgaggatactggatatggtactacaacatggggtgggactttcaggaaacactttttctacggtggaaacaggttcgg

SEQ ID NO: 376863 - DNA, 564 bp, Homo Sapiens
  misc_feature (452)..(452): n is a, c, g, or t
  misc_feature (500)..(500): n is a, c, g, or t
  misc_feature (518)..(518): n is a, c, g, or t
  misc_feature (541)..(541): n is a, c, g, or t
cttgatagtatataagaggcctgtgcaataactctagtaatatgtaactaaaagcactgaactattttaacaactagattgattattacaatttatatacattttacagagattaaaattttcaggatctgtctattctaaagttttcaaataaaaagataaatttcctaagagattatatttagaagcaatgataatatatgaaaaaagcccaggcttatttcatattgtttagatgattttctgtctaattgttttgtgttttttgtcttccttattatagtaattcagactaatgacccacatttaaaatatgcaatagtggctgactgagtagctattgtgtattataactaagaaaaaatactgatcagtagtttcctgttcagcaaaatcggaaggaataagggagggtctttaaagttgtactttttcgtttgtttgtccttgcntgcatcttcctttgcatgtgcaatatacaaataagcctttaggtgaanatgtatttatccctgccntttgcaacggacttaccctaaangtcatgcatgcaaaacactatgt

SEQ ID NO: 376864 - DNA, 527 bp, Homo Sapiens
  misc_feature (357)..(357): n is a, c, g, or t
  misc_feature (361)..(369): n is a, c, g, or t
  misc_feature (391)..(391): n is a, c, g, or t
  misc_feature (420)..(420): n is a, c, g, or t
  misc_feature (471)..(471): n is a, c, g, or t
ggtttatagtacaaaatcatcagttgcctgtcctaccctctcttctgccactttctagcccctagggacaacacttaactcttccggccttttcttctggtgttttacctccctattttttgtaatacggtaatactgctatttataatttttcactttttgatgttatttattccttctaaggaagatagtgatttacttctcttatgccatacactctttccttctatgcatttttccagtgtatttatatcacaattataactttcttaaattatcttccaatatttacactattattactgtacagtgttcacagctaagccattagtatactataattgcatcctttctttnttgnnnnnnnnngagatgggagtctcactctgtngcctagggtgggagtgcagtgggcgtganctcgggctcactgcaacctctgcctcccgggggtcaaggcagttctccggntctcagcctcccgaggtcgtgggaactacagggcacacaccaccacactggggcaa

SEQ ID NO: 376865 - DNA, 515 bp, Homo Sapiens
tggagacagcatctcgctctgtcacccaaactggagtgcttggggccatcaatgctcactcagcctcggcctcccgggctcaagccatcctacactagaaaggtctgagtcattacagagtggccaccagtgtcatctgaggcacgggtaggtggctcattcagggccacaccagcggctccttttagtacatgtgaagagtgtaaagcaaaggagaataaggtgtgtaaaaggttgtgccaatggtgactgtcagccacacttcctgccctcttgcttgtcctttcaagtacagagctgtggctcacccagagatgacatttcccattcccccatgcccaggtggggccacgtgaagtagttcttccagatggacgtggctcatgtctcttctgggtgttctccaggcccggggggtggcagataaagggcagagggagacagttcccgagccccacaggctggcatgttgcctgcaagccaggacacctgaactgtcctatgagaccgaagct

SEQ ID NO: 376866 - DNA, 432 bp, Homo Sapiens
  misc_feature (122)..(122): n is a, c, g, or t
  misc_feature (167)..(167): n is a, c, g, or t
  misc_feature (416)..(416): n is a, c, g, or t
aagaaagaataatggcctttaaggatgagaggtcccttttgagtaaagaaacattctgtgaaacacagcaggcagtcccacaagggttggggtttgaatgaaagggggtggctgaggatccnccccaggcacctgtgttttgggattagcccgtacctggaagcccnggtggaagctgcttttctatttatgagtcaaattcctctttcactcctgaatgtaattataattgccaagccagctgtatcttaatttagggtcttgaatcggtaacgtttcctaaggctttaattttaattttctttattccttggcctttcaaatatctaataatatctaaataaattattgaaagtagaagagttctctatacattgtaaaaggaaaaattacttggaaatatacacagttacctnccaattgatgctttgt

SEQ ID NO: 376867 - DNA, 494 bp, Homo Sapiens
  misc_feature (441)..(441): n is a, c, g, or t
  misc_feature (466)..(466): n is a, c, g, or t
  misc_feature (474)..(474): n is a, c, g, or t
ggattgtgctgaaagacaggttcatgggagtgaggatagttgctgcaataatggcaattaccggcattgtcatgatggcatatgcagataatttccacgctgattccatcataggagtggcatttgcggtgggctcagcctctacatctgcattatataaggtcttgtttaaaatgtttcttggaagtgccaactttggggaagctgcacactttgtctccaccttgggtttcttcaatttgatcttcatctccttcaccccagtcatcttgtatttcaccaaggtgggagcactggtcctcttttgctgctctgccatgggggctgtctctgtggggatgggcaggggctgtgggctgggccttcaacatcctgggggaaatgttgggggtgggtgctggacataacccaattcctaaatctccaattggggacagtggntcagcgtttccggggaaatgcagcngtgggatntcccaaaaggcaggaagtga

SEQ ID NO: 376868 - DNA, 507 bp, Homo Sapiens
tccattgggacagtgctcagcgttcctggaaatgcagctgtggatctcctaaagcaggaggtgaaattccaaggttgtcccccgggctgctaccatccatcaacctgcattgggtttcctgctgatgctgttgccctgaggaatgggatgaaatcaccctgaggttcatcaacagccctgaaggaaaagaagagtgaggagcatgtggatgatgtgactgatcccagcataacacctgcggggcagaggcagagccaatgggacagtgtctataccactggcttagagagggacatattttgaatgcacgtgtatgtatattctgtgaatataacaaaattttctcactacctgtacactcaaacgacagtattaactctgaatttggataaatcatatgtgaaataatgccaacaataaaagtttacatttatatgcttatcaaggaattggtgtaaataatcataatggatttttttattaaaacacatttgtccttaaaaaaaa

SEQ ID NO: 376869 - DNA, 529 bp, Homo Sapiens
  misc_feature (22)..(22): n is a, c, g, or t
  misc_feature (34)..(34): n is a, c, g, or t
  misc_feature (39)..(39): n is a, c, g, or t
  misc_feature (44)..(44): n is a, c, g, or t
  misc_feature (56)..(56): n is a, c, g, or t
  misc_feature (66)..(66): n is a, c, g, or t
  misc_feature (81)..(81): n is a, c, g, or t
  misc_feature (90)..(90): n is a, c, g, or t
  misc_feature (97)..(97): n is a, c, g, or t
  misc_feature (102)..(102): n is a, c, g, or t
ggaacctggggaaagttgtcancctcctacctgnggcanctggncctgaagtgggnaagggatggnaaacttgaaatcaangttaagaantgggaanggaangggagtaaagggaaccccagggtatgaaagcccaatagtttagttatccccaacaaatatggattgatttccatcctttatgaatttgattatcctaatttaatacattcaatccaatgaagtaaaaaaaagtgccaaggacaatatgacatctgtcattcctctgttgagatttgagaggtaataatacccaagaacgtgtggtgaccctgggtcctcactgcctactgtcttccctgtaccctggacacttctagcaagagacttcaacttcagaacaaagaggatcccaacttgtagctgcattatacacaccccagcagcacacataagttgatttctaattattcctctttaagaaattgtttgtggaatatttatctatttataaatggaaaaatagaaaattaaaataacaaaaataagt

SEQ ID NO: 376870 - DNA, 514 bp, Homo Sapiens
agggatatctgtgataaaaaagaggtatgttaaaccaatcttgggcaatattttgctataaatatttaaactgttatggaatcaaatcctttactaaaataaagagaaagaaaaatgtaatcctcaaaaatggccatctaagctgcttgctaaactttaatatttctagataggtggtagactcccaggtcttaattggcatgcctgttgttaaattctgggatctcatatacctaatgtcttggccgactttccatgcaatgaaaactcatttccttgtggcattgaattgatggatgaattaatgaatgaaaagaaaatttaaaaaatctcttgtagcaagcaattctggcactatagccaagtataattttcactgcaagaataattgcaccatttattttcaccttggtctttactctatttacattgctataaaaatgtttcatattttcttaggttagccctcaccatcatctttgtgaaaaaggaattaaaaataattttaacacct

SEQ ID NO: 376871 - DNA, 144 bp, Homo Sapiens
ctataaagagattcccaaaccatgtcccagaatctgtacatcacctccacctcctcagaccctcctccaaagagtcgcctgtctctgactcctacctgtccagggttctagccacctgatggtaagatcttggctttccgattc

SEQ ID NO: 376872 - DNA, 672 bp, Homo Sapiens
ccaggtgggagtgctgctgcctggaacggtggacagaggagagcaatagaagaggtgcagtctgggaggctggctgagatccccacctgctcagctgggcttattcccagccacaaccctgagatctgtgctggggacctcattggagggctggaaactgcatatcaaaagaacaatatctgacagtgaggtggaaaccagtgcaaaaacgacactggcttggaaactccccacaaagggctttcacgcagactgacctgtggaatgtcaaagagtacagcctgggctccacacatccttaggaacaagggctgatgcgggtacctacaacagctactgaccgaaacgcagtagataataaatggtacctagaatgctccccagcctcacgatctggaagcctagtttttgcacatgtcctattcttggaaggtaaaacagcatgtgtgtaggtggtggggagggggttctatttccccgtattcatatactcacaatgtgaagaactatgggccgggtgtagaaacagatgtgtgctcaggcacctgctgcactaaggattataagccgggtgtagaaacagatgtgtgctcaggcacctgcggcactcagcattatgggcggggtgtagaaacagatgtgtgctcagacgcctcccgcactcaggattat

SEQ ID NO: 376873 - DNA, 418 bp, Homo Sapiens
atcactatcctactcctctgctacaacttctctgctacaggcacccactgcagttacttgatatgagttaaatgaatccatccatccaaacttccattcattgaataaatacttagcaatggcttcctttgtatcaggcactattctaggagctggggctacagtgcagatggaaaccagcaaagctcactgccctcatggagcttatatgtgagtgaataaatctcagggtggttctcctgtcataggtcctgggctcctctgccagctcttccaaatgggttcagagaggttttctccttgtcctgttgtgtaactgataatcccatgggtgggacctcactttgctatttcatatggcacttaaggtagtttatgggtgtgctttgtgggctgggcaattgtggacaggatttct

SEQ ID NO: 376874 - DNA, 392 bp, Homo Sapiens
  misc_feature (354)..(354): n is a, c, g, or t
cacttcaagatagtggggatgtatattttaaaaaatttcacgctcatgggccaaagattttcccggggctgtgtgctgatttgcagcctatcatgtgtggctttgggacactggggaaggtgtggagcagtttaagtgacaaacgggttggaaaagcaaaggacaccaggtgaggatgatggaatttacatcctgttgcttccctgatagttcctgccaatatgggatcccactactatctttctgccctagaaaatatgtgtatattgagatagaaactgttgtaatggctgcatgcattgcagtagaggaaaggagagaagaaagaaggaacagatttagtcctgcccagantcttgcacttccacggagggacgccagggttttcacgg

SEQ ID NO: 376875 - DNA, 542 bp, Homo Sapiens
  misc_feature (289)..(444): n is a, c, g, or t
cacacaactgtgaaccgaataaatagctcctatttggtctatgacttctgccactttgtttgtgttggcttggtgaggacagcaggaggggcccacacctcaagcctggaccagccacctcaaggccttggggagcttaggggacctggtgggagagaggggacttccagggtccttgggccagttctgggatttggccctgggaagcagcccagcgtaccccaggcctgctctgggaagtcggctccatgctcaccagcagccgcccaggcccgcagcctcacccggnnnnnnnnnnnnnnnnnnnnnnnnnnnnnnnnnnnnnnnnnnnnnnnnnnnnnnnnnnnnnnnnnnnnnnnnnnnnnnnnnnnnnnnnnnnnnnnnnnnnnnnnnnnnnnnnnnnnnnnnnnnnnnnnnnnnnnnnnnnnnnnnnnnnnnnnnnnnaccaagggcccaaccgtgtgcatacatcgtctgcgtctgtggtctgtgtcgctgtccccagtcccaccgcagtcctgccgcaggcctaaccctcctgc

SEQ ID NO: 376876 - DNA, 403 bp, Homo Sapiens
  misc_feature (25)..(25): n is a, c, g, or t
  misc_feature (119)..(119): n is a, c, g, or t
  misc_feature (196)..(196): n is a, c, g, or t
gccccttgcccctaaacccccttanttccattgccagtaatagttttacgttgtaccataatagtgtaaacccttttaaaaaaggaaagtataaaaacaaaagttgtaatttaaaagtnctgaataacccatctgcctgccttaggaaactcaatgaaatgacatgcctttttagcaggaagtcaaagttggtttnctgttttttgttttcctttgttgttttagtttataaaacatgtgcattttacagttccagtatcaaatatttataatcttatgagaaatgaatgaatgtttctatttacaactgtgcttatcaaaattgtgaacacccccacccccgcatttttgtgtgttgaaattcttgaaggttacattaaataaaacaaaatctttttattat

SEQ ID NO: 376877 - DNA, 525 bp, Homo Sapiens
  misc_feature (259)..(276): n is a, c, g, or t
  misc_feature (297)..(354): n is a, c, g, or t
  misc_feature (438)..(438): n is a, c, g, or t
  misc_feature (456)..(456): n is a, c, g, or t
  misc_feature (471)..(471): n is a, c, g, or t
  misc_feature (489)..(489): n is a, c, g, or t
  misc_feature (496)..(496): n is a, c, g, or t
gcttcctagtattggctgctatgatttgccgggcactcgctctgaaccaggtcatgggctggacccatcatgtgcatcccctcatttgatctacccagcagcctcaccaactgggggttgctgttgtcaccccacctcatagatgaagaaactgaggctcggagacattaagtgacttgcccaagatcaaacagcttaagagacccagagctgcggcctgaactcatgcccagctagcatcaaacactgtgttcttgcnnnnnnnnnnnnnnnnnngagacagagtctcactctttnnnnnnnnnnnnnnnnnnnnnnnnnnnnnnnnnnnnnnnnnnnnnnnnnnnnnnnnnnggttcaaggggattctcctgctttcagccttcctgagtaggctggggacttacagggcacccacccccatggcccagcttaatnaaaacactgtgtttcttnaaccactaagagggntcaggggtaccccggggnggccttnccagttaggaggcatggtttccctttttg

SEQ ID NO: 376878 - DNA, 421 bp, Homo Sapiens
  misc_feature (11)..(11): n is a, c, g, or t
  misc_feature (108)..(108): n is a, c, g, or t
  misc_feature (376)..(376): n is a, c, g, or t
  misc_feature (388)..(388): n is a, c, g, or t
tagcatctgtnacgattacagttattaagcaaatgcggtgcaagctagctgtggtgtacccagggttaaacttgatatcatggtggacaggctgtgcactgcaaaatntccataggcactgttgctggggtttagcacgtggtcgtggaggagacgtggacaacctccctgcacttgagtcgctggcagtcacatcacagagataagatggagttaagcttcagtacatgtatggttacatgagcgtcggactgatggggccaggcaggagcaatggagcatagagcccggacagatgaggtctccaccctgggccactcacatactttgtgacaggcctcaagtgagagttgtcacagtcagagcacagattctngggaggttaggnaggctttcgcagaggaggcatcttacctttcac

SEQ ID NO: 376879 - DNA, 414 bp, Homo Sapiens
  misc_feature (37)..(38): n is a, c, g, or t
  misc_feature (42)..(42): n is a, c, g, or t
  misc_feature (174)..(174): n is a, c, g, or t
gtgcggcccaggggctgtgtgctggagtgggtacgcnncatngtggccaaccgcctggcctcggatggggccacctgggcagacatcttcaagaggttcaacagcggcacgtataacaaccagtggatgatcgtggactacaaggcgttcatcccgggtgggcccagccccggnagccgggtgcttaccatcctggagcagatccccggcatggtggtggtggctgacaaggacctcggagctctaccagaagacctactgggccagctacaacataccgtccttcgagactgtgttcaatgccagtgggctgcaggccctagtggcccagtatggggactggattttcttatgacgggagcccccgggacccagaatcttccgggcggaacccagctcacctggctaccaaga

SEQ ID NO: 376880 - DNA, 437 bp, Homo Sapiens
  misc_feature (346)..(346): n is a, c, g, or t
cttaatgatgggaaagcataggggtagcttaagaaaaaataagctattaatatatatataggagaacagacaaaaataaagttggtgaggtaggttaaggctgaatgtcaaactgaagaatcagtacttattcaggtaaggaagattttcaatccaaggagtgacaagaaaatcaagctgaccactgtgagtcaaatggatttggatagggaaggagtaaataccaaaattctatcacagtagttcagatagaaagatatagaaacctaaactagggaagcagtgaaagtagagaacatgttcctacctacaggatgggacttgctttttgtatgatctaaagggngaaaacatgggctaatcctttaagggtcccaggctgggtagtttgaggaaattgtggttgccctttatttttaattgccggaggttggggg

SEQ ID NO: 376881 - DNA, 508 bp, Homo Sapiens
  misc_feature (414)..(414): n is a, c, g, or t
  misc_feature (419)..(419): n is a, c, g, or t
  misc_feature (493)..(493): n is a, c, g, or t
tagaatctaatgtctaccccaaaaaagtagttctttgatattttatactttttatgtaccatgtcagaaagagtatgttggcgtttgtcatgggactcatttcacataatagaatgcctagtctcattgaccaatcgttaaaaaatcatatttgtgtgtcttaagattcatatttatatgttctctcaaatgtatgtctcttacgtaacatactctaagaatgaaactgtcaccacaggtaaatccttgttagcaaggaatctgtctgctccagtctactcctagtttgatccttgggatgtaaggaaccaagtcattacatgtcaaattcaatttttctgccttaaggaatgaatgtccttcataaaaatattgggatgcagtgttaacacttatccaagggcagtggacttncaggntttattattacatattaaaatataggtttggtttttaaaaattatttggacatttatttttaaaccttttgggntgggattgtttggcc

SEQ ID NO: 376882 - DNA, 448 bp, Homo Sapiens
  misc_feature (24)..(24): n is a, c, g, or t
  misc_feature (51)..(51): n is a, c, g, or t
  misc_feature (71)..(71): n is a, c, g, or t
ggaaaacatgccttgggttatccnaaattgtgaaggcccatagtacaaaangttaagagaaacggaactcnggatctgagaaagaatcagcccattcctcagcatgttgccttggctgccttaaccttacctaaacttcccatttccctcacatgtaaaatgtacatcataataactagtctactgagataagggaagaatacttagcacagtgctagtacactgtaagtactcaaatgttacagatccaagtattttgtaagaaaataccagcaaaagataaaagtttttttatggatcgtatttgtatcaatcacctaccatgatctagagccctcacatggatgacatttaaatgttcagtttgcctaatagccttcaatgaaacacggattcttctacttaaaaaaggtaagcctggagaaaataaaactgattactatgcaag

SEQ ID NO: 376883 - DNA, 472 bp, Homo Sapiens
  misc_feature (305)..(305): n is a, c, g, or t
  misc_feature (414)..(414): n is a, c, g, or t
  misc_feature (456)..(456): n is a, c, g, or t
gatgacaggcctgtggagggacctcaagaacgcctatgcccgtgaatgagttcaccaacacctgtgcagctgacagtgagatcgagttggcctacgctgatgtcgccaaacgcctcagccgatcctgagcacagccattttgccccatccccgctgcagaaggactcaaccactcccctaagactccagcttcatagactcctctgtatcactgccttgaggcgcactttttataatcaagcctcatcttgctggtatcatgggaactccagcctgctatctttcatgaaggtcagcaccatccngggcctcctcacatagggaatctaggcaggaaatgataggacacagtccacctttcggccggccagcctgatctggggctcagcatgttttgggggtcagtcagtgttnggagagcccacatatgggggtttgccattaggttttttttgnccattatcaaaaataa

SEQ ID NO: 376884 - DNA, 481 bp, Homo Sapiens
  misc_feature (27)..(27): n is a, c, g, or t
tacaggcctgggtttgactgtgcttancaatgagtggtttttgagctatgagaaagtggatgggagtgggaggaggagagatgggtgaagacaaaagagttctttatgagcctcgatgttccctggtaaacttttaaaaaggccttctctcatgatctaagtcttggactggtggcatcatgtaactgctaaccttacagtaaaaacccaagaatgggtcaaaaatgtcttcccagtttctccaagctgcttctggaatgcaggtctgtcggctgggtgctctccagcagctgctcctgcctgattcaactgtagcctgtaatgggtaaaagccacatttaggaggtggtctgatcatagaacagcttaggaagaaagtccatgagactttctgactaggaaaccatgtggtttgaacttgaagaaaaatgtagacccatctgggttaattttcctacaatctgactcaactgtccaggtg

SEQ ID NO: 376885 - DNA, 350 bp, Homo Sapiens
ttccttgaagacagaagtagatgcctcaggtattaacagatgtgctcccaagacttctctttagaaaatctcttgtcattggaaagcatgtccgttttaggcttaaaggcagttaagtctcatgttcattcctccaaaagggatgagaaattgaaaaaggtgtgagcaactctggtaaagtgtccatgaggaatatgttgttatagaacccacaataatgtaacacaactgaatctgcaacatagttaatgctttccacaagcaaagattaactctaccactactttggccaagaatctaaaccagggatgaaaatcaggagttctcaatcccaactcacctgttttctc

SEQ ID NO: 376886 - DNA, 433 bp, Homo Sapiens
  misc_feature (19)..(19): n is a, c, g, or t
  misc_feature (58)..(58): n is a, c, g, or t
  misc_feature (153)..(153): n is a, c, g, or t
  misc_feature (168)..(168): n is a, c, g, or t
  misc_feature (188)..(188): n is a, c, g, or t
cgaaccttgaagggaaccntagctgtagccccaggccttccaaagattaggagaaacnttaccggttccatggaaaatagtcctcctgccaggtagattggaaacaaagaaattgccattggtggtgttaaaatcctaacatttataacaaanccctgttttaatccnagatgaaatacttagacaantccttccagtggaaaccagtgaacttttttaacagctttgggaaatcttttgtatgataatttttaaaatgaaatgtgtactcttcaaactaattaaagcttgaagtttcccaggagtcgcattttaaaagtgtttgtacacattttaacacttggatattttctattttggttttgtatatttttatgtatacacaatgtacagacttttttcttgtaaataaaacatgttttcatttgtctag

SEQ ID NO: 376887 - DNA, 306 bp, Homo Sapiens
agaacataatataggcaatatccatgtatgcttacctagtcctacatgctacaacgagtaacatcttttcaggaaccaacatgacctgctccctagtaccctcttggatgaccatttacagttaggtatcctctcctggattctccattaatcccttatgcatatctcctatagagtgtaatgcttacactgtatcacaagtgtgtgtttgtatttctatcatttgtactagacaaggaagccctctggagggcaagaagaaatcttgttagacttattaaatctagtacctagcacagtgcttgg

SEQ ID NO: 376888 - DNA, 144 bp, Homo Sapiens
caaagtgaaaaggaaaggacattattcagtgacttctttccaagccacaattatatgtcgtctaaaacatgaactgagcaaagctttgagaagagctgattctcaaactactatagaaattagcagaccaacctgtgaatgcag

SEQ ID NO: 376889 - DNA, 431 bp, Homo Sapiens
ctcgttctctagcacgatccccattattggttggacgagcacaacaaatcagtcaggtgcaggtcacctctggccctgcgtactaagagatctggtgggagtaaaaatcagaggagagaagtcagagaaacaaggtggggagaactcaggcagcacatgggtggaaaaacacgaaaccagacagggcaggggagacagcagaaaggagagaagaaatgataataatgaccataatgcatgacaggccaggtcatacaatgaaagaaggaaatattggagaaggagagagatcaacatgagaacaaggaatcgttgattgaagaagacatcagaagagagaaggagagaagtgaggcagaggggagacaccctcagagaaggaaaaggagaattcaggagaccggaggtaagatcgtccaacccatattggt

SEQ ID NO: 376890 - DNA, 628 bp, Homo Sapiens
  misc_feature (443)..(574): n is a, c, g, or t
gtagtctttaataaacagctgttatcattgcagacttgctatttaggcacttaggaatttttcactagaaggcatgtaaagaaagaccatgggcatttgtaatgaatttagcattcattctttgactacatgactgtccccagagctgtaactttattaatgaattttttagaagccatttagctagcaactgagcctaaccagccactcactgtcattattcagtgctcttttattattgtctatttctcctccaacttggctacactcataaagtgataaaaacttgcacttgttttctttccttgtcagagacagcgtcttgctctgtagctcaggctacagtacagtgacatgatcatggttcactgtagcctcaaactcctgggctcaagcggttctcttacttcagtctcaagtagctggaattacagggttcccannnnnnnnnnnnnnnnnnnnnnnnnnnnnnnnnnnnnnnnnnnnnnnnnnnnnnnnnnnnnnnnnnnnnnnnnnnnnnnnnnnnnnnnnnnnnnnnnnnnnnnnnnnnnnnnnnnnnnnnnnnnnnnnnnnnatgagccagcgcatctggccaccttattttctgttactggctaggggtaccgag

SEQ ID NO: 376891 - DNA, 360 bp, Homo Sapiens
cgagaaccagaacgagcagagagaacgagacaaaaggagagacttggatagggaaagagagagactaatttctgattctgttgaaagggacagggacagagacagagacagaacttttgagagttctcaaatagagtctgtgaaacgctgtgaagcaaaactggaaggtgaacatgaaagggatctagaaagcacttcccgagactctctagccttggataaagagagaatggataaagatctgggatctgtgcagggatttgaagatacaaataaatccgagagaactgagagtctggaagcaggagatgacgagtccaagttagatgatgcacattcattaggctctggtgctggaga

SEQ ID NO: 376892 - DNA, 215 bp, Homo Sapiens
tgggatcaattaaacattatgtcctaaattcctgccagacatgtaggatcccagtggcaataataatatcagtagtaattaatactgattctattgtatgttgccttcctggaaaggacaatttccccttctgttcacaagcatagaaacacacatacagacataaacatactcacatgcacactgatggcgtgagccagctccatcacctttat

SEQ ID NO: 376893 - DNA, 400 bp, Homo Sapiens
  misc_feature (42)..(135): n is a, c, g, or t
accgtttggcacgcttagctaatctttgtataattcaagtannnnnnnnnnnnnnnnnnnnnnnnnnnnnnnnnnnnnnnnnnnnnnnnnnnnnnnnnnnnnnnnnnnnnnnnnnnnnnnnnnnnnnnnnnnnnnatgagccaccatgcctggcccaaaccctcatttggaacatagacataaccctggggacagtggacagaaaactccatagctgagattaagtttctttaatcttgcaaaatggggcctccaaatagaaattaactttgtgttaccaaagaatgaagttgcattcctcatacacatgaatctgtagatggacattttgtaccagctgcatatacctaacaaagctctatcagtaggaaacaatacacttacactggtgtcatattac

SEQ ID NO: 376894 - DNA, 404 bp, Homo Sapiens
tctgagcaaatatgagtgatcaaggcccatgacacagccctcaggcaatcctgagaacatgtgtccaaggtgcttgggttacagcttgattttatacattttagggtggcagaagttatagataccagtcaacacatgtaaggtgaacattgtttcagttcagaaaggggggacttccaggtcataggcagattcaaagattttgtagttaagttaccctctgaagacctggaatcaatagaaggaaatgtctgggttaagataaggggtgggggagaccaaggttcttatgcaaatgaagcttccttgtagcaggcttcacagagaatagattgtaaatgtatcttatcagtctttaaaaggtgccagactgttagtggattctcttctggatcaggaaaaag

SEQ ID NO: 376895 - DNA, 317 bp, Homo Sapiens
  misc_feature (280)..(280): n is a, c, g, or t
ccagccctaaggaaaagaatatctataaacacgggaaagttggaaaatagattcattagccattcatgtacacagtgcagtataaactactctcatagatggtacttctaaatgaaaatacacaaatatttataagctttaatagtggtccctaaaacataggcaactatattttcctgtctttataaattcataatggcgacaatataacaaaatatttagggtaagaactgtttctcatcagatctctatagtacatactttaatggcatgcagtgcngatgttcacaataaaagaatcaacttaaatgtcaaaa

SEQ ID NO: 376896 - DNA, 533 bp, Homo Sapiens
gagtgtgatcgtaaaattaagacgtaatgtttcgctctatgtcatcgtatataggataatccagtaagagtggcatgctactcccaacatcaggcattagttctttcaactcatccaaggatggcttcttattcagtagtttcttatatcaagccaaaggaaaagggaggtccagaatggtacaattacaaatagctaagccacagataacaccaatcaaatgcaacaaatcactgtcttcaaatgtcttatcagcaacaaccaaatgagcctggaatctacataactacctaacacatgccgtatgtaggatccaataattccctcatgatgagcaagaaaatattctttgcgcaccccatcctgcatccacagcatcttctccaacaaatataacattgagtggcttcttgtaatctatgttctttgtattcctaaggacttccattgcatctcctacaatattttctctacgcaccactagaattaagcagggattcacagattcaatcactgggagaaaaagagaggag

SEQ ID NO: 376897 - DNA, 497 bp, Homo Sapiens
aaacagacagacgacacatactctgacattcagcttctgcctctaccacgactagtattgctgctagaagtcctctaacttattaactattaaatcctaaggaccagtctacagtatataaatctggcaatcactctagtcacctagaaatgtccccttttcccttggcttccacaaatcctactctactaattctctactactgatttctatactcttagcaccccagcccaaacatcatcatcttccagagttaaactcccataacccaatatataaaacaagtctacttatctctagcagtctaactctggggccaatatccacaaactcaatcacctagtagactgctactagtagatcttctgaaggaatctcaaacatggtttaaactcaaagtcattttcttctccattcctctcaaacccattttcagctctaccaactacagtatcacaattcatcccaccccaactaaaaaccgtattttcacttta

SEQ ID NO: 376898 - DNA, 522 bp, Homo Sapiens
  misc_feature (455)..(455): n is a, c, g, or t
agtaccaggacaagaaggccaaacaccagccaaaaagaaactaggaaaaaaagattttctttgctaatatagattaaaaataacatcagacatcttatgaaaattagcctctaaactcttaatacatacgttctgtgtgtctctacctggcgtctttaagaatatcctctctgggctctgaaattttaggagtgattcttatccactccaagttgtaagtatttgtagaaatttgtgcaaacaaacaaaaactatcaaatgaaaagaaaatgtactcaacctaacttatagttagcagctgggaattctcaactcttccctgccagcactataccacagtgtggaagaaattagtcaaatgcttgttttcctgcttctcttttcaactggtttactgttgcttttgtttgaaagtaggttttctctctcaaaggccgttgcttattatcgtttanggatggagggtttgtgttttaaaattttatttgccattgccaagggggtgggttccaccggaggtcc

SEQ ID NO: 376899 - DNA, 261 bp, Homo Sapiens
aaaataaaaaattgttggccagagctgaccccctacctgcaagtaaggaattcaaggaacaggattttcctggattggcttagtcgttgcaccacatctgatcactctgggataggctgcctgaacacaaaaccaggactggattagtataagaaggcatgaggtagcagtgaactgtgtacaaatcatctaatcttcactatcaccctgatggggtcagttctggtgtctacccgttttcacgtgaacctggagcctctg

SEQ ID NO: 376900 - DNA, 390 bp, Homo Sapiens
gctcccggatcacgtgaaactacaatctagaaaagatgatgataaaacgagtaattctctgtactgtccattcaattgacatgacatgtgacatgctatttcacagtgggtccttcctggcacccaactccattttgtctgtgactaggctatgatacaacaaacaaattcaatgaataattgaatgtgttaccagaaaaattccctagtcctcccaaatcatcttgacttactcatggaacttaaataacccatcagctgttttgttactaagcaaggaagaagctttatcttccacctatctcctaaaactgtttctgctccacaacacagtttaatctctattcctcacctctgctctcatacacctacttaatattctgatgtcag

SEQ ID NO: 376901 - DNA, 445 bp, Homo Sapiens
gagctcggtacccagcggggaacaatcactttacctggcataggtcccagactaaaccacccatcttgttacctcaagagaagaaaaatccagcaagcctgtgagcaatggcacaaaatcccagatttatagcagagcgagggtcaggttttatcaactcatagcaatcccacatacattaccttcttctttatctttttcaatactatcttcttcagaggccagatcacctaaaaaccctggaagatcacttagagtgacagaacctttgctgccaggtggctcttctgaagagaaacaaagacaactgaagtcaaagaaatacagtgtaatccctgtaagtgtaaaactgcttacactgtatagaatatgtctgtaataactcttcatgctgaacagagaaggctggacatggctctgtcactctaagtgattgttccccgct

SEQ ID NO: 376902 - DNA, 561 bp, Homo Sapiens
agcggggaacaatcacttctggaccttcacctgaagatgcctaagataaaaatgcccaagatcagcatgcctggcttcaaaggagaaggtccagaagtggatgtgaacctgcccaaggctgaccttgacgtctcaggacccaaggtggacgttgatgttccagatgtgaatattgaaggtccagatgcgaaactgaagggccctaaattcaagatgccagagatgaacatcaaagcccccaagatctccatgcctgactttgatttgcatctgaaaggccctaaggtgaaaggagatgtggatgtttctctgcccaaaatggaaggtgatctaaagggccctgaagttgacatcaagggccccaaagtggacattgatgccccagatgtggatgttcatggcccagactggcacctgaagatgcccaaggtgaaaatgcccaaattcagcatgccaggatttaaaggagagggcccagaagtggatgtgaacctgcccaaggctgaacttgatgtctcaggacccaaggtggacattgatgttccagatgtgaatatcgaa

SEQ ID NO: 376903 - DNA, 149 bp, Homo Sapiens
agcggggaacaatcacttctggaccttcacctgaagatgcctaagataaaaatgcccaagatcagcatgcctggcttcaaaggagaaggtccagaagtggatgtgaacctgcccagctgaccttgacgtctcagacccaagtggacgta

SEQ ID NO: 376904 - DNA, 441 bp, Homo Sapiens
accaccgggaaactatgcagctgggagctctctgcctaagagtttgcactagttaaacctgcctgggagttaggacggatggttttaggaatgaccggaaaactacccctaatactcccccgacattccagcctctagaatgctctgatccagagctcagtgaatgattcccagctggtgaactcctgtggctaccccatcagaacaagggctaagggtttatgggtcaagagtatttgatcagaattataaagggtggtatactctgaaacacagcccaaccaaaccattgtttgaccgctttctcttttcctctaccttcctcatccccacttttttccctttctctctacttcctcttcttaattggctttgcaattcccaatatatttttaaattatttgttgtatatattgaataaagtttttaatgtccttgtcg

SEQ ID NO: 376905 - DNA, 272 bp, Homo Sapiens
accaccgcgaaactaaaaaggtcagaggagaagaggaaagtgcttaatcttatttggttactatgttacctgttattcagcaaaatgttagaacacttaatatcccgatgcaggaaattctttttgtgacagtattccaatccttccattagctgtttcatgaacgacttgatatggtcctcagaaaagtgcaccaaaccagattctagcagtcccattaagtcatggtccatatactcaaatacaaggtaaaaggcacctacataaagacg

SEQ ID NO: 376906 - DNA, 470 bp, Homo Sapiens
tggcttggtgctaatccggagactcaaagaaagattactgaagcgtgcagaacagcagggccgaccagacggacaatgtaaaagctacccaaaggagactaatgaacttccaagcagaatgctgctccattggttaaatacttccaggaaaaggggctcatcatgacatttgatgccgaccgcgatgaggatgaggtgttctatgacatcagcatggcagttgacaacaagttatttccaaacaaagaggctgcagcaggttcaagtgaccttgatccttcgatgatattggacactggagagatcattgatacaggatctgattatgaagatcaggtaattaaaatctgaaaatagttctctatttaaatgtttttaagttgaacctttgtaaatgttttatgaaaatttgaattataaaaactcattttgtgaaatatatacagataactaataacatattacatgat

SEQ ID NO: 376907 - DNA, 918 bp, Homo Sapiens
  misc_feature (444)..(444): n is a, c, g, or t
  misc_feature (694)..(813): n is a, c, g, or t
ctctaagatccccggaccccggaaaccataaaagcctgattcctggtagttttttgtaattcatttggcaacaaaacataacctgaactagcataacgctatttatcgttactaccccaactcagttttttgacttcacttgcttctctgcagaatttgtgtcatttgattttagggtgctacttcagatgccaccaggactgttaacttgaacacggtatgtgcactgcatcatgaatgttattcacgacatggtatgcacacagcactgcatcacacgtgttacccagaacctggggccacactggatcacaaacctgaacaccgtgaaactcatctgactctaagacttcaaagaagccactgtggagcggcagcttattcatggcaggaggccgcgtagccaaaactgcaagacttaacgagactggaagtaaaaagagncagcttgcaaaaaatgcacatggaaaaagccagcagcaacacaggatataagtcaagcagacactgcaggataaatcaaattttataagggaagattccaagtgagaagatcaagttgtcacacattagcttttgtaaataattgagtcctgttgaattcgtatagaatttacagttaagatggtatgaaaacttagttgtacataggaactaattatgcaagctctcagtataaaaggaaaaaagggtnnnnnnnnnnnnnnnnnnnnnnnnnnnnnnnnnnnnnnnnnnnnnnnnnnnnnnnnnnnnnnnnnnnnnnnnnnnnnnnnnnnnnnnnnnnnnnnnnnnnnnnnnnnnnnnnnnnnnnnnaattagccaggtgtggtggcatgaacctgtagtcccagctacttggaaggcgctgaggcaagaggatagcttaagcgccgggcacggtggtccgtttcgcggtga

SEQ ID NO: 376908 - DNA, 580 bp, Homo Sapiens
  misc_feature (480)..(480): n is a, c, g, or t
  misc_feature (516)..(516): n is a, c, g, or t
  misc_feature (534)..(534): n is a, c, g, or t
  misc_feature (565)..(565): n is a, c, g, or t
aagtagtcgacgagcaggtagtagatgataaacatgacagcatggtcttatttcacaggactagtccgggccttcgtatcactagctgttgccttttacaccctgcttcagccaccctgtccctgtcattggccctggacttcctctctgtgcccgtgtgtcctctgcctgggagccctctcctcccatagtcactttctctctgccaaactcatttcttcttgtgcccaagacctctctcctgagcccctgtggaaacttcaggaaggatgaatccgtctttgtgctccacggctcgtaccttgatcaggctgtgcatcacagtaattccgttctaggtaggcagagttgatctttgtctcatctgccagggctgcgggctcttcaagggcagggaccttgtcatagtcatttttatttttcacagtgcttgggaacatgggtggggaaaatggaatgttggggaatttattgggagtnaatataaatttgttatccaaatgttcctttttgganttaaggaggatttagttnatgttttactaaggaatgttaaactttggantggggttggcatttt

SEQ ID NO: 376909 - DNA, 438 bp, Homo Sapiens
  misc_feature (18)..(18): n is a, c, g, or t
  misc_feature (36)..(36): n is a, c, g, or t
  misc_feature (53)..(53): n is a, c, g, or t
caaccaacggccatggcnccaaaagttttgcccagncactttggaagaatccnaacaatgggacccaaaagtttggtgccatttcccttgccagatggatgtaagaatccccagtggtgaaactaagtgccttgggttaaagattccatactgtgctttgtttccaaagtgcagaggttcagcttgcttttggccaacagtcatggtaaaagagaaaaacaatcaacttcagcagagataatactattacttttcttaacccaaattaagagtgacaacttttgtgaacttgtgaagcagttttgatataaacttaaaaataatcaggcaatgttgtaggtggttctcattccatgctcactgtatctataccagttgtcaccagcctgtgtctgattttcctctatctatggacttgcctgaagagaaacagaaaca

SEQ ID NO: 376910 - DNA, 259 bp, Homo Sapiens
ggagctgagaggatccacatgattcctcttgtggaccatgatttacaggtatgttcagagataattccattttcttctggtaacataggtgaatggcacttgaaacactctgtaactttgttttctttagctgaataacagcttcaagaaaagttatctcttcaaaggttctcaaaactggttcaagttctatgaaacattttaagaaagatggtctttcatcgggattttgtgcccatccactttctatacagagatg

SEQ ID NO: 376911 - DNA, 491 bp, Homo Sapiens
cctatctatcatgcacctgggagtcttggactatgtgaaccccagttatacatgaacgcccctcccccaagtctagacacagcttcttaagtccacacaccagaaatccagacccactcccagaatcctgatacagagctacaacccttagcccacagaaacactaacttctgtgtgcactgttactgcacaaggccctgacacacctgaaagtgattacagaaactgacccttcagaagaccccgtgcacatctacagaactgactcacccctgaacatcgcagtgctctgaagattctggatatacaactgaggccctcaaacccctgcagcctgacctataccataaaagcttaagcatggggtctctggccacacccgaggcccttgtgccccttatcctggcacacaaccaagccttccttgtgcatgacacacacaagagacagcaatgggggagtctctctggaagaggcagggataacctcct

SEQ ID NO: 376912 - DNA, 289 bp, Homo Sapiens
aaatggaacgaacaagcactggttaattaggcaagccaagactccaatgactaattcttcaatacagtttttagataatgcatttaggaaaaggtggcaaactctcctctcagttgatgaccttgtggagaaactggtcaagaggctggagttcactggggagctctaacaacacttacatcttctatacctcagacaatggctatcacatcaggacagttttccttgccaatagacagagacagctgtatgagtttgatatcaaagttccactgttcgttccatttcc

SEQ ID NO: 376913 - DNA, 172 bp, Homo Sapiens
aaacattacgcatatttgttggactctaagatcaacaccctgttatcattgtgccaagatccaaatttgttaaatccaactccatggacattgtgcagagatgtggtgtaccatgaagaatccccaccacaataccaaacatcttacctgcaaagtaaataaatgtatctgg

SEQ ID NO: 376914 - DNA, 410 bp, Homo Sapiens
aaatggaacgaacatcttgtctcaggtcatcacggcccgtaacaagctgtgctcctctccttgccatcggaacctacacaatctattatttttggtaaatttacacctcctgctaagcgaaattctgctttaaatgactgtatagtcaccagatttccatattctcctgtgtggtccaccttaatttccatagtagggacaacaacatcttctaaattcttaagtttagtaattggctggtctgctggaatatttatgccttttctctgagtcttccactgagtggcatctaagtttgtctaatataatataagcatcaccaaagtgcctcaacacttctgaccatctgaggtctcctacttctgatagtactatattattcttatttgcagcctctgttcgtcctttcg

SEQ ID NO: 376915 - DNA, 322 bp, Homo Sapiens
aacgaacaagcaaataaaatgtaatgaaggcatatttttctaaaataagaagacctcaaaattccgtaagaggggacaaattttgtgaaaggctctacaatactaaatttaaattgtgatgaataaagaaaaatgcctcgataacaccaaaggggtggctattatctcttccattttaacatccaaaggggtggcattatctgttttaaaagcactattactgaatagataagctatttttctctagacactctctagcatactttcgataagcagcttgcaataacagttctcaactgacacctgttcgtccatttctgta

SEQ ID NO: 376916 - DNA, 270 bp, Homo Sapiens
cctgggcaacagagcaagcctgtcgtcaaaaaaaggaaaggagtaagtttggctatatttcatcataaacaaagtcaacaaacagatctggggaaaatatctgtaatatctcattataggcaaagaacaagtttccttcaggtatttatcagcttgagaaagaccaaagttagcctggtaagattatgggaaaataggtacttacatcatagccatgagaatatctaactagtgaaaacattacaggactacttggattacttaaaaatt

SEQ ID NO: 376917 - DNA, 353 bp, Homo Sapiens
tcgaacaaactcttaggagagaacagagagcaaacgctccacacactggatctggcaatgatttattggatgtaacgccaaaggcacaggcaacaaagaatagacaaattggactgcatgaaaatttatttatatttggagacggaatctggctctgtcgcccaagcttggtctcaataacaacaacaaataaaatgaaacaaaaaaccctcccataacttcacatcttcaatgatattagcaaaaagaacaatctcaaacccaaagctagcagcaagaacggtaattatagagcagagattaatggatcaagtgaatatagagatatagaaaaccaaataggggaacaaaaa

SEQ ID NO: 376918 - DNA, 372 bp, Homo Sapiens
tacagaaatggaacgaacagttcagtcacttcctaacatctagccacaaaaatacatgggaagatatagccacatctaaagattgtgatctcctgattttctttataacttaggtagattcagaataccatcttccagttttcccttggaatacaaggaacattagtcttaatctactgttctgtgttgaatagagaaataattccttcccttccacacactctttttgtttttctctattgaacttttctctaggccattctatatagatgcagctctaaatgataatagacttggactgttcgtaaactcacccttttcttgaaatatcatactgcagtgtgacatttcttacctgtgtacgtcccattt

SEQ ID NO: 376919 - DNA, 450 bp, Homo Sapiens
aaatggaacgaacacacgtaattagttaaggttacatagaagtaggggaggccctaatctaatatgatttgcatccttataagaaaagaagttacaagacacacaggggagagggtcaggcgccaatggaggcagagactcctgatcgccttacccgctggcagtcactagaactgcaagccatagtgtggggtgaaaggaaatattgatggctaatgaaataaagtgtctgcaaatgcaacctaatactgcagcggcaaatctcctagtagacacagaggggcctcctaacagctgcatgtgactctaacatgactttcaccaaccagcttctgctgtctacagacatctcagagaggattttatgactcgcttgttccccaagtggcagagctcagatctcgcataggactgactgatgcctctccctgtatcacctgtttcgccggt

SEQ ID NO: 376920 - DNA, 278 bp, Homo Sapiens
gaaatggacgaacacacacacctatacttcctcccggtggctcatactcacgtagctttcttagaacaccctgtgaccctgtgcctggtaacttttctattccccatatagctcctatttcttctgtcatctatttatggtttattttctaggaggatttccgtgactttctttcacatggtctctctagacttgtttatttgatcatcacctatttagtttccagcacaacatctctttttttgttcgttccatttcggggcatcctctcacatcgc

SEQ ID NO: 376921 - DNA, 323 bp, Homo Sapiens
tagtatcctagaagcgcatcactttcccaggtccatcaacaatccgccaggtatcgtccagtagcaaaccgcttctttattaaggaaagcctatagccagtgcccacaagttcgaaatctactcctgaaagggtacttccctcgctgaggaattgtactgcaagtgtcgtgggtttactaggtccttctgaaagatcaaattttgctcggagggacccagaacctccattttctgatttttctgaaatactagacaatttccaaaaggctttcatttgttctgcattccatattgcagggggaggggactgcatgttcgttca

SEQ ID NO: 376922 - DNA, 340 bp, Homo Sapiens
caagaatagaaaggccaaggccaagcctgtgacacgaggagcgggtgctggcggcaggcaaaggggacaaaacaaggagaggccaccacctgttcccaacccagactatgagcccatccggaaaggccagcgggacctgtattctggcctgaatcagagacgcatctgaccctctggagaacactgcctctcgctggcccaggtctcctctccagtccccctgcgactacctgtttcctgggctagtcttggaccccacgagagagaatcgttcctcagcctcatggtgaactcgcgccctccagcagtagccacagggatcctctagaacgctacacca

SEQ ID NO: 376923 - DNA, 681 bp, Homo Sapiens
  misc_feature (402)..(439): n is a, c, g, or t
  misc_feature (585)..(595): n is a, c, g, or t
gctgtctcgaggatccctgtggctactgctggagagggctctgcagccagagaggggcctgaggactgtgggtgagtgtttcctggcccgggagatgggctacttctcccagtacgtggcctgggtgagagaggaggtgactcagcgcattgccacctgccagcccctctccggagccctggacaacagccgtgtgatcctgtgcgacatgatggctgacccctggaatgccttctggttctgcctggcatggtgcaccttcttcctgatccccagcatcatctttgccgtcaagacctccaaatacttccgtcctatccggaaacgcctcagctccaccagctctgaggagactcagctcttccacatcccccgggttacctccctgaagctgtagggccnnnnnnnnnnnnnnnnnnnnnnnnnnnnnnnnnnnnnnagtgtctatgtttaactgcatcttataaaccagcaacaagttttctactgggaattagaatggtgcatacacaatgtattattatcactgtcagatgagcatgcttgaatgtagcatgactgcctctttttgcttttcctagaggnnnnnnnnnnngcttgttactcatctgttgacctacctgggggaagtagcacccttgcatttcaaaaataaaattgatggcattacaaatggaatag

SEQ ID NO: 376924 - DNA, 327 bp, Homo Sapiens
ccgtaggtggcttaggtgacaatgatgacggtgcagacccatcgacttggggacccgcagctacttaaaggaagagccaactccaaatacaaccagtgtggcgcctgttaagatctagccctgaaagccgagttactccacgggcagggactctgctgaaaggcaatttccacatgcaggacgcacagttcacatcttttcactctggctctttctgagtgagtgacaggaacgagacccagagtttccacagcattcaggctctgcaaagtgctctggtggacgctgctattgcaaatgagcttgctttctccagcacgtagctcc

SEQ ID NO: 376925 - DNA, 467 bp, Homo Sapiens
gaacgtcctgagcgcgatggttggtgaggccctgagggagcaaggagaggcgtaggggcacgcatccaggagccaacccaaccagatcaccatgcccatccctaccagcatcccgggcatgggaagaatgcccagaatggaaagatcccacctggttgtgaaggggtgggggaccatcaggagagaccacatggaggaggtggcatttgtgatgcaacttggagggcttgagggctgagaagggttcgactgggctatgacccctaattatataggattgagacaacacctatggttagggccaataacatctcccctggaggcagtctggataagctccctggaaagacaccacaactgatataataaccccatctctctaccttcagacttatgttaatcaaggattctcggagagtcctaaattaaaaattaaaaactctgccacggggagctctgacaagggg

SEQ ID NO: 376926 - DNA, 406 bp, Homo Sapiens
cgggggacttcgagcatacgtaactgcttttgcactcaacaactttccatattgccaaagaggtcttcaaatcagcagctatggtattagatgaaagtccacataacccagatatttttagttgagcttccacgctaccactagtactacttgtacttcctttgtcatctttagatgatgtcttgctgtctttagcattcctttgaagagctcttagcctgaccagaggccccagtagacgagggccctttcttcaaagtatccttttcttagtctccagattctgctttcttagaactttctctggcttcgcttctcgacagggtcacccttcacgcagtcttccttcttaccatctttatggtacgcattcatctcataatccttgctttccgtctccggccta

SEQ ID NO: 376927 - DNA, 499 bp, Homo Sapiens
gggaacattatggtatagtgtgcaagtatgcacagtgtatgagtacacagacacagacatagacatagcatggagaggacctagatgtcctgcaggtctgggacagcgtagttaagtcaggcatcctgtaggttatcagggaccagccattagaataggagaccaacatgaggagatctgcgtgtgatgtgagattccatttctgaaatcaatgatttcttttggtgggtttaactcttgttatcctttatagagcaatgaagtttgtggtaagaatgataatctcaaattgaattcactgtgttctgattttggaaatgcacgctgaaggatgccagggagctgaactgacagctccaaaggctggcaccaggcattccatgagcgcatttgcccagccagccagacaaacgtggccacgcactgggtggccagagagtccttaccacttcagtaggccggtagtacttgagatccacagtcacgggggatcctctag

SEQ ID NO: 376928 - DNA, 187 bp, Homo Sapiens
taggccggaggactaggccaggacgtcattcaagtccacgtttttgtgtgactttgggtcagtaccttcccctctctggacctcagtctgaccatcgtcatattctatctgcaaagctgccatactgttcaaatgtgggacaaggaagccatcatccagaaaacatccacacagctaccgtccgcca

SEQ ID NO: 376929 - DNA, 318 bp, Homo Sapiens
cggaccggtggcggtagagatgaggagctggtgcactggtgcagagctatgggtggtcaaagcgaatctgcctcggtgaaaaggcccaagaggccagctgtcccctcagctgagctcaggacagaccacccctccccagcagtaccaaccagctctcagaggacgctgggatgctcccagccctccttgggctagggctgtggggctgactcgttcctggaaggctggttaaacacacagtcacccagagagtcggtgaaaacctaggggctttgttcatgaaaggaggtgtttgttaggcctaagtcctccggccta

SEQ ID NO: 376930 - DNA, 389 bp, Homo Sapiens
tgaatctctgtcacctctatggtcagaggcagtggagaggggctcggagtaagggcacgggagatcacgccattggcctccacctgccactggcacctttgtaaaagttggaccgcaatagcatcctgacaggcttctatcttctttggataatttctggtccatagtacaggattcttaacatggaacaagctaaaacagacagacctaaagccaggtctaacagaaagggcaagcctcctgagacatcctccgaagactcctgagcgcgaactgtgcaagcaaagccccacatggatattatcaggagtgtcgtgttcacggccacttctcattacaaaggagaaggtgactgtatctccttccaacttcaccaagtctccggccta

SEQ ID NO: 376931 - DNA, 529 bp, Homo Sapiens
  misc_feature (23)..(23): n is a, c, g, or t
  misc_feature (26)..(26): n is a, c, g, or t
  misc_feature (447)..(447): n is a, c, g, or t
  misc_feature (476)..(476): n is a, c, g, or t
  misc_feature (497)..(497): n is a, c, g, or t
  misc_feature (509)..(509): n is a, c, g, or t
tctctggctcgctggggaggggnggncgaggacagaggcagagtcggggagcctccttggaactcagcagttggttattttgtgatacagtcatggtgggtaaatctgttaccaaccaagtatcttctgaatgtcaaatcctgtttaatttcactttcgctttgctgatccgtggcctgcctcatactgagtgtcaaagagacactgagtgtcaaagaaggaagtaaacgtctttggccagatttaatttctgactctgttgggaagcgaagtaacatgatgggtgcaagatacacagaatggaacatcaggggcttggattcacattcctcatctgtgaagccaggggcgtttgcctgagtggtccttagggtcctttctggctctaacattctgcacttttagggttttaattcctgattgacattggctaagcagaagacaccngatgagagaacacctatttacagaccatntttctctctctaggggacgantggagtgagcanggcccgggagtctgaaggtt

SEQ ID NO: 376932 - DNA, 444 bp, Homo Sapiens
  misc_feature (94)..(145): n is a, c, g, or t
cgtggggaggcgtgcacactgggggagaagcgcctgaagggccccgagggtctggaaacccccgctgggcaaaaaagggggagcccctgtcccnnnnnnnnnnnnnnnnnnnnnnnnnnnnnnnnnnnnnnnnnnnnnnnnnnnncagcttccacaggggcatggagcacagaaagtgaagcccctcctgcaccctgcctctcccccagcatccatgcagcttgacctcattctgtttaagggtcaagaggattccattgttttggttcaaccaaaacccattcagtgagtcccagagaccacttttagccctgggaaaaactggccctggattcccagtaggcatctgaaagaccctggttttggctgctagattgcgtttcgtctgcagccctctcccctccactccatcacaaaaaggcagcctcaaattcctgtaaagaa

SEQ ID NO: 376933 - DNA, 645 bp, Homo Sapiens
tgatgattccgagagtctggctcctgagtcctcacctttaaccactctgtgacactagttctttatgacttatgttcagagtttatagtattgaaaaattaaaggcagtatggaatattttaaattacgatgcatttgtataatgtggtcattaaagtattttttagactattgtgaatattttcctattaacttctaaatgaaaaagcaagagtctacatatgatcccaattttataaaaaaggggaaacatatataaataacaatacagaagttaagaatgaaataagccaaaatgatataatggttgttgccaagtgctaatttttctttccttctttacttttctgtattttccaaaatttctgcagtgaacacttacttttacgcttaccaaaaaaagggatacagacaaaacagaatctgcagaaaaacctacaatttgaaccctagaacacctgagacaactacctattgagaacctctatctattgggaaccagtgttatcagacttctcaaatttctaaaatcacatgtaatactccttaaacataacctcgcaattcgaatatcagttaataataccttgcatttgtatagcatctttttcacttctcatttacaatattttgatgtgaaaaaca

SEQ ID NO: 376934 - DNA, 551 bp, Homo Sapiens
  misc_feature (13)..(13): n is a, c, g, or t
  misc_feature (54)..(54): n is a, c, g, or t
  misc_feature (63)..(63): n is a, c, g, or t
  misc_feature (159)..(159): n is a, c, g, or t
agaaaagagtgcntatgatgttcttagcatttgctatcatgcctatttttatcnagatttttnaaatgtagcttgtcataaccaaaattttaaattacaattggccttgtatgagaaggaaaaaggtatttttatggttttggagtgatgaccgccagngactcaatgaactttgaaaatagcattgcttcgtgcactttgaataccaatcaggtgttttctgtgctactagttgtcacgttgcattcatgttcacctcctgatttaagtatctcgggtgtgcccagccactaaagcactctggactaatcgctaaagagaagcaacgtggggggtggggttgcgagggatgtgttcacatgtacccatcatttgatcatagcactgtgattgcttttgatgtgtgtctctagtggtgtgttgtctgttggcatgcttaaagcacatgtccattaaaattcattttgttccttttattttccttgttttcttggttagtgattcatttgcataaacattaatgatctctgcatactggtttggggttttct

SEQ ID NO: 376935 - DNA, 549 bp, Homo Sapiens
cttaaccctgattctaagcaaggagtaaaaacaatgagaatgaggttatgtccagaatctcggaaaagtgccaggaagttatacgagcgatctcataaacttcgtaaaaataatcaccatctttttacaactacaattaacttaaattcaatgaatgatggttggtatggtgcgctgaaagaagcaattcaacaacagcaaaaccagctggtatgggtttccgagggaaaggcggatggtgctacaagtgatgaccttgatttgcatgatgatcgtctgtcctacctgtcagctccaggtagtgaatactcaatgtatagcacggacagtagacacacttctgactatgaagacacagacacagaaggcggggcctacactgatcaagaactagatgaaactcttaatgatgaggttgggactccaccggagtctgccattacacggtcctctgagcctgtaagagaggactcctctggaatgcatcatgaaaaccaaacatatcctccttactcaccacaagcgcagccacaaccaattcatagaata

SEQ ID NO: 376936 - DNA, 716 bp, Homo Sapiens
  misc_feature (33)..(33): n is a, c, g, or t
  misc_feature (100)..(100): n is a, c, g, or t
  misc_feature (118)..(118): n is a, c, g, or t
  misc_feature (491)..(623): n is a, c, g, or t
taacctctgagtatattaaaaaccactgaattntaagctttagaagggtaaattttatggcatataaattttatctcaactttttacaatgttaaaaaanaaaagagtaaagcagagnacagagacagggaagaaagtttcctattttggatagggtgatcaggaatgaccttagtttgagcagagatctgaacaatgtaaagaagctactcgtgcaaatcggggaggtgggggaacattccagaaggaagaaagagcaagtgagaagactctgggagtagacacaagcctgttttgaaagaacagcaaggagcccggccagtgtagctcagtgcagtgagcaagagtgaggctgtagaaagccagggtctaggtcatcatggaggccctgtagaccacacctgaggactggactttattctaaatgatttaaaaaaatcactggagccaggagcaatatgactagttgcacatttaattaattaattaannnnnnnnnnnnnnnnnnnnnnnnnnnnnnnnnnnnnnnnnnnnnnnnnnnnnnnnnnnnnnnnnnnnnnnnnnnnnnnnnnnnnnnnnnnnnnnnnnnnnnnnnnnnnnnnnnnnnnnnnnnnnnnnnnnnnaataggatttaaaaatctagttaaagatttgtaaaaggtacatgcaaggataaccattacagaattgcttaaagtagcaaaatatcgcttcta

SEQ ID NO: 376937 - DNA, 327 bp, Homo Sapiens
tttcaccggcaggtggaatggagctgtggtcatgggaaggaaaataacaacgacaaaaacaaagcagcaacaaaaccaggcaaggggctgcacaggttcagcaagaggaaggatcatgaactgaggaaatgcttaatagtattaaaaaataataattttgaacaaattaaatgcaataatgtattccataaatatcagtttttagaaaggggagttattaaatagcaaattacaatgatactaaagggctgtgatagaaatgtatgtaccaatgaaaaatcatcagggcactgttttaaaatagcacagcttcttcagttatttata

SEQ ID NO: 376938 - DNA, 395 bp, Homo Sapiens
cgggagtgatgactggttgcaccatatactgaggtgtatcaaagacaatgtgattggctggacaggactctggataccccactgtaatgattggagttgtctgcttggaggggctcctgattaccaagttgaggcttcccacagatgaaacagatgagcacacttaacttcagtattgttgagtttggtactagggctccttaccatccaggaaagatgtaactgtaagattattattaaggatttagttagtccagctggagacttactatatagttggataaaatgtatctcaactactgttacaagacttacaaatatgcctgagaaaagtcacaagaatgctaaaggatctaaaaggttagggacatacactgtgcttgtaaattgacctc

SEQ ID NO: 376939 - DNA, 436 bp, Homo Sapiens
ctcggttgaacgcctcattagcttactggttaatacgtacaccgtgcagtttactggctacaatattcactctacccgcattctgtacttttggaggacagtcctatttataacggtctgacttgcaaaagcccttgcggaaagaaccttttattttgactatgatcattcttctaaaggagatcttagaagaacaaatgaaaatgtgaaaacaagagtacaaactcaacatgcagagctatctgtatgataagaaccagttgccaggcacctgaaaatgtcaagtcctctgaacctgaaagggttgtgagaagagtaaagagagtgggcaaggatgtgtgtcaaatggcataagataaaaccgtatcagagggagcttcatcatactctctgaggacagtacccagtgagaaacctcagactctcaatttctaac

SEQ ID NO: 376940 - DNA, 214 bp, Homo Sapiens
attatgttgtaccagatttacctggcagcacaatctacctcattgctaaccccactaaaacactcaccaatgacctcaacccctgacccccatgcctcatggatactcctcaatagccatctactgttcctggggtgtgatctctagatgtctgacctgcattgcatagcaatgcttgtgcacttggcctgtctcgttttaccaactgtctgtc

SEQ ID NO: 376941 - DNA, 192 bp, Homo Sapiens
gacgagccggtccagattcaccggcaggactaatgtttcttttgtggtgcttgaggcatattcatataaccaaagtttgagaactgggaacttcatgctgatttgtacatattgaagtttctctggtattcaaaggttatatagtgaatgaattttcattaataaatcactttgtcagaaactcaaaaaaaa

SEQ ID NO: 376942 - DNA, 614 bp, Homo Sapiens
gagctcgtacctcaccggcagtctccttcgatgtgggccaggactctttgaagtggatctgagccattttaccacctgtttgatgggcaagccctcctgcacaagtttgactttaaagaaggacatgtcacataccacagaaggttcatccgcactgatgcttacgtacgggcaatgactgagaaaaggatcgtcataacagaattcggcacctgtgctttcccagatccctgcaagaatatattttccaggtttttttcttactttcgaggagtagaggttactgacaatgcccttgttaatgtctacccagtgggggaagattactacgcttgcacagagaccaactttattacaaagattaatccagagaccttgcagacaattaagcaggttgatctttgcaactatgtctctgtcaatggggccactgctcacccccacattgaaaatgatggaaccgtttacaatattggtaattgctttggaaaaaatttttcaattgcctacaacattgtaaagatcccaccactgcaagcagacaaggaagatccaataagcaagtcagagatcgttgtacaattcccctgcagtgaccgattcaagccatctac

SEQ ID NO: 376943 - DNA, 650 bp, Homo Sapiens
tgtggtcgcacgtttcccacacagagctgtggtgactcaacccacgtgtcaggaacaggaccgaacaagcgtatgtataaacgcagaccaggatcatcactttattggtaatgttgagtcataaggcagttacaaaaggacccccatggtgaccaaacaatgttggactatggcttagcttctgtaataggatgaccgactctcccgtcacaaagagctgagaaaggaaagagaaaaccacagtgatgacaaagtacgacaaatggctgtgctgtgaagtaccagaaagccccaatttttggtgtatgtcgcccacttttcctccaccagagactaagatgtcatcccatagctaagagaacctagagggagaaacagggccgcacgtcatcctccacttcaggtgaatttgtcactgcaagtggtgcagggatgttacaaccaagccgcggacaactcatgagtagggccgagattcctggtactgtggagaggcgcagagcatatgaacacctcaaacagatgattgtcacagggtgggaaatccttccatgaaacagacacttgagacatagtggcaagacattaaggccttccatttctttgcctacaccgcttaaagcctgataccaagccaaccgtggactagt

SEQ ID NO: 376944 - DNA, 639 bp, Homo Sapiens
ccggtaccccggtaacagtagatgtgaccaggtatgatgagggagaagattgcttgcctgtccacaggggccggggctttaggaatggccggctgtgggaccttcccatcccacgtcgacaggaacatcaggaggttcatcacttcaccccgctccaggaagacgtctctcttggtgaatttgcgcactgctgtgagtgtgtcctgcacaatacccatgacaggccgattgctctggggggtgacaatcatgcgaggaaccatggccagctcctggatctctgctcgcgtctccagagactgtggcaggtgcaagttcatctcatccccgtcaaagtctgcattgtacggagttgtcacgctaagattcaagcgaaaggtagaccatgggagaatgcggacccgatgccccatcatggacacttttgtgcagagttggctgccggttgaagataacaatgtccccatcacacatgtgccgttccaccttatagccggtctgcaggtgaaggtcactgggcttggggtggaaacgcaagtcaatgcgatcaccattgtctcggatgatgtacttggcgcctgggtactggctgttccccctgcgcactagttcttgaagtctgtcaatgtaggggtgacg

SEQ ID NO: 376945 - DNA, 361 bp, Homo Sapiens
tctagacagtgatcagtatctaggcagtagtggtatttctgaaagaataaagaaatctgatgataactttcggattgaggaaggcatgaatggggaggtggtagatgagaagcctcactttatcttgaagagaataccgtccatccagatacttcattctttaggcttaaatatgggtaaaatgtttcttttgttatataccagtatatccctgggccggacacatagtagcttctcagtacacattgactgaatgatgactgtatatttcacctaacacttggcggcttctgccttatgtcaggtgatgctaaaatcacagcaatgtttttgaaggcattccctgtaactctgagttcag

SEQ ID NO: 376946 - DNA, 220 bp, Homo Sapiens
gcacccaggcgcacttctcaggccactaggagcaggacaaataggtcctctgtcaagacccctgaaacagttgtccccacagcccctgagctccagccttccacctccacagaccagcctgtcacccctgagcccacatctcaggctactaggggaagaaaaaatagatcctctgtcaagacacctgaaacagttgtccccacagcccctgagctacagg

SEQ ID NO: 376947 - DNA, 638 bp, Homo Sapiens
cagaggcttcactgcctgagtagatagtgaggggagatgatggtgtctgagaagacaacttcgcaaatgttgaaactgctaatgttgtatcagtgtaatatgggggattggatccttccatcacatcaggcacctctgtaacactctgatccataaggtgggtagtagcaatacttagatagggagtatggtctactaatgcctcctcagctcctgaagagaacttctggctgaaaagaaggaccagcatgttttttgtcttcatactcctcctgagtcctttcaaattggcccaatgttggtattatttcactttggtctgcaatagcttgaccatcagacaaagtgcttgattcaaacatgtcatccagggcttttgcttcagcttttattccttcaatctctggaataactgtggcagacttacgaggaattggcagggatgttgccgtgggaagtaaaacgtctaattctgtttctgtgctaggagcagggatcccagttgtgaagtgaaagcccatgtgatctagttggcttctatcttcataagtcattgattcatcatgtgttgcctgagtgtagctagccagaacatcagcagagccctcaaatgtttcctcagttaaagaaaggttgac

SEQ ID NO: 376948 - DNA, 309 bp, Homo Sapiens
  misc_feature (260)..(260): n is a, c, g, or t
  misc_feature (286)..(286): n is a, c, g, or t
  misc_feature (299)..(299): n is a, c, g, or t
agattcaccggcaggacctatcatatgagacttcttaaaggattaaaatgaatagtgatagtctcataattgtgagtaaacatcaaggcattatattttacaatactgaataaaatttcatctacacacatgttgccattgtttcatttaaggttcagtgcttatagttaactacaatattggacctaacaggatctagattagcaatataaagaagcatagtggtactctgtttcacactttcagtagatttattagangtcaaattctattcaacagacacttnttaggatatacanctaatttaag

SEQ ID NO: 376949 - DNA, 413 bp, Homo Sapiens
  misc_feature (372)..(372): n is a, c, g, or t
aatcggcctccattagagaactcagttctcaaaaccaagtcatgatctgccttaaaattgaccgaagagccactgatgatggctcaacaagctcattctcagaaatcctacgaagaggaactgttatggtactaacataggttcgaatacctgaccgctctaaacgagaaatggttcggcgaaagcccccactattgctttcaatagtgactgtattttctgctagccctactctggatcgagttctatttgcaatactatcccgatctctattttcctcccaggacggatccttctcacttgaaggtccagtgtgattgttggatgtcgtcgtacagcagttgaggatctgctggattcttctccttcttnctactgttattcttgacacaagccttgaattagagaatggg

SEQ ID NO: 376950 - DNA, 612 bp, Homo Sapiens
  misc_feature (574)..(574): n is a, c, g, or t
  misc_feature (598)..(598): n is a, c, g, or t
gcatcgggcgatatatactcattttatcattataaatgtgcttagttcatcatgtagcatcacttgtctcccgtctcattttttccttgcatgtcacaagtctcagatcatttataatacattaacagtaaataatatctatgtaaatttctttcaccatgctgtctcagagtcagcagtgaacaaaggcaaagattggggccccacttagtttgaaaaagggaaaggaagtgatctaggatgtgtactagaagcatttcaaatgttgggtctttaaaatgttttgttcagtcttagcaaatcttcgatcttttatttcaaaattccagtagtccactgtggagcccatgcatttcatctggaatttaatgttactttgaagccaaaccatttaaacaattatgtgtgttttattagctagtgttgctgaaaatgcacttagttcaattttaattgtaaatggggaattttaaacttttcctagttagcatggttatatgttagttaaaactgaaagctaaatttgaaggtattacattttaatttatgggtgacagttagggtttgtatgccnttatgtgtaaatcagcttcaggcngttttaaaatttat

SEQ ID NO: 376951 - DNA, 327 bp, Homo Sapiens
tggcgcttgagaattataactctaggatgttgcatataccaatacttggctacactcatgttgtgtgaaatagagggatgatatcatttgtctcacctctttctgtgcatagaatttatgtagcacatgtgggcttcctcaagagaaatttaaaaccccaaattgatgggatggtgagacctaccacctctctcaagcatgtgtctctccaagtgacacacataagacactatttaaagcatgtactttggatgtgtgagccactgctcctggccttgcagtttttatagtataagttgtctcagtccgttttgtattgctgtaaag

SEQ ID NO: 376952 - DNA, 681 bp, Homo Sapiens
  misc_feature (345)..(359): n is a, c, g, or t
  misc_feature (600)..(600): n is a, c, g, or t
  misc_feature (608)..(608): n is a, c, g, or t
  misc_feature (623)..(623): n is a, c, g, or t
  misc_feature (631)..(631): n is a, c, g, or t
  misc_feature (655)..(655): n is a, c, g, or t
aatatactagaaagtataattataggttaaataaaaaagaaaatagagaaagcagaatttgggggaatagcacatgaagccatttaagaaaaggtcaggaaatatatcctaaagtatattacattattctcccacagtgattttctggaaatattgcaaaatacattaatttgtaagaaaactaatattaaagtactggtaaactagagatgctgatcaaatttggtgaaattattaattctaccctgatgaagcagatgatcataaaaaagtgatgtgactgatctttgtgctatggataaaagaagttttcctaaataccatatattggtagagtataggtgnnnnnnnnnnnnnnntttgggcaccctcactgaatttctactgagaattccatcaactgctgtctgctgacttgcgactggatggcttcaactcaggtgctcatgtgttacatggctgttttgtgagcacaaaacagagcaacatcaattccagggcatcctgactattggttcctccagctcacctcatcaggacccaggaagagaaatgggaggaagcgtaatgcagaggcagaccctgctcaggttgggcatngttgaagnccacacgtctcctcntgttgggnttgagacgctgcagaggttctganctgtgcttacagtctcgcatgtcaca

SEQ ID NO: 376953 - DNA, 258 bp, Homo Sapiens
tagatcgagctcggtacctattcctacttgatagagcagtgttgctaactagagcatacattgtgtagaaaaccctcctgactaccttttatggagctgaataaatatgtatacttgagtgctctcatgttagtcataacctttagtttagcactgttatatagaagtgacagtcacgtagcccactacacattatactagtttgaatttaaacaaagcaaaacaactttataattttaaggggaagaggaatggttc

SEQ ID NO: 376954 - DNA, 277 bp, Homo Sapiens
ctcagtggcaccagtttcaggatagggtgtctcctgtcctgtggggtccctgagtttgagataatgctgaacatactgcaggctgtagcaataacatgtgaagtcaggcagtcactttaaaacctaagcaatctacatccagtattagccagttgttgttatctcagtaacatttcttaccgaagtagtttttccacacaacttacaacataaaggacaaagaaaaaatattgctggaatatgatagactttttaaagttcagtgttgaaactcctt

SEQ ID NO: 376955 - DNA, 595 bp, Homo Sapiens
taatgaattctactggtgactgtaaatatatacttcctagcctatatgaattcacacatggagttttctaaaagcagggcgtagtggaattgaatcttctaagaaaaatagcaggcactttgagatgacaggaactggttttcttcctcttgtttttctcagtctgtgttgtaggtgctgtaattaaaaaccaggctttggaacaggtctccactggagtggtcttgagtagacttacaaatggctgcaatgcttccaatggcagttgatctgtgtgagccaggagtggggtagaaatctggggactggaatttcagtctgagttcaggattgctcatctgcaactggcaacaatggcctcttcctcttttccctgcacagaaagtggtctgtgaaattaaagtcgagaacagctgctaggagctcatgctggggacccacagtggaggccacattttgtgatcccagaggaattcccaaacccaactgacagctgctccaggccttctctgttctcctgatccctgccctgatggaggctagaccatctgacagagtgcttaactcccacttgaatactttcacgccacatcct

SEQ ID NO: 376956 - DNA, 214 bp, Homo Sapiens
gaaaatggcttcctagtcccctgcatctctggaatgacacctctcaagcctcataaacatgcaccccgtgtacttgtaccttgtggcggcacgccccttacagcaataccctcttgtccatcaatacagtagtctagccccaccctaaatgaggaccatgctggcccttacacaccagggtgggaatgtgcccctgcacactcacactcagagg

SEQ ID NO: 376957 - DNA, 280 bp, Homo Sapiens
gagctcggtacctctacaggcagcctggagctgtctggtttgctggaagcagtggctttgggaggttggggatggaggtggcccctcatttcagggcccttcatacttcagccaccaggagttaggaatgagacagtaatgatgccaagagggaaactcagaggaaaagcccaactgcccagaagtccagttccctcaggacacctcctcctcctgctgctggtctctcttggaggctctggaagttgcctaggtccctgctgactcaccttgcccccta

SEQ ID NO: 376958 - DNA, 240 bp, Homo Sapiens
tcagctcggcccgtatacgtgtggaagaagtgactgtatgccagttccaagcctaggtttcaagaggccttataaatgtctgttggaaccttacccagccatgaacatgttgagtgagcatgctggagaatgagagaccacatgaagcagaaacatgctttcctagctgaagtcatactagcccaacctacatggcagctaacacatgaatgaggacctcgaccattactgaaggatcca

SEQ ID NO: 376959 - DNA, 405 bp, Homo Sapiens
tacctggagttcgcggagtgtctccactacgcgggcaggcgactacaaggccaacgagtggctgatgaaaaacatggaccctctgaatgacaacgtcgcagccttgctccaccagagcacagaccggctgacggcagagatctggaaagacgtggagggcatcgtggggctggaacaggtgagcagcctgggcgacggcccaccaggtggccgcccccgtcggggtatgttccggacagtgggacagctctacaaggagtccctgagccgcctcatggccacactcagcaacaccaaccccagttttgtccgctgcattgtccccaaccacgagaagagggccgggaagctggagccgcggctggtgctggaccagcttcgctgcaacggggtcctggagggcat

SEQ ID NO: 376960 - DNA, 153 bp, Homo Sapiens
aaggggaaggggtgaggtaggttctcccacaggcctgttcagtgattatcaggacaacccctcggtaggggcagaattgagggtagcaggtagggtcctgaacatcctggaaatataaatccctccagaaaatttcctccctttcatcgatcg

SEQ ID NO: 376961 - DNA, 240 bp, Homo Sapiens
cgatgaaaggagattacatgcttgtacacaagcaatgaccatggagtgctagaacctagagcacccacataggaacatgggtgggcccgacatcttcaggacctgagggctggaatggagacagataggaagggaaatttagataagggaatagcatgaggaagagcatggcaggcatttgtggggaacacagttgcccaggatactgaagagaatgagagacatgaagttccccttcat

SEQ ID NO: 376962 - DNA, 165 bp, Homo Sapiens
gtttttcatcagatacactatgatgtgtctaggtggagtttgctttcatctgccttgaatttatactgtttcttgaatctgaggcttgggtcctttgtcactattggagtattcttagccatatgccattttttcttctgccctattctcatttcctttcatcga

SEQ ID NO: 376963 - DNA, 177 bp, Homo Sapiens
ctgaataaattaggcctcaggcctctaccaccagagagctggagaatgggtccacgtcattcaaggacctgaattttttatgctcaggagcgttggaatcctcttcttccagggaggaattagcctgcaaggttaggacttgaagagggaaggtatttaataactggcaggatcggg

SEQ ID NO: 376964 - DNA, 373 bp, Homo Sapiens
cacgtcttgcttcgattatatatgcgaggaggtctatataataattcaagattcctgtttatgcacttttcagacaaagagctagggatcaaatagggtttcaatccttctattcatagataaaaatctgtgatggggatcaagatacccctttaaaagtcatgttaagatatacactattctttgggtaagcagaagaccttaacaaggaaagtagaaaaattaaaatgattgctgtaattctgatttttagtggtcctctagaataaaataagttttagaagtaggtatcttaaaatagtccagtagtcatcaacccaggtcaatataatataccaatatcctccaccacccaaatactggtattttacac

SEQ ID NO: 376965 - DNA, 452 bp, Homo Sapiens
  misc_feature (261)..(291): n is a, c, g, or t
tgatgagtcccagtatcaaaatccccatgctcaccattcaggccttaagtaaaaaggtagagctgcatctttgcaaataactcagtagaaaggaattctgccaagaagctactaaagaagtagcaaggctcactgttcctgtagttgtagtagaagttagacatataaatttagataataatcctacaagggattttttaaaattataatttcttttttcctcaatatacacgacagagtccacttcatcccacatctacnnnnnnnnnnnnnnnnnnnnnnnnnnnnnnngatagtgacagaacaagcccaaagaagctggcatagaatctgtgctgagaaaagttctcccccagtataacctaaatccacacccatctctgacaaagcattccaggctgaacaccactttcatgttgtcataagtctttaaaagcggcaccacggggggc

SEQ ID NO: 376966 - DNA, 633 bp, Homo Sapiens
tgaaacggagcgggcgatgctgatcgaggcggggagtccattccgagagcccctgatcaagttcctgactcgacattcctcgcagacagtggagctgttcatgatggaagccacactgaacgatccccagtggagcagaatgtttatgagttttttaaaacacaaagacgccagacctctgcgggatgtgctggctgccaaccccaacaggttcatcaccctgctgctgccggggggtgcccagacggctgtgcgccccggttcgcccagcaccagcaccatgcgcctggacctccagttccaggccatcaagatcataagcattatagtgaaaaacgatgactcctggctggccagccagcactctctggtgagccagttgcgacgtgtgtgggtgagtgagaacttccaagagaggcaccgcaaggagaacatggcagccaccaactggaaggagcccaagctgctggcctactgcctgctgaactactgcaaaaggaattacggagatatagaattgctgttccagctgctccgagcctttactggtcgttttctctgcaacatgacattcttaaaagagtatatggaggaaaattccccaaaaattacagcatcgcaaagaatcatgcc

SEQ ID NO: 376967 - DNA, 284 bp, Homo Sapiens
ggtaccggctcgattctttgcacgattctttgccatgagtttgcagattagacagaagtagtaaggacgatagtgaagttcttgaaagtgagaagagagaacatgttcctttgaaattaaaactcagtttttcctgatttttcacgttagctaaaacgtgccaggaaacgggcttttcctgatttctttttttccctagtacaataacataatgactaaatttggaaaagtactttgcagttttcaaagcactttgttattcacagtaactgcaaagaatcgtg

SEQ ID NO: 376968 - DNA, 282 bp, Homo Sapiens
ggtccggctgattctttgcagactccgctgcagggaaggccagtttgatccggcacactcgaacaggtcatcagggagaaaatggccctctgtatttttaatgtctgatgagaaaagacctccatgcggcatgtgtgcgcccacacatatgtgcaaatggcacttagcatgtgccatgctgctggatgctggcgtgggacattgcagttcatgtaactatagctcaacccaccttatttaaataaacttttgggggaataattttagatttacagaaaagtt

SEQ ID NO: 376969 - DNA, 404 bp, Homo Sapiens
ggtagattctttgctccagatgccacaaaaatacatcaaacatggtcctagtggaaccctccagtttagtttggagcatgacagcatgtgctggtaatgtatgagtgacagtgacaggtactccagggagggatcaatagggctaactttacggaaagattgaaagctaagctttcaatttactttgaagtaggtaaagaattctgatggagctagggaagagggaagcatactaaggatgaagtgctgagggcattaggacgttgagagagggacagggtttctgccaggagagcagcaggcaataaagctggtagaggggcttgcgaaggctgctaaggctcttatttgtcctgccaagaatgcagactctgtcctctaggcaatgcaaagaatcatgccgg

SEQ ID NO: 376970 - DNA, 596 bp, Homo Sapiens
ggcggcccggcatatctttgcaggcaaagtgggactgacccgcatcttctgcgcagctcctgggtgactactgaagctgatgtctacttagtagaggtctgggagattgtatggggcctggctgggacttctggtcagcgagcagacctttgaagaattggcttcttcaaacctgtggcccattcccaacagtgaggctgctgggagctggctacgtgctgtgggtccaggcagttcaagaggccttcctagaatatatgagaactctgcaaattttccttcagcctggggagcggtgagaaaggatgaagtgtaacagggccctgaaacctcatcccaactcgctattaagcaagggtgctcttttctaatctaatagagtaaaactgagaaaggggtcttctctacttcccaattccagggccttcctgcattcgctggtgatgatggagtagggtgaccttaggaggtgtgacttgggccctacaggctgtctgggaaagtcagagcttccctccatactcctcccagaacactgagtgggtggctgtgttgtgagagtcccttgagagcccagaggcagaaacgaactctta

SEQ ID NO: 376971 - DNA, 238 bp, Homo Sapiens
aaacaaaagagtgaaatattaagagtttggaacgatcctatgcatagcaacacattaaagaggacttttaagaatagattctctatttcatttagagtaaataaacattctttcaactagtcatgattcacattgataggattaaaacatcctatacataatacccttgaaattaaaacaatcaacagaattaaacaacaatgcagaaaaggcaagacagcaaagatcgtgccggtcc

SEQ ID NO: 376972 - DNA, 472 bp, Homo Sapiens
gggaagtagcaacacaaaccatccagccagcaattaaatctacagttccctcaacaacaaagctaactttagccatatgggctcatcctgtatttccccaggacccaggagtctttggaagtttcttgaagtgggcttcccaccttagcttttgctttctgtccagaataatacagtggttaatatctgaagggtttcccccaggagctccagttcttttagtggtagtaacatcaagtagtctccagacattgcagctgggtggttgaaatgcttgctctgggaggggtggccagtcagctggggtcacaaaagccttgtaattagaatcagtgtgactaatttccaggtagaatgagaggctcttgcaaactgcttttgtagaaattatactcactggtgtccaacctgccctgaatcactctatactcacaacagaaacagctggtgtcagagaactctacaaatatgg

SEQ ID NO: 376973 - DNA, 213 bp, Homo Sapiens
cgattctttgctcctcaggcacctctttgcactctagatcttttctgatcatatgtgtctggatagcacatcaagtttcagacctggctatcagcacattagccagcaagaataaaagtttagatctgacaatcccaaaacacaatctgcacataaaataattcacatatatcatgaagaagataacttactgcaagatcgagccggtccgct

SEQ ID NO: 376974 - DNA, 583 bp, Homo Sapiens
tctctgataaaagctaaacattatttccacggtaaagttattcctgcttttctccggtgtaggacagagtgaagcttacagctctccctttcctttcaagagaacacatgaatgtacattgtctagtttctcacgtgtggattactcttggaattccacatttccttccatgtgaacatacttgacatacttctgccctagcatattcccagaagttcctaattactgcaattaactgggatgctttcctaagcaactgcagcactatcaggaacatgtgagcccactgtctatgaaacagtactgaaaaaccaaaaggaagtgctctgcaaagaatccatgcctctgcccttggccgtctttctttgggaaaataacaatgccctccaaagtcccgacgggcgtccttctatcttcttctcatttgcagttgcctgctgatagaattccacctaacagtacctacctttgattagaatatttagtttgatactcaggttgcatttcaattcctcaattttctcttgtgccttggacagtcagcaagctttcaccttactggctcaccaaagacgacttgatc

SEQ ID NO: 376975 - DNA, 655 bp, Homo Sapiens
cattacagggtgagtacgtagcagatgagtgcttgtgagcctttcctctgggattcacacagatggctcactcctaactttggtgagtcattcagtggccagatgtttgcctctttcctcctccccactctacccccacaattcagtgtactgttctttgaatgacatcccctcttgtttttgcctctctttctcctgatgcaatggccaaaatgctggaaatggctgccttaaatgtaagggaccattaggatctcgctcaacacagaacccaggccacctgtaataacacagctggctcccagtcctgaaaccctgcctttctgccctgaatggggtgcagagaaccagtccagacacctgaaactgccacccttcttcatctgtaggtgcagggcgcctctggtaatcaggaagagaagcctctctgaaatccactggtcattctggggcttttcctggaacagctctccttacctaaccccttctctaacctggtcagtttcactcattcattggacatttataagcactaagtatggtaccaggcatcatgctgggccttgggtgggaccaacaaataaagagactgctaaatgcagaaaaataggcacagagtaaagacttgtaagtctgtaaaggagtgctcagtgag

SEQ ID NO: 376976 - DNA, 422 bp, Homo Sapiens
  misc_feature (47)..(93): n is a, c, g, or t
tctttcagtttatttgaaagaggtctggtttaaaatttgtagcctannnnnnnnnnnnnnnnnnnnnnnnnnnnnnnnnnnnnnnnnnnnnnnaagggtgagccaggtctagcccaacagtctaaactatccagtcaataccgagtgaagtggcagccagcactgttcactctgtgtcttttgaagtgccttgaaggcccagatgaaattttaaagggagggggtccatgtccttccctcccccaccccgcctcattctttaatcaaaggatgtcttctcccttgtttgagaatgaagaaactcgccacctctgacctacctttgcctttttctgtcgtggagaatactcacccttcagaaacagaccaaaggccaaaacctgctgatttttctattgaaaatatgtccccttgcaaagaac

SEQ ID NO: 376977 - DNA, 255 bp, Homo Sapiens
agaaacggcctgcgcgttccaggcgtctgacctaagataccgagagctgcgggtgcagcaccctagccagacagggcgaccctgccctgggcgactagcttggaaggagggaaagacactactctacatctgcagcgacagggaacaagtctaggtgccacccggttccgtgttgcttagtacagcagcggggactggatgttctgtgctagccagcggcagcaaggagagaagtgtcaggcaaagatccgtgcc

SEQ ID NO: 376978 - DNA, 443 bp, Homo Sapiens
tccacctttctcccgaagggggcgctgggagtagggaagcttccctatctagtgtgctccatgtcaacagtacccctatgtggaactcctatgtgtgcatgcgtgtcacttgtaactgtggatctcacagcttttgttgtgaaccatcctggttgggaaaggcttcattactttacgtgagcctagtacccttttcgtctctcccttttctctgctactcatcttctgcacccaccccatcgaccacgaaccagttgacatccgctgtaataatccctaatgaatcagcatttagaagagtcaccaaatcacaagcatgagaaaagcttccactcccaagctccccatctcaggcgtctcctccctctccacctttatacagacacaatctgttcttaaaaatcataaaatgccatcagtgtctacaatcgcaacagcacgtg

SEQ ID NO: 376979 - DNA, 197 bp, Homo Sapiens
gtacagctatagtagagatttgttcaatatttgtaggtaaagatttattgaaaatggtgatatagacctcagagctgttatcttagtttaaagattgtatatgtactgtactatagtaggactttatgtatctcatacgctgtgatgtggatggggccccagatggaaggtttgaaactggattctcgatttttagc

SEQ ID NO: 376980 - DNA, 380 bp, Homo Sapiens
tcacgattctttgcagtttaggtttcctaaataaatgaggagtagcatagtttaaaatatatatatctgtataactttctacaagcaaagaattattgagtccaaatgtcatcagtgctcattttgagataccctgctatcgatggtcgctacaagaccaggaaatactcaagttattatgtgtatacattggttttagttttatgaaacaatttaccttcatgatctcatagttaaaattgtaataaatttaggaatataaaggatcaatatgggaagcaaaatttctaaaggcagtttctgttgttttaattagtatttgtgtagttcaaaccaggaaggatttgactatcattagattttgcttaactttatgaaag

SEQ ID NO: 376981 - DNA, 389 bp, Homo Sapiens
  misc_feature (243)..(284): n is a, c, g, or t
  misc_feature (308)..(318): n is a, c, g, or t
gaaaaagtaaagagataataacaaaaactagagttgagtaggaaggacgtattgaaaaatggaggaatctgataacaagtagtatcaagtcagatttgtaagagtctgagaagaaataagtagagaaaacagaaaatggtgtgaggtttacagtgttaaccacaaagtgaaagcaggcaagaacgtggtgggtacctggctgggtaaaggtcactggcaaagctttggtgtccatagtgactnnnnnnnnnnnnnnnnnnnnnnnnnnnnnnnnnnnnnnnnnnggtccgataatctaccttaggctnnnnnnnnnnnggccaaatttcagcctgaaagggcccacagtatgcccaataaagagaaaatgctgacatctattaatacat

SEQ ID NO: 376982 - DNA, 667 bp, Homo Sapiens
tagctgggattacagacacgcaccacgacgcccggctatctgctgggattttgtggaaagaagctgcagcagccaaagcttgggagagacaaggggcagggcatgcttgcaaggggttaaccatgacaggttacaattacgacaagaagctctttaggcagtgaggctccagagagagcttctgtgggttgatagtcaagcattccccaggtagagcacggagaaaggaggctcaggacaatggtcctgggaccttgtttccatccacgactcgaggcatctaagacttgctagggactacacacactctagagaaacagtaggggagagtggcctatgaccagccccaacctatgctcaggttgtcctttcccggatctcagagaaggtgtactacatgtttgtattgccccttatagtttacaaagcaccttcccaaaacattataccctgtcactcaaggtcaacatgatcactgttgaggtttattcctgcccatatccaggtatctggtgcagtcaccttgctatccccttgcctagatctttcatctcactataggcaacttccctcagcatattaacacacaggtttctaccatggttaattttaaaattaaaaaagcccttgaatctcaaacctccttaaataactgtcttctctttta

SEQ ID NO: 376983 - DNA, 466 bp, Homo Sapiens
cgcccaacttgatgaagagggcaaaatgagctgcgcaggcttgtgctccggttccctaatggtgacagcagcaaccagccatgatgggcatgggtggacaatccccaggcctcaggtggcgtgttctgcttggtaaagagacagtagcagctgcactgaggacttgcctgggtggtcatagtctgggccaatgggtgagaaacatgcaacccccactcataccccagtcttagtggggctggcccctccagcagtgaaagcctatgcctagcttacaccttcttggtcgtaagagcaagtcccaaaggcaactcacaccctgttcatatcctaatccccatcctggggttgcccacttcctggcagcagcacctgcagtgcacaccttgctcacttcctacgccaggtgagaaggcactaccagctcactcgcaagtcgcgtggtagtttatcctcaagagtcagg

SEQ ID NO: 376984 - DNA, 531 bp, Homo Sapiens
  misc_feature (68)..(68): n is a, c, g, or t
cagtgctgctatgtgaggctctgtaagcattccttagtagctctgtgatgggttaatctccctcctcncactccgagtcagggtgtcactccctttcccctgtgattctacccacaacgtctgacctagtgccaggggcacggagtctcttttaactgccatggtagttggcatcaggttgtaattcagcattagggtactctgactgcgaaattgttgttcccgggtctttcaattatttctgttattcaattataaagatagtggggaacatggagataatctcattccagcttatagttttgcagttgaagaaactaaagccctgaatggaaaatgactgagatcaccgagttgatagtcaccagcagagcaccgtccccactgtggaacagtgaccaccatgggtgaaattgctctgattttgggctgtaatttatctgaaccagtaagttggacagccttggcaacactataaagtagagggtcgctctcctgtacctctttccaagttggggcgagctcgatgcg

SEQ ID NO: 376985 - DNA, 344 bp, Homo Sapiens
tggaccactgtatttatcagatcaggagagaatcactggcctgctgtataaaacatgaacttggtgttggatgtagttaaagtcagttagtttgtactatcattacatgctctgaaggagggagagtttgaaggcacagccctctcacccagttgggactctcagtgacttcacaaagagatggcactagaactgaatctgacagtacagaaacatgtcactggcaagagggggaggacatttctagaataggaaattatagttaagtcaaggtatgctgaggtaacagagatgatggaatatagggcttatgttgaatgtttctttcatcctaaggttgcttc

SEQ ID NO: 376986 - DNA, 213 bp, Homo Sapiens
gtgttcttaataggctttattattacttaggtatggtaaaggctgacagagcaggaaatgactgtcattcaaaagacagtttattatactcacagtttccaagagagggagtacacttcacactattggggagtcacctggggaatcactcgacgggtaaggaaacgaagccagtgggcaagagaaagaggaactgtgggcctagccttatta

SEQ ID NO: 376987 - DNA, 166 bp, Homo Sapiens
accttggaagaagaattagaaaacaaatagaagaaaagctattgtttcatgaatagtccctgtttgcctcatacctgcacatttcagagtgaagacctgcacattcaagctctggtaaattacttgctactgccacctctggcaaatatagggtcctgctaagtca

SEQ ID NO: 376988 - DNA, 898 bp, Homo Sapiens
cccaacaagatagaagagtttcagtctaggcttaatggcaaccattggacaaagatgctttcttccacctaacaggccattaacatcttaaaggtatttttgtatctctaattttgtttataataggtgctcaacagaatgagctgaatggctgttacaaagggggtttgtaccttgggtaagagattaaaatataactcaaaatttccttctaacgctgcacctatggaaccatgtgatagaggtgtattaaaattgttatcgaagaatatatagcatatggtaaacaacagtttgcatatggaaaatgtctttgataatttaaccagaactgcattatattcaataacggattttctttataacaaacaacaggagaaaatggagttggcacacagtggatcactttgatatttttaatagtccaagtctggattttatttattcctgagcccaacaattttgaacagcatattttcccatgtttctgactgtaacaaaacattttcctcattgttccattgtaaatattcctcttgttggaactctttttaatcctgagatttaaacctgtacctttcaattgtctgtgacctttcaatttcactttcaatagttgaagaacttggctttgtaaatctctcagaagcttgaaaatatcttgtctctaccccctcagcccatttcatttgccaataattattttgtaagtagggttgaaatgaactcagctggccttgtgaaatgtttaaacttgcacaaacaactacatttttgttcaacaaatagcagtttactcagccaaaatcactttggatattgccattacaaatactgttaaacttcagaaatcatgtctgtaaattagatgagccgaaaataaaggacaattgggttg

SEQ ID NO: 376989 - DNA, 242 bp, Homo Sapiens
ctctctccacactggctccaaggactgaaccacaacccaggctgcaaaggtcattttgtgagaacccataaagtcctcacccagcatcccccagtgcttatgctttttctcccgtggtttcagatttctacagctcccttccacctcagctcttagacccttccaattgggcatggaactctaccttcactgagagtcccaccaagtgacttccaaatgcaagatacccagtgtggagagag

SEQ ID NO: 376990 - DNA, 165 bp, Homo Sapiens
ctctctccaactgtaaaaagtagccatggctacctacaataatttaaaataaaaattgcaatctatgcaaactaaatctcatcctagagtcacaagatttgagaaataggaaagaaacctgaactaaaataccaagtatacaagatttcctccagtgtggagaga

SEQ ID NO: 376991 - DNA, 247 bp, Homo Sapiens
aggtttcattcttgatgtaataaaggattcctttgataaaccagcaactaatatactccaaggaaattttttagatgtattcactcttttcttgggaaaacagcctaataccttctatcaccaatgttatttaagatcaatacaggaagaaggaaattatggaaaattatgacagggagaccttgcagtttccagtgtggagagatctctccacactggtaatacagttaataataactgctctaat

SEQ ID NO: 376992 - DNA, 244 bp, Homo Sapiens
tctctccacactggcaaacatctaaataggttattcttctagaattctctccatttgccctaggattatcttcctttttctcctcctaccacaccccaccccccaaaaatagattgtgttggtctgaaacatttatggctgtaataaatattaatataattgaactatcatagaaaaataagaatacctaatgtaagctgagaagcagacattattactcttttcacttcccagtgtggagaga

SEQ ID NO: 376993 - DNA, 383 bp, Homo Sapiens
ctctctccacactgggatcccaacagaaaaatgggaaaggatatgaaaaaaggaaatccaaatgaactacagacatattagaagaaactcaatctcactatccaaggaaatgcaaattaaaacaacagagatactacctgacagaagtttaatgtctgacgacaccacatattagtaaggatttgaaaacaggaatcaagccacttcagaaagcaatttggaaatatcttgtcaagctgatataaagtaacaaccacctacaggtacagtcatgaaccaggaaagtgcaatccaaatgaaaaaattcatgctttgcaaaagccaaaaatgaggccactggtgttttcagaataacaccggtgctttgatgccagtgtgggaga

SEQ ID NO: 376994 - DNA, 137 bp, Homo Sapiens
ctctctccacactggggctgacagggactgctttcttgtcacctgttctcttcctactcagcctgtttcaaggcacaaggaatagaactctcaactctttccaaccagtgtgagagaggggatcctctaagtcaccc

SEQ ID NO: 376995 - DNA, 248 bp, Homo Sapiens
ctctctccacactggcctgagcctgtgttctgaccacaaaagtccactcactgctgcccaatcagctcccgggttctccccaactcagggctttggctccaacttctctttctgcattgactgttctgctctcataccgtctcctagcagcctgctggaggagcttcgggaagataggaggtgcattctgtggggtctctctgaaaagggtctggagagtggagtgggcccaaaggaagggagaatgt

SEQ ID NO: 376996 - DNA, 584 bp, Homo Sapiens
ctctctccacactggcactggacactacaggcattctttttttctcctgctcccattcgaccgattcggataatgtgcacggtgatataaatgtcctttcttagctcactgctgcccaaatccacaaagagggagcaatgtcgttccggtttatcaggggctttgggaagcccgtttctattcagcctcaagaaaaatctctcactgattggccggttctctttactgtcaaagagtgagaagatgacctccagctcctctcccaggttggaacacatgaggctcttcatctggacaaagaggtggtgactgctggcctgcaccggggtgtctttcttccgatgtcgatgttccatcaatcggtagagctcagtaatgctgatgtcttccggatccaccattgcgtactctttcctaggcaccaggtccagtcccagttgttcattgccccagtcaagccgggcagtaatgtggcgcttcacgtccttaatccggtcgtgggtgaggtggcccaccagcaacctgccgcctcaggtccaggatttcattcatgatgtgccacagccggtggaagagtcagacga

SEQ ID NO: 376997 - DNA, 168 bp, Homo Sapiens
ctagaggatccccgtctctccacactggatttcaaaatatgaatttttgtgggacacaagccttcagtccatagcattttttcattgcccacaccccaaatttatgttctcacatgccaaaggatttccttcaatctttacagccctgacgtgccagtgtggagagag

SEQ ID NO: 376998 - DNA, 175 bp, Homo Sapiens
acctagaggacccctctctccacactggataattcaataggtactttaagaattagattatctaatataaaactttagaaagattatgactgtaacaaacaactcaaagttttaaagaaatctcagagaaacagttattaaatgcagcttcgttgagatcatactttccagtgga

SEQ ID NO: 376999 - DNA, 518 bp, Homo Sapiens
acggggcagttacagagcacggcgtatataagtcgtcattgacttctcaatcatcatatatgtaatcattaataacaaaactagaatatctattacatattgagtatttgttaggaatgtgctgtgtgcttcacttatattaatttatttaatgttagaaaccacctcacgagatggtgaattcccattactctatttactccattagttgttacacagatgaggaaccgaggctccaggaaccaggtgaccagcacaaggtcagcactcagggaccgacgcagctggtatttgaacagagaccttcctgactccagagctcaaatgcccaatgcaatcccaaggctctggcagggactcttcctgctctaggcagatacgagcagggatttaaagggagagggaaaagcttttcattttcttagcaaagttgatccgcaagaagattacctttcaagaaaaccaggacaagttcccttagaaacatgaaaccagtgtggagagaggggtaccgagct

SEQ ID NO: 377000 - DNA, 247 bp, Homo Sapiens
tccatataaagttcacagggacacaaacagaggaatattaggtctctctagaagatcagaaaggtttcatcaactgaacttgagatagccttaaaagatgagtgtttacctgacaaggaagagatgcaagcatccaggtgagcaatgaaaccccagagcgcattaaaggaactgcaagttcaggacctttcagggctggggagggaaggaaggccacaatgacactagaccagtgtggagagagggg

SEQ ID NO: 377001 - DNA, 748 bp, Homo Sapiens
  misc_feature (554)..(593): n is a, c, g, or t
tctctccacactggcacactggtaggaaggaggaggacgtctgtgggactgagccctcaaactgtgcgatctgacactctgtgggatctgacactgtctccaggtagatagtgttggaattgaactagaggatacccagctggtgtccactgcagaactgattgcttacttggtgtgtggggagaaacctccacacatttggtcaccagaaatcttctgtgttgattgttattgtggtgtgagagcagagaaaaaaacagtttgtgtgttgtttccactgacatactattaaaatgatatctaattatgttgttaatttttcttcagattttgcttcaaaatttacttggatcatttttcttttacttaataatatgctatttgttaaaaattaggtatataaataagctttgtctgtactacactgggggccctcaaggccaatatttactaattatagcaatgactcaagcacatttatataaacgaataccattctacaaagtaatcttcttaaaaatgaaagatacaggctggatgtggtggctcatacnnnnnnnnnnnnnnnnnnnnnnnnnnnnnnnnnnnnnnnntctttgagctcaggagttcaacaccagcctggacaacatgacataaccctatgtctaccaaaaaataccaccatgaactgagcatgctggctcatgcctataatcccgcactttgggaggccgaggcggcggatcctcgaggtcagaagttcaca

SEQ ID NO: 377002 - DNA, 623 bp, Homo Sapiens
  misc_feature (148)..(211): n is a, c, g, or t
tactcctgggagggatcctgacattcacctaggggagtcaggggctacaggccttgacaagcatgctaacaatttccagtgtgggtaacagaactgggtcctggtctcccaccttttaaacctcagatgctccagcctgtaatccctnnnnnnnnnnnnnnnnnnnnnnnnnnnnnnnnnnnnnnnnnnnnnnnnnnnnnnnnnnnnnnnngttgtggtcctcactttccccacctagggcctagagacaggagcagggctaagcccactggatttttaaatgtatagctgaacgtcacttgaatcagagcctcatcaatgtctagcactttttgctgttgtttctaccccttgagggagtgtatttaccctgccaccagtcctctgtattcaacagaatacaattcttgtatatgaagacaacacgggcttaccatgacaagcctagaagaggtcctaatgaacaggtgccctgctatctactcaggctacgaaagaaaagactagagattccttctatctgcagactcgattcatgggagatgctctgcacctggagctggtttcctagaatccaaaatacccgcccatcttgtttttaggttggccttaaaaaatttttg

SEQ ID NO: 377003 - DNA, 311 bp, Homo Sapiens
cactcaacggtgatcatatggtctctctggtatgggtcgagatgtgtcttcagtgaagagtgtccctgaaggctttcccacactggctgcattcaaagggcttttctccggtgtggattctccgatgtacaagcaggcttgaaatgtaactgaaagccttcccacaatcctcacatttgtaggctttctcttgtgtatggagtttctgatggaccataaaacttttgctcataataaaggttttcccacactctcgacattcatatggcttttccacattcagtgcattcatagggtttctcaccagtgtg

SEQ ID NO: 377004 - DNA, 401 bp, Homo Sapiens
  misc_feature (187)..(187): n is a, c, g, or t
  misc_feature (285)..(285): n is a, c, g, or t
  misc_feature (330)..(330): n is a, c, g, or t
ttcggcacagcgaccagagtctgagctcctctaccttgagtttcattagtccttagtgtctaggagacaggaaagaatgctctctgtgactggagaggtgacatgcaggtgcagtgtgtctggagtccctttcccctgctgtgagacttcagtggaggagagaagcattgtaccctgggatcatatngggttggttccaatcacaagcttagttatcaggttgcatgccttgtctcctgcaaaagacagaatgtttcacaattcccagggtaaactctggaccanttccaagtgtcctagccttctgactgacattaacttacctagttntgtcgaggagtataggatgggactctcctgagaagggggaggttgggtggctttgtcttttctttttgctg

SEQ ID NO: 377005 - DNA, 538 bp, Homo Sapiens
aaggatcccctccagcactggtctgaggacaaagaatgtgtaaagtcaaaagtgaaagaaaagttaaatatttagtgtataagaagtgtgaaactaaatggcaggaggtcgcacaggagctctaacatgaaactggggagtgaggttagtaggcagagtcctgcattcccttccctcttggtcaatcttattggcagttttacctatcacttccaatagcatttccagggtgggggaaaatcatacaccacacagtaagagtgatattctgtgttaccacgggaaaggaaaccactaagagggtgtcggtagaagaactaatgctgacctgttactagcttcttctgaggaatggtagaggtattttttttccttctattctatgcctacttggtaataaacaaatttcttgtaacatgagatctttaaactgaaaaatgggcagctagatagctgtacgaattttctaattaaaacattatcacatctctattcatcactaaaatcaaagagcaaaaaacaaaacttgtaagattcc

SEQ ID NO: 377006 - DNA, 291 bp, Homo Sapiens
ctctctccacactgactctcgccacactcgctttcctggagagtgctggcttccttcctaggcccttgttctgtgttgggaaagatggctgcagcagccacagtcagtgcccttatcagtcgggattgacaggtgagagaagccatttctctgcctctcctcaccttctgagtctcatggaaggcctctccttggccacatacaccttgtcctcaccacggtgggaagcaggaatgagtgctgtctctggccaggccacatttagcgcctactcttgtgaccccagtgtgg

SEQ ID NO: 377007 - DNA, 444 bp, Homo Sapiens
tctctccacactggggctgctcaggcgtggggggtggaggagaaaccacacaaggccagaggcatctctgggaactcctgagcataccttagaaccagcagcctcctcccggcacggggagcattgcggatccgtcacgtggagctcggttgagttcagcgccaggctgtctggcggtgactcgggcacgggacagatcctgactggctggagcattcaaaggtgttcattatggaatccctgtgggtttcctgtctctgtccttccggcttcagttctccatctccccagggaatcctccccatgtaacatcaggctgtgactcagcccccagcatctttctccctttctcttacacgctgggccggataatctttatactgagccttctgtgcgctccccttttgaaagccccaaatcctgcttaatctcagcagaaagcct

SEQ ID NO: 377008 - DNA, 328 bp, Homo Sapiens
ccgtctctccacacgagtaatcatggaatattcttagccatcagtgaccctggaattagcctgccatcctactgaaataaaaaatatacctacatggcactgattcctggtcaaggcatgaaatatacagatgaatagtgttgctttttaactatgggtctaaagaatttttttatacttgctcttagattccccaccagagggctctgctgtgttatagctttcagtgttcactagaaacgctttatttgttacaatgttttcatgtgcaataaaagccaatgtctgtgagggcgggatgctaaaattgttaccagtgtggagagag

SEQ ID NO: 377009 - DNA, 165 bp, Homo Sapiens
ctgggatcatcactacccctctgccatctcctgcgccacattttctaagccaccactagatacgttaaattgtataaattgtatacaaacactgtatcaagtataaagtatagatataatgaataatcctattttgcacagaaagaaaccagagtgtggagagag

SEQ ID NO: 377010 - DNA, 260 bp, Homo Sapiens
gctctactccagacgggtctccacacggctctctccacacggctgaattccactcttgtggcttggcattgactttcaggtctctgattatagccaatttagtatctgtgattctttctgtcattcctgtgcactggtatcattagttcttgagatagaaaatcgtttacctgatgagcttttagtatcttgaaatttccttcctctgttaaactttacccagttagttccttctttagtagctgaatttattataatcc

SEQ ID NO: 377011 - DNA, 511 bp, Homo Sapiens
gtaccagtaataaagtgagacaaaacaagggatccataatttgcctaggtacagtacatacaggatcactatgctacccgcaaaatatcaaacatctccatctctcagttaaaatgagtgactactgcttctttaccaattacggttttagatttgctctagtctggcctccgtatagataagatctattgagatacatacccatagaattgcctcataggacttcttgcagcactcaatctagagtgaatccctgtttacttagaccctcttccaaatcatgtaaaccaaatcccaaatcgtatagtgggttctttcttacattcttatggagacaccagtggttccctgtggtgtgagttctctcttgccatgagtaataggcccagctcattcaattgtaagagtagtacaatcagcttacaatttttcactttcaaaagtctgtgaatattgtttccaaagtcttctacatctcactttttcaagaggagggggcacagactaaaat

SEQ ID NO: 377012 - DNA, 362 bp, Homo Sapiens
  misc_feature (232)..(232): n is a, c, g, or t
  misc_feature (266)..(266): n is a, c, g, or t
  misc_feature (299)..(299): n is a, c, g, or t
tcgattgacttcttgagtgcaatttgaactgtaacatttgcttagtcacctttagtggagtaatctactgggcttgtttctatatttatataaagcagccaaatccttcatgtaatatggaagtccatttttgcaatgttgttccatacttggagtcattttgcatcccatagaggttagtcctgcatagccagtaatgtgctaagttcatccaaaagctggcggaccaaangtctaaatagggctcaggtatccccaatcgcttnatctctggcctcctttcctcctcccttcccagnctatcatccaaccttggagtattctacacaatgtgaattcaagtgcccgattaattgaggtgg

SEQ ID NO: 377013 - DNA, 380 bp, Homo Sapiens
actcctttcagttcatttcatatgcctggactttccaatgtttggggaaattttaaagaaatgaagacgtttttgtagctatataagactctattatttccagaagcctcataaattgaaaatgagaccatactgacattctttcttttgtttcttctcaaaaggattaacaaatagaaaaagagtatgtaataaaacagagagtgcagagctatggttgtcaaggcaactgtaataatcttgcccttgaactgtggtagagcatccactgcagttcaatctaacctcatgtttcctcagaatgcttatgtatgttcgaaatccttattatatagcaatatcattccaatcaatcaggtgatgataggaatgtagaacac

SEQ ID NO: 377014 - DNA, 137 bp, Homo Sapiens
aaataaacaacctagcatgtgtatttttctccagtcaccatgttttgactcctgagtctgtcactggcaatgcttaccagcagactagtcacaaaaaagaacagaaattggatttttgtacagtgttcagaactaga

SEQ ID NO: 377015 - DNA, 517 bp, Homo Sapiens
ctacaagagaacacagacaatcaaatgaaatgaggaaaactgcatgaacaaagtgagaatatcaataaagagatagaaactaattttaaaaaacccagaaattaaggagctgaagaacaaaataactgaattgaaaaattcaccagagggatttaacagaagacttgatcaaacagaggaatcagtgaacttgaagacagatcatttggaattatcaagttagaggaacaacagcaacaataaaataatgaagaaaagtgaaggaagcctaaggaactcatgggacatcatcaagtggaccaatatattcactatgaaagctcagaaggagaagagggaaacaaaggaaaatgggtaaaaagcttatttgaagaaacaatggcaaaaaagtccccaaatctgagggaaaaaatagacatccatattcatgatacttaaaggactatacataggataaatccaaagaaatctacgtgagaacacattaaaatcctactgtatatgtcaaagataaaga

SEQ ID NO: 377016 - DNA, 495 bp, Homo Sapiens
ctcggtacccggtcatttggcagtgatgatgtggctccgattgcagaattgagttggaggctgaagcatgtgagctctgatccttgccagttccgtaagtccacaaataacacatctatttagacagcttccagacaacagatagctgtgaaatataatctcctttatgatacagtagtgatcctaaatttaagtatgtcaagcattcataaccttctgactccttgcaaaattttatctcaagtgatttcaatatactgtgcatactttatcaggcaatccaaaggaaaacatctatctgtagtgaaagcataacactgacgtttgtcaaaggtcaaagattcagagatttaacttattaatctataagccgttagtatttttatactgtggtggtaaaaaatttgcaggatttttaaaaacatgttttagttcctaccaggagttcctaagtacattgtttttctagtaaaatccagttcgttccacattttt

SEQ ID NO: 377017 - DNA, 463 bp, Homo Sapiens
tggctactataatagagttccataaacctggtagcctataaacacagaaatttatttttcatagttctggaggctgtgagcccaaggtaagagtaacaacatggttgggttctggtgagggccctcttcaggtttcagacagccaacttctcattgcatccttacatggcagaaacaggactagggagctccttggggtctcttttataagggcagtaatcccatttatgagggctccaccctcatgacctaatgaccttccaaaagctccacctcctaataccatgacacgatgggttaggatttcaacatatgaattttgaggagacagaaacattccatctataaaagcatacaatgcccattcatgaattccacatctgtgaatctctgggctaaatataggataaatccagacaatggataaagtggttaaaatgatgaactccatcttctatgtttt

SEQ ID NO: 377018 - DNA, 208 bp, Homo Sapiens
cctccctataattcaaatcttcttagccattctcttcaagctccaaacctccaaagttcaccagttacttggattatactcatttcacttagaatgtttcagtctgttgggatgtacagttccttcaaaacttgataatccacagcaactaatgggacaaatggatgaatgggggaactgaaatgagcgggtctactctagagtcgcc

SEQ ID NO: 377019 - DNA, 531 bp, Homo Sapiens
tcgagctcggtgccctgcatattgagagcctagggcttctagctcctgctgaatgacagctaggcctcctggcataggaggcatgcatttttgagggcttggaagacaaagtagccttctcatgtaaagcttaattcgtttatcaatcaaggaccagataggattgtcctcctcttcaatgcttgaaaattgacctataagattagcttgaatctcagcatttaaagtgggtaaacctctttccatcagggtcttgttaacctcaacacaagtctgaataccaatagaattcaggacttccttcaagttaaaggtctctttgttcatgccttcaagtagaacagctgaaatccttgttaacctgcttgcaagctcaggcaggcctcctgtaatagcacccaccatgttgttggtaattagggacaggcaggcaataattttcaattgattcagcttttctgttagttcctgaagacgtgctccatctgtcataagtgtctctggtaattcttttttctgaactgaaatgag

SEQ ID NO: 377020 - DNA, 410 bp, Homo Sapiens
ccgagtcagtgaggcgtgtcagtgtactgacgtcacagggcacgtgcatttaaaaatcagctgcttgacaggagcaaggccgaagctatatgaatcaggcggggcagcactggtctatgccatagctggaacacgatcaatattcagtttcttcaacaaactccagaaaaaacactaaatgttttactgccttactaataaataacaaaacaaaaactcataaatattagtaagacaattttatttattgctttactaattaataacaaaataaaaactttgttctaactccacgcattccaaaatagtatagtttgacctatcagagaccacagccatggcccctccactaacttttcatactttacttggaagcaagttactattacagaacattaggctgcaaaaaa

SEQ ID NO: 377021 - DNA, 144 bp, Homo Sapiens
tgtatatgaagaaacataaaaacagtcgcataaaatgatgcacagagatttaggaatagcaccataaaagctctaaacagggtagattccacctggagacatcagcaaggcttgcagaggagagagaactgaccatcgccgatc

SEQ ID NO: 377022 - DNA, 375 bp, Homo Sapiens
ggatcgtgcacttccagaggctcatgcccgaagtcgtatttacttgcatgtactcaatgcttaatccaatgctgggcatcatgtaattgtatcaagcagtgaacaaacaaataaatgaatggtcagattcttcaaaaaacgtgtacctccttggaacaccactgactgacctgaaagttccttcttgccttccgtgcctcctcctccctggccccagctccctctccccttccatgtcccagatgtcaactccaagccaccagttcttaacttcgcctgcacttaggtgtcctccagcgatttaaaaatatagatgtcttggtcctgctcctggagattttgatttggttggtcatgagtataactcttttaaaa

SEQ ID NO: 377023 - DNA, 137 bp, Homo Sapiens
tattaagttaaaaatgtaaattatgaaacaaaatttctgtttcttaaacatttatagagtttaggtttctttcatgttagcctaatgttctaacagctttagtcagataataatttgtatatcatacagttacccat

SEQ ID NO: 377024 - DNA, 394 bp, Homo Sapiens
gggataaatgtataggcgtcacaaatcgttgtgatggtgtttttgattgcagtgacaactcggatgaagcaggctgtccaaccaggcctcctggtaagtgccactcagatgaatttcagtgccaagaagatggtatctgcatcccgaacttctgggaatgtgatgggcatccacgactgcctctatggatctgatgagcacaatgacctgtgtccccaagacattgcccttcatcatatttcacactgtgacaacggaaactgcatccacagggcatggctctgtgatcgggacaatgactgcggggatatgagtgatgagaaggactgccctactcagccctttcgctgtcctagttggcaatggcagtgtcttggccataacatctgtgtga

SEQ ID NO: 377025 - DNA, 536 bp, Homo Sapiens
gaaaaaggaaagagggcacgagcaagggaaggaggatgccgggctgcgtcacgtcctcaaacaggccgtactccatgtgggtaaagagctgccacaggggcttcaacagcgcaaggtcacacaggtcactgtggccgcagcatcgcacaatcctcagaagtaagtggatggcttttaatcgttggtggccagtctggcgtcaggccacacccaccagccattcccaaatttttgccaatgggagatgaggcacgaccctttcttctgacaacatctgcttcaaaatctcgaatcctgtctggaaccgccccaggtgtccggccgtcacggtgaatctgtagccccactcggtgttgctcatgtcggaggtgaagcggtaatacagagtgtctcctggaagttcaaaatctttccacttctgctgagacccgctgaagctgtgtcggtcttgctggaagtcactgctgcgggacatggctaactcgtcacagccctccttggttctggggggatcctctactgtcgtcctaaggcat

SEQ ID NO: 377026 - DNA, 468 bp, Homo Sapiens
ccgttgtcagtggcatggtctttgctcccgcgcttgatagagccgttggcatgagtcctgtcactccagtagatgaaatcctcaaacacagacactgaaaacatgtccatgttgttgctggacagaaccacctcgcggttctcacctgtctccaggtcgatccgttcaatcttgtctgtccgggcatcgcaccagtacagcttcccatcctggtagtccactgagatgccgttgggccagctgatgctgacgttgaccagcaccacacgctccgtgccatctagccgagaccgctcaatacgcggatactgaccccactcagtccagaagcaagtaccctttctccgggtggacggtgatggaccggggctcgtctagaccctgggagatcaccacgtagcggaaggagccagtcgagccgggcgacctcgatgacatcaaagccctgggagaagcttgttttggacg

SEQ ID NO: 377027 - DNA, 477 bp, Homo Sapiens
  misc_feature (393)..(393): n is a, c, g, or t
  misc_feature (435)..(435): n is a, c, g, or t
  misc_feature (467)..(467): n is a, c, g, or t
atggctactttcatctctggaaggctgaaaatacactatctaagctctctccaccaaactgccatattgcccgtgagaatgtgtgtctggcttatggtagtgaatggtcagtttatgcagtgggctcccaagctcatgtctccttcttggatccacggcagccatcatacaacgtcaagtctgtctgttccagggagcgaggcagtggaatccggtcagtgagtttctacgagcacatcatcactgtgggaacagggcagggctccctgctgttctatgacatccgagctcagagatttctgggaagagaggctctcagcttgttatggggtccaagcccagactagcaggggagaatcttgaaacttaaccactgggcaaaggctggcttgnattcatggattgaaacctgggggggatttactttttcagacnttgactttctttccccaatggttgtttaccanccactggtta

SEQ ID NO: 377028 - DNA, 257 bp, Homo Sapiens
agggaagtagtccctatctctgataccatcatcccagaggtgccccaactcactgacctaagctttgttgatataaccgattcaagcatcggcctgaggtggaccccgctaaactcttccaccattattgggtaccgcatcacagtagttgcggcaggagaaggtatccctatttttgaagattttgtgactcctcagtaggatactacacatcaaagggctggaaccgggcatgactatatatcgcgtaaggtccc

SEQ ID NO: 377029 - DNA, 229 bp, Homo Sapiens
ttttctcattagcttcttgcccctagtgtttctgattaaaaatcaaccattaatttaattgtatcactgtttcctgtatgttgtctttgcattctttgaccactttctagattttccttaatcttggttttcatctgagtatgtttttccttcctatgatttacttcatatttatccttcctgagataaccaagctgctgcaactctgtgagtgagagtactcatatga

SEQ ID NO: 377030 - DNA, 205 bp, Homo Sapiens
cctattagacatcacttcaaaaaattcagtttatatatcatatgtgtgaaatttctttttaaaaaattgttagttaacactctattctatcccttccactaataaatttcagaggtgtttttctgccattctagatatcacaaatatagctaatgttactacatcctcctaatgtctaatagggagggatcctctagatccacct

SEQ ID NO: 377031 - DNA, 399 bp, Homo Sapiens
atcatcactgcaatcctgatcacgcagatatgcatagtgccagagactcttgcaattgttataaataaaaagctgagatcctctgagtattcgttacttattagcaccccttcttgctatactagcttcattatactgcttttatgtctccctgatggtaattttcttgttgctattattactgtgtatgcttggtagagaaattagataaatctttaagaaatgaagaatttcccaaatgatcgaaagccaaataacattttaataaaattctggtaagcaaagtttttaagttgttacataattatctagttaacattcttattcttaaaattgtattttaaatttgaaatgtaatgcaatgcattcatacaacttaaaactcaatagctccaagag

SEQ ID NO: 377032 - DNA, 614 bp, Homo Sapiens
actttcagagtagctttttgaatttggttcccttagctttagggatgtgatgttatagtccaaaatgtttacaagaaaacctaagtcttcaaaagcacaacttttgttgcttaggactttgcatcaactgttgttccagacctcacttcaacttcttggtctctgaactggttttagctagcatgcatgagagacagttttcatgtataatgtttctgctctgtaactggaaagtggtttactttgcataaatgctgatgaaaacttcatgactataagacttttcttctgtgtatcaagaaaaagcttgctcgttggcaagcaattcacaaggtggggacagacttgtactttaacatgtagtccattcaagcaaacaactttggactctactgatagatgaaagagcaaatgatgactagtttagcctctgcatatcaacaatataatgcagatcaagtataatgctcaatattagtgacatgagtatcactaaattacatagaaccctgatggggtttcctgtgtcgtaatccattaaatcggtggccagtgcttgctgccgtggtttagtgattgggtgttagaaataaaaactcaggtctatttcttac

SEQ ID NO: 377033 - DNA, 251 bp, Homo Sapiens
tatcccctccctatgagacatcattatacagaaaatcctaaggaatctacaagaagatactagaaataataactgaatttagcagagatctcaatttacaaggccaatttacacaaattaactatatttttatataccacaaaggatcattggaattcaaacttttaaaaatactacttgcaatagcattgaaatcatttttttaaaatctaggcatcaatttaacaaaatgtacaagacctctactcgat

SEQ ID NO: 377034 - DNA, 616 bp, Homo Sapiens
atagtcaacaccgatatcaccaatatgatgttgccctctagagtagtacttctattatcatcctacgtcaagatacaaggtagtgacgaaacaactggaagttactggtattttgttattgactaagtaccaggtcatgtcttgggcattagggatgatttatttattatttgtgtccttgtccactgtaaaaaagggaagcttaaaaacacaagtgtgtgttcaggttcccagcctgaatacaaattgtattcaatttccgagtgaaatgtgtccagacagcaggagagatctacttatctgtgagactgaagagcctccttggaacgaactaatcctgaaagaagaactacttgtgaagggcaaacagtttagttcaagaaagcaaagctatgcaataccacagcaaacttcattcaatgaagactgagctccagctcatgtcttaagagcgggaagaaaaagcagcaaacaggctctatctccacaggctctgggggacagtgacggctgcagtggctccttcaggatgctcaaccctggggctctgggaacaccaaggcacaggcctcagctcttccatggatggaataccttttaaagggcatcagcttgc

SEQ ID NO: 377035 - DNA, 320 bp, Homo Sapiens
gttattaaatactaacgatgattactgtgagtaatatagtttccaaactgaccagtagaagtatacactctctcagtatgcttctacccatcaaataatctatcagctttattttcttggagccattcttcctggattctttttaactctcaaatcttgactgggtgtaatctcaaggtcacctgtcagtctggaaattccttttactgccatcattctgggaattccttggcctcttttccttgtggtaagtcttccttttacttggttgactctcattttggtgaaacatttcttctgctaatttcatgagaaagatg

SEQ ID NO: 377036 - DNA, 534 bp, Homo Sapiens
gatagaatcgagccggtaccctcgcgacgtgtatccctcgcgaacgtgtatcctcgcgaacgtgttatccctcgcgaacgtgttatccctcgcgaacgtgttatccctcgcgaacgtgttatccctcgcgaacgtgttatccctcgcgaacgtgtttatccccattgctaagcaatgcatgactcaattcttataacttcctaagaggttatcccctcttcgccactcccactcctttcagccctacatcatttctcatcttagccaccacagtatccttctaactcatctccctgtccagatttgaaaacattcctgaacacaccccacactactgccagtgatcatctaaaagcatccctttctgaaaacacttataatgaaatccaaatcccatggcataccatataaagttctattcctggcctacatttccaacctaatttacgagaactatttgtagttccccaaactcatcatactacttccaatgtccatgcttttgcttggaaagcctttcgctgatacacgtcg

SEQ ID NO: 377037 - DNA, 672 bp, Homo Sapiens
  misc_feature (338)..(338): n is a, c, g, or t
tcacacaagttcccaagacttacccctctccattcatactttcctttccaaagaataaggcatgcctgggtgggaaagatactgcaggtaagcgacaagaaggggaaattacagggtaaggagatcaatcaaatggtgatggggggtaggagtgaacaaaaagaactctggagcaaaccaggattagtgacatctgtggttcccagacaaaccacacttacaggaatttgtctgtctagcccgaatatattgactttcagggagcatttttctgtgtccctgacatacagcctacctgggagtttcccctgagataaagaaactttccaggacatccntaaggtcctactgcatcttcctgtactgccccatcaagataaagttttccacccagctttatcatgattagctgccgtgatttcatgtcagtttctctgtaaaattaggtttgactgttgcattatttttaagaagccttccaggcttaaagtattatgatgcatgggtataactgtactgaggaaatcaaagaatttctcagatcatcttcttctgtgagggctgcagcttccatgtaattgggagatacaggaattattattcctggtttatgaataaaggacatttgtgggagagaaaggaatcaggccagagttctttctctccaaatgc

SEQ ID NO: 377038 - DNA, 848 bp, Homo Sapiens
acagggcccctgcagtaggcaggtcacctgagaggccggccggcctcccagcccactgtcatccggggcatcacctactataaagccaaggtctctgaagaagagaatgacattgaagagcagcaagatgagtttttcagcggtgacaatggagtggatttgctgattgaagatcagctcctgagacacaacggcctgatgaccagtgtcacccggaggcctgcagccacccgtcagggacacagcactgctgtgacaagcgacctgaacgctcggaccgcaccctggtcctcagcactgccacagccctcgacctcagatcccagcatcgccaaccatgcctcagtgggaccaacactccaaacaacctcggtgtctccagatcccacaagggagtcagtcctgcagccttctcctcaggttaccacccaccacctgtggcccacacagccacccagcaaccagcagccccagctcctccggcagtgtcttcccagggaggcattgatggaagctatgcacacagtcccagtgcctcccaccacagtcagaacagactcgctggggaaagatgctcctgctgggcggggaacaacccctgccagccccacgctgagccccgaagaagaagatgacatccggaatgtcataggaaggtgcaaggacactctctccacaatcacggggccgaccacccagaacacatatgggcggaatgaaggggcctggatgaaggaccccctggccaaggatgagcggatttacgtaaccaactattactacggcatcaccctggtagagttccggaacctggagaacttcaaacatagttcgctggagcaattcct

SEQ ID NO: 377039 - DNA, 479 bp, Homo Sapiens
gcaatcgcagatcacgagagtattggaccgatatcaatgagtttggccagtattgatgagtattggctggcattgatgagtatcggttggagttgatgagtatcggctggcattgatgggtatcggctggcgttgatgagtatcggctggcattgatgagtttggctgggcgtgggtggcgcggtgccttgccccctggccaggctggctcgtgggtgaaatgtgacatttaggcggttttctcctgtccttttagtttgtatttatgtggtatccgggtaccatggggagatctggcattcagggcagtattgagtattggccggtcttgacgagcagcagccggttctgggccaccgtgggtaagcattgatgagtattgactggtatcaatgagtatcagcctgtatcaatgagtattggcccgtatcaatgagtttggccagtattgatgagtattggctggcattgatgagtat

SEQ ID NO: 377040 - DNA, 699 bp, Homo Sapiens
cccaggaattcccataccaacacagaggccctgtggatggagagttacaccaagagctagaaatcaggccaataacccaccagccaatgctctccgaggaggagccagccaccctggaatgcatcctagggccaacaaccatcctgctgcttactggcagaggtaagagagatttagggccatgggcaggaacccacatcaaggaaggaggaaccaggaggggcatgccagcgacgaagctagagaccaaagacatgaccaggagaatgacaccaggtggagaaatggcaaccaggactgtaggaaccgcagaccaccatggtccaatgacaacttccagcagtggcggactccccaccagaagcctacagaacagccacagcaggcgaagaaactgggctacaagttcttagaaagtcttctgcagaaagacccttctgaggtggtcatcacacttgccacaagtttagggctgaaagagctcctttctcattattccatgaaatctaacttccttgagctcatctgtcaggttcttcggaaggctagtagctccaaaatggatcgccagagtgttctccatgtactgggcatattgaaaaactccaaatttctcaaagtctgcctccctgcttatgtggtagggatgatgcactgaacccatccctgacatccgaaaccagcatccagggctcaatg

SEQ ID NO: 377041 - DNA, 333 bp, Homo Sapiens
aaatatttttgccatatatttacccattttaattgtgtgtatatatagaagacccatataggaaattgatatttgtaatagtggatttgttaataatactttttacataacattactgtttaaattgtaaacagattttttctcaggattagtttgaaaaataatctaaattgtcatcttaacatccatatatagggaagtgattagttctattactcaatttgtttttctcagcattgaaatgacttaatagaacccttgtgtcctgctgcaaaaatttttcctctctaaagaaaaggtttatggtggcaaatgatgtttattttattttgt

SEQ ID NO: 377042 - DNA, 655 bp, Homo Sapiens
ctgggataagcagcttgcacggcaagtccaagggcgtgatggaatgctggcacaccaaggccgtcaggctcccgaaatatggttcattcgagcaccctttcaaccgcacttccttcggggtacactcgatcaaaaagtgccggacgagttcattggccaaatctccagctttcttgttcagctgcaggactgaaggtgggggcgtggccaccttcatggccaggccatagccccctcggaaggaatggctgtctcgaacaatgaatgagcccggctccttgtccttcaacatggcgatggcttgttctcttgaaatatccgccttgtaccagaacttggaagtgtcttgaacaaatttcacgatcacaagtttatcacctggactatctggcagaggtgaggccgcttctgaagccttggaaaagtcgggaaggacatttgggaaggggatactgatggtgctccccgctgtgcgggctggagaagccactggaggagggagagactgagcccaaagaacgatccccctccgaggcccgcttcttctcagggaggggtggctgcccgggcagggtcacaccctgccctgcaggcctggactgtggtggctgctgtgtccaggcgccaccgtgagaaagttgtgggacaggaagcc

SEQ ID NO: 377043 - DNA, 660 bp, Homo Sapiens
tccagtgttcccatgatcaccagcattctagagctcctgaatgactgtcgtccagcccccctaccccaggactcccttaactaacctgaaggtctccctgagtgtaggctgtgaggcagatcagccacactcaggtgtctaagagaaaccagcataagcacccccaaaaaagggcaacaacaaaccgagacgctctttgagggagtggtgcattgtaaaatatgggcggacacacccttgtcaagaagggatgtcacagacagtacgagaaaaatcccagtccacgagaaggcagcaatttctatcagaacaggccttttgaaataacttgcaagtgaattacagcggctgcttcctatgggagggaaaattatttcgggcggcttccagccccatgtgcctcctttaattcaagtcatatgcaagaaatatttattgagggtggaagtctccccataggtgagttttaagatcaggccacactggagcactccagttagctttttaaagctgccttaaaagaacatttttaatgcaccatctcctttgctttgaactgatttctcattgcaaacaaacaaccccctacaaatatctgctttcctctgcttctcctctggtctcgctgccatggcggggatcctcttgaacgccatgcac

SEQ ID NO: 377044 - DNA, 183 bp, Homo Sapiens
ccctcaccgctagtttagtcaaataacagagcagcatttgggtaaatattctgtgggtgtagaagtgagagcacttactctctctgggctgacctggtagaggagaatttcaaaaaggagctgacttgacaaaatgactcgacttaagtatagatttgggagggatagcggggtaccgaagcc

SEQ ID NO: 377045 - DNA, 379 bp, Homo Sapiens
gccgccctcaccgctagggacagccctgtggaatggtcagcagccgttccctgtttcctccctttaaataggcggcaagttgggacccacctcccggggtgggggtgatggtgcagggagcctggtgtgtttgattagggcatgggcggtgtggccacaactgtgtgtgtcaccacgggacggtcccccggaccctgtcttgggaggcgagccgctctgcctggtgtggccggtttcctccctggagcccagggacggcagttgtggccctttctggtgtcttaacctgggtgacttgattctgggagcttgcccggtccccactgcccaggcctagctttgtgaaaaccaaatgtagcgatgagggtaccagctcatg

SEQ ID NO: 377046 - DNA, 184 bp, Homo Sapiens
ctcaccgctagggaaattctgctgagcatttaattagaatattaggcagccattaacatggtatttataagaatatttactggcataaaccaggagtcatcaaactttttcttgaagaaccagatagtagataattttaggtgtgcacaaaaaactattcagttttgtatagcgtaagggggac

SEQ ID NO: 377047 - DNA, 429 bp, Homo Sapiens
  misc_feature (113)..(121): n is a, c, g, or t
agctcggtaccctcactgctagcacagagcctagcacagtgggtctgtttatattgtactgagataatagaaactgtgtgggtatatggttcaccttaaaatccatgccttannnnnnnnngagctcatgatgcctgtattaccatttgctgaactcaaaatactccaatggtttcctgccaaaatgtaatcatgttatgattgtccaccaagaccatttctaaggtagaaaccttacatcagaagatgttatatgtttctttttctaaacaagttcaggaaaagtatgtcctgatacaggaaatttattcagacttaacaccagcagtgtctctggttatgttacgtaattacatggaaatcatagtaataatatttgcagtgcctaaatttgaagtgctcaatggtgtcatctagcggtgagggggt

SEQ ID NO: 377048 - DNA, 267 bp, Homo Sapiens
cggtccacgcctttcacgctaagatcaggaacaaaaagagggcgatgaataccagtcttacagattaaaaggattaaaatggaatatgtttgtgtacaacaaattagattatatagtataatggaaaaattcctggaaagacagaaactattaaactgatacaagaagaaatataaaatgtaaggagacctgtagcaattaagagatcaaattgctaattacaaaacttcccataaagaaaatccctcacccagatagcggtgaggg

SEQ ID NO: 377049 - DNA, 421 bp, Homo Sapiens
ccgcctctcacgctaaaagctctactgtaaaatctattgcacacattcattcctctctattgaactgctacctcaccactactctctgagttgatttctctcaggcccctctactatctcttctacacatagctatcagaagaatcatttgcaaacataaatcagaccacatcactctttcattccaatccctccagtagcttcctgtagcactcagaataaaatctgaatgctgtaccacggcctataaggctctacatacctcattccagcctacttttataccgctaggacatggtatttttcctctacatcaccaggctctggccttcctggctgctttactgactggaaaacacaacaggcttgatcctgccctagagcctttgtacattatgtttcctttccctagaacattctg

SEQ ID NO: 377050 - DNA, 148 bp, Homo Sapiens
ttatactattataggtgacctccacaggcactgacattaggatcactgtgctaacgtaccacattaaaggaagtagagagatacatgggagaatacattctgagccttggattagataacttgagttccacccttgggtgtgctttca

SEQ ID NO: 377051 - DNA, 384 bp, Homo Sapiens
ttacatcctgcagaagagggtatgcagcacgtgtcttgacacagcgtgtgtgaaactgaggagggtgagtgtgtgtcactcaggatgagccaggttctgttgcaataacaaccgtgcccaatctgcatggctgacaacagtcaaagggtgtgtggcactcctgcgcccatgcacagcttagggagggtggtgtgtgctccgtgtcattggcctcacgccaggactagagggaaagaaggtggtaaatgatgccctagctctaaagccaaaacaagccgcccagtcacagttgacctcaagtgaatagggaagtgtggtcttaccctgcttctcccagagagaactggaacgtgaatgaacgccttcgtgactgcagtgtgcatg

SEQ ID NO: 377052 - DNA, 271 bp, Homo Sapiens
caaaagtagaggcagtaagatttcctgatggacaaaatgggggcttgagaaaagagaatgcaaggctggtgtcaccactaggggaccaggggccccaagagctgaaaggttagagctgtctacctcacccacacagcatccagaaataaataaataaataaatacattttccccagctccagcttaaaggacagaaagatcatttaaaagtgaaacctctgccaggtgcagaggctcactccagcctgggcaacagagcaagattctgtct

SEQ ID NO: 377053 - DNA, 473 bp, Homo Sapiens
  misc_feature (107)..(123): n is a, c, g, or t
  misc_feature (338)..(338): n is a, c, g, or t
  misc_feature (344)..(344): n is a, c, g, or t
  misc_feature (374)..(403): n is a, c, g, or t
gatcgagctcggtaccgatttacatcattacacccaaggaaaatagacagcgacctaacagtttcatctcatgtattgtccatatttaagcttgtccctcggagtcnnnnnnnnnnnnnnnnnaatcccatctgtggcccaaagttacacagtgtctttgattatgtctctttattatcttgccgtctttcatatttcatttcattaattttcaggagagtccacggtagttgatttgtagaatgtggcacattctagatagaaagtgttaacgttggttcactaaaggcacttgtgaagtgattccaagaatgagggttgtaggtgataatttgcanctatcnaactcacagaactcgcaagaaactctttgnnnnnnnnnnnnnnnnnnnnnnnnnnnnnncagcttgagagtaacccagtggaggagatgcacagggcaaggtgttaggaaggggtgcagagcatccatg

SEQ ID NO: 377054 - DNA, 455 bp, Homo Sapiens
ccagatcgagctcggtcccactgtactcttaatcctatcagtgaaaatgaaacatttccttgtctcaaggaaaaagggttaccttgagggaagaatatatgtcttcatattgtccattagcaaatctgagatttatttaatttgttagagcattctagttccattggtgctttcttgttccagctgctttctaggtggccaggaaattaaaaaccaaagacgtgagccactttacctggcctatcacctagctttgataacagcattttgccaatcttgcatctatacttctccatttttctacctctacctccctggaatattttaaagcaagcccagtcctcatgggatttcactcctaaatacttaagaacgtattaatacactcagggaatcttttagaggtgaggatgggggagtataatataactacagtggtattgtccggggttgtt

SEQ ID NO: 377055 - DNA, 120 bp, Homo Sapiens
taaaaactaagccacttgctgaaaggtggagaatgccatctaatgacagagattccaaaacagcaaggcatgcggcagagcaatcacaaagcagggcaggtgaggctggtccggggtcgt

SEQ ID NO: 377056 - DNA, 710 bp, Homo Sapiens
aacaaccccggacaaacaaatggtatgtaatagaaagtcttaggacagccgtgtatattttctcccccaatgaatcaattgaaaatgagaagctcttaccgccatgttccgggcagaagctatcaaaagtataagccatgatattataatttgatgatttttcatgcgtcaaatggttatggcccaggggtgaaaagtggatgctccgtaactagatgatggtcaagagttataaaaatgaggtcctctctgttcaacatttctcctttcttgaaaggatactcaatatcatgctcagggcctctaatggccagaaataaagttcctcccagttccagagcaccccaggataaccccaaaaccagagcaactgcttatttccatatagactatatactgtgcaactcccggggtggcattttcataaatatgtgggtggcgccccctggaggtaagcaatgcacaacttgcacaaatggtaagacaccgtatcccaaagtccacaaagaagagctaagcaaaactcccatcgatgttgccatcggtaatgagtctgccttttcttcatgagacagtagcaaaaacaatttgaccaagtgtgcttggatgatctctaagatggaatcagggtctctcactttcagcagctattgacattgggctggatcattcttttgtcttagtgggagtgtacgggggaccgagctctc

SEQ ID NO: 377057 - DNA, 271 bp, Homo Sapiens
ctccagtttcatttgcatgtatctgcgaataattcagaaagactgcagcccctacagaacaacctcctcttcactgtgctgttgaaagcccagctggaggcaactgtaaacttacaatcgccagcccttgcaggacatctcttagggaaactacagagcataatttggaagtccatgaagtgctacatggctttgtctaaaatctcatggggagaaattgaatggccttaaactgatgcccaaattgcatattaaaaaaggtgaccgagct

SEQ ID NO: 377058 - DNA, 610 bp, Homo Sapiens
tcaatccggacaaggctctgtgcatacaaggaaaagcatatcctttcctgtcatggcacctgggactgtcagagatcaaatgtggcattgactggcagttcggagaagcagagtgcttcctggtgggtactgagacaggatgttgggtctaagtgatcaggaatctgtactaggggaagaagggacctgatctttagttcagtgtgtgttttttatttatgtttttatttatacttagcaatggaaagcagagagatgagaaactagcacatgtttttcagtgttctctcacactgtgaccttattagaattttatattgcctaattaatttatgtagcatttacccaagcatatgcgagttactgtgctaggccttggaaatacatcatttctgacttcaaggaattcataatccaatggacagtagcctgtatgagtttaagaggaaaagcagaaggttaagctaatcaggtaggcaagggggccagatcacgaaagctttttgtggtgaaaccacctttgcaaaaataacagtgacaaaattatgacagtgaaagaaatctgacctaatcaactccatcttgctgttaacctccaaattgctcttgc

SEQ ID NO: 377059 - DNA, 212 bp, Homo Sapiens
agtcggtaccgaataagataaaaacttattagaggactgtaaccgattataaacaaacatataaaaaaatgagaacttaaaagtacaataactcaaataatttaatatatgcattaaaggcatttgtatatgtccagaaagtggtttagtattccaaaagataaaaatttaatacgtgtaaaacaatacaatttgtagtgcatagaaaaaag

SEQ ID NO: 377060 - DNA, 549 bp, Homo Sapiens
aacaaccccggacaagtcgacgtttagtcttggccttgactggatctttctggtacatacggtcttggaaacggaccagttctttgagtaggtcggtaacacaagcatccacttctttactaagcatctggctgcagtaatccctgaatctgcggctgtggatcttagggaaggtggtgtgattgggagcaaggtgggaggcctctgtgtccctctggagctctgtgcctggtggctcttcagacttgtcctcaaccgaaggagtggagatcagttcgtccatcccctctggccctgacagctctgcctgctcgggaaactggtcatcaccaccactctctccatcttgtgtgtcatcactggtaaaagctggactcacagcattttcttggagacgctgctttctctcttgccgttctttcaaaataatcttcttcagtgaggttggcttcttggccttggggatctccctctgcttccctttcttcatcagtggggcgctggagtccaagggattgtccggggtcttcatttgactcatgcggcggc

SEQ ID NO: 377061 - DNA, 405 bp, Homo Sapiens
tcaaagccacccactcggacaagatctcccttataaatacacgtgatgccaaacccatagtttctccagaagccagttttctgagtaaaggcaaaatggttgtcactgggaactttcccactataaacaatctttgggtcatactggctgaagatgattggaaaatatatttgttggcccagaactgtatttgctcgacatcgctgaaggaattctgtagtaaacacgaggtcgacgtcgcagaagaagagcaaagattcattgttaaactgggaggatcctacttccagggccagggctcttgaaaactctccagacacaggcaaaatctgcatgtcggctttagggtacttaatgcggtaatctctcatcagttcaacttgtttggccttgtccggggttgtt

SEQ ID NO: 377062 - DNA, 678 bp, Homo Sapiens
  misc_feature (141)..(168): n is a, c, g, or t
acacacgacaaaaatgtacttcaataagcaatgcacccctacccattattttccattatactgtggaccaatgtgaactgctatttacaaagtaattttattttttggtaagaacaaattaactatcagattagcaaaccnnnnnnnnnnnnnnnnnnnnnnnnnnnnggtttatttaacttttaaatggagggtgaaccggggcattaagataacttccacttctttcaataaagacatttggtggcatgctatttattggtttaaatcatcggtcatgccttaacaaaaacctcctaagaatgtccgaattgggattggtaggcacgtgcaactgagatcttataaacattagtggtcacttcatgggttggacctaagtgacaatatgcgggtaccggccaggcatggaccaactatgataacaaacagttaaacagcaataatcagagatttatcccttaatttcccccaactaccctaccgggagaatgtccggtaacatcatgaaggcacaacacattaaatatttggtggctatggtctaataacacttgtgttacaacaaccttattggtatatgaggatcaacacagactctggccatttcaacaaagttgtagacacacatttgcccaattgaaactatttttgaatagtgatttttcctccataaaa

SEQ ID NO: 377063 - DNA, 481 bp, Homo Sapiens
  misc_feature (51)..(51): n is a, c, g, or t
  misc_feature (72)..(72): n is a, c, g, or t
caatctgaagtgggaggaggaggagggtcacgagccctggagcgctgggangacaggctgtaggcgcacccngatcctgcctgggacgaggttcaacagaagtaggatggtttcatcatgaccctggcaggaaaaccaccagaccctggaattttgcttttacaactgtttaacttctgtttcatacaggatggaaaccggtgaattgtaatctcacataaccgagcaagatctagtagtcataagcactttgtcagagcaaagcagacaaggcaaagtgttggaaatgtcatcggatcttcacagaaccttagccaagcagcctttcaatgcgagaaacaaaataacatggatttttatctagtaatgaagtcaacaccattgtccaccctgggttaacacattcacatctcaaagcgaatggggctgcagacactcatgttagagagccttggaatgtcctgcctttttacgtttaatt

SEQ ID NO: 377064 - DNA, 379 bp, Homo Sapiens
caaccaagctatggtcaaatatgtgtgttgtaggatttatgaaactggtaccaatttaatattcaaatgtgattaagtcatggcaatctatttactggatactttgtggttaccaaagagctatgtgctgccacagggagtcctttcaatagtgattgaaaaaggcagaacactactagacagaactacctgttttatgcatgtattggcatacactgaaaaagcttagtcacttaaaatgaggttgtacagattgtagattttgtttttaaacgcctgtatggtttaaaaaatgttttgggaaatagacatgagcagggcagagaactacaacctacaggccaaaccccaccccactgcctgttgtccgagttggtcc

SEQ ID NO: 377065 - DNA, 518 bp, Homo Sapiens
aacaaccccggacaaagagaaagctgcctctgaagtaatgcatcacagctgtgagaaagagcactgtggctttggcagctgttctacaggacagtgaggctatagccccttcacaatatagtatccctctaatcacacacaggaagagtgtgtagaagtggaaatacgtatgcctcctttcccaaatgtcactgccttaggtatcttccaagagcttagatgagagcatatcatcaggaaagtttcaacaatgtccattactcccccaaacctcctggctctcaaggatgaccacattctgatacagcctacttcaagccttttgttttactgctccccagcatttactgtaactctgccatcttccctcccacaattagagttgtatgccagcccctaatattcaccactggcttttctctcccctggcctttgctgaagctcttccctctttttcaaatgtctattgatattctcccattttcactgcccaactaaaatactattaaatttcttgt

SEQ ID NO: 377066 - DNA, 301 bp, Homo Sapiens
ggagctcggtaccaacaaccggagcacgcacctctgctttttcctccaagtatgttatgttaagtttcgtgatccatcaagtgttggcgtggcccagcatctaactaacacggtttttattgacagagctctgatagttgttccttgtgcagaagatgactagactggccaaggcagacctgttacacttgccagagttaggcattgtttgccatgccactaaacctgccgtcaagtgaaaccttcattggggaaatgagatcggagtctgaaccgcagaagatggacgccctgtctctgt

SEQ ID NO: 377067 - DNA, 272 bp, Homo Sapiens
tccaggtggttatgaacaagagacacgcatgatcttgataccaaaaggagtaaagaatttaagaaaaaggaggttgatgaagaaaaatccaactgcaattatccgtcaattttagtcaacataggcacaaatccaactgtgctctgctggtttctctcccccaatcaatgcgctcaatctgccgcggtcaacttttcttctctgaaatttctttgcagatgtattattaatttcctctcctcttgtgggaaattcaaaaagaaaagaaaaca

SEQ ID NO: 377068 - DNA, 262 bp, Homo Sapiens
gtacagactacaaatttgagttctagctccaggagattagtgctttaagttgcagctttatagctaggtagtggaactatatatgacaggtaattgagaacttgagtttactcttttgtaaaatgaacatattgtattatatgatatctaattctaaagtccaatgaggcaggaccctgtgggtgattgtatatacatatacatatgtaaaatgatacctttgtcaatatgaaatatatagggcatgtaaataatatttata

SEQ ID NO: 377069 - DNA, 329 bp, Homo Sapiens
tggtccacaatccggacaaagaaaggattctgtggagacatgagatgagagccccagtaaaaggggagagtggggaggatgtgaattcagtcctaagaagagagagaagccccagcaacatgacaggaggttgaaggccgtggagaaagaggtcctgtgggaaagtcctgctggagagaagccaaaggactttccacctccatgtgcaacattcgattaggttgtgtttcatgatataaacttcccctacccaaaacaccttcagcaagccaaactgcaacacccacccccacatcacaatatgaaacttactgttgtccggggttgtt

SEQ ID NO: 377070 - DNA, 469 bp, Homo Sapiens
ctggcccaagatgcggacacaaaataaacaagtagcagactgaaataataaagattatacctgaaaagtagaaataaaaggatttaaagtaagtaaagataataaagacattggaaaatccattacaaaaagttaaaatctgcattataaacagcaaaataataatcacaatcaacccaacaattttaaatgagtaatactgagatggaggacaagtttgagaatttttgctagaatataaagaatcaggagaaaaattaagcattaaaaaggtgaaaaatgttggtgtgtttaaaagattgagaattacagaaaaacatacagtaaagagatttgtttgtctttagaaaaatatgtataaaaactccttacagtggccccacaatatgtataaaagaatgattacatggtgatatataaaagtagtggaaaggggtaagatgactcatttaaaattgtccggggtgtt

SEQ ID NO: 377071 - DNA, 104 bp, Homo Sapiens
ccccctactagaaatgcagccattgctcgggcccacccagtggatcagccacagcaggttgcagcaagctgcctatgggaggacggggctggagcaggaaatga

SEQ ID NO: 377072 - DNA, 276 bp, Homo Sapiens
tgaatatactcctcttgctgcaatccagtaatcaggaagccagagttacactgctaatgctgtagtcacaattgcctcttgacacccagaaaattggaaagtgccacaaaaagcaatgctaacaccttgcatttctttatctttgtttgcagttaaaacagtcgaaaggatgtaggaaaatggcttctcgttcgcttctgtgttcattatcttagatgaattgcttctaatttgcagaagcgaattctcatccagaatttgaacgtgtctgtgggt

SEQ ID NO: 377073 - DNA, 364 bp, Homo Sapiens
  misc_feature (246)..(258): n is a, c, g, or t
  misc_feature (348)..(348): n is a, c, g, or t
cgacgttgcatgaaccacaggaaacagaaactagttaaatagtcttcaatctggtccctatcaaatttaagtacaaacaaaatgagataagtatacagtggtctcttcttcctgaagtctaaatggactgagccatcttggatcctagagtggcagtacttgcttgatgatagaaatgagtacagagaagtcttgtcctgatgaagtcataatcaagctcctgggggacagaactgtgcctattcnnnnnnnnnnnnnctttttaactgacctttatgtaaccttctagagatgacatcaaggcctatgaggactctgtcacacctctcctaaatatccattggcttnaatactacatttcgtc

SEQ ID NO: 377074 - DNA, 547 bp, Homo Sapiens
tatcttgagtatcccgcctacctgggacgatccgaccacctagtgagcgaacgcagtcaagtcaattgcctcgcccattggagaacgctttgaaagcaattatgggtatcgccttatcgggcacgttgctggccggttgtgcgccgtcttactcggtatggacaggtggtatgaacgcatttgtcggcacgcgcttcgatgtccatctctatgacgattgcagccgcggctgtggcgattcctattggtcgccggtcaacaagaacaaggtctatgaccaggttgtgaaggagggcgacagccagcgctacttcctgacctggatccgcgaactgtcgatactccgtgctcgtctcgggtgagggcattatccagtcgtgacgctacgagactgaagaccgtagcagctgtcacgttttttagtcggtctttgtacgaactaacatccactcaataaccaaacctaaacgcggtcaaatgtgggagcgggcttgctccgcgaatgcagagtgtcagtcgccacatggggtgactgatccaacgcttt

SEQ ID NO: 377075 - DNA, 368 bp, Homo Sapiens
  misc_feature (21)..(21): n is a, c, g, or t
gcagattgtctctctcagagngcatctctctcaactcagaccaagctacaaactgctgaacaagcaactgcaaacttatttttgttacattttttgaattggccacttaagctccaagtaggagtaaactgattacagccataccacaactggtctgttccccagaaagttcagatcgctgttctctccaaacaggtaaccttcaggatgagttgagtcaaacttctctcctcccataatgaagtggctggcaaaatagcttccggacttgggcgggtagcggtacacggaattagacgggatgtccacctcgctccacgcccgcgtgctgccggctcgtcaggcccccatggccctgcgctgcagcc

SEQ ID NO: 377076 - DNA, 328 bp, Homo Sapiens
  misc_feature (86)..(175): n is a, c, g, or t
tgggcttaagcaatccttgcacctgagctttccaagtagctgggaccacaggcatgcaccaccatgcccagctaattcaaaaaaannnnnnnnnnnnnnnnnnnnnnnnnnnnnnnnnnnnnnnnnnnnnnnnnnnnnnnnnnnnnnnnnnnnnnnnnnnnnnnnnnnnnnnnnnccaagaggcatgagccactgggcctggcccaacttttctagtgaatggtttttcacagtggatataccaattgatacccccatcagcaatatgtgagtgatcctaatgactaaaaccctctccaaaacttgactttatttgggcgtacgggga

SEQ ID NO: 377077 - DNA, 241 bp, Homo Sapiens
tcgagttcccttgattagcctactgcgcaggtaaaaattgtttacattcttttcctgtgaattgttaatttcccactagaaaggctatagtacattttaaaagagaattctcttaaaacaagattagaagactggataagatcttacagaaaaggtttacccaattatcgtggatattgaatgtatagtgcatagtaggctcctactacagcaagtccttgaactcttgggcgtacgggga

SEQ ID NO: 377078 - DNA, 261 bp, Homo Sapiens
acccgtacgcccaaaatccagcgctgccctcagagaagggcaaccacgcagtccctatcttggcaaggaaacacaatttccgagggagtgggtttggcctccattctaagtgctgcacatggggtggccataatctggagctgatggctcttaaagacctgcatcctcttccctaggtgtccctcgggcacatttagcacaaagataagcacaaaaggtgcatccagcactttgttactattggtggcaggcttatggatg

SEQ ID NO: 377079 - DNA, 526 bp, Homo Sapiens
ggttgagggaacgtggggctcaagtactgtgttcttaaattatttagacttgtttttcctctttggggtgagtatggtgttcatttaaaatatagctgggcttgtttcagattgctttcagatttagtctccccccactcctacttttcttcatccttactgattttcgcttttaaatacatagggtattaacatgcttctgcaaacccagaactgtacaaaaagatatacagatggtatataggttattaaaccatcagtggtgttatttttgccttacactgttatctgtcctttaaagaaattaaaagaagaacaaactttggtagtggtgggttgtttttacatttactgtatatttaccatttctgttgccctgtatttcttcttttatatcaaaattgtcatctggtattccttccctttatcctgcagaacttcctttagggcttcttgttatgtagggctgctggcaacaaattaactcattttttgcttaccttggaaatttattttttcctttcat

SEQ ID NO: 377080 - DNA, 579 bp, Homo Sapiens
  misc_feature (291)..(355): n is a, c, g, or t
tcgtgcgcccaaaccctataaaaacacctttctcctgagcaatccttaacccaagctgctgtttaaatatttcatcttttaattacacatattaaatactgcactaatagataagtgaatgtttcttatgtccttcactacaatgcaaatgtttttacacctttattctcagaagccattattcagtttttttaaattgtactttgctcttcttctgtcaaacctaccaggtgccaagcacaattaagcccttgatgtatactgtttattttaattctaagccttattttnnnnnnnnnnnnnnnnnnnnnnnnnnnnnnnnnnnnnnnnnnnnnnnnnnnnnnnnnnnnnnnnnctaaccctccgaagtaagattcattattgtccctttcttaaggctgaggtataactaaggctcaaagaaactggataaactaactcaaagcctctcagtccagattcttaatgaacagacttacttaccttgactccaaaggttgtattttacactattttttactataccatacttcctcctttcaccctaactggttaggtaatcagcccatcactactaca

SEQ ID NO: 377081 - DNA, 221 bp, Homo Sapiens
tcccttcacgcccaaggacaaataaccccagtaggggggcaatattaacatcacaagcccagaaatgattcttcttatagctgtaaagaaaccagaatttttaactttagatgaatggtatgctttcaacaagtactctttaaatatgcattgcaataatatgaagttccattattataaagtataactattcttaacacacccatggtacagtatatatt

SEQ ID NO: 377082 - DNA, 303 bp, Homo Sapiens
ccccttgagcagggggtttgggggcatgacatatagccctgtccaagggagacatactactcgggatgtatttctaatttaagatagggcctggtattttcttaaaagaatccaccaaaatgacatttcagaagacacaaaaaaactaaggagaaaaactgcttgtgacagaaagtccggagttcaaagagctaaagcatatagtggcattcagagaactaaaccctaatgaagccaaactctcaaacaatcttactataaaatacagaagcatctgtggtaaattagaaatacataccgtgt

SEQ ID NO: 377083 - DNA, 606 bp, Homo Sapiens
  misc_feature (437)..(528): n is a, c, g, or t
cgagctcggtaccccccgtacgcccaacgcagactcaccctttctgcaggctcaccaacgaacgaccactcagggagagtgggtctgacatcctgagaatcaccatgacttccccaaaccagtgggacatccggggcctttgactgtggctgggctgcctctgacgggcgggaccctgacacccaccttagctgtgacagttgctccatgcagctagttcctgggcacctgtgcagttccttccacaggaggacattctgccctttgccttctttgagacatgggtgtcttgcttaaggggaccagtttcccccacgtgcctctctaccatcctttggctatagggtattttaaacatacagatttattttccttttctatttacagtttcctttgggtgagaacggagtgagttggttatgaccgggggacctgannnnnnnnnnnnnnnnnnnnnnnnnnnnnnnnnnnnnnnnnnnnnnnnnnnnnnnnnnnnnnnnnnnnnnnnnnnnnnnnnnnnnnnnnnnntggaaaactgaaataataaaaagaacaagcttacgtggttggggagaagctgtggcggccgagaagctgtggcggccg

SEQ ID NO: 377084 - DNA, 456 bp, Homo Sapiens
cagggcctgatatagcaggaattcaaacatttactgaatgactgaatgaattattaggattcagtccaagaggcctggatcatttctgatggtggcccttgcacactctctgcctctgctttctccctctagtaccttctggtactgctgtttcagagtaccactgcagtagataccactaccagtgctcagcaaggctgactggctcctgagaacctgctgcatctgactgtacagcctacttagtggcctgttatgatccagactgtcttgtgtccataaggctgtactcattaagagaggtgtaaacttttgtccccgcatcctcatctaagtaaggtacagtgaaatgccttcttccaagtggacggtccacctcgcttatagggaatcgatgacataccttgcagacactttcaggccagcaaaaactctttatcatttgggcgtacgggt

SEQ ID NO: 377085 - DNA, 364 bp, Homo Sapiens
gagtatctcctccccgtacgcccaaaaaaacaggtgggtgccacagttatccccattatatgcacaaaatgatgaagacttggggttaatgagcgaggtgcccaagctcacctgaatatgaagactgagtcaaatgttagtctggtctgactttaatgcttgctgtgttaatgagcaccatgcattgcctctcctatgcagttaagcaggtagacaggtgagagaagagcccatgtgatatcgggggaaattcaccccaatatttcatgtaggttcttttcaattttccctgagtgtcggccggtctgagaaataaaaggaaagagtacaaaagagagaaattttaaaattgggcgtacgggga

SEQ ID NO: 377086 - DNA, 705 bp, Homo Sapiens
cctccttacatgctgttagtgggaaataccaaaattttgacaaactgtccagtgcattaattgtcatttatacacttgtattaactctcattttgactccacaaaaagtgtaatgttggttcgagctcgagaaggaatctggattctggtagctttgaccagaccttgggaatcctcctcctcaatacatttaattaatgaaatgttacagcgaattctaaaaagagctaagagatttgttttcactttaatcgctgtgatcatgggcctaattacagtcactgcactggccaccactgccggaatggcattacaccaatccattcaaacggctcattttgttaatgattggcaagccaattccacccaaatgtggaattcccaacaaggcatcgatcaaaaattggcaaatcaaattaatgatttaagacagtctgttatttggcttggagatcaggtagtgagtctcgagcatcacatgcaaatgcagtacgattggaacacttgagatttctgcatcaccccgtattcctataacgagactgatcattcatgggaaatggtcaaaagacatcttctgggtagggaagataatttatcactggacataactaaattaaagagacaaatttttgaagcctctcaagctcacttatccattgtgcctggagctgaggcgttagatcaggtggcagaaaatctttc

SEQ ID NO: 377087 - DNA, 289 bp, Homo Sapiens
atcgtcatagctgactctagaggatacactgccggtacgcccaaaaaatatattccttgatatattattctaaatatctctttgaattttcgaatcaacaggtaaggcatggcccttcagggagaaacaaaaaggattaatagagcactgagaatggctcaaaaaggaagggtatagatttgcaggcttggaagccatgcaagtaagtcccaagtctgaagctcttatatgaaggtgtctgactctaggtcacctatggccaattagcttatcaatccgcccagaaaag

SEQ ID NO: 377088 - DNA, 332 bp, Homo Sapiens
ccgctctagagtatcccctccccgtacgcccaacccagttcccttctgatagaaatattttatataactaggtcaccatctaaagaggaggcccaaagaaaaatactcatcaagaaagacctggccttctgagtaagtttccccaagtgcctctcctcaaagttttatagtgttcctttcataaaatgttccactctgatagttctatgtccacagtcatcatctaattatcttcattacctgttcaaaaatgaagtctagaatatctttcagccctgaacatgctacaagttcccgtttttgggcgtacggggaggggatcgtctagagtc

SEQ ID NO: 377089 - DNA, 414 bp, Homo Sapiens
cggtaccccccgtacgcccaaggtttcatagctagtggagccaggacaagaattcatgcctctctggctaccaagcctgctctctcttcattattccctctttatgctgagagcagtagagaaaaaggcatgaatgcgcacttcactgtcggtactgaaatgtgtaagaactgtgacatgtaacagccaatgtgaccagagtagtctacactccaggggctcttaccatccttttctctgctcgcacaaggttctgactcttccagaatctgcttcacactgagctggcatcctgaacagatatgcgcaaggcacacagtgcctcatctgccaggaccttttcatagctgatttgttaattgggacaagcactcacaaaagcactgattttgggcgtacggggaggggatgtct

SEQ ID NO: 377090 - DNA, 211 bp, Homo Sapiens
tgctgggattacaggcgtgagccaccacgcccagcctctccatttttgtaatggggatactaccacccttctgaagttaggaggtaattaatataaaaaattgggcaaaatactacctgttcgtcaggaataagccagtgatcactgcattctcggatatgcactccctaaggtcaactgtttttgggcgtacggggagggtaccgagctc

SEQ ID NO: 377091 - DNA, 367 bp, Homo Sapiens
ttactctagagcatccccccccgtacgcccaagcctagctctccagccctctcaacaattctgtaaaccacaaaacatctttttattactctctttctgcttaaccaactgaagtcacctttgatctcttgcaactgaaggtcctgaaggaaatagatagtcattagactttggacactgtggttaaagaggtctctctgagaaggtgaactggggcaggaagaatgtgaaggagcaattaatatgaacagctggggaagcagtcaggctgaagaaatgtaaagactacggtactggagctggggtgcagagaaagcaggacaaacaacgcccttgccttttgggcgtacggggggtaccgagctcg

SEQ ID NO: 377092 - DNA, 289 bp, Homo Sapiens
gactcagaggatcctccccgtacgcccaagtgtgaggaaagatgaaaaaggagaccagttagaaagctgctgtaacttatacatgcagtggttagtgcttggaagtttgaagctccttttgggaggttttgacattgtcaatgtcctgttcggaacagaatcccacaacagggattgctcttttatccttatgaagtaggtattattattgtcatcatttcacaaaaaggaaaatgaaacttagtaaaaaacttcaactttataagcttgtacgtagaagggccaggat

SEQ ID NO: 377093 - DNA, 415 bp, Homo Sapiens
  misc_feature (258)..(310): n is a, c, g, or t
accactaacgctgactcttccacagcagctaagatttcagttaatcagcttgggccccagacaactgcttggcagaggacttgatagaacagatgtcaggagatgtgttacagatacccagaacagaaaacagataagaccacagcaaaggacaaagcctatagctcctgagcttattcaacaggtcaccaaagtaggccaatattccacgtctcaaggatgcaatcgagaaacaagagtgatgaagtccatacgaannnnnnnnnnnnnnnnnnnnnnnnnnnnnnnnnnnnnnnnnnnnnnnnnnnnncacaatgtctgtgtcccattcccagatattgatttaatggtctgggatatggcctaggtttcaagacctttaaaagtctaacatggtctaatgtacagctttagt

SEQ ID NO: 377094 - DNA, 318 bp, Homo Sapiens
tccccgtacgcgcaaaaaaataattacttgactgtaacggataaggaaactgatctcagaggtaagggacttttgcccagtgtcatacgggtagtaagtgatggaccacagacttgaatatagtatcttaaagatccaatttcctatgcttaccagcatatctagaggataaccaatatagattctgcctttgaattagatagctaatttttctgtggaacattatggattgatttggggcaagaatcttaataaaagttgaaaaagtgttgctacttgtgtgttagtgagattgggcgtacggggagggtaccgagc

SEQ ID NO: 377095 - DNA, 297 bp, Homo Sapiens
cccctgcccgtacgcccaaatgaaataataaacaggtgagcagataaataactaaataaacccagcctcaccaggaccaattctgatgttccaatattccagaattaacatggcatttgatggacggtttgagcctgtcctcattagatgttctcatgtcctgtgttaaggacttaagactcagaagatttttcatggattccaggcacgtgggagtggtacagacaggagcaggagtgggagcccgtgtacgggattcattagggaaacagaactttgctacgttgggcgtacggg

SEQ ID NO: 377096 - DNA, 380 bp, Homo Sapiens
gagctcggtaccccccgtacggacaaccgactggagagtgaggaatcacttaggccttggactccggatgagtgggctttgcacatctctaatcccttctgcatgcgaacagaggagagactccttatgccaacagcaaaccaaaagcctgagcagcttctctaccagaccccgcaaaagaacaatgagctggatttagaacttgagtcctttgatactaggcacagtgggcaagtcagaacacggcctctccaagcacaatcagtaaaggaaaagccacacagaaccgagaaggacttgaactaatgcagcagctcgcaacaaaagtgaggccactgaaaatccatttgggcgtacggggaggggatactctagaggcg

SEQ ID NO: 377097 - DNA, 755 bp, Homo Sapiens
  misc_feature (18)..(18): n is a, c, g, or t
  misc_feature (106)..(106): n is a, c, g, or t
tcgggggggaacattccntaaccccactggaacacccttctggggcctggccatcctgaatgaaagcccctttaaaagtccccactatccttgttccaaggtgccnggacccacaccggagcccaatcattattaccctcccatttccacagagaagaaaatgacactcaggaaacttaagtgatttatcccagagtctcacagttatgaagtggtttctgctatgtaaaaaacttaataaatgttggctaaatgaaagcacgaatgaatgtataaacatacatataatttcataaatttagaaacacatgttttgtaagccatacatatttattcaccaaagaaaaactatggcccgaacgcccaaggatcccctgtcaatagaggtagccctgacgctgaggcctgcagggaatacctggcagaaaggagggagggagctgaggaggccaacaggaagaaagaaaaaggacctagggccaaatccacagatctgagcaggcacaagaaatccaaggcaacaccaactcaccacaagaaatcagaatctagactagagcacagggcaggtgaaaaaaggaggacttttgagcagtgattctgttcatgaggagggtctgggatatagttcaagatgcctggtctgggccacagggcctgatggctcaggcagaaactagaatgtgaagggagctaaggaaaaggaggctggacggggtgatatagtttgggcgtacggcgagggtaccgagctc

SEQ ID NO: 377098 - DNA, 320 bp, Homo Sapiens
gctcggtaccctccccgtacgcccaatcacaaatggctattacctgtactgagaagctattttcaaagttttaaaatgtatcttttagtgaacatcgttgtgcctttctcttaataggtctgaccatttttcagaatttattatcttcagatttctaggtagatacttagcttgtagcccaaacctgtctgctttccagtagtatactctttatcctgcttcactgcattggttagattatcctttcaggacactgttcaataatagtagttagaatggatctatcttgtccctgacagcagtgtttgggcgtacgggga

SEQ ID NO: 377099 - DNA, 436 bp, Homo Sapiens
  misc_feature (357)..(394): n is a, c, g, or t
ttttaagtgcgctacaattagtctgaatgctacatctggcatggttacatcttttgaactctctgacaacactaacgaccaatctggagaacaggaatctgagtatgaacaagaacaaggagaggatgaactggtttatcacaaatctgatggatcagaattgtatactcaagagtacccagaagaaggacagtatgaaggccacgaagctgagttgacagaagaccaaatagaatatgtggaagagccagaggaggagcagctttacactgatgaagtgttagacatcgagatcaatgaacctttagatgaatttacaggaggtatggaaacattggaacttcaaaaggacatcannnnnnnnnnnnnnnnnnnnnnnnnnnnnnnnnnnnnntctggacgattacgtttcaaaactgaaatgagccgggtaccg

SEQ ID NO: 377100 - DNA, 489 bp, Homo Sapiens
  misc_feature (441)..(441): n is a, c, g, or t
tcacttgggcgatttgaaactgccaactccctccctccctcccccacccttgattctaaagtgacataagaatggtgataagtctgaactctttcacctcttaaatgccatattattgcccacagttgccaaatacaaaatatcaagtcctctgctgaagaagactgaggtcccatcgtttcctgtgttgcaggtcacttcttcaccaggtggctgactgcatcattgtgaggcagagccatgctgtgcaagtgtcataagtcatcccactttcaactctcaggaacactcgcagccagtaccacgctgtcctcgccatccaatattgatagccaccccagttcctgccagccagcctggaacacataaccataggatcccctctggtcatgggtcaccatgccttttcttaaactgcgcttctagtgacatggccttaancgatggggtccccaaatgtacaagtgctcctcgatggcaaggttgtat

SEQ ID NO: 377101 - DNA, 369 bp, Homo Sapiens
ctctcgaggatcctctccccgtacgcccaattcaacgaattgttatctctggaccactgggctcacatcgtggacagctgctccaccctctgtctttcaccagcaagtttttctggtaacaagaccacataggtctcacttaagccatcttcaccaactaccaactattaaactggttaattcgtctttcagatcagaaacaagaggccaggagtaaaaactgtgccaatcagagaagaattacctggccaccaaattaccagtcactcactcatctcaactctcctccctggctcctttaccttgaagcttaggtctgcaatggttattttatatagaagagcaaaatatgctcctttcaaatttcac

SEQ ID NO: 377102 - DNA, 278 bp, Homo Sapiens
tccccgtacgcccaaatatgcctgcgtatccacagaactcacccaccgtgtgtggagtgaggactgccacgtgggcgtggtggggttgcatggatcgacttgggtgcgcaagtggaggaaggcctgagatcctacgaacacagaggcagtcacgaaggggtctcgaggcagatgcctctgaaaataatgtggatccgccctttagaaaggtaattctggcttgattttgaaggataacacaatggttagtttgggcgtacggggagggtaccgagctc

SEQ ID NO: 377103 - DNA, 457 bp, Homo Sapiens
cctctccccgtacgcccaatcctctatctgatgaataaaaatcccccactcagtagcaacaaaaagtggccagccagcatctacttccacatctgtaataatgacaacccttctttcaagacagcctgtctgcagagagcaaaatattaattaagaaatgtttttatacgttggactgaactcttccccattcccctaagtatccatttcctggttctaacaagcgtctgttcttttttccaaaaaacaaccttttaagactatggcactcttctaaaccttctctttttcaagctaaatagtctcagtctttgaatcattctttagataatatggattctgaatctcctaacttttctgtttattgtcctctgggcctatttccatttgcccccctcactcttaaaagaatgacaataagctcagttccaggtgtgacccaatttgggcgtacggg

SEQ ID NO: 377104 - DNA, 220 bp, Homo Sapiens
tccccgtacgcccaagagccaagggctaacctgcgtcctgagagggcagcgggagttcagtaacaacacgagtgcgacccccttcttcatgacttatggaccacccgccttactccagcccccgggagagaggggagccgcctagaggggtccttcttcgggggaggattcagtccttcctccatttgggcgtacggggaggggatgctctagagacggc

SEQ ID NO: 377105 - DNA, 349 bp, Homo Sapiens
cctccccgtacgcccaaaaaagtgctggtttaccagctcatattgacttttctttttcatgagcttcaaattttctgaggatattttataactaaggcctgttgcctcaagtctatgctgttaagtacaaaagcttaaagtttaaaacatacttggaatttgctacgtaaaatatgcactagctacaggtgcatttaggtaatgaatacacatgaaaaaaagggtaggcctgtgtgtgcccttgagaacaaccaattttctcaaccataagaatcctctatagaccctataatttgccagttcttttttatcacacactcgttaggggattgcgcgtacggggggatca

SEQ ID NO: 377106 - DNA, 430 bp, Homo Sapiens
cgatcccctccccgtacgccccaaatggtaagatacttattttgctatccacacttgatgcaattgaattcaaggtgcaaagtcttgtactgaagcagtctccttgttgcttggagaacacctccttcagagccctttgttaaataggaggggcgacgttgatcatagatgccacctggttagcaccgaatctgactttggtgacagtcccaaagcacagttggtgattgtgagatctgttagcggcaggctgagcagatactacttggttctgcttggtatgagatactactgtttgcttagtatgagattttttccagcctgtctcttaaactcctgtgacatcttcaatgatatgtgccctcagttgcagcatagcttctctgctgcctattaccattgctgtctcaaaagttgagtgaattttgag

SEQ ID NO: 377107 - DNA, 143 bp, Homo Sapiens
tcattcctacgtatttctgtatgaatgtgtttgtgaatgtatgtgtaaaagtctttcttttccctaagttgctttggtggggtccttaaaacatttcccaactaaagaatagaatcgtaaaggaaaagtggtactgttccaac

SEQ ID NO: 377108 - DNA, 202 bp, Homo Sapiens
cgggggcgaccgagggtccagggggcagtagcaggccgaggcccggaaatgcaggatagagagatctctaaggccaactttccaagtcaggaataaaaacaagtaatacttattcaatgtttaccacataccaggtaatcttgtaatatgttatacagaactatttactctgtgcagtaaagatgactattagtcccatttt

SEQ ID NO: 377109 - DNA, 366 bp, Homo Sapiens
tgaacagagcggtgtataagtgcttcctaaagtggtgaagtaaggccccagagcagaaggaggtgatatggtcagcactgagcttcaaggttcaacgagaaccctatcctgctcaacaacatcattggcagacatgaggcaacattaactcggcaggcccagagaagctgcgctgcagagaactgccccactcctctgcgagggcccctcccttctgacaggcttagaactctaggctaagtaatggggattgaatccagtgctacatgttagggtggggatggtatttttttggtcaatccataaattacctgaaacactgcagaagaaaggactctttccaatcacttttatgttagaaagttg

SEQ ID NO: 377110 - DNA, 147 bp, Homo Sapiens
taacgagtacatcagatgtagtagagggcttgccaaggtgcaaatggatgaggactgtgggtcaaggcagatgatctaacagctgcctccccttccttcactgtggtttatgaccaaacattttcagtgtcacctgattgagatcta

SEQ ID NO: 377111 - DNA, 217 bp, Homo Sapiens
ctgacgataagtcaggttgaagaagcagtgaaactggaccgcgagttgatatttgcagttcagcatataggagtctagaataagatacttccagattggggggggtgtattttataggatgaaatgagcataagatggatgggttaaccattggcagaaggctactatataaagatgtttacaaatttgcattataaaggcttaacaatatgctgaa

SEQ ID NO: 377112 - DNA, 421 bp, Homo Sapiens
cagtgtgatctgggctcagctgggcagtccttctcatctccaagaggtcactcatgcatttacagtcagctgaagttggctgagggcagcctggcctagaatggccttagccggaacggctggtcactgcctctagcaggccagtccaggctcgtttacatggcagtttggcaggtttctgagagagagcagcagtgtgtgaggcacaggtgtgcaaggacaaggttacttttgctgtattctgttgctcaaagtaagtcacaaaatcagcccacattgaaggggtggagaaaaagaccccactcccttgatatagaggggcttcaaagtcacctttggaggaatatggataccgtagggagaatagaatgcttgtggccatttttgctcagaatcttcccaacggctgataccatctaca

SEQ ID NO: 377113 - DNA, 557 bp, Homo Sapiens
tttgcatgctttattagtagccataggcaatgttctcacaaagcttgctgaagatgacattcctcccagcttagtgagtttcctgtcactgaaaggattcacacaatgtcccagatatccacagtgcaggcagaaatgtcccatgtatttgtaccacctctcagccataagaggggatatctggagttgtttgacctgcatcagctccacgttgttagccatgtcacctcttccaccctcagctggcattcatctttatttgtctccttcctggcaacatgcttaccgccagattgggctgaatctttctggacactaagggtcacagagtcttacattgtgtgacatgtaatagtttggaactaatcaaccataatggcttggtttaatctgaaatgctctacaatcatctggctggcttatctctaacccattttcacctacacagcatcagaactctgtgatgtgcaatggctcgcgcttagactcttttttgccccatggggcccgaagctcggggaacacttgtctcccagtataaagctgcccatagtgag

SEQ ID NO: 377114 - DNA, 361 bp, Homo Sapiens
tcagttctaaaagcacttggaatagaatattttgataacttccagcataatttatcataagtcttcaagagctccttcatttgaaaaagacagaagaaaaaccccatcccattaccttggctcttaaataatgcagcctagtggagagccatgtcttgtcaagtagacaacaagaaaggactccttgtatggactcccagcagtataggtttcctggtaaaggatgcatgacacaggtgtggctcacgttaaagcaatatttaagtttctttattcaagataccattttacagcatctgcactatgcaaaggcctggcttcctgaaaacccacaaccaaatagctgatgtatcgttaagga

SEQ ID NO: 377115 - DNA, 541 bp, Homo Sapiens
agaggatacataacgatacagttcagttttaaagccggtcagccttaataccctctctctcgggagccctaacttcagcccccaggcctggcaccactgcaacaaaggaccctgttgcaaagtcattcttctggattagacaaacccatttctctcaggatagttagtgcaattccaaaatggcttatgatgagccaaaactctcaacttgttttaaataaagcaagctctccagaatcccagagctgtagtcggtggtggcggtgtgatgaacgctggtgtgaagctgtgctccctttctgcagatgtctttctctgtgatctctgtggtccttagtttctctgtatttagaatacaaactcttacctacctcacagaaatgattgtaacaaccaagagggatagcacaaatactttttgaaaaacattaaatgccttctaccactgagatgttaacatcagacttttccaataggacaggttatggaaaattcaactaggcatttagaaggccaaagcatggatccaaaagctctctct

SEQ ID NO: 377116 - DNA, 244 bp, Homo Sapiens
cagctttatgatacacgcagggaacaacagatcagaagaaagggggacaaggagagaggggtagattcagagagtgaggatacacagagggctcaaaacatgctgctttacttcatagttcagcctctgtccctgcttctaacccagtgcctagcacagagtaggtaccaaataatgagtgattcattgattaactgatcaatgttaaggaacaagacagggtggtatgactgaatgtatctta

SEQ ID NO: 377117 - DNA, 179 bp, Homo Sapiens
gtgtgcaacggacctttgccctcctccgcctgctgagagataccagctctgacagtccgaaggtaagaagataatcggattctaaattcgaatccatcggtaaagtattcggtgattaaattagcctaatagatataatttcttacatgactgcgtaattttatcctgaatgtatcgtt

SEQ ID NO: 377118 - DNA, 466 bp, Homo Sapiens
  misc_feature (56)..(85): n is a, c, g, or t
ctaattataagccttgtagtactgtctgattctttatgtattcttactattttgannnnnnnnnnnnnnnnnnnnnnnnnnnnnnctaacactgtataagcaaaatcaccatataaacaaactgaccaaaatttcaaaatataaggtcaacgttggatctggtaccaatgcagttaaggagaatagaaaatcccaaacaaaacaaaaaattttaaagacttaattaagcccaactctagaatcagtatcttgactcaactcaaatggcagcaggctggctaatgtgacctgaatctctgccacagcctgggtgtaaccacacagtgatcaacaaccccacagcttactctaacagagggcaaatatgagagcaacttccaatctaccataggaaatcataaccaaaattaattgcagaggtatgcacaaaaatagagaaatgagccctgtatgctgatgtatcgtt

SEQ ID NO: 377119 - DNA, 469 bp, Homo Sapiens
tacgatacattcagtaaggcaagctctccaaggtgtgagaggctcttaaaggtaaaaatgggtgtggagaaccgagatcatattttgatttcgcattttttatttgacaaaaaaccatgggagactctaacattaattaaaagaaaacttctttagttgacaaacatcacttttctgcctgtcaagctgcccctccttagtgagccctcctgctaggggatattccttggccaaacaaccaagtctccagagcactagcaagttcagaggaaatggcgtacaggttgcacaagaaatagcaagaaatccagattgtattcaaagcggcagactaattctagtataatgtctccacccactgctacacttcctgagcccattatctcccgagaatcaaagggcctggctataaatgtgggtgtccaatgtccttataagctccataagctgtatacatgaacaatacctg

SEQ ID NO: 377120 - DNA, 333 bp, Homo Sapiens
cggagggtctataaaaggctccgtgattgtaaacttctggagtagtgtaacaggtactgtggttaaaattgatgctgagtcatgtgcaagtatagctgatgacgttacagtgcagtctaagatacatttgaagttatctaaaccaaaactactatctaattctgtgaccctgttttagaaaaacatttgagttatacaacttactaaaaggtattgtagcgatgatgtataggagcactagtaatatagtgtgtaacttattttctattgatgatccctctatatgagtgaaattacttctctttgaagttttcccccactgataaaaaaagg

SEQ ID NO: 377121 - DNA, 431 bp, Homo Sapiens
ggatttgaaggtaatttaattcagtggtttcaaactttttaatcaccaaggccttctttttactcccctatgtcctgtgtcttaaaagattatgtctaccaaactgcatttattaaagaattatattttgctacataaaggcatgtacaacacaaatcatgcttctgactggcaccatgtaggcagacctaggtactaaaattccagcccaaagcaaataatttaccattttcattagtctttttattccttttgtgggcaaacatatcgtctatgttaggctttttgaaatattaactatgacttgtaaactccagattaaaaactaaccaattcatctttgatggagcttgaatcaaactaagggtagttggacttttgaaagattgaaatttttgttacagtatggaatgtttttaactgaatgttga

SEQ ID NO: 377122 - DNA, 191 bp, Homo Sapiens
ccccacggtcccatctcatctagtgctgaagtctgaggactctgcagcatcagacccacctctaagagaactttctgaatttgcagctaatctcggggaagagaaagataggtttaatttatttgaagttttcatggtgttaatatttttgtttacctcgctagcttcagaattttgccaacctctgaatt

SEQ ID NO: 377123 - DNA, 472 bp, Homo Sapiens
  misc_feature (442)..(442): n is a, c, g, or t
  misc_feature (451)..(451): n is a, c, g, or t
ggagctttcagctcaatgaattagataatatgaacagtacagagagaatctcatttctccaagaaaaactacaggaaatcagaaaatattatatgtctttgaagtctgaagttgcaaccatagacaggaggagaaaaagattaaaaaagaaagacagggaagtgtctcatgcgggagcctccatgtcatctgcttcatcagacactggaatgagtccctcatcatcgtctcccccacaaaaggtacttgcttgtaagaatgtaggtgataaacatttgctcgtaccttcccagaaggtgtgctgccatgggacataaatccccaaaccctggaattacaaccacaggaaaggcacttcaactgggtttggacattggctaaggtattattcctgttattactttttccggggtgggattgtattctatttcccctctctctntcttttttnttgttggcaaaaaataggtgt

SEQ ID NO: 377124 - DNA, 402 bp, Homo Sapiens
cgactctagaggagtcctaacgatacatcagaaagtattgctgtggtataatagaaagaacataaatttccatcttaaaggacttaagaatccacttccagttaaaacaaaaacaagtcctttgatgtaaccatatggtgcccataaatcaatttaagttcctaaaacttccttaaaagctaataagcttttattggttaattataaaactgaatgaggtgagaaaaacacagaaccttgttaatttcactaatgaatcaaatttaaagaacataaagaggtcaggggcttaactgatgcaaaaatacacactttattaaagcaagttttgcaatttagttcagctttaagaaaaacattagaaaatttacttcggaaaagcagaaaatgcttaaatttccc

SEQ ID NO: 377125 - DNA, 334 bp, Homo Sapiens
caagaccttccgcttctcatccattatttccctctatacgtaaatctatgctcggaatactggaccccatgtttagagattccctgcttcatctcacaactctttaagtctcctcccttctttatttaaaacacccctcacccaaataccacggtaatgcctcgctgctgatgaacaacattatgatttgtaacttatgactattgagaaacttgcaccaacacccaacaacaatgtgaatactttttacgttcaggaattgtatagttgtatatgccttcatgcattgtgagttttaagtatatcttgttttgtactttggtaaaatgggcaa

SEQ ID NO: 377126 - DNA, 242 bp, Homo Sapiens
aacgatacatgtcagcaaatatccaaagtaacaagagaggaagaagatgaggatgaagatgaggaggaaggtcacatctgtctccaggatcccaaactcatcagcggagaagtgtcgtgtccagaaggacttgccacttggtgaggatccatctcatagctacaactgcaacttcattatatcaccatcacccttctgagtagcatactagacaccagctatgaatgtatcgttagtgtatc

SEQ ID NO: 377127 - DNA, 205 bp, Homo Sapiens
ataagtcagcgagtaaaatacgcgtcatgtagcaaataatatctattatgctactttacatcaccgaatacttgacatgaaaattagaactttagaatccaattatttcttacattcggacagtcagagctgttatctctaagcaggagtgaggggggaaaagggcagtaggaaaaggaagattagggcaaaaaggaagatcagg

SEQ ID NO: 377128 - DNA, 338 bp, Homo Sapiens
agcagagcagttcagagcgctgggctgttgtccacacatctgtgtctgattctgtggcaagggtagaggaagagaggtcactgatggatgtttctggagaaagttgtgcatcgttttccttcttagctaggagggaatagggggtgtgtcgggagggtgaatgggagaagtgagggcagatgagtggatatgtgagtcgtgttagcaagccagattaaacgaactgcttgtggtttaatctgatgctcaaataaaacactttgcctgtatttctaggtatggaagaagagaaagaaaagcctaaattggaatgagatccaagtctaaacgcctctaca

SEQ ID NO: 377129 - DNA, 246 bp, Homo Sapiens
acggaaatatttctatactgacctataaacggtccctttaaaagttcatgagaaactgaagaagtagctctgtgctccagccctctttatgacctcctctctccctagcctgtagcagcctcaccggcctcctcttctgggctgtgtcgtcagcctgaagccctctgtccctttgtgcctcagctcaaatgtcacaaatcagagaggtcttccttgaccaccgtgtacaacatagcctccaccccg

SEQ ID NO: 377130 - DNA, 473 bp, Homo Sapiens
cgagaggaccctcagaggcgtagtgtgaagggtcctttcagtcctgcttcttggctccacagactcctccagcttctcggatccaccagcccagccctcattctttcatggtcagcaaccccatagccaggtctgtccagctgggacacaagcggatagtaataaggttgggcaaagtgccccaggagtggggagggggcagagagctggaactggggagactgggagggtcctctcttattggggagtaaagacagagagctgtggttcttctcttttgagactctggactgcttgtaaggtcagaaatggtctatctgccacttggtaccagaccgctgatctagaccattttcatacctgcctcctgtctcttgtttctacttagattttcaattctcctcatcccatctctcctaacttctttaccctctaccccttctaaacgcctctgtcgggatcctcgagagtcg

SEQ ID NO: 377131 - DNA, 351 bp, Homo Sapiens
tcatctctagaggatgtcctgcataggcgttcagagtattgatgaataggtgagagaaggtgagtgactcaggtgaggtattaacctcctaggccacaataccttaaagtcctcgagttcgtctatgtgcctacctttcctctggaatttcatttagaatgctcatggtttgtaactggccgtcgaattgaacaatcatgaatgcacctcacctgttttcacactcatcttttaagaatggatgagatgatataagtgaagtgatttgaatccctttaccccctcccccacaaaaagctatgtaaattcagtatacttttaaataatctgtctcacttactgaaagaaaca

SEQ ID NO: 377132 - DNA, 187 bp, Homo Sapiens
  misc_feature (19)..(19): n is a, c, g, or t
ttcagaggcgttagcctgnaagacacatcctacccagaggctagaacatctccaactatctagaagatggccataattatttggttaatagccacctccaccactgaacttctgcaacttgcctctgatgaagctgttccaataattgttcatttcttcacccattcttttgctccaccagtatttc

SEQ ID NO: 377133 - DNA, 638 bp, Homo Sapiens
  misc_feature (398)..(446): n is a, c, g, or t
agaggatcccgcagaggcgttaggcaggagacaaattacattgatgctgggcactgtagtatgtcacaatgtcttttaagggcaggccaggcaaaataatttcgctgatgggcctagtgatgtgttagtttttctgtgagcagaatctgtgaagaagaggcaagtaacatcagcttggtgctgaaaccagcaatagatatcattatcccctagtgaacaaggactaggcaggtgaaaagattcacatcaccttggtgatgggcacaaaggtacgtaacaatatccctggaaggcagtggcctggcaggaatgttacatcacctgggtattgaaaccagcttcacaatagcctaagtagacagggcacaggtggcagagttccatcacctgggtgctgnnnnnnnnnnnnnnnnnnnnnnnnnnnnnnnnnnnnnnnnnnnnnnnnnagaaacattttctaattgctggatccagtgatgtcacaatcttctctgtgggaagaatgcaggtagaagagaagagtcacatctttctaggtaatgaggccagagacatgccacaaagcctcctgtgggcagggccaaggcaggaacctctcatcccctaggtgtcagtcccagagatacgtccaatattca

SEQ ID NO: 377134 - DNA, 388 bp, Homo Sapiens
cccgcacacagggcttcccctatttcacaggaggaattagaagccatccagctgggacctccttcgcactcctgccaccgaacctcagcatgtacctggacccacatgtatcctcttttttgagacgtttagccacgaagagggagagacatggggcagtaggtggaggaggagatgaaattaagggagtgtatggagttttaaaatggaaagcttgatcctgtttaaatgctgttttatgcccctacgagggcgaggttaaacatacagaatagaggcataactgatagagccaagactcccacccaggagcgggtttcgagcggcacctctctaattcaatcccaaaggaaaagaggatacactttctgtcaactccttaccgcgt

SEQ ID NO: 377135 - DNA, 122 bp, Homo Sapiens
cactaacaagagggaaggaagaatgtctaattggaaggaatacatgttgtgtcatctgtcaccaatctctcccctcctccatgccactgaggttctaaaataccaaatttgttcatgtttcc

SEQ ID NO: 377136 - DNA, 685 bp, Homo Sapiens
  misc_feature (76)..(76): n is a, c, g, or t
  misc_feature (277)..(278): n is a, c, g, or t
ctactctaggatcccaaattgaggtcgggtggaggggtggggcagtgttggctcctccgtggcaggcctggctcangatggggaggggatccacaggcgagcagagcttgggggtcaagatgatggcaggatgcaggttggctgtgcagtgtggcctgagaatgagctcagaacaggaagaggggaagaggaactgggctggccagaaggcttctttctggaagaggcaggactggagcagggattttgaagcgtgggtacaggttggaaaaaaaanngcaaacataagcgaagagtggagtccggaggttaaaagtctctggataacttttccaagcgggtggaatgggagtagggtgaggaaagggtgctttgtctcagaaccagtcctctagttcctgactctgtgtggatgagaggctcctccagaggtcgctgttccccaggattccattactagcgtccgcaccgcgaggccagagctcccactgttcccctggctttgcttctatgaggcttacgcggctctgcatctgcccagaggactcagggacgcggcaatatttccgcccccacgagggtacttacgggctcgccagttaccctgtctgggacttcggaggggttcccgtgaaggttagcgcttttcctttttatgggtcaccagggtcgtatggtctggccc

SEQ ID NO: 377137 - DNA, 520 bp, Homo Sapiens
acatacaatttaggctccttgaattctggaacatactaagcttcactagtgatatgaaagaaattcaaactgcttttaaaaatccagtccttttgcctgaattaccgagacacatagaaagagacaataccattactcttcttggacaaagaattgcctggctttagacacaggtgggcagacaggtaccagaagcagtggaaaggaagaaggggagagggatgcactttcagggtgcttggagattgtggcactctattctgattctggaatggagaagaacagggcttgtcactgtagttctgcttctaccactaactggctagaagacctttaccctggggacctcagtttctcatctacacagcggcagatgatctctaagttcttttggctatgaaatcctataattctctgattccttcagtttataaaccctaggaataaaggtcagttgtatatataggggccagtttaaacccaaaagctattttagaacctgtgtctacacgcctctgca

SEQ ID NO: 377138 - DNA, 430 bp, Homo Sapiens
ctgaactccaacaaattgaaagttattgatagtcgctggtttgattctacacccaacctggaaattctcatgatcggagaaaaccctgtgattggaattctggatatgaacttcaaacccctcgcaaatttgagaagcttagttttggcaggaatgtatctcactgatattcctggaaatgctttggtgggtctggatagccttgagagcctgtctttttatgataacaaactggttaaagtccctcagcttgccctgcaaaaagttccaaatttgaaattcttagacctcaacaaaaaccccattcacaaaatccaagaaggggacttcaaaaatatgcttcggtttaaagaactgggaatcaacaatatgggcgagctcgtttccgtcgaccgctatgcctggataactgcctgactcacaagctgga

SEQ ID NO: 377139 - DNA, 490 bp, Homo Sapiens
tggtcgtactctagcaggatccccgacgggtctgttaccacaggtgtcaccacatgagactacgtgtcgtcccttttcctaccaggagaactctggtcacaagcgagtatttgttacatctattttgataaagttccacattcatttgtagttctttttgttcttagaatatatgcactgtttaatgttcacgaagttacttgaatttttcattctgtgtggttatcaatttgataaacaggttcatttgtctgtttgtattcagttttagggttcctccatccttgccgatgcaattttgttgcagtatgtaaaatacttaatgtggttcaaaggataaaactagaaattaacttaggacctatcttctccctgccctctctctccctctatatctcatttgaaatactgtcctttactcccagttaataactatgatcagcaagcataatattcctttgttattgttctcaccacatctccctggtac

SEQ ID NO: 377140 - DNA, 256 bp, Homo Sapiens
aatccagaggaaaccaggactcctgcttatcttgcacaacttgggtaccctcaaaatatatgatattggcaaagttaatctgagcctaagttccagcacctgtaaaagatggtacgaatttcctaaaagaggttgttgtgaatatgtactctcctgggtttagtccttagctttgcaagaagtccaaaatcttcaagatgatcagcctcaaatcagggactcactaaccgcaaacaaacttgaaagtggctgataa

SEQ ID NO: 377141 - DNA, 246 bp, Homo Sapiens
gcgagcgtcggtacccctgcctactgagcgccagttgcatctccagcactgggcaataaagtagcaaaacatccgtctccaaaaaaagtaaataaatgaataattagcctacatatccactacaacaatattgcattatcacaggtatagtgataaatactgtatgattcacatttatatgaagttcaagaacaggcaagtaatccatgatgaaagaagtataacctctggggtgcgctcgtagag

SEQ ID NO: 377142 - DNA, 579 bp, Homo Sapiens
  misc_feature (99)..(238): n is a, c, g, or t
tagtgtaatgagattcatgattatatctgaacggtgaatatagtcttactcaaattaatactagctgggtaaacatgtctatctacagattatcctgtnnnnnnnnnnnnnnnnnnnnnnnnnnnnnnnnnnnnnnnnnnnnnnnnnnnnnnnnnnnnnnnnnnnnnnnnnnnnnnnnnnnnnnnnnnnnnnnnnnnnnnnnnnnnnnnnnnnnnnnnnnnnnnnnnnnnnnnnnnnngtgtgagccaccgatgcctggcctgaaaattgtgatcatggaaagtacctcacagaattgtgggatgaatggagctaatgttagcaaagctcatatttcagtgtccaggatatgttaggccatatgcctacagagtcaggcacattttcttgaaacacaaagccctttatctagcttaacctcttcccactttagagtcgtgggtgcaggaaatattttgttttcctctttaccgtaaggaaagtaacagtgctagtgtgttgttgaaatgccatgctctgggcatgtgtttggggagagagatgcagtgcgaggtgggaggtggatcctctagagcgggc

SEQ ID NO: 377143 - DNA, 251 bp, Homo Sapiens
tacgagcgcaaccagcccaatgacagggcttcacgccactgcatgtggctgcagtctcgaccaatggcgctctctgattggagctactggttaataatggggctgacgtcaactaccagagcaaagaagggaaaagtcctctgcacatggctgcaatccatggccgtattcgacacgctcccagatcctacatccagaactggcagcgagacttgattgtgccgacaaatttgggaacacgccactgcatg

SEQ ID NO: 377144 - DNA, 325 bp, Homo Sapiens
gttcagaggtagtcccctgactgaggagcgcagcgagtctctggtaggcagatggagccagcgatgtggggcggttcagaaaaggagcctctaaggaaagccggagaataggctctagagccttgggaaaagaaccaaatgtgtgctggagaattgagatccagatggatcccaacactgggaagttgagcttctctcaggcctgccatacattttgtagaattactccctgattgagtgcttctgttgtttcattgtgttgtaatgcgaagaagggagggagggtgtggttaatacagctggtcggtcgagtaaaaactcaatc

SEQ ID NO: 377145 - DNA, 516 bp, Homo Sapiens
tcctacgagcgcagcccagatacccaggtactgtgacttgacctgttcttgattcgcagatatcttaacacatctggagtcatactctattagcttcctcctcaaattctgttcttcctaaacattccctatctaaaaggcatcatcatcacccaataaccacactataatctttaactctttactcaatggtcactcaaatctgacaaccgtgaagtaaaaattatccccagaatcgacgtccttttacatcacaattcaatactctcacaagtctctagtcaaatctttacatgtcatctttttaaaaagccatagtggatgtcctactcaaacctcttatggtccctaaatgcctatagaataaagttcacactcatgagcatggaattacaaactcttcccaatatggccacaaccttatcagtttcactttccactattctccaagtcgagcaaaatccacttgctagttctcaaatcagactactgatgcccttcctctcagcacctctt

SEQ ID NO: 377146 - DNA, 115 bp, Homo Sapiens
cacaaccttcaaataccgtacatatgttaccttttatgtcagttaactgccagaccccatgaggatttaaggtacatgcagaggcagggactgcgctcgtaggaggggatcctct

SEQ ID NO: 377147 - DNA, 357 bp, Homo Sapiens
  misc_feature (331)..(331): n is a, c, g, or t
  misc_feature (345)..(345): n is a, c, g, or t
aggtcagatgcggccaccagctggctttgtgaccttgggcgagtcgcctcccctctctgagctgaagccgcccctcccctactacaacaggggtcggactccatgtctgagcggggaggagggtcatggagagagaactgtctggcagccctgatgcggtagaggggcatcctctggcctttgtgagctgtagggatgcagagtctgatgccagcgtcttgctggggggagtggcctagaaggggatcctaacagggacttctggagcagacagagcctgccagtgcctgtgggagttcagccagccgagggtctggcttccttcagctgnccccagggggcttncccttccttgaa

SEQ ID NO: 377148 - DNA, 543 bp, Homo Sapiens
tagaggatcccctcctacgagcgcataatcagagatggaaacaagaagttcaaaaataactcccagacgtcccaactgtacatgtatttacaaatgtatgacttgatcattgatttttagagggtaaacagaaccagacaagttcatatttttaactaggttatagcctgaatattgtattcggaaggaccatgttatttattaaactgtgtgaggctgccatgattatgctgtagataggcagaggtctccagagtcaattggggttgttgaatcacattcagcgaatgtccttccatctcaattgaagaagcttgctattgagggactcccctgaagtaatcaattaaaagcagtagcattaagcagctaatggtgctgagaaatcaatactggtatggggaaggaacaattccctgcaatgatttctatgcaaattctgattcttatacctaatgacattaggattcactaatgacacataactcaaggaattgcttctttcccagttaagcatgaagcacatttttgcccctacaacct

SEQ ID NO: 377149 - DNA, 559 bp, Homo Sapiens
cggtcggactttagagaatcccccggttggcgaacaaacgtaagaccacctttttttaatattcattatttataaatgcttgataattctagtacaaatattgcatttttagagttggtcatttcctttatctacataatctaagtaagctctcaaaataaaaactggttaaactcttacgatagactcattggcatttctagttgtctattgaattagcttatctaagtttgaacaccatcgtactccatcagcttcatcatcttggccgtatgttaagagatgtgatgtttataactgaaatggaatggagctctaatcaggccatgttaaacattgatccaaccatgataatgaaccatgttaaaccaaatatctagcagcaggaagaggaatggtaaataagttcttgtcttacagcctatttaataaatctggatactctacagatgatatcccccctttcctaagaaagaaaacgtgcaatttaaagatgggtcatttcaacccgcatgagctgttttctctcttaaaacattagcacttgatcgctcagcgg

SEQ ID NO: 377150 - DNA, 376 bp, Homo Sapiens
actcctttctgtaaaagaaaagctctaatctgcctgacctctgaattgctttcatacctcacggagtaagcattttccctattgcaatagtaccccttcccttatcgcagtaaccctgttattgcaaaagtcctttcaaataaagtctctattttcttaagtccagatttgttttttatttgctacaggttttgaatgtaggagagatatggataatggagtttatgaataaaggctttgggttgattgctgcatggagaaaagcagtagaaacctgtagagaaacaagaaaggtaatggggaaaccagtgtttatttccgtgttgctcaactttaaaagggtatttgtaaaatgcctataaagttttagtatgaa

SEQ ID NO: 377151 - DNA, 392 bp, Homo Sapiens
ccgctgaccgatcaagaccatcagactctaggccatgcacaattcaccctgcactgatagaccgtgggccactctgatcctcctggctcttaggtctaggtttgtgtattaaaaacaaacaaacgcaaccaaacaaaacccaaccaactcacaggtaattctgatctgcatccagaacaacatctctgtagatcatcagtttcttttttttaaagaaatgtacatatccatatatctgtaaggaccaattaattgccaacactctgccattagagatacaaagacaatccccatgcatcaatataggacacagtttcatctttgtggcacttttagaccaatgggggacagattaatcttagggtcttacaaaaggctgtaagagctgagcg

SEQ ID NO: 377152 - DNA, 531 bp, Homo Sapiens
tacatgcttgtccacttcataaactgcttactgaagacaccttatgtgtgtttttccctactcagtcccttaactgtgattcaagcctttttccactgtcttgtccacagtcagggctggtggcatacctaattttaaaatgcctcgagtgtgggaaaacgttgccttaccacaactaccattccttttgcccacggattggggaatttcctaagcccaactcctctgcctatggttttgtctttgaactccctctcacatctagatttgcacattcttacaaatccttcgaggttggaaacaagcatttgctctcagcctaccctttggaaaacgagaccaaaaacaaacatctccagtgtgcatggatgctgtggaatgtaagaaaagggctggggagccaggagccaaccccacccgattcctctggggaaagtggcttggaggatatcctggaccccatgagcagcgcagctaagtgcatggcgcctctctctgctcatcttacttgatcccccagccggggggctc

SEQ ID NO: 377153 - DNA, 403 bp, Homo Sapiens
ccgctgagcgatcaatctattccaatacttagtatcccatgattaattagccatcattaaagatgactgttaagtcaaagcactctaattagtactcagtctctgtggctcatagtggccactgtgcccactttttctctgatgttgaagcacagctacctagtgtctgctatattaacttctatagtctcaaggacattaaaagatatggactccttcttaaaagttgtcatagtggtttcgtggtttcttttttcctgcccattttgttatgtttgttatcgaaagccttcacgtttttctttttcctgagtatgtgctctcaggtaattcaaggcagatgtttcatgctgcactccttacaattagaattataatcttggcgactaagtcctacagtgtc

SEQ ID NO: 377154 - DNA, 394 bp, Homo Sapiens
tgctggacaatgccactccagacagaaggatgggcatgcataaagatggggggatgtgatatagcctgtttggacggctaaaaaatttcactgtgtgagaataaagactgttatatagaagagggaaatggacctttaactgtcagccaggggccacatcataaagtgcattacactttatcctggttatgtttcagaaaggttactttggtaacagaatggaggaaggattaaaatgaagtaatactagagactgaaactcgtaaggaggctattatatgaatagagatgagggcctgaacttgagaagcattagtggaaatggggataaagtaaccgatttaaataatatccagaaagtaaaatatgtgacagacatcataggttcccatca

SEQ ID NO: 377155 - DNA, 524 bp, Homo Sapiens
ggagagcctggcccgctcttgtagacccgtcagaagtgattgggcctattttagcccacagagccctcaggtgttcttcatgaaaccttcagggagggagtggccttgtaaaaatggtcgtaacctgaggcttgaaatgcttggaaggcttagaagtaacgggctgagcaggtaccgagaagctgaaaggatatcctctccttgcattgattttgatttccgtttgtgtgacttcctaactccacgttcagaatccagcacagggtgatgtagaacaagtcattgaggttttccaagtcccagatagctatgagaatcctgtcgttgcttctgttctctagactggctgactgtgcctccttcctttcccgcccttctatttcctgcctttggctgtttgtggttggaaggagaggaaagagaaaaggagccggaacacacagccatggtgaggtttgggcttatctgggacttccgtgtgttctgttctcctcccttccttctggagtttggatcaatgaagc

SEQ ID NO: 377156 - DNA, 410 bp, Homo Sapiens
ccgctgggcgggcaacaaatcaaaataacttgtgtcatcattagaatgtcagatgtgcttctacgaactaagctgactcttttaattctttggcaaagggttggcaaactaggactgtttgccaaattcaggctgcctcctatttttagagtcttcctgaaacacagctacacccgtattatccatggctgctttcctgtcacagtgagtaagtagctgggactgagaaggcatggcctccaaagtctaaaatatttactctctagcactttgtagaaaaaccttagcttggcctcccaaagggctgggatgacaggcgtgagccaccacccctggcccctcatccatctctttattcttgagacctggctgtcccctaagcactgcctgctcctggcagccccagacgg

SEQ ID NO: 377157 - DNA, 349 bp, Homo Sapiens
cacttccccatttcacctccacatgtggctctagcagcctttaatcaaggaagcaagggaaaactcgaatgttgttcaggcctggggatctagagacccacctggctttctcccactgtcctgggcaaccaggcaagtcctctgtgagattgtgctgcctgattccatatcggaaaaatatggtattcactagagttgggtttcggggacctttcccgccctgacattctggatgcttctccctagcctgggaactccggttgcctgaggtcggctcaccccagagcacctgattctggccccagatgaacctcctgactaggtctgtgaagatataaactcgcccttc

SEQ ID NO: 377158 - DNA, 583 bp, Homo Sapiens
agggagcaggatcttggcaaagaatttaatctcctgttcatgtggggacttttccactcgcccactgctgaccacagcctccaggtgggcaatgaactcctgagaaatgtccatccagcgcagcagctgctgcaggaagccaaaggcaaaccgcttttcaatggaagacgagtccagttccatgtccttaaggcctcttgtaaccgcgtagccattcatctgcaggaatttcagtagctcctgggccttctctcgatctcgtgccttctccttggccgtgagcgtgtcgtaggggaccagcagggggtgggtcccaccgcctttggcttccagctcctgcttcttcttccgtccccacgtgttgtggtaattttctgccagttgttctgccatggcctgcagctcccgggacagggtaacagcactaaggtcggggggctgagggttgtagccttctcgaggatcataggtctgggcactttgtgatatcttccgcgtttttttcttttccgtcttctcctcctcacccaccctccccttctctatcgtccattcccaggcaatcatggccttcagggactcc

SEQ ID NO: 377159 - DNA, 630 bp, Homo Sapiens
  misc_feature (37)..(37): n is a, c, g, or t
ttgtagaacttgcggaagaagttgaaagcaccacagntatagagataaaaccccacggccaggagaccgacagtcagaaccaactgtttgccattgtgagttacagatgacaagaatggtcctcaagtgtcttgaagcacattgcgatgtccaataggtgagcagcaaagaagaagttattgtagtggcccaggactgacatggttgtataccaggcaaggtagagaaaggagttgtcagtaaaaacaactccaagcttccagatatggtacttcatgtctatggaacttagccatgacaccagagaagccgcttctgctttggtctcttctactgggctaaagtcaagagcatttttgtccaaacccagaagttcagcaatgcgttctgctccgtagagatctccatacttgttgatcacctttctctttacaaacttgtcccagtagttattaggaaaagatctgaaaaacaaaacgaaaaaggttggttcttcattcttaacatcaaggaaaacacatcaagaaacgtttcagtttgagtgcctggatctgggatctttctggtttgtgtcctgctcaccaaagaattttaagatctgattgaagttcagagtcatcacaggctcta

SEQ ID NO: 377160 - DNA, 396 bp, Homo Sapiens
tagcttccaggcaagttgatacatacagagttggggccacagcgatgaaagccagttgcacattcattttcatccacacagttccgtccatctccctggtacccagatgcgcactcacaggtgtaatctacacctgtccctggatggcaccgtgctgttgtgtcacacatgtggctcccatcatagcaaggattcaccggagtggggtctgaatcttctttgaccgggccaatttgattggtcacagcaaatctaagcactctttcttcgtcattatacaaggcaaagacccggtccacgttcagctgctgggtggtggggaaggacgggtgtctgggggcgtgcctgcacacctggtaagtgatgttctggtggatgcggtaggaccatgtttgg

SEQ ID NO: 377161 - DNA, 336 bp, Homo Sapiens
acgctgggcgatcaacccataagttttttgaatgaggattttaacctgtatcatagggtgaagatgaagccatgtttgtagaatatagaaaacaactgaagttacagttggacaggcttgctcaagtttcaccagagttactactggcctctgttcgcagagtttttagttctacactgcagtaagtttgtcattacttttgtaacaagcctacttctttcttttgctctttgatatgggtcaaaataaatgattcatatgacttattaatccatgttacttattcacatcttatgtgtatctctggaaacaatgcacaagtcttcttgatttatc

SEQ ID NO: 377162 - DNA, 365 bp, Homo Sapiens
agctgtctccaaccctttgaaataatccgttggtgatcgaggggggataaatcattcacccgggccgaaaacaaacaatcactgagaagtctcaaagaaatataccacgtgaggggaaaaaactgggagaagatccggaatattatcgtttttcctatggtaaaaccggagcccctcttcaggagaactgatttcaaattattattatgcaaccacaaggatctcttctttctcagggtgtctaagctgctggattgcttttcgcccaaatcaatgtggactctttggaacatttccagcaaaggaacgcacatgctgcagtgtctttgtggcaagagtcttaagaaaaacaagaacccaattgc

SEQ ID NO: 377163 - DNA, 383 bp, Homo Sapiens
ggcgatcaaacctctggacagctcactggaggtaacattacctgcaaagtaaggtgtatggggaagcaagtagatagtagaggaataaaaagtgtgtgagaataatcctttcaaaacagtaggatagtatctgaaaagtatccgtggctgatggattctcaaaacaatgagaaaacacagatgcagtggatgaatgtcggaaccttatgaaatgtgactcatctgacctttcagagattggaactgccccacagtgctgttctgctaactcttcttctctgccctctaaagtccctgcggccctttctttactttttagtttcagcccgcgcatgatctatgcatgatattcatcagtacatgacatgttctcttcatttctc

SEQ ID NO: 377164 - DNA, 313 bp, Homo Sapiens
tgccccgatggcatgtttgtcatcttctcccctttcccttcagacagaactaatctctctgtgaccataaagcattttgtgtgatagatatccctctcacatagcactaactacatttggtcatgatgatcttcaaatctatttctgatacaaaactttaaatctccaagggcaagagagacctcatagcataggggttggaacaaaaccatccagggatagcataaagaagcttgctcttaaaggcggaggagcagaaaaggactgatgtaatcacagctcactaatcccaggcttctgtccagagctggcc

SEQ ID NO: 377165 - DNA, 383 bp, Homo Sapiens
cgctgggcgatcaaccaagcaccaaacctcaagacatgaaaaggaaggaaagtttcaaaaactaaagagcagtgccctggcctgaccaacgcccccagacaatgatccacagtatattcagaagccaagagcaaatgctcaccacaagtgacaaactcccaaagccaccagcccagttactcaagaacctgagggccttggctctggccctgagcagacaaacgtgaggatggcagtcagcaccagcaccacaaacgagtgtgtcctggggttcaggccacgcccagggtgaccccagtgctgggtggtacagctgagccagatggtgcggagaagctgctggcatcaccagtatggtccatgctcaagacggttctgccttc

SEQ ID NO: 377166 - DNA, 510 bp, Homo Sapiens
  misc_feature (443)..(459): n is a, c, g, or t
ggtggaataatcctaccctagttcagctgaacagaagccaggatctaactgcaaacaagagacccagcttgcttacagcatggaagagaccagtttcgttgcagctacctgggaaggacggttgctaattagcctgcaacaaagagttccttgctcatctaaaagaggcaatcaccgttcaggtcataagaccttcattccagaggcatcctgccctgtatccgggaagaaggaatgctgcacacagatgccgagaagtaatcggaacagacaggcattgctggatcccccctcggtctattaccacgagatcaaactctttaggtcccaatcacatgtctacagttgctgtccattcttcattgaatctaagcagaaaaatgggcagttttccctgggtcgtccggtcttcatttctgaagtcttccatgttacataaaacnnnnnnnnnnnnnnnnngggaaagaaattttccccccgtccctgggctggaattgcaggggcgcaact

SEQ ID NO: 377167 - DNA, 460 bp, Homo Sapiens
tatctagaggatcccgtaagcaggtggaatccagattgtaatcagaagcttgcttgaggaaaaggatagtggattgggtatctggtactgcattaatctcctgcatcaatcgtgacctaccacttagctgcgtcaggaccccttctcttctagagagtgctaaaggcactgcctagtcacctctcataaatcccctgttctaacttacatagttgtctgctttcgggttgcatgttcttaaaagcagacagcaaaaccctggaggaggttttatacttagtcattagcctgtcattcctgctggagttttacagcctcaccttagttggattttgggagcttaaacagacttctaaaaatgttttaaatttaaactttgtattaagtgtacagaaagttttaagtatacaaaaacctaaggaggattgtataattaacccctatacattccacctggata

SEQ ID NO: 377168 - DNA, 395 bp, Homo Sapiens
tccaggtggaatgacagagggaggcatggatgcaagaagggacagaagatggcgagagacaaacaacgtcttgatgctatttttgaggccctgaatcccgttgtgcctgaagctcccccttgtaattttctagctacaacagccaatcaatccccacttttcttaaagccaagttgagccgggtttctgctacttgccattcctggaggctgggaagttcaaggaccgtgcggaaaaacccagtgtctccctgggaagctgggtcctggtatgaacgtggaacagcctctgggaagtgtctcctggagcctggggcagggctcgggtgagggcaaggggtgagtaggcttaagcctcacaagctcttcccacctgattccacctgttacaggtcc

SEQ ID NO: 377169 - DNA, 384 bp, Homo Sapiens
taggtggaatagaccattggatagctccaagtgctgacaaagggcggacacgggagctgatttctgcctggtgggaaaggtgatgattccagctactttgggaagtggttggtcagcatggattatagccgaaggccccagctttgccttgtcctagcagttccactcctgggcagcccgagagaggccttcccaaccatgggcagatgttcatcatagtattgtttgcagtagtaagaggtcggagcccacaccaaagaggatggatcaatcactaaactctaaatgagttgatctaagcaggggtccagcaaactttctctgtaaaggggctagacaatgaatgtttcaggtgttgcgggacacaccatgcctggcaccact

SEQ ID NO: 377170 - DNA, 413 bp, Homo Sapiens
cccaacccccagcctcactgcaaagcccatcgctgtaaccccggcactttcctgcctcctctgcttctgctctcacgtctgtgtccccagtcgggcctttctgaggcccactgaagggagtaaactcctgagacccatctctccaagtggggagtgaatgatggcaccggccctgataacaggaggtgtgtgaaggtactgaacttcaacttgtatttgagtccatctcaagccagtttttttccagctctttaaatagaaactggacttactgcctcagggcttctgaggccacagaggttgaaatggagacccggtccccgtatcccattttgacaccccctcagccacacaataagtgatctaagttatgtaggagagcccccattcataacatcattggattcattcca

SEQ ID NO: 377171 - DNA, 511 bp, Homo Sapiens
cttttagccaggtggaatacactgcctagtatagggaaggcacacaaatacagatgaggaagagggggatggagaagctgggtagcggtaactcagggcagtgatccaagtcctttatgaagccagaacagaagggagctggcatggaaaacctcaaagccctcaggctccttgtgtggtacagagaaggctggcaagtcaggcaggtgggagcaaagggcagaaggacccatgtaatagactgggtgggaagcgataggacatagctagcagagaccctgaaggcaccttttccagggtctgctagacacaaagtagtaacttagttccgaaggagtaggggctgcagtcagagcaggactctaaggatactagaggatgctggggagaagtaagcaggagggaaatccaagaactgccttgggctaggctgcttggcatccttggtaacaactgcatctggtcctcagtttcccccattccccatgactgcctcgccacattcacctgg

SEQ ID NO: 377172 - DNA, 385 bp, Homo Sapiens
  misc_feature (121)..(254): n is a, c, g, or t
tcgtaagccaggtggaattcaaaaaaacacattcttccagataaattctacctttatggtatggatttgaaagtactttgcaggaaaacagtcagtactctttaaaaagggactgcagggnnnnnnnnnnnnnnnnnnnnnnnnnnnnnnnnnnnnnnnnnnnnnnnnnnnnnnnnnnnnnnnnnnnnnnnnnnnnnnnnnnnnnnnnnnnnnnnnnnnnnnnnnnnnnnnnnnnnnnnnnnnnnnnnnnnnnnctgggcatgatggtgcactcctgtaatcccagctacttggtaggctgaagcatgagaattgcttaaatctgggagcagatggttgcagtaagccaagatcatgccgctgcattccacctgctactgatcct

SEQ ID NO: 377173 - DNA, 340 bp, Homo Sapiens
catatgcattctggcgaccatcactacggactctgacctttgaagatatccctggaattcccaagcaagatgacactctcaccagtgccatgacagttgataatcaccatgacaacaactggaagaagtcataaaaggaaaaaaggaagacagcactactggttcagagaagtttaccaccctattctggaaaaggcatgaatattgctccctttgcttttactgtacaaacccttcattaaagagactctatattttaacctcgtcatccttcactagttgagaagttgatttgcaagccacattcccacggtctctattccacctgctacaaggtcct

SEQ ID NO: 377174 - DNA, 333 bp, Homo Sapiens
tagcaggtgaatgtacgcttctgacatacttgggctaggactgtgaacttagcctctgatgccaaggagcaaacatggaatgaaagcaggccaaaggccttttgcataatatggcagtaaggcaggaagggaagttcattccactttagagaggcagtgtttgaagcatgaggaagtttgccagccagagaaaatgggaataccttctgtgcagagtgaatacaaagatacaagggtgtgaatgtgcagttagggaatggggaagctttagtaatgagactgttaaggtggattgtgtcccttgtgaagggactcagacgacataaatcagtt

SEQ ID NO: 377175 - DNA, 430 bp, Homo Sapiens
  misc_feature (366)..(378): n is a, c, g, or t
gtggaatcctgcaagaaatgagctcttacttagacaataactgctttatttagatgggtcacttgtaattttgctcataacacagagctgcttgtcatgacaatgttaattcgtgggtatgatctacttcggtatctgttttgcacagtgaatttctttgaaccccggttgcaaacaaagaaagaagaaaataacacaaaagcatgctggcttgagtgcctaatgccatcctgctgcacaacttcctcacacaccacacgggctcccgaggctataaaaattgtttttgtctgattaaacacaagtccctttgaacttggtgggggttcttttccgcttgcactttcttctaactgtgtgcagccnnnnnnnnnnnnnctggtttgatttggaatccaaagtgtctacaagttggcccattccacctggc

SEQ ID NO: 377176 - DNA, 353 bp, Homo Sapiens
aggatcccccgcgggattgagggtgactgtgaaagtttaaacttcagtgaagtcagcagcagctccaaagatgtggagaatggaggatacgcaagaacaagcctaacatgaattatgacaaactcagccgagccctcagatactattatgtaaagaatatcatcaaaaaagtgaatggtcagaagtttgtgtacaagtttgtctcttatccagagattttgaacatggatccaatgacagtgggcaggattgagggtgactgtgaaagtttaaacttcagtgaagtcagcagcaagttccaaaagatgtggagaatggagggaaagataaaccacctcagccgggttgccccg

SEQ ID NO: 377177 - DNA, 424 bp, Homo Sapiens
tccggcggggcacccggctgaggtggtttatctttccctctattttcacatctttggaactgctgctgactgggtgaagtttaaactttcacagtcaccctcaatcctgcccactgtcattggatccatgttcaaaatctctggataagagacaaacttgtacacaaacttctgaccattcacttttttgatgatattctttacataatagtatctgagggctcggctgagtttgtcataattcatgttaggcttgttcttgcgaatcccccagagacgagccacctcttctgcctgcaaaagcttaaactgcccatcattagaggtccaacagatcatgtgcttgttctgaggcttctgcaggaactgaagaaggaactgccacagggtgatagcactgtccatagcaatgagcgacgccgcg

SEQ ID NO: 377178 - DNA, 485 bp, Homo Sapiens
tagaggatcccccgcggggcacccggccacaggagagaggtgacccagacccttaataaaaaaaccctcatgggagacaaattatggtgtgaaggaaaataactcaggctttcctcattgccaccctccgtgagattttaccccagacctgaggcggctgtactaacaggactctgatctttctctttgtgttcaaggatatcccaacttcgtggcgacctatggccgtggctaccccggatttgctccaagctatggctatcagttcccaggtgagtggcttggtctcccagggctttggaagcacaagaggtgggctgcatttgcgaggaggtgagaggacccctaaagagaatgcatttcttacatgcatccacttgaaaatgacctatacatgataaatttcaaatccactgaaggtcaaggccaggatgcagctcataagtttttgattaactcaggtataactcacctggggccggggg

SEQ ID NO: 377179 - DNA, 387 bp, Homo Sapiens
aggaagtcaagatactccaagtattaacttcatttgcaaattgaattgtacataattgtgcaccatgctaatgcaatactgcttttagtaatgggatccaaatgaaaatttagaagaggtaaactccccctaaactgcaaacacatctgaatgtcaattcaattaggagtctatttagttattacacttcttagcataaagcgagttaaaggccaggaaaagaacacttgctttaatcactgaaacaatctacacatatttctcaaggttccacttaactcatcctgcaacatttatattaaaagtgacctatcacttaagtgataaaggagagtaaaggaagagttttaaggctgaaggtgattccaccggctacggggatccact

SEQ ID NO: 377180 - DNA, 485 bp, Homo Sapiens
gactctagtggaccccgcgacaggtgcgttagcatgtacaacagcaggaaagaggaccacaccatgatgaggacccacagaggcctctagacaacgggtagtgtttagcagtatgcgacgtccatgggatggcattagaggtcagggcagtgagaagacctcatgcattaattttaaaacatcactttgtgtaagaaatatctaatcctagtgcaagagtggaaacatggagacattactaaacaattttaggttttgtgtgaaataattgtggcttttcctagagtgataagggtccatgtgagaggaaggaccagtggtatattttggaggtggaatcaacacaatttgaagatggcttagcaaaagaaggaaagggaagatcaagaacatttcccaggtgcatgcattgagcaattcactagctgggatgagaaagacagagaaacagggtggagaatatggggccacccaagaaatcctta

SEQ ID NO: 377181 - DNA, 529 bp, Homo Sapiens
actctagtggaccccgcgacaggtgcgttactactcagggctcatctacacctattcaggcctgttctgtgtggtcatcaatccttacaagaacctgcccatctactctgaagagattgtggaaatgtacaagggcaagaagaggcacgagatgccccctcacatctatgccatcacagacaccgcctacaggagtatgatgcaagaccgagaagatcaatccatcttgtgcactggtgaatctggagctggcaagacggagaacaccaagaaggtcatccagtatctggcgtacgtggcgtcctcgcacaagagcaagaaggaccagggcgagctggagcggcagctgctgcaggccaaccccatcctggaggccttcgggaacgccaagaccgtgaagaatgacaactcctcccgcttcggcaaattcattcgcatcaactttgatgtcaatggctacattgttggagccaacattgagacttatcttttggagaaatctcgtgctaacgcacctgtcgcggggatc

SEQ ID NO: 377182 - DNA, 462 bp, Homo Sapiens
tcttgctgcggtgactctacaggatcttctatgcgtgtacaaggggagactgagagtaggggatggcttaggttttggcttgggtgttcagaggttagagataaagaggtgtcatgacatgatggacttacgaggccaagagaacagacagaaaaagaggccctctaagtggctaggtcttcagggctggtgcccagaagaaaaacccgagttgtagaaagacctggggagtaggctcagagaatgtcctgaagatggggagatcacccaggaagcctgcacaaggatggtaggtaggacacttaagagttaggcagagaaaagatcatataacttggtgagcataaattctttgttacccaacagaaaccaaacaaaataacccctgttttttttcccaaagagggaaaacggggccagggaccacaaattggggtaggtaagcacatttggtaaataact

SEQ ID NO: 377183 - DNA, 188 bp, Homo Sapiens
aggctgactagaggacccctatgcgtgtacaacactaaattcaagctgtcattaatgaataacaacatgaaatacaaactgtcattattgaataacaacagaggagattaaaactgttcccaacttgcagttattacaaatgtgctaacaaacacaatttgtgttccttgccccttctaccgtcttgg

SEQ ID NO: 377184 - DNA, 381 bp, Homo Sapiens
gacctcatatcgtgtacaatcccaggagccccttccatgctccttgcccataagtacccaacgtgctcaaaaccgcaccctgacttctaacactgtaggctggtctggttcatttttgaactttggaataaataatgctgtattgtatgtattcttttgcttctggcttcctttgatcaatggtaagtttatgagatttatccatgttgctgtatataggaataggttcattttcattgcttatatggtattccattgtacaaatataccacaattcatttatccattctcttgatggacattcagtttcaggctattatgaataatgctgctatgaatatttttgtacacgttgtaggtacacgcataggggtaccgagc

SEQ ID NO: 377185 - DNA, 476 bp, Homo Sapiens
  misc_feature (292)..(307): n is a, c, g, or t
ctgatcacaggacgtattagaaatacataaatgtgagattcctggacagtttcaaaataacaaaaccaactctcaatttatttggtaaataaataatcatgccaatggatcacaggcaaataaatcttaagctcaaaagacattttaatactctggttactctttaagtaaatccatgtgagaattttagtatctaaagtgaaaatggcgagttctgggcttcctgccaatttcatttggggtgtgaaatttctgacttacaagctgaaattcttggaaccttagaagaaannnnnnnnnnnnnnnnataattgagaatggttctcccacccacaaaacgacctacttccttttacctagcagctttggagggagcaagtgtgagcggtgtgagaaggaccttctgggaggcaggacctcagtccacctgcagccccacagcctctcctcactacctggctgccccttggtacacg

SEQ ID NO: 377186 - DNA, 536 bp, Homo Sapiens
gaagggactactgggcctccggagccttagttatgtctgatgactttcaaaatcatcctggtggaggctttagcctcgtcaaggtactgtgtcttctaggctggtctcctgggctccctgcaagaaaccttttggcttctaagatttggacaagccacctagagtgtggctacatttacagagtaaacttgctctccgagctgaatacaaggacacaggacaaggacacagaaaggacaagagctcttttaagcagaccagaaagcagaggggtctggggaatggggttttagcactgtacctaaagccatgttgcttttcagccccaaactgccctcaagcccattcctcagttgtcctcattttaccttatacacttctctcctaggatgtctgaattcagagttctgcgcgtgctctacacaactcctcctgcttggaattgcaattaccccacatctctctaatacattaggtgtcctgtttttaaaattaacattgtatgtctgttgtacacgatagtaatcctggatcaa

SEQ ID NO: 377187 - DNA, 299 bp, Homo Sapiens
aaccggcacactgcttctccgcagtgattatacattaatgctgatctcatgaactcagctaataatacagttttatgatcactgagatagaagtggggctgagctcaccacttttccaaggagaagaataaagtaaaccaggatttcattggagggaacatccaacacttggcttaagagaacaagcttgtaacaagcactcttgagcaacctcgatcatgcgatgtaacacgagacttggagcttcccaacagtactccttgggtttggactgaacccctcatggctactcgctggac

SEQ ID NO: 377188 - DNA, 550 bp, Homo Sapiens
  misc_feature (200)..(251): n is a, c, g, or t
  misc_feature (258)..(283): n is a, c, g, or t
gaggttacggcaccggcaacaccctgcacatagctaggcccagcctctggaacagtcctgcccaaacttgggcttagcaactgttatcaagaactggatgaactgaggcctccttcccaccacagggcaaatctgcccatcgccaggtttgaagttcttaaatgaagaccaggctgagaagaagctcacagttttaggtnnnnnnnnnnnnnnnnnnnnnnnnnnnnnnnnnnnnnnnnnnnnnnnnnnnngtctgtnnnnnnnnnnnnnnnnnnnnnnnnnnattttttctttactctttcttccttccttcctgataaatatagctcatcatccagtgagctatgaatctgtaacacgcattgaaattggccaatgacagttctgcaggcagtccctccgggagagtctatggataggatgttctccaagaggaattctcactgtcacgttctgcctttagcgcagttgcttcctcagaccttgctgcctacaaaactcagtacagagttcaccctttgctcctgtgtatctgtggtaaaaataggga

SEQ ID NO: 377189 - DNA, 508 bp, Homo Sapiens
acttagaggatccgtgaccggcacaccagaattgcgtggaaagttgctttgggggattcaggcagccctggcctcacctgccctatctagagtcgagaggaggtctctaggctgagggcaatccctgtgccccctcctgcaggacagctaaccccccgcatcggtgacgtgatccagaagctggcccccttcctgaagatgtacagtgagtatgtcaagaactttgagcgagcggctgagctgctggccacctggaccgacaagtctccactcttccaggaggttctcactcgcatccaggtgaggctgggggagggctggagtcagcattgccactcccagcatgcagtggctcaggttgccttgagtgattccgggcatctcccaggctcagctgcttccataggcccctgcctactcgtccggccctcaggagcagcctgacccacctcccttctctcaccctctccgtgttgctcccccatccctcccttaccatcaaatcaat

SEQ ID NO: 377190 - DNA, 535 bp, Homo Sapiens
catcctttctaccccttatgtatgtatattttcaaacgaagctatgttgtgtctataccatgttgagccctgtttttgctcagtctgctatgggaagcgttcctcccgtcgcacagagacggagatagggaaaccccgggagcgggagcaaatggtgcccacggtcatcctgcaggaggggctggaaggggcttggtacaccaagacttcatgtatcaagtgatctgggggccagaggagatggtctgtgcacctctgaggagggtataagtcattaattcttagagaaataacagttcagggaaaaaacacccagtgtaagcaccaacatgtatgtcattaagcattttagatgaatcagaagattcctcaagacaagtcttctgagtgttcgttttccctgcttgcggcaaatgacctcttggagaccctgtggcactctatattccagatcaaggagcacttatattctctctgtgtgtgtgtggtggggatctgtggctgtgggcatggcccagggcggagtctcatatcc

SEQ ID NO: 377191 - DNA, 612 bp, Homo Sapiens
tccggacccggcacactgggaattacatttgaacttgagatttggaggtgacaaacatcccaactatatcagtttctaccctggtacaggaatcctcattgcatatagtgccctgccatgttggggtggcccttgaatttctttcagttctactacgtacaaaagttagctgcttgtgggcagtgagtaacattcatgaactttatggaggctacagaattgcctagctgttcagtttgaggatgccccagaggagggctatctcttagataccgtgataattaatctttttgcacatagcatcaacttcccaagacataatattttatatccaaacattagaagaacagagttcatgaatgttaatgcctaagcatggactcttctgaaagctgtggcttgtttatgtgggtgtgtctttagttaggtaccctatgtgggtgtgtctttaatgtcccaagcattaaaagccacatctgttagggtctagggcaggaaacccagactatgtcatgcgtgagtgccactccagagtatacgaaagtgagaacatattagaaaaggtcttacagcttctcaagcagctctgtagttcctttattcccaatcttc

SEQ ID NO: 377192 - DNA, 243 bp, Homo Sapiens
ggtactctagaggtatccggacccggcacacataaaattctcaatgaccaagcgcagccaggctgtgaatcagtcacgaggctgtggtcactgccaccttcgcggcagctgacggcagcgtggcagcagcttactgtgcttctgatgtgaccttatcgagcttacaggacggagtaatgggccagtgctaaggaatgaaagggtcggactgaaactccctgcagccgtatcctgagaacgtgt

SEQ ID NO: 377193 - DNA, 264 bp, Homo Sapiens
agaaaggaaaggaaatgaaaaaaaagattctgccctgttattttgggcagagatcatggaaaacatcatctgtgatgtcttgccttttctcgcatcccctaattctcatagaatacccaagtcctctggagtctaccttctcagtagctgtggactctctttctctcccttttttcctactgtcactgcttttctgtaggaccttgtaatatctcccttgagcacttattgtgttccgggtccgggatctctagagcgacccaa

SEQ ID NO: 377194 - DNA, 372 bp, Homo Sapiens
gcgactctagaggacccggacccggcacacggaggtgcaggcgaagacttgggaaacatggtttacatgtgcgtctagggaggaagaggagagcatggaagcgatgactactcccaccccagcatccttgggatgcagcagcagatcttgaggtctccaggatgccaagagcagagctgctcccctagaaaggaaattcacatgaccgtgatctcatctggttcctgggtttgaggttgggggcatttcggccaagcttgcagtcttctctggtggggaataaagtagggtgagcaaatccgttgtaagagatggacctatatgttcctggttgcaacgatatttatcgtatccctactgtgttgccggggt

SEQ ID NO: 377195 - DNA, 221 bp, Homo Sapiens
agaacaaaagcggtcctaacctccaaccccaacaggcccccgcttgtgtgttgctcagggccacagggagtcactgagggttctgtggcccctgcgcgcatccctctcccatcgtgggggtggctccgtgaccttcctgccacgagcaggaggttgatgatgtgctacgttagccttgtaagatacaaccccaccaaatgtgttgccgggtccgtatcctc

SEQ ID NO: 377196 - DNA, 370 bp, Homo Sapiens
gccgataccttaccactgttcgtggaggacagagcaggtcacaagataggggccaggatcgtcccagcccattctggatgtgctgtaatttcaagtccagtgaggtctcaggaaagccttttttgaactgaaccatttttcagaaatttatcatcattctacaaaaacagtaatatggtcatatgggtcaaaagtcttgaccccagggcagtaaaaatgggtgggaattctttcccctgcctttctggtgtttctcagagcactccttattcttaaggcaagaaaaatggacttctgtcttcttaacaatacccaggaaaagaagggtcaacgagacaatggtgcccatcattcgaaaaggaaaactttc

SEQ ID NO: 377197 - DNA, 265 bp, Homo Sapiens
  misc_feature (154)..(173): n is a, c, g, or t
gtatacatgatggttggtttgtctgtctatccatccatcccatccttatgaatgcatggaatctttggaagagtaaacaacaacaaaaaaatgatggctggttacctccagggaaggggaactaaaagtctcagagctggatatacgagggaannnnnnnnnnnnnnnnnnnnggagacggcttcctcgcttagtggcccaggcatgaagtgagactccgtcctaaaattaaaattttaaaattccacgagtatgagcggccgga

SEQ ID NO: 377198 - DNA, 443 bp, Homo Sapiens
tgtgcctgtgagtatgcatgaaaagacataaaaaggctttgttcgtgatgttccatagacaatgcttggcgtctactcacaagccttctctaaaacttagagcctttgtgtcaaactctaaaaccccaaacgatggtgcttatctacacaggccacttgccctgtgcagaggggagggacttgggaacccagcctcccatgcacacgaggatgctccattaatattaattgatattgaatcaatgttagaagatctgagctgtgttagtgactcaaccattaactctgtgtgtgacctgggtgcaacccttaggctgtcgcctcatttctaaaatgagataaccattgtccttttctattaattcaggatatcatgaaagattaattagactacgtccataaaaacaggacttggacttaaagtataataacaacaacaaatt

SEQ ID NO: 377199 - DNA, 327 bp, Homo Sapiens
gagcttcggtaacccgcgactgctattagtcattcctgtaagctgtggtgtaggtaacagagacagctcagatactgcttttctgtggctgtggcattagtccagcaggtgcagcttctgccgtttggaacaatggtaagcactgggggactgttcatatgccctgtgtgcaggcctattaaggggtaaaacacccaaaaatctatagctctgcagtcggctggatttgaccccctctggctgtacaggaggccacatatctgctcaacacaattccaccttgtgcaggggtgcactgccctaacctgtcagcactgcccactacta

SEQ ID NO: 377200 - DNA, 170 bp, Homo Sapiens
tgatgaccactgggtgtggtttaggtgatcctccagatgtgtgagcaattgtagctggccataagaagatttcctggctgcccataagctgccattttgtgaggaccttcagctaactatttctccacatactagcagatcgcgcgtaccggagctcgagatccgtaaat

SEQ ID NO: 377201 - DNA, 227 bp, Homo Sapiens
atgatgtatgccttcagatgataaagaagaaaaacagtgcaactaggtaactttatatatatgaactgaataaaaacagtttactcactgacttataccattttaaataagaagctggagcttcacaaatgtgaccatttcaagttgaataatacaagtatgtataactgaaggttaggggtaaggggtcagggagaaggaagcccttgtgggactactagcagacg

SEQ ID NO: 377202 - DNA, 295 bp, Homo Sapiens
  misc_feature (170)..(186): n is a, c, g, or t
gatgctaaactgtatagtgcatgtcgggtaaagatatgagcggtggaataaagtcactgatttactaagttgaaaaaactgatgggttaacccatagctgaaaaagtaagaattatttttgagatggggtgttgttgatggctgatgtgatacttcagttcttatcttcnnnnnnnnnnnnnnnnngagacagagtctcatgaccagactggagtgcagtgatgcaatctttggctgggctcaccgtgcagccttgcggccttccccaggctccaaggggattcttccttagcct

SEQ ID NO: 377203 - DNA, 529 bp, Homo Sapiens
gtgactgtgggtattctaactggctgttcatccccaaagtacccacacatacaggctgcatattactgtttgttaccaatccctttctgacactgctctggagccatggccgaaatttccagctgcagcaccacaggaggaagtatctgaccttgtgtctgagtcctaactggcagctcagtgcccacccttttgggctctgttttcctgagcacaggagctccccggcaggcccatctgtgtgtctctgatgctggtgcctgggcaatatcacctgcacttggacccacaacgctgtcccctgtgtgggaaggcacaagacaggaaacgtaagtaggcctagcatctgtcagtccagtccagagtaggtggggggagggggtaaagcttcggctgctggaagccccactggcgctgctcagcatggaatcgggaagtgtctggtggaaggtagggggaagggaagggatggcacgaagaacctccctgccattcctggcgcatcaatggagatagcaagtgagaggtc

SEQ ID NO: 377204 - DNA, 286 bp, Homo Sapiens
tgaggtgcctatagagactccaagaacacatcacctgtcactccctctgtctgcctcctcaggccttctaccctgatgacttctattgcagagatgggtgaagagtagatgctagatctggtgcagaaagctatgagcttatgtcaatccagcctagtgatgctcctggaaaaatatgttctttcctagcattcatctaaaaatcttaagaaatggttgtcattgtcccaatttggataatgtattcattcttgaaccaggagctcaggcaagtgtatgaggagct

SEQ ID NO: 377205 - DNA, 462 bp, Homo Sapiens
  misc_feature (203)..(203): n is a, c, g, or t
tcgaggtgccttagagacatcagacaaagaaatgcatgccagctaggtaatcctttttgtggaagcgctagataagagattacgaatgctgaatggtgagctggggaaaaatttattggtttaagtgtaggagaaccagtttgggctcagaaacaaaagaacatgaaaacagcagtatacctcagtggctaaagccactaccntagcttgagtggcctaatttgtttactccacctggggaaaaaaattggaggtagccacattactgaacacggattgtttaataacaggatttaccagaagttacatatttcattgaacacggctttaagaaacaccttggaattaccagtaaaattggctaatctaaaggaaacctgttaacattaaaactaagaaggggttgaccaataaatggcttgaaggtgattacagaaatgggccttgttaagggaaaagccc

SEQ ID NO: 377206 - DNA, 473 bp, Homo Sapiens
aagggctggagttgggcaaagagactgggctccccggtgtacccagtgctgtttcctctgttcatgcagcctgtgattcatagcttccctggggtgttggggagaatcacatttgggtcagccaggtttagcactgacagttttgtctttagaatcaagcagatgtggaatcaaatctggctgtatccatgaccagctctgaagccatgagtgggttacatagctttagagcctcagcatactcatctggaaagtggaagtgatcatgtctattttgcagagttgttgccacttttactctctggaccccactttccccatctgtcagatgaaagagtgggatgagatggcctgtctatttatctctcaatcacaatggctctatttgaaaaaagtttgaactgccctaagtgctaaaaaggaagatggggagccatcaagacaaacttaggcctacattaccatcgagttca

SEQ ID NO: 377207 - DNA, 621 bp, Homo Sapiens
  misc_feature (230)..(270): n is a, c, g, or t
agtgccttagagttatggagcctctagaagtggctgctgtgaaaagcctggagtggagctggctggtgcttccggtctgccattctctgaactcgatggtaatgtaggcctaagtttgtcttgatggctccccatcttcctttttagcacttagggcagttcaaacttttttcaaatagagccattgtgattgagagataaatagacaggccatctcatcccactctttnnnnnnnnnnnnnnnnnnnnnnnnnnnnnnnnnnnnnnnnnggcaacaactctgcaaaatagacatgatcacttccactttccagatgagtatgctgaggctctaaagctatgtaacccactcatggcttcagagctggtcatggatacagccagatttgattccacatctgcttgattctaaagacaaaactgtcagtgctaaacctggctgacccaaatgtgattctccccaacaccccagggaagctatgaatcacaggctgcatgaacaaaaaaacagcactgggtacaccggggagtccagtcactttgcccaactccagaacttccaacagctcaacataaagacctgggggaggggtctaaggcaccctcggggaacctctagag

SEQ ID NO: 377208 - DNA, 567 bp, Homo Sapiens
  misc_feature (512)..(512): n is a, c, g, or t
cccttagaagagaaaataacacacagagaggacactgtctgaagacacagacacgcagagaagatggccatgtaaacaagaggcagagactgaaggtctgtgctggaaatcaaggaatgcccagggctactagaagtggatgagacaagcaaggctcctctcccacaggcttgggagggagcacggccccaccaacatgcaattcccttttcaaatgctgagggctgacacgctactccctcaaccaggggccaaatatttgccttaaaaatgaaactaaagtaaaaacaagattcttgtaataaaaaccggctgtatagcaaacaggatgaaatgtatcattctattccagttctctagttgggcttgaaataatattgtaataaattcattaaaagtactagtaggaggaaaattttttaccatgattttgtggtacagtggctcctggccactgtaaatttgcaagtttaagcaggatcattcaataattttaaaatactttcctcccncagctttttttgcagcgtagagcatacctctaaggcacctcggggtcctctggtc

SEQ ID NO: 377209 - DNA, 466 bp, Homo Sapiens
caatggagtgggagatggggtttggagaccagagatcagccaggatttctttcagtaagactctaggccttccatttttgaggcatccttgtgttgtggataaagtgccctgtccagtgtttccttgggcaagtttcttaacctttctgagcctcagtttcatcctccagttggagttaataatacctgtctctcagaatggttgtgagaattaaatgagttgagcacgatatgtgtctagtacagtccctgttatataggaaatatttgatgaatactaacttcctttattcctcttttgctgtgaacagctccttataccaaaatctgaaaccaaactctgcttcttacccaattagtcttcttccttccaaattttcaagtagcagaggattcagttttcagaaataatttaatgaaaataactggcttcactctaaggcacctcgaagatcctgtagatcac

SEQ ID NO: 377210 - DNA, 317 bp, Homo Sapiens
gtgacctagaggatccccgaggtgccttagaccagaactgggcactgctgaagtggtcttaaaaccacttcatcttccctaatagcaattcatgttccaccccttcaagtatgaagatctttctggtcagtgacaaagagaagtaaaagcataatcatgtcattctgcatgcttacctttgtatatgcacaataatctaaaatattatctttaaaaaaattatatgattatatgatccatctcacattgatttgtattaagtagtaataacactgtgtctaatagaaactaacaaaccattgcctctaaggcacctc

SEQ ID NO: 377211 - DNA, 231 bp, Homo Sapiens
  misc_feature (157)..(173): n is a, c, g, or t
attcctcttagacatgtgggggcctaattataagaaggtagaagtccctttcattggttaaatattatctgcttatttatgtgtcatgcttcatataaatgggattattgaggagttttaactgtgcttgttactatggattggaatccatatgaannnnnnnnnnnnnnnnngggcggaaaggccggattttaaaaagtaaaattttctccctttaagagacttgaaata

SEQ ID NO: 377212 - DNA, 633 bp, Homo Sapiens
  misc_feature (526)..(526): n is a, c, g, or t
aggtgccttagaccttcttccctgtgactcctcccctctgactgttgccatacagtctaactgtaacacgtcctcctttatacgttctccctgccagccacacagcagtcagaatagtatatctgaagggccctgagttcactcacctcacctatccaatacccaggctctctacaacacagtcttaccttaccttcccagccatttctaaacaccctacatcctagtcaagccaagcaggactgattgcatttccaaacacactagatactctgtgacagtgttcctctgcctggcatgccctcctgtggatctggccttagaaatcccactcacctttcagggccatcttaaacaccaattcttccctaaagcctccagctgtgagggattactctaatccatagatcccaccccccaagcagtagtctctcaaagtggataagaaaatgatagaacttggagttataaatattaccagttagtaaaaaatgcttaacaaagattagtattactatttaccagntagattacacttcgagttctcccctcattcaggtattcttccatttttatggtctaagattctttcccaatttttgccacttaaaattttactatttttagaatggt

SEQ ID NO: 377213 - DNA, 323 bp, Homo Sapiens
ggcaactagtccctaccttcttgccagtgttcaataaactcctgctgtctcccattctcaacctgaaactccctactcagttcccaagtaactctctggaagtcaacagccttctaacagatctttctatttcctctcgaaggttgtgacaggaacataggcagttgtaacaattatcctatcagtcaacaagcaattattaagctttctccagtgttagcttgtgctaggccactggtggggtttaaaagaagcagaattagatctcagctctgagaagttgacaatactgttgctgaaagagtgacttatctaaggcacct

SEQ ID NO: 377214 - DNA, 441 bp, Homo Sapiens
ctgacctagaggatctccgaggtgccttagagggatgggttaggggttgggcctcatgcaggagctctccaggttggtcagactttactatttctctgaagcgtatgctgccctgattggggcagtgttccaatccttgaaagacttcccgaggctgtgaggactgccaataaacaacacaggatgtgagggaggtaggagaaggtggcctctgtgaatagagcaggttgagtagcctctttagctcctcacttaaagctagaggtgacagttctagattcttgagtccaggggtatgaagcctgcagtttaaggtctcagaagatcctagaacttctgcaactcactgattctcctctgtggtgaagtttttcttattccagagcctttctacctccttctacaaccaagtctttgtccacttccatccactttgagcac

SEQ ID NO: 377215 - DNA, 395 bp, Homo Sapiens
aaggattacgaggtgccttagacagagaggcagagatacagacagacactggacgaacggctccctgatggaacaccaggaggaggcatgtatggcctcgtatccaacagctgtagcctctgccctcctgcttccacgctccacacacgccagtctttgagtcgcctcccatgccatgatccctcccttggatacgaccgtgcctggggttcagcggtcatgaacataacccgcggctgtgaacatcctgtcggcctccatcctgacccccgtgtgatattccgggtctgcgggaggggcggcaggggcggaagcggcctactgcacagccctgcccctgtgccgcaggcgcttccatccggttgtgccaagtcctctgccaaaaaccccgacag

SEQ ID NO: 377216 - DNA, 617 bp, Homo Sapiens
  misc_feature (443)..(443): n is a, c, g, or t
taaataacagacatgcagatttggctaggacttacatcacacacctcagaagccaggaacgatgagtagcagggctctgaggcccaggaacacctatctgcctgggtctattcagaatgtgtgtatttctgaaacttaatattaagaggctgtttcctgtgccacaggggacagacctgagaaatggcacaagtctccctggatattggaacttcagactttccttaaagcctcgtgaggaaaatagtgcttttacagcaaattaaaaggaagtgtttttggacatcgtgagaccccaagtggccgcacagggtaaaagcagtctcaaagaatatttaggcaagtatggagaactgatagaaatcaaggcataggaggcaaatctctggactataagtagactccatcctgtaatatgttcctgggttgaccagtccttgggngctatctcacaccagatcttaagatctgccggaatgcctgatttagagcatccacgcataagccaagaagcagcagtgcccagcagaactcccagactatcttccagtgagctcaaggggccatgtggcctcatgccactttcatataggaaaaatgaaaccttgttgctggag

SEQ ID NO: 377217 - DNA, 523 bp, Homo Sapiens
ttccctgggcctggatgcctgtctggaggggtaccagatcattagtcttggtatcaaaaaaagagtctatgtgggaaaaggtcaaaggagccaaaggaaccttcagcatccctctgatgcctcctctccccccaggcaggggctgcacaccggcctccaggcaggagaagggccattgttgcaggcgggattggaaatcttctttagatgcctctgtcctctcttgcacaggtgaaccctgtcggcttcacagaaaaaatatttagccaagggcctttggtcatccaggggcaagaagcatgagagtcagccattccctaggctccaggggaggaggcagattgcagccagatacaggacatactgatctcaggtcaaatgcgtgatttcttgaagtaaagttgcagttaataagatggcatgcttcttcctccgggtcgaattctcttcaagcttccagcccatctcacacccgcaggggcctgcgtgactgactccaggtctataggcacctcggtgcatc

SEQ ID NO: 377218 - DNA, 436 bp, Homo Sapiens
caaagagaattaaaaaaagaaagtatctctgaaagagtgaactttactatatgtagatgtactttaataaacctgtatttttattttaaaaacacatctttggcatcttgatgtccctgtcagcatgtaccctcttggtacctacaaccttcaaaggcccagctttcctgtaatgatcctggttgttttctccctctttcacactcttcactgctcaccaataccccaatctcaccaccaaacaaggctttgcatgtgaaggcccatttcttcccagcttggggtttgaaagagagccggtagaagaattcagtatgtttataaatgcagagagatccttaggggagcgactctacactgaggtagccatactttaacagaggagcaacaaaccttaaaagaaggattatcctctaaggcacctcggaagtcctct

SEQ ID NO: 377219 - DNA, 157 bp, Homo Sapiens
gccgccccggtatcgagtgaagacatgaaactacagtcagaagggtaaagttctaatgttagctccagtactggctggcacttacattcactacactgtacctataaaatcaacagaaccaattactaactttaaaaaatacttatcagcaagaaac

SEQ ID NO: 377220 - DNA, 168 bp, Homo Sapiens
cctgtggactgttcctgctcagcccctggattcagcctctttcctaaggattattgcctgctcctccaagcccttcactgtagaatggaagcctgtgattttcctggcatcatgcatgactgagaaggtcagtgtggctaatactgagcttcactcgaaaaccggagc

SEQ ID NO: 377221 - DNA, 427 bp, Homo Sapiens
ttcgagtgaaggatataactaccctgctcttctttgtgctctaatccttcaatttctgtgatctataaatataggcctcaacaactgggtaacaacttgctcctgaaaaaagcctttgagaaggctttatctaaaactgggattaggaaaatacaaagttttttggataggatctcaagatagccaactcaacttttctagaagaaattcaactcgctttcaaatgcgttgttaatgctatgttaaatgcagcatagaaataattctatgaggcaacagcacaagcttctcttagctgcagtgaatgaagtaaatgacttgtaatttctggaagtcttggttatcttcaggtaaaactttaataaccctgggaacatcaagggactgaagacatttctctctcttcactcgaaaccggggatcctct

SEQ ID NO: 377222 - DNA, 448 bp, Homo Sapiens
agtgaagggagaagtgctacacactttcaacaaccagatctcatgaaaactcactatcacaagaacagcaaaagggaaatccacccatgatctaatcatctcccaccagctccctctcgcaacattgggaattacagttcaacatgcgatttggtggggacacagagccaaaccatatcacaccccattcaaagctatgagattataaaatggtccttctcctgtcactcagctgactgtaaattcatgctggcacatccacaccacggcagacagacactgcttgggagttctgttctgtcatcaacggagctgtgatgaccgtggatgtcactggtagtggccaacatttctgcagctccttctcagttacatcctcaacacaaactcctcaccaggtatgatggttttcaggatctgatccctgtcccatctctgttctcatttc

SEQ ID NO: 377223 - DNA, 520 bp, Homo Sapiens
  misc_feature (408)..(416): n is a, c, g, or t
gggcatgtgggatctccctattgagaaaaacacctcaaccagggatcatcttcctcctccacaatagtatgtcacaagcacttctgtagctggttatgggtagaaatcaagaaaatttcctaactagtgcctggaatcctggataccatcatataatgatttttcttcttctcttgggtaaccaataggattagaagacagcagctactagtgactgcttttacttaaaccttgcccacgactggactgttcgccttttgtaaggacaggcttcttagctgcagaggtaagggtgagggaaggcacatgtaacaagtttttaagcaattccagaaacttttttatttaaaaactctatggctaggtagaacagtagataagcaggtccacagataaatcaatcagagnnnnnnnnntcttcctttagaggaggtacatgaaacagaaaaccctccccatgacgagatgcaaccatgattccctagggagatgaatgggaccgctcaagccattcccattg

SEQ ID NO: 377224 - DNA, 336 bp, Homo Sapiens
tttcgagtgaagctcgtggtctgagtgatgtcgtggtcatggtgtatatggattcttttaatcttatctatgcctatattttgaagtaattttctgaacccttcaactgacaaagaattattttctccatagcggtagaaaagctgttgtagatcatattgccgtgtggaaattgccaagtcaacattaatgccagattcccaattcggactaattttctcagtggtctgggggaaagcagctgcttttagttcatgaaggggatttgtgacagagagggcaaaggtcaggatcaagattacagataacttcctcgccattgcgccttcactcgaa

SEQ ID NO: 377225 - DNA, 246 bp, Homo Sapiens
caaaattgtgtgtttgttaagtcatattgaaatatgtatctgtattaagttatagcaggatatttagttctcctgtattactactgaggtatatttgctcacatttatttatactgaaagacactaatgttcaaaagttagaataaatacaaaaatgcatcttgtactttgctgttttaaccacttgataccttaggtgtacatcttcctttatgataacaaataccaggccacagactgagtcag

SEQ ID NO: 377226 - DNA, 240 bp, Homo Sapiens
ttcgagtgaagggaactacccttcatgatgtgggtgtgcctcacctaatcagccaaagaaaggccttaaaaagactgaggtcccccaaagggtaaggaatgctgcctccagactgtctttagcctgaagactgcaacattaactcctgctgggatttccagcctgctggcctgccctgtgcattttgaacctgacagatccttcaatcatgtgagccaatcacttaaaaaaaatttctcc

SEQ ID NO: 377227 - DNA, 596 bp, Homo Sapiens
gtagtccaattgtgaaagaaaacaaaacaagaagaaacatcccaagaaattttccaaaatcttgtaacatctgtcccattgaaatctgtggaatatattacacaggtgttcattaagattatcagaaaaacaaaatattaaatataaatgacccagcaacaaaaggaagaagacaaacacataatccacaggccatcccttctattgcatctggttgagacagatcattttaaaaacatcgaaaatccagctgcctaacaaaaagtcattctaatcataccaacactatcagtgttagatggcacgttcctagaacctggatcagggtttcagaggacattgttgttatggagatagaggcagagatatggagatttaagaaaaggcctaatttgcaagggataaaaggaaaataccctgctcaaacttaaagagaaataaatgcttatatttacatggcttcttaaattttacaaacataaaatcattatgaggcaaagtatttcacctgatttttgaaaccaattctaaaccaattcctaaaatcagcatttcctcctatgggactgccctaatttcttttttgactactcccg

SEQ ID NO: 377228 - DNA, 135 bp, Homo Sapiens
cccacaatccaagctgccatattttgaggccagggggagttttattctacaccctttaccttcctagataatatgtctaagtagtttatctttaatttcatggttaactgtgagccaaaatacaattgactacta

SEQ ID NO: 377229 - DNA, 671 bp, Homo Sapiens
tgagtaggtccaaaagaaatggtattaaagctgagacctgaagaattaaagaaataaaggagccagtcacacaattctaacatattttagtagcagaactctttttaaaaatgaaatcattagtagaataccactcaaaagcaagtaaaatagacttgctctgatggaagctatttagggcttctgctctgctcactcagcctctcttaaccaaacccaaggaggccctggatattcttggagacctttttctagtatcaggatgagctgtctcaataaataatcctcaaaaaataatccagggcttcgtggaacgtggtttgaaaaccactggcctgggtgaagccagtaggaaattgctttatgctgtcctgccctgataatcagatacaaagataagtacctttcactcagcagtagaagcctgcgttcagcaccgacacagatattaatctttcccttgtatgtcactgaaagtattagatacacaaagcaccaattgctatgttctttgtactaaagcttcagtgatcagtaacctagcataaaatgcttgggatactttaattaacatgagatcattaatggataataataaatgcctcttaattgtatctaaatatagtaagccttagttaaatactgagaggataagcacttccttggactat

SEQ ID NO: 377230 - DNA, 392 bp, Homo Sapiens
agttccaaggtcacagctctctttgagaagacagatttattttaagaaaggtagggagtggggagggagggagctttaatctcggtgatccctcctaccttccacccccaacttggtaatatctggtagtctcagtttccaacagtggtacacagaatcctaaactggaatgttaactgaaaagtgaatgaaccacattaatttgatgagtttacaaatcaaacatggccatatatatttatttctaagccaaaaaactcaaaccatggttttcattattgatttaaaataagtattctttattttacttggcactagaaactactcatttaagcaattactagaaatatgcattttatatcaaatgaatgtatttaactgttggactacta

SEQ ID NO: 377231 - DNA, 514 bp, Homo Sapiens
tctcaggtgggttatatgcactgccctgggaaattggagaggaagtgtgagaaaaaccatttcccccttccagcttgctgatgttcacttgagaagctgattggaggcgactgatcagtgtgtgtgtgaagggagtgtccctcctttgcggctgcacctgaagcatccactgttgtgtctctatcagccatatcagcagcgacagcttcctgtgtgactgccagctgaagtggctgcccccgtggctaattggcaggatgctgcaggcctttgtgacagccacctgtgcccacccagaatcactgaagggtcagagcatttactctgtgccaccagagagtttcgtgtgcggtaagactgtctttgtaactttttctctccttcatgaaggacaaggacgccaggaggtactcttcattatgggagtaattcctgtgatcagagtaaaccccagcccgtggttacagatcagctgctggatgcaatttatttcttgctgataccacacacagta

SEQ ID NO: 377232 - DNA, 395 bp, Homo Sapiens
actaagtccaaaagaaacacttgggcataaatccaacagaacatgcacaagatctgtatattgaaaactgcaaaatgctaattaaaaaagacctaagtaatggagaggcagtatgctcacggattagaaaagacatattaaaaatatttgttctatccagactgttgatctgtatatttaatgtaattcctaaaacattcctggcaggattcttttggatatagacaagctgattctaaaatttatagggaaagttgaaattatttttttaaattaaaaataaaatttctatggggaatgcaaaagaactaaaacggttaaacaattttgaaaagaataataaagttggaagaatcactcgatctaattttaacacttactgtacagtaatcaag

SEQ ID NO: 377233 - DNA, 270 bp, Homo Sapiens
ctgtaagagaaggagttctatgcattccctgcactgagctctgtattcccaaggcttcaggcctctaggcagatgaacctcaaatccataacctgagcctttacgtttccctaaagtccaggtccctacttactgacttgttgaaaagaaaatgtactaaactgggcacattaccttcttctgcctcctaaataagctcttcccatattcaaaattctgttagcagtttgaccattcattgcttgcttctgatcctgaatgaccttggac

SEQ ID NO: 377234 - DNA, 404 bp, Homo Sapiens
cgggagtagtccaatccatggatcattagtgctctagtgaatgtgagggtaggaacatccttgcaaacgtcttttcctgtctacatgcaggagatgcttggcttatatttagagctagaatttctgggttattgggttagtgaaagggctactccaaaaagataaatcctgaaataagccctgctgagataatccactttgaagatcaagggggtgggggaacccataattatccttgtactgatacacagtcttaattactgtagctttataataagtctttatatctgatgggacaaaccggtcctccttgtacttgctcttcagaagctggctatatcaggaggttctttacttttccagagccattttagaataaacatttcagattttgctacaaactc

SEQ ID NO: 377235 - DNA, 186 bp, Homo Sapiens
tatttttgtgaactggaccctattctatttcttcaagagtcatagattttttaattgctttgccaataagagtaatagatttgtgataatcaattacttttgctcagcaagttggtttttatgaatgcagtctatggccacacaagaaaacaaaattaatagtgctaatagttggacttactcacg

SEQ ID NO: 377236 - DNA, 418 bp, Homo Sapiens
  misc_feature (313)..(372): n is a, c, g, or t
cgtggagtagtccaagacttacagccatttatcgcagaagctatggataaagctggtttcaggctacaatgcacagtctcaggagtcaggcttgcagagaagtccatttcggaaacaatgttgtgtggcctgactgcttttcctccctggctcctggcccctgttttagctgggtaggacatgaatgacccaattcataggatgaaatttacaaaggatgtttctcaaaacttcgggttttcaacttacatatattcacacctgtttaggttgagtttatttatcgatttattttcaggcagggtctctatcnnnnnnnnnnnnnnnnnnnnnnnnnnnnnnnnnnnnnnnnnnnnnnnnnnnnnnnnnnnngctcaagtaatcctcccacttcagcctcccaagtagcttggactac

SEQ ID NO: 377237 - DNA, 257 bp, Homo Sapiens
gggatcccccgtagtaagtccaagccctgattagatccatagagtttggaagtcttccttccaagtagaggggcttatgacaaatcttagatttttgtatgaacctacaatcacagaggtgtatctgtaagctaactcatggtcaaggagatcagtcagtaatttttttatgtgcttacataagaattgtttttcttcataagaagacaatagaatcaatactctctataacatcttattcacaatgacaaggattc

SEQ ID NO: 377238 - DNA, 415 bp, Homo Sapiens
cagcatcattaaagtagttctgtggcagttgcaagtctttttggattaagaattcatcaatatttgtaatgtgtgctgctgttttccagagaagagaaaagctcatttcctgtgatttattagtaatatcattagatactttataaagtatctgcatttattttcccagatcactctgggcccattatcaaacaatcaaaacatcatgaatgaatgagaagcaaccctttgaaatgctgtgatggagtaagacagcagatggtgacaagtgggcgatactgccctactccttgtatggagacactggagagtgccggccacttccgcttctgccgattccagttccagttctgtctcacagtggacatagctgatgtagcagttttgaaaacttctctgcctgtttagttaaggg

SEQ ID NO: 377239 - DNA, 359 bp, Homo Sapiens
aaggaactcttgaagaaaaaaatgcatgttaacataagatcttcatactcagttgatcattgatactgttttcattcttgctaatctttctaaaaaccaccaaatatatttctatattcatgtgtattatacatagctatatatagtttaggtatcttcaattcagctgaaaaatgttaagcctaaacatttccaaatttagagcatttagtcacatcaactctgcttttccctggggctaagtttttggaaaggtagggagtcagctgtcatttctgctgtttttaaaaaggtgaagtgtgcttcctaacaaataaaaaggatgctgacagaaggttactttctgcgttggacttact

SEQ ID NO: 377240 - DNA, 482 bp, Homo Sapiens
tagggctttatagcaaaagaaaaagatgatcctccaaaactgcgacctaatacagatgatggctatttttaataccttcaataatgaatgagtgtccttcattataaatgactgactttaggatatttttaaatgataaagaaatacaaacctcaaaagtcatcttaaaattgtacagctcaaagcccctacccccaatagactaggcctatattagattaaaatgtacttaaaagtcttcatttctaagtacctatcatctctgtagaataggtgttctcaaacttactaaagaatcagagatctcttggataatgtatcacaagctacttttatattaaaattaaagtaactacataatcttctgctaaacagatatcttgtgatatcgcccgtaagagtggcagaacagtgccaaaggcataataaaatttcatggaagaaaaattaatagtcagaaaattctatccaccaactctctt

SEQ ID NO: 377241 - DNA, 184 bp, Homo Sapiens
tgtcccctagcgggcatgaaggtatgatttttaaaaatgacttattttgaataattgtgtatttagttctttttgaaagagtcatacatgtatatgtgtatatttggcaaaagtaggcggtgtggatttccagtttactaggaatggggttatagtaaagtaccaaaattaaatattattattt

SEQ ID NO: 377242 - DNA, 435 bp, Homo Sapiens
gggcagggtataggcagaagacagtcacatttttcaagtcacatatcttttaagaaagtcatgagggccccttgggctgagtctgggtggaagttttcctacctataggtgttggtcacagaggtatgtcacaataccaataatatgtgacacttgagcaagagaggatagtcacatcaccaaggtgctcagttcagtgatatatcacaatctcttctttttgcagggctcaggaaaagagtagagtcgcatcacctaggtgatgaacaaaatgagataccatcatatgcctatggacagagcttatgcatggaaagtcacatcacccaggtgtctaacatagcgatatattacaatacacatgtatgcaatgcccaggcaaaagagaagagtcatatcacgagtgctggtccagcaatatttcatataccgtct

SEQ ID NO: 377243 - DNA, 214 bp, Homo Sapiens
attcggcttaaactgaaaaatattaagatatctcttggcatcatgatcgttattaagggaaattattacaaatagcagttaccaattattgagtacctcaaatactcaaaactaatagcaagctatcaattattgaggaatctcataaataagcactataaataagtgtcttatattaaactgagcaattcagctcaatccccccgctagggaa

SEQ ID NO: 377244 - DNA, 183 bp, Homo Sapiens
taattatacaggaatccagcgatctacttggaaaaataaatggagatgggaccatattgttaagacaagttgtggaaaaggttccaggatcaaactgggtagggtataaatattctgcacccatggaactgctgtggtctcttttcttttataacctgattatcagtcaggcgcagtggttca

SEQ ID NO: 377245 - DNA, 388 bp, Homo Sapiens
ggagaaatgtgtgaccaagagtgtgtttgaggttactgaggaacaaaacaagcttcagtttctcagtctattctatgaaacacacagaaacaggagcctcttaatgttcattgcctttcccctcaagatattccaaaaatcagtgacaaccacatcttgtactatgtgtattctggtaaaattctatccataaactactgagcagaaagagacagtttcacagggcctgcatagcaacatctgaaggaaaacaaaaggcagcggtagtaccctggatacagagtagggcctgctccccaccacactctccaaggcagcagcctagacaggtgcaaatactgtgctgagagcctgagctcctggagagcctgggccacactctcactct

SEQ ID NO: 377246 - DNA, 390 bp, Homo Sapiens
  misc_feature (62)..(131): n is a, c, g, or t
cgacgttctgttaccacccattagttacttagtaggcatcttgtttatcacatctttttttnnnnnnnnnnnnnnnnnnnnnnnnnnnnnnnnnnnnnnnnnnnnnnnnnnnnnnnnnnnnnnnnnnnnnntccctcctgatatggagggactgctgtttttccaaatatattttatttctgtatgttataaaccgaacaatgtaattagatacatattgttcaatatgaattgctttatacaatcagttcagagaaggaaggagaagaactcctacagttataccatcttggagtaattaaataacttacataattacttatcactggaactctatctgttattctgtgtggaatttaaattaactgtctggcatcacaattattgcag

SEQ ID NO: 377247 - DNA, 379 bp, Homo Sapiens
cgacgtctgttaccctttcagaattgaagagaagagtacttggtaaaaaccatttgtaaaaagcccaggacaccatgactgaggagtaggaattaatcagatgtaaacagaggcttagcaaaactattaccaaatcccaaaactgttcagtctctaattagttgtgatcatcagttccttcttacattagtctaacaaaggaaatgggcaaccctctctaatggaagataacatcatatggaacctctgtggttctttcatgacaatttccaacatataataaccattactagatatgtacaaaggtaggaaaatatgactgacaataaagagaaagaaaaatgatccaagcacacccatcgatgatctagatattgga

SEQ ID NO: 377248 - DNA, 467 bp, Homo Sapiens
cgtacggtctgttaccggggccctagaaaactaaaacaggtacaataccacctccagctgactatgcatcttcaagactcagatacactcatgttgtccaaaaaccactatactaatccctgaaagggaatatatcataaatctccaacttctttaagatcctaggaacaggatgtgtttcctagttcaaaaattttcagatattgaaaaggaaatagcgtgtatttaccaaatactacctagacactatcctaggggtgtctggggcaagatgctataatcaaacacataaacatttctcccacaaaacacaaaaatatgagcacttttaagatgaaattaagactacaaacagttttacagcactgtatgtcagatatagctgccaaatgaattcacattagttcatatataaatgctaaataaactacaaaaaaatccttcgcatatctgaacctgttggattc

SEQ ID NO: 377249 - DNA, 350 bp, Homo Sapiens
tgaggatccccgtaggtctgttaccagagcgtgtctgccgtattcactgtatctgcagcttggagcacagtagactcaaatgcttgcatgccagctcttcccctgtacagcctggattaacactgatgctagcagactcctttgcacaactgattagctttcgtaactaccacagctttcttactgctagtcattctgtgatgggattaagctaggtcttgaactccttaactccagttccttggctactactgagtacatactgaataaggcaaaattgacttacctcttttgttttgctcccctgtggtagaattctaggggtacagaccgtcggggtaccgagctcg

SEQ ID NO: 377250 - DNA, 443 bp, Homo Sapiens
cctatataattataagcagctctccacagtagggttgaaagagaatataaggaaaattagaagtactgtatttttgctattggaaatgaaatattgtttcatgcacctttgataaaaaataacaggattttacagccttctgatgattcattcaaagcatggggaatagttcatatgtttgttaaatgaaaatcttatgtagctatttgtgtgtccctcccacttcatatactacaataaaaatatatatgaatttctaaacaaagtgtatattttaaagatgaattgattcaatgtgtacttaccagtttactgtgtggttttatcttctaggtacagatagtttgtggtactacttgaaaatacctttaatattattttcatcagaatttgtaatatataatccagtttgggatgatgaataaaatttttctaatctcttg

SEQ ID NO: 377251 - DNA, 492 bp, Homo Sapiens
  misc_feature (41)..(41): n is a, c, g, or t
attccataaccctgtgcctatattacttgaaggggcctaangaaaaatgtatggtccagtggaaacacaagtaagtgtaccccttaaatgcccttataaaagacccatcccatcccagtctgcgcttttgactgtgtgcaagtatcagtaataatgcttttgggggctcagatgaacagcgaacaccaatcagcccaggactctggaaggaaagctccaaaaatgagaagtccttcaacaccattttccattactgttctcaccaaatcaatgactataaaacagttttgattatttatctccatcaaagtgatttgatttgagataatcacacaatctcaggctcggtatgtaaaaatgtcagaagtggctgaagtaaaagcagcagctttgtgctgaagacacccatttcctctgactccagagctccacagtctggtctcaagagttgtccctcagaggaaacagctatagagggtacagagctgaaac

SEQ ID NO: 377252 - DNA, 502 bp, Homo Sapiens
  misc_feature (32)..(32): n is a, c, g, or t
gagaaaagaatagaaaataaaagcgtacatcncagatggtaagggtatgtgtttttaagtaaacatttgttcatgtgtatatgtgttagattaccttgtaaaacatattccttattgtgggttacaggccaaaaaaagtgtttgtttttgtttttaaaaatcctacagttccagattttcccttagaaaatggggaaaaaaggaatgttagaaagatcctgacctgccctatgaacctagtgaaggattttagaggaagtacccaggctattttagagatcctgatactggtttcagaaaggtaatccttaaggcaaagggtaggaaataaagttatgttgttagtagaaatgtcaaatacggttaaagttgtgaggaggaattattttcctagtggacctacatttgttgtgtgtagatctgtgactattactgatctgttgtagcacattttccaatctaaaatgtccgatacagcacaataataaacatggggcagaat

SEQ ID NO: 377253 - DNA, 496 bp, Homo Sapiens
atctttacatggtactatccaccagtcctagtggtggtagtgaagctgacattgaagggcctttgcctgctaaagatattcatcttgatttaccatctaataataaccttgttagtaaggatacagaagaaccattacctgtaaaagagagtgaccagacattagcagctctgctcagccctaaagaaagtagtggaggagaaaaagaagtacctccccctcctaaagagacactgcctgattcaggattttctgccaatattgaggatattaatgaagcagatttagtgagaccgttacttcctaaggacatggaacgtcttacaagccttagagctggcattgaaggacctttacttgcaagtgatgttggacgtgacagatctgctgccagcccggttgtaagtagtatgccagaaagagcttcagagtcttcttcagaggaaaaacatgattatgaaatttttgtaaaagttaaggacactcacgaaaaaaa

SEQ ID NO: 377254 - DNA, 372 bp, Homo Sapiens
acgtctgttacccaagagggcgcttagcacttgtttgctgctcacttgcccgataattagtactggctcaggcagagactgtggaaatagtgagactagtaaaaaatacgttatctcatattcattttcatgtgcaatattttcatgtaagtgatagcttaattttttagcagacttcagatttcaaagttttaatttatctcactgtgctagtttaccttctttcagtggacgtaaaaataacagcatgaccactggtccctgggggatagttggcagtgtctaaaggcattttttattgtcatcaaaaatgatgacaccatattgtcaccataagaatatggtggtatttagggtgataatggtagagat

SEQ ID NO: 377255 - DNA, 426 bp, Homo Sapiens
aggtctgttacccatgtgggacatctgagtatcctcttactattgaaatgtcaatatcaatcccagctatatctcaccaccgttccccttagattctttctacaattgtcttatttgcctttagctcccacctatatcatctcatgctcagagaaaaacaatgttccttagaggttgtattctttattctccaagaatctgtctgaaacttgtacagctagttccagtcccacaactattaagtggtttattaagtacattaggcagaatgtgcacttcatcaccaggttctagctctggcaaaggagtgctgtctacagcaagatttttgcttttagaattttattaactacatcttttgggttcatccatctacaaacactgattaagggcccctggggcaaccaattgatcagattactaaaa

SEQ ID NO: 377256 - DNA, 515 bp, Homo Sapiens
cgacgtctgttaccgtaaaaagtaacctagaagtagataattatctagtctagaccagagaataaaacatttcagctttgcatctcaaagtgtcttggtggtctcctaggaaatttggtacttcttaatagagttactttaccttaaaaagaaaatttaaaatcttaagtcagttatcaatattgcatcttcaacatttttgtttcacactctcagtcttttattctctgtgtgtgcttgatcataactcaggttttcctctggatctcttacgctgtgaaagccttcttggtttggaccctgcaacttgcagcagagttctaaacaaaaattacacgctgcttgtattccatggctcccctcaccaatgaaatccggcctgtcagcagctgcacccctcagcatattggaccagctatcccagaagtcagctctgtctggtttaaactgtacatttatcatgtcactggacaaggaccaccatcccttttattgtccaaaggtacagaccgtcg

SEQ ID NO: 377257 - DNA, 403 bp, Homo Sapiens
cgaacttgagtctacattgaatggatcttcctcttttgaatgtctattattgtcgagttcagaacaaactttttcagtaacagctgtagtcacctcattttcatcagtcacaccagaaggcagtagttcaggacgacttcttgctggagattcctggtgtatgggctcagactctaggttgctctggccttcaacatgttcattaaggttggctgtttcactgctgctggtgctgaggctgcaataatctgtagctccgtttacaagaatgctgtgtgggctactgcaccaatttaactgactattatgagtttccataatctttcatttctcatcagtttatttgcattgaactaatttcctgttgtgaatctcgtaggtgctgtctgaagaggttccaact

SEQ ID NO: 377258 - DNA, 407 bp, Homo Sapiens
ctactaagaggatcccggtattgtgtccgaggttaggcatacaaaaaattaggggggaccctgacctggtggctgctctcttcctcccatctctgcattccaaacgcacagcccagccattctgcattgaaaggaatgagaaacaaaacacactaaacagcacaaagaatgagaatgaccccttaagcacactctggagaccctcatttccaaagggtggggtgaggcttttccacaacggttgggaattatttaatggagttctcgccatccttttatcaaattgttgctcagattgggctgcaattttcttcaaagggaagaagaaattgctcgtagatggccttgataatagaaacacaaatttgtaaaataaattatttctgcggtaaaagcaatctcgggtg

SEQ ID NO: 377259 - DNA, 414 bp, Homo Sapiens
  misc_feature (230)..(239): n is a, c, g, or t
gtattgtgtccgacacatgagtccctgtctcaaaacgaaacaaaacaaaaatttatctgacattagaccctttggcatgaaataatttatggataccttctctgtagtaaattggcttgtaatagattgtgtattccagagttttgtttgttccaatatataaattatacttgtcggactaccaaaattttttgctaagtagcatcaaatatatatcacattaactctgnnnnnnnnnncataaacaggttagaacttctttaactactcaagttaaaagggaataggttattttccaaagtgatgtcataaaaagttgaaataattacttaatttttggccacttttctgatagttaatggttttgtatacatagctagcagttttaagtcttacgtaaactggatttaccaa

SEQ ID NO: 377260 - DNA, 222 bp, Homo Sapiens
aaaccaaacaacatagaattaaatggagtaaaatgtgagaagccccccttttttcctcctacagcagacaaaaccgatgtctaatagattgaaatgtgttatcacagactattttcttagggtgcacacaagctatatatgactacgtataggtaaacaagtttaaactatacaaatgtaaacaggagtgcgagactactgtgcaacttcttcgtcctctat

SEQ ID NO: 377261 - DNA, 446 bp, Homo Sapiens
caatccaggtagaaaaagctcagccctatcctgaacatgttatttaaaagtctcaaatcacaacgtcacagcaggatgatacctgtgtaatgaatcataggacctgttgtcaaaaacaatctgatttttccttggagaatcccgtctatgaaggggagataccattgaaagggatacacaatagaactttaaaaaataattctcattatgttactgttttataggttgttaatagcaaacaatacaagaattgagtctattaaccttaaaataacctaatttttccccaataaaagatattttaagattacttttagttatgtgaagataccagtgactagaaaattttaaaaatcatgacacaatggctactttttatataggttgtaggcacagtaagtatataaaagtatacaaaagtaactcttctcctgctaatgtagggt

SEQ ID NO: 377262 - DNA, 283 bp, Homo Sapiens
atttgcggacacttcaagaaatatataaattattaccagcaaaatgtcatacctttttcatctggcagatatctaaaatccatagattcactaacttcctggtcagaaggtctccgcaactgcattttttactgttacgggttctgtgatagctttgcaatatggtggagttttgaaaacaatggctacttgacggtgtacatcagcttgtgaaaagatgccttttgcttcccaatcgttcaacacaaaacgaacttctatgtcatctagtcaataagaaacc

SEQ ID NO: 377263 - DNA, 289 bp, Homo Sapiens
  misc_feature (147)..(171): n is a, c, g, or t
gccggcacccatcatgcaggacataaaatggggtaggaaatgtttctatcttttcagtgtctagaagagttttaatagatttccttctgatctttattttctttcttctggttgctttgtattttattagttcttctgtttctagannnnnnnnnnnnnnnnnnnnnnnnngaaacgggttctcctcttctgtcaccccaggcacaatgtgcaagggctgtgatccccggcccattgcaacccccggttccctggggtctcaatttgatcttttctggcctcagcctct

SEQ ID NO: 377264 - DNA, 533 bp, Homo Sapiens
ggaggattataatatctatatgtgatttgttacgctatctttgataattcaggaatagaatattacacaccacatataaaattttgtaaaaggcataaataaaaaagtatgaatttcaaaaattgagagtttaaagtgaaagataaattggtattctgcttggtgcaaatacatttaaaatcaacaggaaagacttaaatgagaaagaagactaagatgtatcagtggagtataagatagggtgcagttatgatacttgacaaaaaatgcttaaaaaataaagttttttaaaaggccgcaattaatagggaacatatcatgaaatataacaatactgaatataaatatgaccccaacaacataaagcctatatacctgtactgatattcagaaggaggataataagttgagccataattgctttgaaagtctttaataatctcactatctgggattattggactgtatggtcacatccttgttttggtacttgtttcttgtggaaacattcctgtagtcttctgttcctgcta

SEQ ID NO: 377265 - DNA, 223 bp, Homo Sapiens
tagaggatccccggagacacttacgatactaaactaactttttagaatgtgttccatcttcttaccacaaacaatattgatattttcccaacttttaaaatacaaatttgtaacaaagggtttagccagggattcttagtctagggattcacgaatccccagaaatcttttggaaaatttccagaaacaagcaaaactacattttgccgtaagattgtctccg

SEQ ID NO: 377266 - DNA, 479 bp, Homo Sapiens
tatgcttgttggtcgtctctgcacggatccccggagacacttacggaagacacacattaactataaggagccaggaaggccacaagtgaaaggatcaaaaaagataataccatgcagacattaattaaaagaaaacagttatagttaatatcacacgaaagagacctacaacaaaaagcattactagagataacaaggaatatttcttaacaagaaaaggtctaatttactaggaagacagaacaattctaaacattatatacttagcctaaaaatacacaaaacaaaaactacagaacaaggataaacagacaaatccacaatagtgggaaattctaacatgactctcagtatctgaaatacccagacaatatcattaatcagtatgaccctcttgtcatatacaaaatgctacaactgacaaatacaaatatacattcttttcaagtagcgtaagtgtttacgggtgccgagctcga

SEQ ID NO: 377267 - DNA, 295 bp, Homo Sapiens
  misc_feature (59)..(157): n is a, c, g, or t
ctacagtgttttttgattgccagatggtattcaattgcgtgactatatcgcactttgcnnnnnnnnnnnnnnnnnnnnnnnnnnnnnnnnnnnnnnnnnnnnnnnnnnnnnnnnnnnnnnnnnnnnnnnnnnnnnnnnnnnnnnnnnnnnnnnnnnnaaagagtgcttccaaagtagttaaaccatttatacttttattagaaatttatggagttctagttattccatattcttgccaaccgtaagttgttccgcggagacactacgtttagtgagggagaatctgtatatgtga

SEQ ID NO: 377268 - DNA, 414 bp, Homo Sapiens
ggatccccctgagacaacttacgactaacatacaaaatccacaaggtatcaactgcggtgagggaaagggagagtactcagcaagtctacgtagcaggcttctgtcagttcagccaactctgtgtgtgatgaactatttcagttatttccaaactgtaactgtattctttaatttttaaaataggtaatacagtcatatgtttcaatattcaaaacgtacaaaacaaggatagacccaaacatctcccaccttccttttccagccattgaattcctctccctggaagtttgatcttagcagtttcttagacctcctttcagaaatacattaggtttagataaagcacatgcatatacagtttccccatatgctcttttatttttaaacacagatggcgatacatactacatacc

SEQ ID NO: 377269 - DNA, 358 bp, Homo Sapiens
agacacttacgaatggatcatcatctatttcatccttgatccttagaagaatctaacttactatcttatctcttatttgtcgagttgcagggcgttgatggtgaattattcatcttatctagaaagttacaccttatgcattttaaataaggaaaaacaaggtttcagtcctggcttttttctgatttctgtcccagttttcctatgctgtgaaacaaagataataatagctctactttaaccatttcacaggattactataaggcctcaaaggaatctactgacttttcatctttccaaatattgtgagattgactattaattgtattttactatcgtaagtgttacgggggcgagg

SEQ ID NO: 377270 - DNA, 194 bp, Homo Sapiens
acccgtagacattacggatgacacaattgagcaacagctttcactgtttaacaagcagtgtctctggaacactgggttagtgctgtcggatgttgactgaaaagtcagtggtttgagcccatccagtcatattaatgtttctagctgatgtgaccttccatctgaagagtctcttccttgcgtaagtgtctccg

SEQ ID NO: 377271 - DNA, 206 bp, Homo Sapiens
cggagagaagcttacgattcgataatgttaggaggaataccaagctttatctatgtaacttagcttatttttacggagacaattacgtttcttaaaaattcaagtttttctgaggaagcagaaaatccattaagcacaatcagatggaaagtcttgtctctgtaaaaataagcaaagttacatagatgaagcttggtattcctctt

SEQ ID NO: 377272 - DNA, 357 bp, Homo Sapiens
  misc_feature (340)..(340): n is a, c, g, or t
cacccgtaaacacttacggggtggggatggtgctgacagggctccacagactcgccggagtactggacgcttcaggaacacatgctggggattctgctttgggtacagaattcatctcaactacttcctccttcggcttctcgttcttgctgaaattctcgtctggctggtacctgaattagagagagtagggcaagattaacccaggtccctgttcatccaacatcagagagcctaatacacccacggtagctcccacgtatccgaggtttcatctacccatatccactacagtccaaaaatagtaaatggaaaagtccagcagtaattcgtaagtgtntaccgggagccgagctc

SEQ ID NO: 377273 - DNA, 344 bp, Homo Sapiens
taaattactaccaaaagagtgaattgtactgtatttcataattctgttctcatttctacaaatgaaatgccacttgggatttcgatcgtattgtatttataaatagatttgggaggacgtgacatcttaacaatattgagtcttccaattcatgaatatatcttcccaattatttaggtcttcgttaattcttcttatagcactgttttgtagtttttgatatataggtcttgcactcttggtcagatttattcctatttcatatgtttgatgtttttgtaaattttatttttataaatttcgatttccagttgttcattgttagtatatggtaataaaatttt

SEQ ID NO: 377274 - DNA, 647 bp, Homo Sapiens
gaatactcttatgaaacttacttaagttgtctctttccccaagctctgaactttacaaacccattttatgtaactccaaagaacaggctgacttcagttgtgaaaaattctctgatctaaaatctgattttttcaccctgcatttgacattccccttccacctcctttctaatcttgtttgtgcctccctaggaaaggaagcctttgtctgcctgaacttggcaattcttaaagaccttgtagttggtacttctgtggcaatatttctttggaagtcaaaatttttatgtaaattcaaccttgtattatttccaaagtctataaactgcctcaaaacaagaacaacttcatcttcagtaagaccctcccaatcccctctcatataccaatacctaagtcttcgttaataaccccaactgcatcattactgcagcctactcatgccctctctggtgatggggaatggtctggagcctcttctgatagtgaatttcttttacctgacacagatgggctgacagcccttaacatttcttcacctgtctctgtagctgaatttacatataccacatctgtgttgggtgatgataataaggcgctttctaaaagtgcaataatatatggcaatgcgactgaactggaaatcc

SEQ ID NO: 377275 - DNA, 504 bp, Homo Sapiens
  misc_feature (64)..(64): n is a, c, g, or t
  misc_feature (90)..(90): n is a, c, g, or t
  misc_feature (110)..(122): n is a, c, g, or t
caggagtatctaagggaacacagatagtaggaatggttattaaaaaacctcagcaactattttnttctatgcttcaaattgggtgaatgnttttttacctgctaacatgnnnnnnnnnnnnnggcaattcctcccagaaagacactccaagccgttaagagcttcattcacatcttgcagttctgactgacagtagtatgccctaagggaaaggggagtccctgctgactttatatattataccaaaaaagaggcatatggacacttagaagtcttaatatgtaggactggttagttataaagtgaaatcgacttcacatctgtgactcagatggccagtgtcacgaagtagctctttggatacagagttctaaaagatcattgtaatggttagcgcaaacagggaccatgttccccaagaggtaggtagcacctatagctaatactgaaataacttcttctatcttagagaaaatattttttcccctataaactgaaaatgca

SEQ ID NO: 377276 - DNA, 321 bp, Homo Sapiens
aagagaaggaagtcagggcccagaagcttgcagatgacctctccactctgcaggaaaagatggctgccaccagcaaagaggtggcccgcttggagaccttggtgcgcaaggcaggtgagcagcaggaaacagcctcccgggagttagtcaaggagcctgcgagggcaggagacagacagcccgagtggctggaagagcaacagggacgccagttctgcagcacacagacagcgctgcaggctatggagcgggaggcagagcaaaaggacaatgagctggaacggctgcgggccgcgctgatggagagccaggggcagcagc

SEQ ID NO: 377277 - DNA, 344 bp, Homo Sapiens
aaagaaaaaaaaaattaggtgacttggactagtggccagattcaaatctgggtctttagaccacaagctagtttacttgattagctcatatttaaatctaaatcttgtttgctgtaactttgggcatattactgtatatagcccttgccctcaaagagttagtctatcatgaaagataaatatagaatgtgagaagtgctatagtaacagatgggtgagcagttaattcggcttagacgcaggaaagaggcttagacatacagaatgagcatattaattaagagaggacaggctgggcacgttagctcacgcctgcaattcccagcattttgcgagcgataagg

SEQ ID NO: 377278 - DNA, 270 bp, Homo Sapiens
tcaaaacagagcttcagctacaccagcacattctgactcaacatggctatacggttgtcatcgctgaagaaaggctcaatgctggcctagggccggggctactagaacaaggtgatctgggctcttgggatctgctcatttgcctgtcttctaagaaagcagaaggaacaccctgtatatccaaggaagtcatgtgccagttaggtttacatcaaaaggcttcaccagctaatgaggacaaatgaggtcacattggcattaaaaaaagta

SEQ ID NO: 377279 - DNA, 231 bp, Homo Sapiens
accttcaacatttagccttgggaccccattgcttgcacagtggacctattttctaatctggaaaatataagcctgtataccaagaatatattttttgaggctggggagtatatttttttggataagttcactaattaccataataaatagtaaatacaaattttcttgtgatctagaacataagctaggccctgtggctcatgcctgtaatctcagcattttgcgatcgtt

SEQ ID NO: 377280 - DNA, 221 bp, Homo Sapiens
tcagaagcgtgctgggagcttgggggtcctgggcgaggagggagccggacgcaaaatcctcaggtcctgggggaagatggactgtgggcaatgctgaaggtcagtgtgacgtgatgcagcctggctggaatgttccacaggcatctccagcttaatttggtcaaaacggaatgcctgatttaaacttaaatactccctttcgaccacctcagtcatgagga

SEQ ID NO: 377281 - DNA, 306 bp, Homo Sapiens
caaactgaaggtaaaagaacacaccgactgaggacaagagagcatttcccagcgtcttagaacctgaatcagtcttctttcgtggtgtgctcaacgatgggaaacaactttgctgtacccacggtaaacggatttcctcagccctttgcaacattcgtaatccctcaacaaatggaacctgctttgttttcacagaactttttctttttctgcgtagaactgctacgggttcctaatttttaaatgcaggcctacaggcattcatagtaacctgtacccagcaaaaccatcttgagcacaactaac

SEQ ID NO: 377282 - DNA, 319 bp, Homo Sapiens
gctcgcaaaatcaataacaaatctgcacatgtacccatgaacttaaaataaaagttaaacaaacaaacaaataaaacccaaacatttgtttgggtgtgctagtaaggttcttgttattgattgtgcgggcaaacattatgcacgatgagttatacagcctgatattggcaggaagcatttgcaaatagggtaaaatcatagcagatgggaaaggtgtttataagtagattacattaccgtggagggaagccactacaatattttcatgcaaacagctcagagtgaggatatcataaataactatcttttgcgagcgata

SEQ ID NO: 377283 - DNA, 277 bp, Homo Sapiens
ggtacacatcgctcgcaaaagtggtgctgcatggggggtgacaggacaccacgaggagaaaggacgtgttagagtagaggaaacaaacacatttctgcatttaaaaaaatgccatttcctggctgaccttgtcagtctaaaacatacagtattgctggtgctgtgactagtactgattggtaatcaaaatgcaaaattagatgaagctcgtttgctcttctcttaatataaatgtttctagcgtggacaataaatgaagaaaaaagccaaaaactaa

SEQ ID NO: 377284 - DNA, 154 bp, Homo Sapiens
tgctgggattacaggcgtgagccaccgtgcctggcctgtttcttggctcttatcacataggaactgttttcatttatataaaacatattttacattatttttcagtgggatcataattcattttaaactagggccatttgccccaattgttaaa

SEQ ID NO: 377285 - DNA, 233 bp, Homo Sapiens
ttccgcgatcgctcgcaaaacaacaagatgaggaatggagaaaaatgttcacaaaagtttcgagccagtgcttctctaccaacatacatattctagatcctggcttgggatggggtgtcatgaagatgaatgagacaagcctccccgctcgttaagggaagtcaatataaaacagtacgtgtaaaagaagggagaagtaacgttgggtctctccagtggagaagaaacttttg

SEQ ID NO: 377286 - DNA, 142 bp, Homo Sapiens
ctaactctgttcttacgtatgcacaatgccctgaattgaggcacatggatttgcagaaggataatggagataattgaaagtaatgaaaatgaaaccaaatctccttccccaaaaacttaaaagaactgattcaaaagtgccc

SEQ ID NO: 377287 - DNA, 109 bp, Homo Sapiens
aaaccccagttccagccggacgcccccagacctctgaggttcgaggaggtggtggttttcatttggggctaaacatatttggttgttaggttttgcaagagccttctta

SEQ ID NO: 377288 - DNA, 339 bp, Homo Sapiens
tatcgctcgcagaagtatatttctagcctgatgtaaaaatctacattcattctgcagcactatggtaataggtgttttatgattctctcctttgatcaacgtgtccggttatccaacttgtgaagctcttgtgagggcttctaaagtatgaagatgagaacaacaggttagttaatcttggcatgaccctagatacccagtcattatttgcatttaacgtgggatatcagaagtgtccttatgcgaatgctgtgtgcgtctgttcctaatgaactgcttagtgtgatgtaggtagtgcctacgacacttcttctttgataatctattctgcgagcgata

SEQ ID NO: 377289 - DNA, 269 bp, Homo Sapiens
tatcgctcgcaataaggctcaagaaaggtcaaagtatgattcaaagtctacactgcatcaatagaaatgacagtgagaaaaatcaagacaacacatggcccctgctcatctgcactgtcggataacatctgaaatactgtggtcggcactgaatattaccttgcaaccaggggagtatgaaactagaaattacagcacatgagggacactagcagggaggacaaaaatataactctaagtaaaatcttggggtccaagaaagtcaagta

SEQ ID NO: 377290 - DNA, 518 bp, Homo Sapiens
atggatgagtgaattaatttctatagtgttacaatactttcacacccatcgtctgactccttccgacagcacagcgaggcaggtacggatcattcccattttgcaggtgagaaatattgaggcaacataaaggcctggaaaaggttgctgtacatcattttgttggaactcctgggctcgtggacggcctgagttgaaagggacgaaggtctttatttgcaacacatggtctactgggagtccagcgttctgtgcttgggacagtgggactcaaacccgactccttgttcccgagtctgatggggaaggtagacacgtaggtacatagttacaaccggtgtgataacgatgagacgactaggtgtttccaaaaaaatagtatgtgcaggagaggattttggagtggtacacaaaggagaatttttaaaacttaataattatgtatttaattgttaaaaatggaatttcccccctctttttgtgaatatactgtataatacatgtacatggcacagatt

SEQ ID NO: 377291 - DNA, 259 bp, Homo Sapiens
cagaatatgagtgctacaaaaagacagttaaatatacagccttcaatttgaagacaatgggatgagacagtggacaaatgtctcctaacgctagacagacaagcggcagtttgttcaacttgaaagattctcctccatccctcttacaacatttaaggttagaactgaaggacacagaacttcacagaacttgcaaaatctcctggcctctaaagcactgctgtgagaaataatcatctagccattaagaaaaaagaga

SEQ ID NO: 377292 - DNA, 239 bp, Homo Sapiens
acttggcttctaacgtcaaccctacctctcatctgcttactgaggacaggacgaaacttgagttgttccctgcagacaaaagtacaacggttgacactaaagatcacctatttgaagtaaaactggttttaagcaggttaatgaaccccaggcttacaggttcttgcactggtatattttactaacacaccccaacaagataagagattggaaaatggctccttttgcgagcgatgcaa

SEQ ID NO: 377293 - DNA, 217 bp, Homo Sapiens
caattatttgctagccaactagctagaattgctaaaatacataacaccagctcagagcaataaaatacaatttctgtgccacgaaacaaattattctaaaaatcacaaatattgcctattacccagcatccaaaacacaagttttctactgccatcaatctataccaagtctgattaaaactacacaagatagaaaatgtcaagttcatactcaaac

SEQ ID NO: 377294 - DNA, 399 bp, Homo Sapiens
ccgccggactctagaggagcctcgtatcgctcgcagaagccattttgttactgtatttctactgctcatctataaaatgaacttggtctagagtccaggcaatccataacatatattctattaaactgttttttctatttctatttaaaagtacctatacacagccacaaggatttatctccttctaaggtttgaaacagctgctgagttccagcttactgaaaataccatctgctctcacacaaatcagctaagactttataaacaagaataaagcactcccaaacccagtcctgaagtcccatcttacatatgtcaaacttattttaatcagctctttgaaaaagagcctatgaaaaagtgaactacgtttgaaacaaactttcaaacattgatttt

SEQ ID NO: 377295 - DNA, 262 bp, Homo Sapiens
ccacatgcataatggaaatatatctacctaccaccacagtcctctttttaacacatttcatttgcttttgaactaagatcccttaggtagcttggaaataatagtgaattagtagtcagtaacatgtttctctgctcaaattcatgcatgtacaagtcaggcttacattttatttgtggcattcttaaatctccctgctatgcttatttgacatttataactatgtggttttgcattgtataacacttttgcggagcgatcg

SEQ ID NO: 377296 - DNA, 472 bp, Homo Sapiens
  misc_feature (426)..(426): n is a, c, g, or t
  misc_feature (438)..(438): n is a, c, g, or t
  misc_feature (445)..(445): n is a, c, g, or t
  misc_feature (462)..(462): n is a, c, g, or t
gaatccagttcggctgtatgaacagttgctgcaaaaggaagaagagttgcctgatgaacgatggatgagctatgaagaacgacatcttcttgatgaactctagataacaaaacgacggctgaaggaaatagaagaacggcttcacggattgaaagcatcatctatgacacaaacacctgccttaaaatttaaggttgagaatttcttctgtatgggatccccattagcagttttcttggcgttgcgtggcatccgcccagggaaatactggaagtcaagaccatattttgcctagagagatttgtaaccggttactaaatatttttcatcctacagatccagtgggcttatagattaggaaccattaatactggaaacactacagcaacattttcacctgtccagatccactgggtacaatacttnaaatcctttacnttatggnacatatggaggccaagnttttcttcaa

SEQ ID NO: 377297 - DNA, 399 bp, Homo Sapiens
agagctcaaagtgttctaataattataaagccattatcagggtaaactgcaattgtaggagtgaagttaaatccccaactatacactttcattggacctctttccttcctcggaagtgaacttgtcattcttacattcacattgtttgcctattgatattgtgtagctattggggcacagccattacagccattgtgccaaggggaccaggtcctcaaagtaggagccagggctcttagagtcaatatctagctttcttttcaatgataattaagtactcagagctctggtctatcaatgagcttgctgcagagtgtttatgagagcaaaatatgataagaaatataaaacatttttgacagtctataaaatttttataaaaacaagttacttcaacga

SEQ ID NO: 377298 - DNA, 305 bp, Homo Sapiens
tacccgacaaccatagagagacaaaaaagaacaagactgagaaaagactctgctatagagaaaaccaaacttgtttaaaggcaaacgagcagaaattagcagagaagaagcagactgagaagcaagggcccttgaaatgagtaagggatccaccagttcactaataaaccccatctaaatgccagtaactcccaaattaatacctccataccaggtctttccctgaaccccatattcctatccaactacttactcatgagcatagtcggccctccctacatgtgggttctacattctatgggtgt

SEQ ID NO: 377299 - DNA, 278 bp, Homo Sapiens
ttcattgtttgcatacataccgtgaatatcgacatgaagattaccttgaatttctgaaagtacatcatagcagaaacatctgaaaaatttactcaattcacctctatactaagatgtctggtattatataaatctataaactaattcagaactcaaaataatactacctaaactaattatcattaatgttaacactctgtaattctcattttgctatgagtcattaaacaagatatactcctatgatgtactttcagaaattcaaggtaatcttcatg

SEQ ID NO: 377300 - DNA, 407 bp, Homo Sapiens
ggggaaaatagaaagtgagacaggaaaggagggaaagcaaatacagagtgctacgttatccagcaggctacagcatcataagaaccttagctggctgctcagtcatgttggaaatctctggagaatcatggcacctctcagaatacttctggggacaggtttgagggaggatggctgagagatttatttgttggctccctctcatatcctgtctcttactggtcagagttgcctgaaggatcttaattattctatacttttgggtttgttacttggcttctctatgcagctgctagaaaagcagctgatttggggtaacagggcttctgccacagcaggcacagtgaggaccaccaaagcctacctgttaacactggggaggtagagaccactagtggtaggctgag

SEQ ID NO: 377301 - DNA, 421 bp, Homo Sapiens
cctatgatgtataagcctggagcttggcgcgcagagatgagtcaagcctgtggagctttatgtattacatgaatgatgaagtatatggatcatttaatcaatcctttatgatcatgcacatgtaaagcccctgtctgcaaaagagacctagatcagtgagaagtattattcatccagtatatgggaagaacatgtgatggccttgatcagattgttgagcactgtgatctgcccaaaatatatgtaggtaattggatgctctttaaaaacatgggcgctgacactgttgctgctacttgtacttttaatggattccagaggccaacaatctacatgtgatgtcaggaccagcatcgaaactcatgcagtgtatctagaagcacgatctcccaccccaagtagaggaacaggacattagcat

SEQ ID NO: 377302 - DNA, 425 bp, Homo Sapiens
tggtaaacctttggtcggtgtccaacaacagtgctgactgtccggataagagctggcaagtgcccttaggatgccgcatgggacaaatcggttatcataatttcaaagtataaatatatttatgaagtagcgctgcggctaagaaggaagagtgaggggtctgtccatggggtggcagtgatttcacacccgcctttcttgaatggcttcgtgttactcagccgtgccctggcaggaatggaactccatcagggaacagggcagctctgtttgaatggggtgaaaaacagcaaaattaattcttagcaagctccttgttctctactgttcaccgggacctggctggcaaatgacgtagctagtgagtatatttaggaaactgttcgaaaagcgagaagagaaggaacaggaatgaaaggaagccg

SEQ ID NO: 377303 - DNA, 298 bp, Homo Sapiens
atgcactccagcctgggcaacagagccagatcctgtctcaaacaaataaataaaagtttccagtgatttagtcatccttctcttcctggtacagaaaggaagacactcttacaaatgtagatattctttataaaataaatttctcttacaaaaatacaacttttactgttttcagagcttctcctgtgtctgtttcccaaaataatcagtttaaagtaatcctgtgccaaagaggcatatttggaatggcatatactgctgtcctacagacatattttgggctgtcatgtcatgacct

SEQ ID NO: 377304 - DNA, 224 bp, Homo Sapiens
cacaaaacaacagatacccttaataataaaaagacattcaaatataacaataaaaacatacttaagatagctcagtgactagcatttggccttgtgaacataagaacacttagtaaataagtgaaatacttaacattttctctgtatgtcaaagacgagtgagagtcaaataacttttttcccaaaaattcaaattggtctttctgcttataaaactgcttctt

SEQ ID NO: 377305 - DNA, 265 bp, Homo Sapiens
caggaactagcactgtgagtagatttatgaaccccattctccagcacttccattcagcaagtcctgtgtccttcccatccctagccctggggccagcccaagcttataagtcccttgacaccatctctaagaggcctagcttagcaaacctacctggggtatctgttcggtgtttggcacagctctgggcctgtaagaaaatgtagcaaagatgaataaagacctagagtgtggccaggtgcttacagtgaaggcacaagtcacc

SEQ ID NO: 377306 - DNA, 294 bp, Homo Sapiens
  misc_feature (137)..(214): n is a, c, g, or t
ctagttctgaactcaaggcattaatacactgtggtttatgaagaaccaaaaaggctcaaggggcgtataaaacaaacgaagtaggacagccagctgtatcggttagtttttgaacaaagtactcattttaaggcatnnnnnnnnnnnnnnnnnnnnnnnnnnnnnnnnnnnnnnnnnnnnnnnnnnnnnnnnnnnnnnnnnnnnnnnnnnnnnncttggagcacaaggtttttagctttttatacttgggatgtactagatggattgaaaaataaagctctgttgactatctga

SEQ ID NO: 377307 - DNA, 279 bp, Homo Sapiens
tatcgtgcacccatcactggaggagtctctcgtgtggtcgtcactgtccatttctttgtgtgatgtcctcactagactgtgagctccttgcaagcagggactgtgactaaaccatctctgtatccctgctgggggcactaactagctggtgagaacctggcctcctagcccttctgaagctgcagttcttctctcacaccgtgtattgccctatgcggatacctctcatacagaccctccactgggccgttcaagtccacgtacttgggtaccgagctc

SEQ ID NO: 377308 - DNA, 161 bp, Homo Sapiens
tcgacctcagagtttgtgaggactaagcgagctaatgcatgaaaagtgcctagtacagtgcctggcatatagcaagaactcagcaaatgcttgctgctctaacgaggcgtttctctgatgacagatttgatcttaagcagacacctcagagatgtactgac

SEQ ID NO: 377309 - DNA, 241 bp, Homo Sapiens
ctcggtaccccctcagatcacactatatggaagacagcacgtggaagttcaggctccttcaggcagtcttatgggtagggtaacacaactggaatgaattaacactaatcattttcagccctgccattcttctgaagttccaggttttggtgaagggtccttccactgttccaatttcagtcacctcctcacccattgtctaccaatgagcagaaaacctgagtgacagccacaataatac

SEQ ID NO: 377310 - DNA, 220 bp, Homo Sapiens
ctatccacacttcaccatgacaatgactgctaacctgattcatggacttatctctcacctcagatactgcagtgcctctctttactcatttttatgccacctcttccttcataaataacaatgtgtaatttaaaattcaatactgctcatatttccgaacagattttttaaaaaagaacttactgataatctatatattctaacaaaaaaattgtatatc

SEQ ID NO: 377311 - DNA, 420 bp, Homo Sapiens
  misc_feature (356)..(356): n is a, c, g, or t
  misc_feature (404)..(404): n is a, c, g, or t
ggagatggagtcttactccagcctgggcaacaagagcaaaactctttcaaataaacaaacaaaacctaagcatttgaggggtttgggcctgggcagtggagcttgtgagctatatgagctggaatctgagtcaaggctgggctggtgaaaggagttcactcaagttcccaaggtattctgtcctccaggactctgaatcacctgggaggagaaggaattgtggcgggcctaacaccttttctttcccaaacaccaagagcaggttctttctgttacatccattgaggtcacattcttgaagtgcattttgaggaagtcattattttcgctacaccagggacttatgtatcagtctnttagaattcagaaaaaagtagcaaacaaaaaacgtgtttgaattattntctttagcatttttaa

SEQ ID NO: 377312 - DNA, 402 bp, Homo Sapiens
taattgcaaaccaaaaaggtttaattatctttctgatagcacagaaaatgttttctgtcatagactacccatagtatagtaatacctctttgccacaggtaagttctaatacctggtgatgattccccaactgtgtacccactcaaacacttttcgacctacccttcctttaaaagatgttttgaggaattccagaaataaaatgtatgacacaaattgtgggactaggttaataccatgatgcctgtacttttgaaggcagggaagtgataagtggtaaaatgagacatttcctaggggtagaggtacaaagctaaaaaagaaggaaacccagactgaattttacgtttcttatttccaactcctctcgatgtctactctgaaagtgggtccgagctgaag

SEQ ID NO: 377313 - DNA, 193 bp, Homo Sapiens
tgccagcctgacaaaccagagctaaaaacaaaatacaatggaaacaataggttatctacatatatccagttcagaatttgctatctccttatgagttggtgttagaggttaatttctcatatattaaaataagggctagcctaactttctatctttgcatatttacacaatcgtatttaaaaaattactcttg

SEQ ID NO: 377314 - DNA, 288 bp, Homo Sapiens
tacagaagagattgaagtatgactgaagaggaaagggagccacagaaattgattctttaaatctttgcaggaagtcctgggcagaccctctagtagaccatgcatcacaccgaccataattcaacacagcaaaatgaactgtgaatggctatagttcaggtttcagattggcttctaggtaacacccaagcgaggccgactagaaaagcactgcaaaggctctgaaaactaaatttacattgaaatgcagcccataaaagcgggccagaacatgcactctggaaagtg

SEQ ID NO: 377315 - DNA, 285 bp, Homo Sapiens
  misc_feature (156)..(164): n is a, c, g, or t
acagaggcgagtagtcattcaagccccatgaaagagataactgggccttgaggagtgtgagcaaaatttaaatattgaccctgtccatttgtgctacacaagtgattatggggattaaaagaatacatatattaccgtgtgttgggaatgggctcnnnnnnnnncttaatagaaaagcagaaacttcataaataatagctgggctttagataccagataacaaatattggttcccctgaaaatatgacctactagaacctctgtaaaaagtggggcccagaccaa

SEQ ID NO: 377316 - DNA, 304 bp, Homo Sapiens
caataaaaataatacaaataaagaatgccatataacatttatatttcattaggtataagtaatctagagatgatttaaggtatacaggagtatgcacctatatgcatagactacatacaactactaggcatttaatatgagggacttaattacctgtggattttggtatctgcagaggagctggaggatactgaaaaaccaccgtagtgatagctgatctctcactggaaataatacaaattgtagacagtataacagtatctttaaaatacaggaaggaaaaaaaagtgtcaccctagaattc

SEQ ID NO: 377317 - DNA, 210 bp, Homo Sapiens
aagaaaaacagaaaagacggttgaaaaataacataaaactaagcttaaaaattttacatccaaaagaaaatgaattacaaaatacaaatgaagtgcacagccaaagccaccacaaagggccaggccaacttcttactgaaaatttagaaatgattatacctaaatctggaaagaataactcccaaaggaataagcctaagcaacaattag

SEQ ID NO: 377318 - DNA, 482 bp, Homo Sapiens
gagtagtttccagagaagtataatagtttgttagggggggccatgttggtaaggagtgatcttatatttgctagaggatgctgtcttcttccacaggtatggcgacaatttctttcacaagctactcaattaaaaactggaataacctagcactacacttctatttatttccattatttttcagctcaccttctagattagtatactgggcacttcttggctggacctcccgttaacctgctcttcctctatcagtggttctcaaccctgcagccaaattacctgcagagttttctaaacgtctacatgccattagtccacccctagggattctgattctaaagtccagaagtgaagcctaaaaatacatatttgtaaaagttcatgagtgatgttgctgtcctaccaaagttgaggatcaccattatactgccttattagatggtttctctaatcccccaactctaatattgtttgtgcta

SEQ ID NO: 377319 - DNA, 251 bp, Homo Sapiens
cagagtagcatgcaaatattccaggtgatcacacaagtgaaactgtatctaagaagaaaagtttgagtgggaactgcaaacaaaagaactgagatttacttaggagagcaaacattttatcttattcctttatttctttttttgtattaacaagagaagtaaaggaaagaaaagtggagaaaatgaagttaggatgaaaaatcaaataagatataaatcacaggaatttaattttaaatttttctttaaat

SEQ ID NO: 377320 - DNA, 299 bp, Homo Sapiens
atgtctaatgaataaacctttaattcactgaagatatcatatgattatagaggatggcactgagaagctactgtttttttgaggatcagtgaggcatcagacaccacagattaagttcccacttagccagctcacacacaaaagaccaaggagaaagaggggtattcacttaaaggagaagtaggcattagaggtaaaaatcaggaagatattttcaaacaaattctccaaagtaattcaacatttactgagctccctctttgggcaagaagctgggctagctactctgaaagtgggtc

SEQ ID NO: 377321 - DNA, 316 bp, Homo Sapiens
ttattcagttccagaatctatttgatcacatcttttttaaaaaaggcgtgagccactgcacctggccagtatttgttgattaaatgagatcgtgtatgtaaatgtgcttagaatgtacctgtgcatgggcatttttctctagaggcttatttgtgaatatcattacattagactagcagcaatttgctcagaactcagtttgtgttaaagtaggattttcttttttgctgtggttgggtcccattcaggatgcaaatcatgcacaacagtctgctgttacctgcttgactgggaccctcgatacggcattacgttc

SEQ ID NO: 377322 - DNA, 357 bp, Homo Sapiens
gagaccactttatctcccctcacctatgtagtaatttcacaacattacctgaatcccaatgtattgaagaaaaataatagattatcaagattcagaaatgtcattgcaatatgatggtgcaataaaacacgtgcaaaatggcatgtggtcttctcatcagtctatcctggaatagagcaaacccactccagagtaggagaccactttatctcccctcacctatgtagtaatttcacaacattacctgaatcccaatgtattgaagaaaaataatagattatcaagattcagaaatgtcattgcaatatgatggttcaataaaacacgtgcaaaatggcatgtgtttttctcatcagt

SEQ ID NO: 377323 - DNA, 308 bp, Homo Sapiens
ctttccagagtagcacttccagagtagactgcagctctatctaaccatactcttcagaaagtcttttgctctttgggccacctaccctatggaaagaggattctgggaaatgtagtttggatgtaaccaggttgacacagtataaactgccacagcagttaaggatgaaaagaaacacagtgggggatgttaaagttgtgggagtccatagtgatgttttatggatcaaggctcataggaatgtgagagagcaagttgcttaagctctctaagcccacttcctcctctgtgaaacagggaaatgataa

SEQ ID NO: 377324 - DNA, 207 bp, Homo Sapiens
ttccagagtagaaggtacagtttgaggaataaccagaaagtttgaagactccctaacatagtcttgtgcctttgtagagtattccttttagcataaatgtagaggtgggcatccgcgcgcatttgccactgttgagaactatccttatgttcaggcatctcctggcagggattgtgtgaaaaattactttacacactctggaaagtg

SEQ ID NO: 377325 - DNA, 463 bp, Homo Sapiens
ttccagagtaggtatgatgaagggagagggtgcaaggttattgaggatgtgtgcaaaggagggattgtcaatcactatggaccatgtaaactaagctgggaaggtcaacagattggcatttgacacaggggtgtaaatattttgtaaagtagtaggaggtgtccagaaattagcacagtccaaaaatttctgactgtcggtgtaggtcctatggaattagcaatgtgggacccttcagacatgcatgatatattagctcctagctgaatttccctagtaactgccatgtgaattggaagttgcagtattttgggatttatgcagaatctgtaatatttaaaagcatggtagttaagccccttcttcacaccatggccttgggtagaacaaattgtagtatctttcatttactgaatttagaattttcatcatttcctcaccaggcttgcctttcatacataac

SEQ ID NO: 377326 - DNA, 481 bp, Homo Sapiens
gacgcagatgtagggcgtctctggtgtccatgctcagatccccacctcagtggcacatctgaggtcacacaggcactgaagagtagagaaatggcaagaacaaacaaataaaaaactctaaaaccacagagccaccaaacctaccaggaagcccaatttgtgcctttttttcttcactacttctccccaccattttccaggactgagttctacaaactaaatattgccagttgttagctcatttaatctttacaacaaccccacaaggtaggaactattaattgtccccaccgtatggacaaagaaacagatacagagaggttaagtaacctgcctggggtcacacagctagtcttttccacttcctataaggccttgcagggcagtagccaggatagggcagtttaactcaagctgcgtccaaacgctgggttggctagcaacaaaaccagaggcaaataaccccatcactacctacctt

SEQ ID NO: 377327 - DNA, 314 bp, Homo Sapiens
ctataatccattgcagaggacatcagaaaggagactctagtgcggctaagggaaactcctttgcagatgcagctgctaagacagcagcattaaaggagctagttggacctgtcagcatgttagtgccctcagccatggtaatgacagaacctgggtatactgaagaggaacaagaatggggtaaaggtcagggtttaattcaagatccttctggctgacttatcaatgacaacaagctgttactacaggtgctaatcagtggaaaatagctaagtatttgcatgactctctctactctgaaagtgggtacgagc

SEQ ID NO: 377328 - DNA, 182 bp, Homo Sapiens
tctagctcggtacccctttcagagtagcatgattgactgtaaaggaagcctcttgactctgggtctccaggagctgggtttgaaagcaggacgaggtggtgtgtggcctccgtgcaacctacagaacctcacgacactatcctatatggcttgactgcgctgtcccgtgggacctgaagaca

SEQ ID NO: 377329 - DNA, 202 bp, Homo Sapiens
aattattattttttgaaaaagaagacataagcaagaactgtaaatccaccttcttaatgctaatatgaatttgaaacatcaaaacttgaatatttatgacggctagacaccttttttctctttccaatttaattatttttaatacagatttcaaagtgtcacaaagtcatgaatttccaataaattatactactctggaaag

SEQ ID NO: 377330 - DNA, 338 bp, Homo Sapiens
  misc_feature (142)..(154): n is a, c, g, or t
tttccagagtagttccagagtgtaggaaactccataggacaaaggactttatttcttcaacaaagaaactgtaacaaacaaaacagaaaagggcaaccacagagtagatgagacttaagactaattggaatggccaaacagnnnnnnnnnnnnngagagagagaggaacttaaaagacctcaacaaaatgcaacatgtggagcattgcatttggtttatatgttttataagtttagatattggcctgaaccagccaactgtaaaaataaatttacttagcaactggagaaatagaaaccctgaccagcctggtaacgtggcaagaccttgtctctact

SEQ ID NO: 377331 - DNA, 179 bp, Homo Sapiens
tcagctcggacccactttcagagtagaagggcctggaatggggctttgcagggaagggtgatagacaccaggaaacagaaaacctatctgtcttacatacttccgggtgaagatagctacttgtctttgggtgaaagcacttcaatccctttagacacacaggagactactctggaaag

SEQ ID NO: 377332 - DNA, 317 bp, Homo Sapiens
cactttccagactagactgaagttcagaagaaatactgaatttctgctcccagaagaatagtttctctggctcacaggcccaagttctcaatgaaatcgttttttaactttcacattcctaagctggcttcccggcacagaagccatggatttcccctctctcccttccccctcctcaaggaaatagtcttcctttatggattttcattggactctttcctcagcgattgtcctggctgtttattgatagtccttcccataagaaaatggggttaaacatggggtaggtattttgtctttcaaactactctggaaag

SEQ ID NO: 377333 - DNA, 504 bp, Homo Sapiens
  misc_feature (352)..(352): n is a, c, g, or t
  misc_feature (380)..(380): n is a, c, g, or t
taggaagaagaacatagtaggagaagtaaatttgcctggagtagaaaagcctatcccctcaggcattgcacttgcggcctgagaatatgaacgagagccctcgcctgccagtgctgctgcaggagacgagacgatccagagagggctcccagggggcagagtgggcggagggctgctgtcgggggtgttcacaccagagaccccagtgcgagcaacggaggacacgggtcagtgctttgccaaataccaacaggcattatggcatttttgtgaacagagtctggggtcttgactgaacaagagccatctcgtctccaaagcggggggttacacctcacaggtgcacattagncaatatctttttggcactattggtgganacaagcctgcttgtcccacctccaacccctaaaataatttcctatgcagtaagagaaaggaagggagggatcagctcccttctgcacggagggcatgaccagggggagatgctctctcctgcaa

SEQ ID NO: 377334 - DNA, 320 bp, Homo Sapiens
ctgtgactacaggcatgcaccaccacgtgtggctaatttatacctcattcttagcatatcttttcctgttagttacatggaaatttcagactagagtaatccccactcctccttactttttatttatagtcccacttccagagaaagccatcgctaacattttggttcatctcttttttctgtaaatgttttggtctatatacgattctgtatttttatttaacataagcatttttcttataaatactataacggctacataatacattgaatgcactattgtttgtgtaaccattgcactcttactactgtggaaagtg

SEQ ID NO: 377335 - DNA, 233 bp, Homo Sapiens
tcggctcggacccactttcagagtagcagtcagtagccccaataccagccttgtacatcacagaccaccgtccaatttaagtaattttttttaaaggagtgctttgagattatagaatctgagcttatggcagaacccgcataggagatcatgaaaacaggcatggagataagccaacattatgctagccactgtccatgaaattcttgaggcttcttgtataaaataaagtc

SEQ ID NO: 377336 - DNA, 189 bp, Homo Sapiens
tattacaacagaaagtcggctatgaaacatgtaaaataaataatcaaggtttaaggacttacattatggaaagctgataaatgaccagatttttttaaaaaaggggataaaccccaaattcctgggaaagcaatcggttaatagaaaagcttgaagtaggtctggtataaaacaataggtactatctgc

SEQ ID NO: 377337 - DNA, 197 bp, Homo Sapiens
acctggacccactttcagagtagcctttcagagtagagagttagttgaattctttggatccatttgagggatcaaccagggggcccaatacgaatagtgcataattaattgcatgatgattggagatacaatttagcatcataaataagttacttttgttaacttgttcaacaattacttcctgcattggaaaagag

SEQ ID NO: 377338 - DNA, 270 bp, Homo Sapiens
gcaaattcgtgatttaacttaagggcaaagagaaggaatagttttcaggacatcatgggggaaatatagatagtcaagagaaaagatttctgtaccctcatttttctttccctgttctctaagctaccccctgatgccctaaggatgaaaagctagagctgctgggattggtacttttggaccgtgattaattgtctagtgaatcctgtcttgggagagcctatcctaaattcaccactgactttttctactctgctactctggaaaggg

SEQ ID NO: 377339 - DNA, 222 bp, Homo Sapiens
catcttcatagagagtattgggtgatttaagatttaagtaatgcagcccttggttttaaaattatttctataatacagctttccaaatggcatcttcatagagagtattgggtgatttaagaaaaatgagaacaatgatatttcttgtgaaaaattttaaactactgagaagtacctgatctttcttgagagatagataacactctggaactactctggaaa

SEQ ID NO: 377340 - DNA, 249 bp, Homo Sapiens
ttcagctcggacccactttcagagtagatgtttcctgttctatctcccaacacatacagtgttattaccacaatatagtgtcaaaccgtcaatgcaaaaatctttaatctccttgccctgatgatatgtctctacaatatccagtactcccacatcaataaaatttatacacccattttctgttcccacctaccacactaaattcttgtgatctttctactctgcactctgaaagtgggtccgagctga

SEQ ID NO: 377341 - DNA, 396 bp, Homo Sapiens
cactttccaaagtagctgggatacaagtgcatgacacttttatagggtctctaaagtgacttaaaagggtttttctttttgttttaaggttaaattgaccttgtcatttataaaagcaactatgctcatcatgaaatttaaagtctagaggtggaaagaataccatcatccatgggcttatcactgagataaccactggtaacattatttttaattgcgataaaatatacataagaaaatgtcccattttaaccatttttaagtgtacagttcagtgacattaagtacactcacattgttgtgcaaccattatcactatccatctctacaagttttttaatcttcccagacttaaactctgtacctaataaacactaattcccattttctctccct

SEQ ID NO: 377342 - DNA, 503 bp, Homo Sapiens
aaatatatttttctttcttacttaatggtggctgtgaattgcagggtactttgaaggccatcatctgaaccaagagtagtaactagattaattatatgacagaaagagtgaatttagccttggggtatttattaacttctattatttagatatgcaattttgtttaccactatctcttcacagcattcatatgttaactaagctcttttgtgttaacaagtttatgacaagactgtgaaagtaaaaataatttatctgcttgaagacaaaaaagggaaggagaacaaggatagaaacattgtgaattaatttgtacaaatagaaagcagaccagcaggacaggagctcttttgcagtgctgccggatggtgtctagaaaaatcccagtaatcatgtaggctccatattatttttgcctggggcaaaatgatgtatcttctgtatttagcttttaaaattagtgaaacaaatggcattatttattaaaattctactctgaaagt

SEQ ID NO: 377343 - DNA, 271 bp, Homo Sapiens
cactttccagatctgtaagcccagggggtttaattgtcacattgggagctccagagttgtcaagaagttgacttaacgatgttggtgcttccctcatagcaggagacaccaaatttttgttctcttcgacactgggaagtttgttaggatccgaaggctgcccatcctttttggactgatcttcagggacaaccattttaacttcttgggcagggactgcttttagttcaatgtttacctgttccttcctactctgaaagtgggtacgagc

SEQ ID NO: 377344 - DNA, 264 bp, Homo Sapiens
  misc_feature (239)..(239): n is a, c, g, or t
cagagtgtaggtggatcatcagaatgttctgctgacggttttaatgcatgtctcacaaatcatagaattagactcatccagtcagctcttaccatctctaagcttaagacggattctaaattctaaaggagacagtcatattttagcagctgggaaaataggaaaaggaatgctctactctttgaggtcataaatctacatcattcccttgtcataaagataggatcccacagaaaacngttcaacaactgcatgcatgacaca

SEQ ID NO: 377345 - DNA, 381 bp, Homo Sapiens
cacttttcagagtagctgtaggtaggaaagtaaacatcagaactagcctagtccttgttacgattagtactttggatttgatttttcctgtaaaacagatgcagtcatcttgtttgacctcagtaaccccagacagtttaagaaaacctctccttttgagctgatacaggttttttccccagaatccttttctggcatgtttattgtatgaaataatgaggctctccatggaaggatgaacacatatgagtcaagggattgcaattctctctgatagacttagttttcagaccttataactattgtatatgcattgaagggtgatatatttgcatataaaaataaatgcacctactctgaaagtgggtccgagctgaatgt

SEQ ID NO: 377346 - DNA, 304 bp, Homo Sapiens
ctctttccagagtaggcaccattctatgaaaatctgtctgcttcatgtttattattgaaataatctaaattaattttagaacacttaaaatcgaaaacatctccaaagtgtagttcttctctttctaacagtatgatagttcatttgtttaagaaaactattcccattatttgggtattcaaacatgtttttacttaggagctctttgtgcatggaatgtactagactatggtattggatgataatggaaagaagataatctccccattcgtaaaatcagaaatttatttgatcaataaaactt

SEQ ID NO: 377347 - DNA, 690 bp, Homo Sapiens
  misc_feature (556)..(615): n is a, c, g, or t
ctttccagagtagcagacaagatataaataaggaacatctttggcagaaagtctctaagctacattcaaagataactcttctagagttaaaagagcaacaaactctaggtagattgaagtctttggaagctcttataaggcagctaaagcaggaaaactggctatctgaagaaaacgtcaagattatagaaaaccattttacaacatatgaagtcactatgatatagaataactaggttttaaaactatggctgttaaataagctttttccagccaaaccaaactacatgtaaagtgaactgtttcctgtataaagttctcatcttaatgaacctatgagagtgttgtaaagttatgaactgtatcctattcttgtaatactcatttaagaaaaaccagagagttgggctggagagaaaagcagttttattacttgataattttccaaattaaaatttagcacatagaaggattcagttataacatgagaaaacaaagaagtgttcaaagagcacagactagaagtcaggttcaggaatcagtcctggttctaccnnnnnnnnnnnnnnnnnnnnnnnnnnnnnnnnnnnnnnnnnnnnnnnnnnnnnnnnnnnnaagcacttactggatttgtaattggttatttatagtcccttccctttttattaagataattctattagaacacat

SEQ ID NO: 377348 - DNA, 336 bp, Homo Sapiens
  misc_feature (221)..(242): n is a, c, g, or t
ctttccagagtagaatgagagtatgaacaaaagtgcagagatggtaaaggataaggcatttcggaaaatggcaagtaccataattcactttggatggagcatcctcagtttgcactgagggtctggacagaaactcaggtcttctaattcccagtaacagtgctggtggtagtgcttgctcagtcgttgtctcttttctcacagcaaggtcaacagtcccnnnnnnnnnnnnnnnnnnnnnntctacctccagtgttcctgccgcatcgtgacaagctctttcgggttccaggtccaggtcttgaaaatctggaaatctggagtccatggctgtgg

SEQ ID NO: 377349 - DNA, 626 bp, Homo Sapiens
  misc_feature (495)..(496): n is a, c, g, or t
  misc_feature (506)..(506): n is a, c, g, or t
  misc_feature (529)..(529): n is a, c, g, or t
  misc_feature (583)..(583): n is a, c, g, or t
aatgatttactctgaagaaacaaacaatggtatctctgaaactcacaacctaaagcccaatcttgaaaatatgttgtgcaccaagacgactgcttcagcttcttctcttatccttactttctttaatagatatttattaaactgtccagtgaaaaggtgccacaatgcccagtattgtaaacaacaggtttgcattcatgaagctttcattcattctggagtctactaattcacctgaatggtgtttgcattctgtgaaatgcctctccacgttgacatatgtccacacttttgtctgcacataactcttttttcacaagaagggtcactgccacaacagcacagtcagcgggtgaattacaggtgcctgctgcctgcctacctgggtaatctgatcttgtctgtatcgccgtgtgctcatcactgaagaattgcaggccactcatgtcagtgaccagatttgtggcttataaacattagcagtttatttatgtnntaagatgcanagatgtgtgtttgatattcactntaataattagaaatggatcttgtaaacagggcatatatcaaagatgaccttatnatatgtacccgaatatacagttcaagaattttgtctgactggc

SEQ ID NO: 377350 - DNA, 386 bp, Homo Sapiens
cacttttcagagtagcaaagcagtcagtgatggtgaacattagaggtcaaacatgagttagatgtttgtgggctgacagccatcgtggctatgaccagtactatttacaaagcatgaattcactacaatgctcaactgtttgtttagctttatctcacttggggaatttattcctgtctgctgcattgtaggtagctgggtaggatatatttccacttgctttttaaattagttcttcacctccattgacactcgttttttggttttctccctatagtgtgggttggtgctagacaccagtctgacccacagaatgggagttatttcatccatctttcctccatccttccaaaaaccacatatctactctgaaagtgggtccgagc

SEQ ID NO: 377351 - DNA, 430 bp, Homo Sapiens
  misc_feature (385)..(385): n is a, c, g, or t
  misc_feature (406)..(406): n is a, c, g, or t
caggaaaaacgaaattacttgcaattatgccagatgagctgaagcacattattggggctgagacaacacggaaaggtattcttcgtgtttttgaaatgtttcagcacaaccaattaaataggagaatggtttatgtcttcttggaaggctttttagaaaccttatttccacagtataaattccgtgaacttttcaacaaactgcattcacggtcaaagcagatgcagaaatataaacagaaacttcaaactactcaagcgccttctttgcagaaaaggtgacactccactctatgaagctggtgttcattttgtccaggactaatggtatggacagatcttctggggcttaactcaaatactgttgtgtctgcaccagtcttttngtgtctcaaaatagattattnatgacatccagaagtctgttggtt

SEQ ID NO: 377352 - DNA, 294 bp, Homo Sapiens
  misc_feature (274)..(274): n is a, c, g, or t
cttaaccacctgacatatctttatttactgcctacaaacctgtatagatccctttctatagtataagcactaagtttagtgcaggaactttgttttacttgctactcaacctcccctagtatagaacagtgcaaaaatacctagtgaatattttttggatgaaaaaattacctagaatttttaaaaagatgaataaagttatacattggaagaaatggcattcataataactccaaatgagtggttaaacgaagtatgatttgataaactacanctgagagtctccgtcgaact

SEQ ID NO: 377353 - DNA, 175 bp, Homo Sapiens
cattgaccattgataatgctgcaaatcagaaatgtacatacttcatttacaacagggttctttttatacttttgtagattctcatacatgtcacatacatggttgtctttatgtaacttaattttttcatccgcaggtgccattttcataataaactactcttggatttgttact

SEQ ID NO: 377354 - DNA, 562 bp, Homo Sapiens
ccatgaaagaattcagtttgttagtacctatatttttaaactggtgaaactgacccaaatatgtaataaataccatagtagctcagacccaaggagatatttttctaaaatcagttttcgttaaagtacttctacttccgttattggatatggtatctcctaaagtgtaaaaaaaatctgttactatatagtgataaaccatctgctcatcgtaagtgtaaggcttaacaaataagtaatacatgctatatttattcaagtgtctattgcttaattgttaattgtgagcagatttattgaatgcctattctattttctgcagtttacaatacaataactctttgagtaagttgaagtttaattgtgcaacaaatttgtattagagtacaatttaaagtgtttttctctatagccttttttgactggggaagcaaggggtaatgttaattagtacactttgttcttgtactagctatgtttctataagatatggtgccctgtgtatcccagagatgctagaaaactgttctttgctcctatttgtgggttctgtttttgtggg

SEQ ID NO: 377355 - DNA, 211 bp, Homo Sapiens
agacagaggttcctaacgcaaaaagaaaaccacaagtaaagaccgtcaaattagagctttagaatatgacttgaaaaagtagagatgggcaaaacagcataagaaaatatttattcttaatgcagatggacagtgttttcttgttttaaaaatgttttgcctatttgccagcattttttgaagtaatacactgctgctactctgaaaagtg

SEQ ID NO: 377356 - DNA, 410 bp, Homo Sapiens
tttaacaagatgaatacccacgaagtcaaaccccaaaaagttgcctggggaaaaagttgcctcctttaaatgaaattgccatcctccatgaaatgttatccaggctgtgacctttctgcactctctaatgagttcatgaattttaggccaattatggccacaaatgctgctgctgtcacagagagatgccggataaagaacacccaccaccagtctctgaacagggaggggagaatcaactctgaatgtgatgtagtggccaggagagaggaccatgttcaacaacgccacacagatgcaaatgacttgtttcttcaacaaactgcaagggaaaaaataaaaatgggggaagctacagattaaaatacatgtgtttggataggagagtatttaatggcaaaagaaaaaga

SEQ ID NO: 377357 - DNA, 362 bp, Homo Sapiens
ccgagctcggtacccccctttcagagtagagtcctccacaatccttcaacctgactttctggctgtatgagttagggatgggagggagaggcaattatattttaagtgtctcctttctagaagaactgagtgttctctgaaggaccattccagctgcagaagtacttctgaatgggtgaagaaagggcactaaaatgtaccaaaagattttgggcccaagtgacatccagaccatttttcttttctattaaagtaaactgaagtttagataagggctagattaaattcaaggaaactcctgataaccatgttaagatcaaccacagtaggctgagttttactgaaaccttggtcctcttaag

SEQ ID NO: 377358 - DNA, 475 bp, Homo Sapiens
atgtcacttattttatttactaaccttgacagggactaaagaatgaggtacagaaaactttccagaagtctgagtgtggtgtagaagtccaagacaacttggagctccattattgcattattaagtagaatgaactgttatgaaattctccatattccaggtttactacatagaaaagtactatttacctacctcacagaggtattgtgaggatttgtgtttataaagtgcttcaggcgccttcgaagaaaggcaacatacaagtataaaataatcatacaaatttcaaaataaatgaaaagatgattttggcacaatgggaagggtgcctcctatttaaagaacacttggctattggtttataaaatcccctgacctcttgggttttaaaaaaattattatttaaaagaataaatgtttttccattgccaatcttataaaaattctcaatccaggctgtgctactctgaaaagt

SEQ ID NO: 377359 - DNA, 417 bp, Homo Sapiens
  misc_feature (22)..(22): n is a, c, g, or t
  misc_feature (38)..(38): n is a, c, g, or t
ataaccccaacctaaacccaantccaaaataaaataanccctcaatactcctattccccggggtagtaattttaattagattcctattgattcattattttctcctgtgtgcctttatttgggaaatactgttagtctaccctgctatcgagtctctttccctaacaagaaaatgtcagccttaagagtcaggaaagcttttactttcactatcacataagaagaatgaactaaacacctaacttggaaagtaaaacttaaatgagggattcaggacatttcccaaggggtcatctgaccaatttaagagttggtatgatgtgcctaaaatagcaaattaactcttctacttataataaaggtgcagatgtactgattagacatgctgacatgtacatataaaatatgcctaaacca

SEQ ID NO: 377360 - DNA, 624 bp, Homo Sapiens
  misc_feature (80)..(160): n is a, c, g, or t
ggacccactttcagagtagctgggattacaggcatgcgccaccatgtcgggctaatttttgtgtttttggtgaaggcgannnnnnnnnnnnnnnnnnnnnnnnnnnnnnnnnnnnnnnnnnnnnnnnnnnnnnnnnnnnnnnnnnnnnnnnnnnnnnnnnagcataatccaccacacctgacctacttttgtatgttaaaatgtgattatacttctctttgacttgtcagcttagctttagctgatacactctggtgcccaactattattgtatcagtgaacttccactttcttttccttttctctcaatttttgttgtatcattcctaccttgtgaggacatataatatttacattctgttgtcatcctcacatttcttagttccacagtttaaatgtatttgaaactcaaaacattcccattaatctcttggtcagctgaaattaatgatttaatagtttccttaaaaaagactcatggaacaatttccctaaatttttgccatgtcaaatatgtttatctgtagcctttacacagtaaaaacaatttggctagataatacaattctcagttcatatttttctttggaatattaaagtattgctatagagaagcctaaagtc

SEQ ID NO: 377361 - DNA, 585 bp, Homo Sapiens
  misc_feature (31)..(31): n is a, c, g, or t
  misc_feature (45)..(45): n is a, c, g, or t
  misc_feature (50)..(50): n is a, c, g, or t
  misc_feature (87)..(87): n is a, c, g, or t
  misc_feature (108)..(108): n is a, c, g, or t
ctggaaactccttgtccaccgaactttaaangaccctgaaaaagncaaanctgaaatgctgggccgcatcctattgaaattaagaantgatcggaatggctccctaanttcaggatgttatgtcctgaaaataggtgacaacggcaaaccatcccaccctggtgttgactgactttaacaaggttcagttcacagagattgagggcagaaaaaggaaacggcctcaaaagggtaagtttgctgtgttgccctcacaccacttgattcatggtcctgatcctaaggatctcacctgatacttggttttataggaaggatgtgtaaaattcccagaacgctaggaaacagggacgaaaacacttcaaagagaaagttaatgaacttgtttctgaccacaaggcatccttcagcacatgctgtctggagtggcctcaaacaaggagtgtgtggtgaggtgctgacaatgcaatgggagcagggtcctgtccccacgctaaagaagctcacagcttaatgcaaatgagaagccagtgaggacatcactactcctgctgtgcacttgggaactagaaacacaaaacccta

SEQ ID NO: 377362 - DNA, 345 bp, Homo Sapiens
  misc_feature (299)..(299): n is a, c, g, or t
tcacaaatatttttctactgttatatatgatcttcctttatactagtttctctctagtaaggcatgccagaagcccaagataccatatcatgaattcttacatattgtaccttttgttggtggttaaatcgcatcaaatgcttggcattgctcccataattataaaatgcttgtaaaggatcaaatatcacctaaatactttaaattgttttacttaagagtctaatctgggaagttttcaaatcatactattaatgtgtaatctaagctcttcagatgtatccatgaataatcctggnacaatattgcttgtattcctgtcatagaacaggttttgtaatcttt

SEQ ID NO: 377363 - DNA, 509 bp, Homo Sapiens
taactgcaaggtaacaaaaaataaagactcatgaaactaaaattaaaatgtttacagaataatagcataagatattaaaatgagaatatagaaaaagatttgtgcttaggaaaatacttaattcttggcccaaagtcataaaatagaaacttactataaggtaatttggcagtttaaaatgcagacagataacctctgatttacaatttctatttttcgaatgtaggacaaattttaaagtatttagtaaaacttggttttatgtaacaaatatacaaagtcttagaggagtctttgggccttcactaaacagaacaggacttgttagatttaaaagaggttgtgaacaaaatcaacaattcaaaaaccaaaagggtaacaagcaaacctcatagcaagatgcactgagagaaaaataaactatgggaaaacccccttaaccaaaagtcatgagacaaggtgagtttgattatgtgaaaaatagttgtttttttatgagatgctactct

SEQ ID NO: 377364 - DNA, 330 bp, Homo Sapiens
gtggggaagagtagctaaataagagccaaaaggtacccaaggagtacccctgtgaagatttgggagtgagcaccaaaagaagaacaagaatgactgggaaataacagaaaatggcacataggcagaaaggagtacagactgtcaccaatatccacttcgttttttgtttttgcctggggttggccctgctcccttctctgaaacaagatataaaaagctgatttatgatatcctgctttatcaccccactttagaaaaactgaggtagaagtggaggactagtcatatttactaactggaatcataccttccttcctactctggaaagtg

SEQ ID NO: 377365 - DNA, 369 bp, Homo Sapiens
cttctatgtgtgtaactctaaataggtaaagttaatttctaaagaaagagggggatgatgttgaaaggagccaggaagaaaatcatgactttttacaagacgcacagatgaggatggattataacaacacgaaagcttggaacaggccatggcagaaaaataactaacggctatatttaagtgggcccaggaatcatcatcatcattttttaaaaattattgcctcaaacagtggaaagaaaagtaaaatttggaatatgtcaaaacaggtaatattcagcataaagggaggagaatcctgtcgtatattcttacaagcataagaaaaagaagcctggtagctatccctactcggaaagtgggtccagc

SEQ ID NO: 377366 - DNA, 844 bp, Homo Sapiens
  misc_feature (519)..(519): n is a, c, g, or t
ataataataataatatactgaattgagttttaaacatttaaacattaataacataagttgcttctctcacatggtcttaatagccatgaattagttttgttttaggtaaaagtttttctgaaaattttccacagctttgttcaaaggattctttttgtctctgacctacttttaatgtctgcattttttttggaaattcagagtcatagaactcttctctgtgtgtaaaagcattcagacagagctgctgcccatccttgcaacagctaggggctgaactcctgctctgctgagttttgggtttattctctaacctgtggcaatgtgctgtagtcagcccgacttattctactgtcatggacagtgctaataataatactgccttttgctggagatgttagttctcacttatgcattttaagaccttttgctggaagtgttagttcttgcttatctaattttaaacgaatatgaaagacaatttaagtgattttgtacattttaatttactcatctacnattttcttgtattttttggattaaagtgtacctgtatgctctttctttctgtggaacacttcatttgtagtgtccaatttttaaaaagaaaacattttgataacagtttcagagtaatgacaaaccaaacacacattctaattgtctacttgtacaatttgttgggtaggtactataggggggaagaattaaatatacatgaggaagagaaaaaatctttgccaagaatttcagttattatcacttatggtttacccatattgtcataaaagtaagaaaatgggaattctaattttctgtcacaaaataaagattatataaaaat

SEQ ID NO: 377367 - DNA, 194 bp, Homo Sapiens
gatattattccctgcgatgggtgtagcaaaagagtaaatgtgaggcaaggcacatttttctttaattctttatcccctcattctccacaccttcaccacataagatagtataagtctattagacttagtgaatcgttgaagtaacttaaggaaataatattttaggaagagggaaaaattaaacataacacagt

SEQ ID NO: 377368 - DNA, 221 bp, Homo Sapiens
  misc_feature (148)..(159): n is a, c, g, or t
ctttccagagtaggaaagatttggtctggaaagcagcacagtttcccattattaatctaaagagttctgaatggacattttaaaactgtcattttgattcatccagctattttcacatgcaaaccttccacataccataaaacattcnnnnnnnnnnnnaaagaatacatatatgaagatattgctttttgcagcttatgcactgtatgggaagccctgtg

SEQ ID NO: 377369 - DNA, 272 bp, Homo Sapiens
cgagactactagatgctagtgtgagtctttacctttccatcatcaactgtcatgctttcccaagtctgaagatcctgttttccaagatctgtgctcagtaaacaagctttggagtctttaaatgtaaggaataggaaaggtgaagagaggcctggcttaaaatcataacatggagatgatggcagtgaatcccattggattgaatggtctgatatggaaagcaggctgtgtagttccaatagtccaaaaattctattttttgagacacagac

SEQ ID NO: 377370 - DNA, 219 bp, Homo Sapiens
taggagatatatcaaacatccataaaagggagtattttgcagccatagacaattgtttttaatgacctaagaaactgctcacagaggaaaatacataaaattctatagaatgatcaaataggctaaaaatagaaaaaaacgctagcagcaaataataccaaaatgtcaacaagcctactctggaaagggattactaatgatttttagtttctttctact

SEQ ID NO: 377371 - DNA, 782 bp, Homo Sapiens
  misc_feature (294)..(309): n is a, c, g, or t
agatggggtagagggaggatactcaaagacaggacagtaagaaacaaccactaaagtctctagacagatcctctgattctttttactattttttcaccctggaggatatttataattattgttttttaaatgctcatgatgtcacagataaagaacaccaattgctcccaatagaactctaactacagtatgtgtttacaagagcaaattactgtttatacacggacaggattgtgaatgaggcaaagaacattacaaattatatgttactaaagaaaagccaaaacatttccnnnnnnnnnnnnnnnnatgagaagacatcattacctgtatatgccccctcttctcagttccctcaatggacattggcattgatgagcccataagtacatgataagcctacaaggacaatagtgagtttatatttttatgtaatgattttagaacatgggataatatccagagtgatggaggtaaaactattcacatttccatattcaaaactacttcaagaatcactagagtgcaaaagttataactctaaatgctgaatggagaaatcatctgtcccaagaactacacccatatgactttccaataaatctatctcaaaaggcctaccatttaacaacaacagcaacaacaaaactttaaaagaacccaaatgaagttttgtataagttggtgtctttttttctatacattttgaatgacaaaaagctgctgtgagctacactgtttttattttattataaaccattcttattttataaaacacagcc

SEQ ID NO: 377372 - DNA, 256 bp, Homo Sapiens
tcagctcggtacccactttccgagtagctgcagtccagaaatgctagcaagccagtctccctaggagtgggccatactcagctgtggaccactcacaacattttctcactttattttgcttcaaagtcagtgtactgcaatgatttctcctttgcttgctttatatgtttaaaattgccttccctaaaagctgaacttaaaattaatgtttgctaccaaaagcgggtagcagtgcctggtcatgtaggcatatgta

SEQ ID NO: 377373 - DNA, 278 bp, Homo Sapiens
agaatcaaactgctccaagcaatggcaacagaacttggaacagaagcaagagagtgtcaccttcacttctggtagggtggttcccaggcgactgcaggtcctgtgaaagacaggggtctcaaagttctgttaatttcacaaatttgttataaatttgtctaaactgagctgttgtggcaacataatttatgaatcgtaaggtctagttaggcttattggggggatatctacatatatatgtgtatgtaagggaaaaaaaggtagaatttacagccttc

SEQ ID NO: 377374 - DNA, 170 bp, Homo Sapiens
agttgaaaacaggtaatatttgacagctggcaagacagggaggaactgcaaattgttgtaaatcctattgagaggaaggaaattgaaggaataaaatatcaggatagttgataggatctttaaatatttggaatcaaggaaatggcccctactctgaaagtgggtccgag

SEQ ID NO: 377375 - DNA, 275 bp, Homo Sapiens
tcagctcggtacccactttcagagtagaacttggaacagaaaaaaagatattttaagtaatctcaaatacatagagacggtacaaaggttttagaattctttgtatttggttttctacagtaacaattacagatatgaatttttaaaagaatatttaacaacataaaatcattcacagaaaaatactgtacctaaaattccagccttcaatgatagttttggcaaggtaaaaatattcaatttatttcagaagagcagtattatagtacagtcta

SEQ ID NO: 377376 - DNA, 174 bp, Homo Sapiens
cactttccagagtggattagctggaacactggatagacaggaagatcataaagtcattagcaaagaaacagacttactggagtggataaattcgatgtctttaccattagggttgggtgctagaacacaaaatcggagctgaggtgagagactactctgaaagtgggtccgagt

SEQ ID NO: 377377 - DNA, 557 bp, Homo Sapiens
  misc_feature (338)..(401): n is a, c, g, or t
tgtaaaagaaataaaagttaaggaggaaaatgaaacagagatcaaagaaataaagatggaggaggagaggaatataataccaagagaagaaaagcctattgtggatgaaattgaaagaaaagaaaatattaagccctctctgggaagtaaaaagaatttattagaatctatacctacacattctgatcaggaaaaagaagttaacattaaaaaaccagaagacaatgaaaatctggatgacaaagatgatgacacaactagggtagatgaatccctcaacataaaggtagaagctgaggaagaaaaagcaaaatctggagatgaaacgaataaagaannnnnnnnnnnnnnnnnnnnnnnnnnnnnnnnnnnnnnnnnnnnnnnnnnnnnnnnnnnnnnnnatgatgatgccaccaatgaggaagaggagtttgagtgctatccaccgggcatgaaagtccaagtgcggtatggacgagggaaaaataaaaaatgtatgaagctagtattaaagattctgatgtcgaaggtggagaggtcctttacttggtgcatta

SEQ ID NO: 377378 - DNA, 317 bp, Homo Sapiens
tggatttgactcctcaaaacctctctcccctttttgccctttccaaaaatcaaaggcttttgtctccatgagttttacctagtagggattgtagttgtcactggtctagagttccaatacattttatatcaggaacctcagtgagctacccagaattggaacttaacatggcccagcaactaggagaagaaggcaaaccttgagaaagctgagccctcaggatagcacagtctcacccttgtttaaaatcaagtcaggctagcctctcagtcactctggttttgtaatgatttgccttttaggcctcaggccatttg

SEQ ID NO: 377379 - DNA, 466 bp, Homo Sapiens
ataagataaatgtgggcataattaggtgtattaacatgcctttgatgtatcaaactgagggggaacccactaaatccagtcaagcagtttcataagatcttcacaaaatgcctctacttacggaattcatgttgattttagtcctgctgatgtgtgtaccgttagcactttggtttatcaatatttgactggctcaaataatggatagaagggtggcctggttatagacagtagccagaaggagccagagggttacagtaatgtaagatcaagactggaaaatgatagctatagaattacaagcccggtaccaccaggtaccacatcacataagaaaaaaggttataatgttttctcaacttaacagcaaaccagtccagctacgggggcccacccacccaacagctgagtggagctacggaggcggctacggtgcccagtagtgggtcgggtatcctatagagtc

SEQ ID NO: 377380 - DNA, 193 bp, Homo Sapiens
acacttgagtatatgccactgaaacaaattggttttaagtatgtaacattctgatttagggttctcatcattatcttggtaaaaaattgacacctgctacattgtcttaagacttttgtctcagaggcttcagatttttacatatatataagcacacatatactatgcatttgcttgggttgaattgaaatct

SEQ ID NO: 377381 - DNA, 314 bp, Homo Sapiens
aggtttaattaacttaaatcaacctctctccctgctcccatgtcccccctcctcgaaaaagagggctgctttaatatagtccctaactggaagttctgattttaggagtttctaatcagactcaaaattgccagctccttgtcttaatctgcccctgagataccagccctccctgtgtgattaatctccccctctttttttggccacatttcaaacttaggcaagctttgcactgcagtttatcatgttgtggttattgttcctgaatggaaacaatagcctctacttgcattgttcttcaaacacacacacac

SEQ ID NO: 377382 - DNA, 424 bp, Homo Sapiens
acccactactggctgataatgggaggaaggagattaaatggacagtttcaatcctgaaagggctctcaaaagataaacagatgagtaagcaaccacttgttaaaatagtcacgagttattttccatcttaagagtctattatacaactgaataataaagaggtccatgaaaaacagataagggagagattcatttgtgaaaatgaaagcagagatttcttttaaaagatgaaatctgaaaaagagtaagatttcagccaagagaagtatgaggtacaaatagagataacgaacagaaacctagcagaggaaaagcccaagctgatcctaggaactggtaataatctctcctagatatagacaaaaaacaaggtgcacaatggccatggtcctaggtatggcatcagccagagccagtagtgggt

SEQ ID NO: 377383 - DNA, 266 bp, Homo Sapiens
acgtaaggtgagtgacatgtgacatgtctcttctttgtatacagttagttcacacttcaaacctgaagaattatttcctttgggataattttattaagctatgtttaatataaatttagtctggtctgctacttgatgctatctcataaaacaaaaataacatagttatggagactgattattttttcctttctgatggttagaaattttatactttctacttttttagtggttaccattgaaatagttatttaacaaattctttg

SEQ ID NO: 377384 - DNA, 123 bp, Homo Sapiens
tggtttattaatcccaatatccttgaagaaataatgcaaaatagggattgtagaaggctagttccctctataaatttttattgttatctataaaaataacctcattctttgccagtagtgggt

SEQ ID NO: 377385 - DNA, 258 bp, Homo Sapiens
gcagccatacccctattctcaatcttcattctcaccctggaaaacctgctcacttctgaccccaagacagccccctccccttccctctgtattctgtgtttggcagaccagccccagcgaggacttgtatggttgcgctttttctatcagggaagtcaatggccggccagtgtagtgtgaagtcccagcatggcagagactgcccaaggctgaataggaggcatctttgccgctcaggctatatcagtcaggagctgt

SEQ ID NO: 377386 - DNA, 245 bp, Homo Sapiens
gcctgcaggtccactttaaagaacccccaacccactactggcttccctcatttgttcctgtaggtttgagttgtgatctggtatcattttcttattctaacacaactttgatcccatctatctcctttatgctataattatcaaatatacttctacaggttataggcctaaaatataattttatacatattattctatacagttgttttttaaatcagttgagaagaagaaataggccagtagtg

SEQ ID NO: 377387 - DNA, 229 bp, Homo Sapiens
cactataggatacccgaaaaggagaaggatgttatctaaatctgaattatgttgaacagaagaaaagagaagacagggttaagaactactctaccggatgattagtggtaactgttaaataatataagaaaatgagaagagtatactcaaggggatagaagagtttatgtacgtaagggagatgtccttaaagactgacaggaaagaaatcacccaggaagagggccac

SEQ ID NO: 377388 - DNA, 302 bp, Homo Sapiens
ctactggccacactcatgaaagctgcaaaatatatgacagtttccatttggaatttctaaggaacttggaaaaccaagatttcttcaagacaaaggatccaaaattcacttgaataatgggaagaggggtattggaaaggaaaagttaatattggttcggcaaccactgtgtgccatatatttacctaccctagtcacaactcaatgaattaagaattatcactagagataaagaatccaacactcaggaaagtttaataactttctcacaatagccagtagtgggtcggggatcctataga

SEQ ID NO: 377389 - DNA, 346 bp, Homo Sapiens
cccactactggccacgagtgggtggtaggacttcccacaaaaaaagaaccgagagcaagtgtggtgcattcaaagctcgcatggagagtggctgtgactgcagaaggaaatggctggcagctcaagggcagggatttgttttttggaaagaagaatctgggtcctggctgaaaactgtctggagagggcaccaacagatcaaggagactgaaatggtgttacccatggggatggagaccatggggcacatgaagatgttcaaaaactgggctcaacaaggctcgactggttgtgggaacaagattgccaactgtttacaactctgatagtggagccagtagtgggt

SEQ ID NO: 377390 - DNA, 302 bp, Homo Sapiens
actactggccacatactttgtgtagcttgatttacaaatagcttggctaaaaagcagttcagcaaatcaacttcttaaaataggctatgaaggaaaagtgcatgatgaagccagcagtaaacaaagaaattacacaatctggtgagagagggtttggaggtggaggggagttgttaaaggcctggaatcattgaaaagtttggggatgacagtgacttggtacaatctgacagaatctgcccctcaaaagattagaaggacaattgattggcaagagacacttgacagagccagtagtgggt

SEQ ID NO: 377391 - DNA, 360 bp, Homo Sapiens
tggtacctccctccctggatctctgagccagcagccaggaggacctgacccagcagttctttactggcccctttgtagggccttgctgccagggggcagggatgctttccagcctgcagcaacagaacacttgaccttaaaagtctcttctggtctttggattagaaaaggcttatgttagcatagcttaagagcaacctcagagacttgagccctactaagtgactgaccactgtttagagtgtctagtatctgatgttcatttattcccagtgttcttgtgtgtcacagttcagccagttttggtttatgcctagagctacttcaaggactagactaattagctacagcccatgtccc

SEQ ID NO: 377392 - DNA, 363 bp, Homo Sapiens
  misc_feature (99)..(99): n is a, c, g, or t
  misc_feature (184)..(184): n is a, c, g, or t
atgtaccaaagtggcagggcagcccgtttggggcccaggaattgaaggtggggagtggggaagaggaacccacccctctgggggaggaggagggcctangctgaggtaggagtagagagatggctacgaggactcagtcatctctagttcctgaaattccctgaaaggagatggtgtggcctangacagcaaggaaggaggcgcggggctgcaggcacaccggagtgaaggcggagggtgcaaatggcaggtggggggttggatgtggctggcagagtttggctttgtcgttggcttgttggcctgagtggtacttacttttttaaaaaattggcagatttctagttagaagtgcgttatctt

SEQ ID NO: 377393 - DNA, 580 bp, Homo Sapiens
aagcttggagatgagcatgaacttctagaacatctcaccaatgaagccctgtctagtgtaactcagctccacctgaaggataattgtttatctgatgctggggtgcggaagatgacagcaccagttcgagtgatgaaaagaggccttgagaatctaacattattagacttatcatgtaaccctgagatcacagatgcaggcattggatacctcttttcttttaggaaactaaactgcttagatatctctgggacagggctcaaggacatcaaaaccgtcaagcacaagctccagacccacataggccttgttcactccaaagtgcctttgaaggaatttgatcatagtaactgcaagacagagggctgggctgaccagatcgttctgcagtgggagcgtgtgactgcggaagctgtgaagccacgggagacctcggagcctagagcagcagctcagcgcttctatgggaagcggtctcgagcagaagccccactgaagtgtcccctggcagacacccacatgaactcttccgagaaactccagttctataaagagaaagccccagattgccatgggccag

SEQ ID NO: 377394 - DNA, 291 bp, Homo Sapiens
ctctataggatcccccactactggccatggctaggtttatagatagttgggtggtgagttaaccttaaaatagaaaatttggtcaataagcatttttattttggagccagagagctattttagggacctgctgcctggaaaggatatccttgggacagcagatcccttagttcctaatgaatagctgcatcaccaacacagcttctcctgaccatgggagggccatcagcaaggtaactcagcccagcttattaacccttctgttttctttccagctagccagtagtgggt

SEQ ID NO: 377395 - DNA, 208 bp, Homo Sapiens
acccccactactggctaggataatgctatctttaagacttgaaccctttcaatctgtgtgattcattaaattggaccattgatgataagaatacacattgtatgtttctgtgcacatgacagtgtgtgtgtgtgcacgtacatactgtatagtcttaaaaatagcattatactgggtactgaccaatctaatatggtatactgttctg

SEQ ID NO: 377396 - DNA, 277 bp, Homo Sapiens
atctctggggaagcaagacaaacaggctctacccatttccctccttttgtctacacaagccagcacctaagatcctctgaatttgttcccatccaatcctgcaaacttccaagaagggcagtagataacttttcaaaagaaaaagaaattgcataaggtccctacataatactgaggccgaaacgagaagaggctgtccactgtaaaagcaaggcacttggggcaggagccaggcaggtggcctgagcagggtccctgcagtgagtcaacagtttga

SEQ ID NO: 377397 - DNA, 220 bp, Homo Sapiens
aattctaattctgtgtaaaatgagtgaaacacagctaaactagaactagtccttgctagcatgttaatatagattttgctcaaacatctgccatccccatcctgttgcggagatgaccaacaaccctgggtccacagcatgttccaaatctctcaagtgactaatctattactctagacccaccttttccgcctggtggcaaagggtccagctcgaatcg

SEQ ID NO: 377398 - DNA, 203 bp, Homo Sapiens
aaaaataaaaagagaatgctaggttgctgaaagagaaaaaagcaaagagccagtctgagaaacaccacggaaaatgtgtgtttttttcgtgttgattctcctggtaggctcctgggctattctctagtcagctctctggcagcaaagcatagtatgatttcagagtatcgggtccgaccaatcgaatcatggcaactgttctg

SEQ ID NO: 377399 - DNA, 310 bp, Homo Sapiens
acccactactggccaattaaaacaagtttgttcattttattttaggagcaatttgccattgtttttgtgcattcggcagttgtttatttgctgcttgcagttgtggttgttcgtggtatcattcacggatacaattttgaacgaggaagagctgtgatgacaaatgcactaagagacaccactgtggctctccacaaattagccagaacataagggtgggaggagcctgtctttccctggcagcacagggctgcctggtcttaagaagtctgtagttgagaacacagtagtgggtcagccagtagtggat

SEQ ID NO: 377400 - DNA, 150 bp, Homo Sapiens
aaggcagactctgcttataattctctgtagtctttcatggctcactgccatttaatataaaaaaaagaaggcatcagattgattgtacgtgtaagtgtgtgtatggaagcacaatgaaacaataagtttcatagactgaaaaaaaagaca

SEQ ID NO: 377401 - DNA, 366 bp, Homo Sapiens
cctgaccaaggcccatcggggtcatgggatgtccagggcactaattagccagtgtcagaagagggtggccaggatgagggggggctctggaggccaacacatgggaaagacccctgaggatgctgggctagaggagagaaagtcacaggaacataagggcctccttcaaaaacctgaaggcaacctggggaattactgtgctctcgtttctagaggtgactaagcaaagatgggctatgtgactcttgattccaataggaacttctgctcagtttgggaagccggcccatggcacacagccctcatggtagagcacttaaggcatgtgtacatgaccctgcacacgcctgaccctctgcctccggg

SEQ ID NO: 377402 - DNA, 485 bp, Homo Sapiens
  misc_feature (14)..(14): n is a, c, g, or t
acccactactggcntaagtgacagtggatgcagtagtaaatcctgagtgagtttctacatgtcctggcaacgtctaaagccacagcaattccttgtcctcttttgtttcaactcgtttaacagatctccactgattgcctggagacagggctttttctgtagagagctcacacagaactccatctcatagccactcagaacaggaggaccacatgggccatgtcctccactctgggatggtttctgttcttgcttcaatggtgcacaaccagacatcattgtcttgggggcttcctcagagcttgtcccacatctttaagtaagttgaaccggcatctgcttcagctgctctcttccccctccactgcttgcccatagctcacagctcagaagaaagtgcctcaaggcgagtgccgcaccttcaggagctgcaatgaagagaggaagcagtgtgactaggctgtgaggactccagagctcccagg

SEQ ID NO: 377403 - DNA, 428 bp, Homo Sapiens
actacatacttccggttcaagtttctctgtctctgcctgaaatattctttcctcttccgtcacatagctgattccttctagtctttcacatctcagctcaatgagacattccctgatgcttgaatttaaagtagtgctcactttttcaccctcatatcacctagctttaaaattttctgcattacagttattaccattattttgcattttttgattctttatcttcctgaaacttataaagttttaagagaacagagatattgcttgctttgttcaatgctctgtctctagcaactaaaatgatacctgccactataggtactcaataaatattaaatgaatgaagacaaataaatagtggagttagtcaggaaccagccaagaatatagaatctatgccaattatttaaagaaaactatgcgaagat

SEQ ID NO: 377404 - DNA, 902 bp, Homo Sapiens
  misc_feature (48)..(48): n is a, c, g, or t
ctaaagaaagggtatctgaaccaagggccagtgatattcctctgttanaggctgttttgtggtctgaagagtttctctaaagggctgagactctattcggaagagggagcctcagttactgaattgcgctattgaaccctgaacacaaagtacacatatataccctgcatctagccttgatatttcttctgctcaagtcaaaaaactccggaagcaacagcttccaccttcaagcaatccacatacttaaaaagccatcaaagctaagaatagcaaaagctaccttcctgattcagtgaagttgctgctagcactaaaagcaagagaaattatacttttgttcttcagatacggttaaaacaaaggaaatgttgtcaacgttgacgccaacatagacatttgctctataacatataaactgtcttttagacaggttatgttaaaaatatcagaatgccatttttgtaaaggatcttttttaggatagacgtggtctcatgcttcctttgttcgcctccgttttaaaggagcattgtaacccctatcctcatccctacaaaaatccagtggatgcacttccaaattacttctgtcattttgtatgtgttgtgtttattatgcgtaattttcactggatgatgagatacatggtgatactatgtcagtttattctctgtgaatatgtctgtacatagacaggaagctctacttatttgtacataggctgtctgaagtatgtacttctgtcacatggacttcattctgataaagggtgtttcttcttgtttcactgtccatacctttgtgcttctactactgataatcaattcatagaatatcactttatgtaactaagtctcctcagtgtgaaaaataatagtaataaaattattgactcaaag

SEQ ID NO: 377405 - DNA, 265 bp, Homo Sapiens
actacatacttccgtgcgtgggtcagccacacccactgtgtgcctcctcattgacaaatagcgcaccaatgcttcaggggaaggctcttcaccctcatcactgtccaaattcagtgtcccatccggctccacaatttggttctctgggttgatcagctgcacctggggaacgctgatgttcatagcagtacctgcctgctccgcctggaaagcagtacatatatatacacgcataccttaacaatagagagcaatcatgagtgtt

SEQ ID NO: 377406 - DNA, 223 bp, Homo Sapiens
tacttacggcttaggctcttccacgctccctttcatttcttcttgcatttcagaggctgtgctctcggtggaagacaaggtagcgctcttgaccttgtccagctcatcttctttatcactttccgaaggccgtctaacacgcttcttgggcgtcaccatctttttgaatgatgcccagggagtgacaccttctctttttttctctccatcggaagtatgtagt

SEQ ID NO: 377407 - DNA, 523 bp, Homo Sapiens
tacttccggcaggaatcaggtcaatggttatctccgatgaatgagattgaacatgtattattgtgataattccaacttcattgttggcctttcactatatgcattatatgataaattgatactgccgacatggggaagtcttgaaagtattgtagtaccatgttctccccacttataacctgaatcacagtactggtgaccacatttataaagtcacatgttatgttgatgcatgaaagttggtaaaacacaaaattgtttttctaaactatgttatagtgttttatcacattttgtttcttaggcctagatgtccacatttaagtaggtttcagttgtgcttctcttcataatataataaatctccccccaaaagtgtctggatttccaatataattcatgctggaatgcttgacactttgagtgttaactgtttgagtctttaatcatctgtgtttgatattgtagagttatactgtaatcctcttagaaagaagctcttactatcacggaagtatgtagt

SEQ ID NO: 377408 - DNA, 177 bp, Homo Sapiens
actacatacttccgaatacaggaacatgagaaatatgaggcctgacagagagctcctttggatggctgttcctccccacttcccttggaaagcttgctccttcactctccacggggatcaaaacctgggagactgtctgctgctgaaactacactcccggaagtaagtagtcggtac

SEQ ID NO: 377409 - DNA, 413 bp, Homo Sapiens
tggggggaaaataaagaggatctcaaaaaaaaggggttgtataataagcttaaacacctgagggtggtaaggtctcatagacgatgcgatattgaatggatgggtataagtataaacattaagcaatttgttttctgtctgagacgacagccaaagattgtaattttaaaaattcacctgcttggaatattcctcaacagattggtaaagttctcatgaggcagtagttgagacatagtataaagcaagattgctaaataggagacttaccaggtctatgtaatttttttaaattattttttctggatgagtagtttagcttctgagagaaatgagatgacatagtcactatactgggagaaaatattcgaaaagacacatttgataaagaactgttacgacaagtctatata

SEQ ID NO: 377410 - DNA, 563 bp, Homo Sapiens
tcaatgaggtcccttagcagcctgatgaggaaggccttgaattgagtttccacttcattcatatctcttttctccattaacttatacataggaatcagctcattcaaaccttgaaacacgggcataatttcagtttcatgtttcaagtacagggataaatccaaggccttttcaatggacagcctcccaatgctgacgagctgaaatgcattgttaatgagacttgcccgatcattactgctgactgctgtgtgtgttccttttaaaaggccagtcgaagagtcccatccatcatcctcgtaatgcacaatgtaatagccattcatgcccacattaaatttgatccattccacctcttctgggaggatgagcccatctgtttttgtttttagcaaaaatcgatggaccatgtcggatttgctggtgatgaatgtcaatggaacatgccacaggtacccagtgtccggggcgccgtcagagcccttcatgtagtgctcttgcttcatgtgtacattcctccccctcactgtgatggttattaaggggaaaacccactctgacca

SEQ ID NO: 377411 - DNA, 325 bp, Homo Sapiens
ttctcgtacatggtcctatacaggggcgcatgtgggaattaaaatgactgctggcttacagtttaaaaagtctctgaagaggaacattgtggaaaagctgataaatcctggcaccaccaacttcatgagctgcataaaatacttcagaggaagtggggaaaaatgtttgtttgctgtctagtttgatactcatacatgctaaccaagaatcttatacaattccctgtggttaacagccatttgaaagtaaacagtccagtgactaccagtgccattcaccaaccttatcttccatattgaagagtggcctgacatgttacctgac

SEQ ID NO: 377412 - DNA, 493 bp, Homo Sapiens
agtatatattttaggcttatcagtagtacgattttgtcctctcccactgaggaggagggaagaagggggaagccagggggagttccacacacgtagatcagtgctgtaagttcccggatatcagtgtctctcacatcaacacagaaatagggcacttctcaacattaattttggaattattcactatttacacaattgtcactgctctttttcattactgtagcataactgagcagttagctgttctaggaaaaggccatgtatcagttagtgctatgccttcttttttacgataaaggttgaagcagtgtactcttagtagcctgaacacttctcaaagcgacttatcactagcggctttaatattgagcttctatatcgttgtgtccaactcactttttaaggctgttcatacctagcaatcttcacttactctgctatttttaaaaaactattttacagttttacagcacaatgttgactcttctgtcat

SEQ ID NO: 377413 - DNA, 356 bp, Homo Sapiens
agtacccacctgcagggagagtccagcttgcttggtttgctccttgaagagcagcttggaggtgggacagtcacaggcttctgactggggtgtgtgtgtagtgggggtggggctcttggcaggcagattgtcaccaatagcctttaagtctttggtctcctggccctggtcccacctgtccctcccctaggtgggaggggtggagagcaagtttcctgaggccttcccctgtgagggcaggaagtagatactttccttggggccagaggatgctttcacccccaaggtgtgtatatgtgggggaagggtggggccctaaagagcaggttcctgtttctggagatcctcgagagcac

SEQ ID NO: 377414 - DNA, 237 bp, Homo Sapiens
aagtacccacctccatggtctctaaatcagacaatctttaatctgaaaaggcagtgtccttattcctccaggaaactggatagaaacgctcctcatctaatgaagtcagccctgtcatgcttactgattctttcccagaccacagtgaaaggcctgtagggaaggcacatgaagaaatttcaaagttcagcttgcaggtgggtaccatgcaggtggtacttgggatcctctagatca

SEQ ID NO: 377415 - DNA, 155 bp, Homo Sapiens
tctgaggatcccactgcatgataaatagggtagaataaatcagtgtatcaataaaactatacaacaatacaaattacatatcttctgagcgggcagtttattctctctctttgcagtcatgactacaacatgctcactaaaaacaactaaaactg

SEQ ID NO: 377416 - DNA, 277 bp, Homo Sapiens
cacctgcaattccagggtgcacaaaataacaggtacctaaataagccttaagttaactttttgtgtggcataaacactgggtttgggaatgaatttactacctttggactccctatgttggcttctgttaaatgcagtcaccataattaagataaaaagattattttatcctctatttatagaaatatttatcaaaggagtaaggaaactatttctaaaccagtggacattaactgtctttactttctcactgcaggtggtacttggatcctctgat

SEQ ID NO: 377417 - DNA, 277 bp, Homo Sapiens
tgctcccaggatgtaagtaccacctgcatgattaggagattgatgtatctggttaattttttttaataggagtaatttaatgcttatttaatacagcttgctggacaaaatttttcacaaggaattcatccaagaaaatgaaataataaaagggctcatgatgttgagaaggttgggaaccaggacttgaggaatttacagcacaagtcctcatggagcccagaaccagatacaaatcacatctggtggtccctctgaggatggcaaggcaggtggg

SEQ ID NO: 377418 - DNA, 254 bp, Homo Sapiens
ttgtggaacgctgcatataaacacagtgagggttctgccaaaggaaagcgtcaccgtgatgggtgctgactgctcggagctattttgcacaagttagagtcaggtggttggaggaaatgaagcttactgcaaaaaataatggtttcaggtaagcaaaagcatcgtgtaccctcttgaggcctgccaggaggcgtggtgtgtggcctgtcgcatggctcagaatctgatggggctggaagggcagcgtgccaggt

SEQ ID NO: 377419 - DNA, 164 bp, Homo Sapiens
ttgtggaacgctgccagaacatcgtaagaaaagccaatcttgtccatataatggcatgaggaaacaggaagcgctgccgcatgactttattatccttcctctgagcagggccaccgctcagctgggaggaccttacctttgtcctacagtttctacaggtgaca

SEQ ID NO: 377420 - DNA, 165 bp, Homo Sapiens
tgcgcaggatacagaatatcgtagaaaagcattcttgtcatataatgtacatgacggaaacaggaagcgctgcagcatgactttattatccttcctctgagcagggccaccgtacagctgggaggaccttacctttgttcctacaggtttctacaggttacacaa

SEQ ID NO: 377421 - DNA, 578 bp, Homo Sapiens
acatggaagcgcagtattgcaaatggacatagacggaggggctgccggacctctcccagcttggagcctattctcctctgagatctgctgaagcttgaaataaaccagccgagttcctggtgctataaatagcggctctgcgtggctctagaaggcaggtgcaccgcctcaggctctgggcggctggggtgccacacgacctgctgctgtccattctacccggcccagtcccccatcctggccctggaacaaggtctaggctctgagggctgagtggggtgtggggctcgctggggatgcggctgcaccccagtaatgctaggcccagcgctgggggcatgcccttccctgaaacagctgatcttaggggtgtgaggtgaatactaataatagtaacaacagctggtgtctattgagtgtgaaccaagtgccagacactgccctaagtgcttgcaaggtaccaattcgttcaaccctcagacccacccgtcctcccctttcacagatgagtgggttgaggcacagcagtttgtggacccaggcggcccgttctcttaacctcatgcagcgttccacaa

SEQ ID NO: 377422 - DNA, 185 bp, Homo Sapiens
tctacaaaaaaattaaaaagttaattaactacatgtggtgcacctgcctgtagtgccagctactcagccctgacccgatcgccttgtgggctgctgatactgggaggctcaccagtcagatgcagaggaaacatgatgaagatctggactctcaacggtgtgacaatgaagggatcgtctagagt

SEQ ID NO: 377423 - DNA, 211 bp, Homo Sapiens
accagagactgtgtgtgacatcagataaatcacatcgggttagagaactttttggtgtagagaggtcaagcaatcattcatcatgagcttccatatttggaacatattactgaaaaatatgcctgaagtggaaaagtttagtgatacaacacatagtgcctggtacatgagggaacccacggaaaaaggtatcagtaaacagcgtaccaca

SEQ ID NO: 377424 - DNA, 159 bp, Homo Sapiens
attgagaaacctacatgggtggcatggggatctggggagcaagcccctacttgctcagcactgcttatgtagcacaaatagcatcctaggaaaatgttcctggggcaaccctagaatcctggtcatattttgcaggtttctctgctgaatcagttcccg

SEQ ID NO: 377425 - DNA, 259 bp, Homo Sapiens
tcgaagttcgagccgtcggtacccggttgtggaatgcatgcagagagagcctgggatattaattccgaggctcgggtgaaaaatgccatcttctccctgaaagactgaacttctgggggttccttacagctctggccttggagcctgtgcacatccttggcagctgccctcatcatcgtgtctgtactgaagcgcacccttgtgctccgctcggtccatccgcttctccagcatcctcagcagccaggcggagacgctc

SEQ ID NO: 377426 - DNA, 474 bp, Homo Sapiens
  misc_feature (339)..(339): n is a, c, g, or t
  misc_feature (368)..(368): n is a, c, g, or t
  misc_feature (432)..(432): n is a, c, g, or t
  misc_feature (440)..(440): n is a, c, g, or t
tcagaaaaggagagcttgttgtgaaacactgcttcctgaaacttcctgctattgcctaaagctacgtctgaaactgagtagggaaaggcatacttttccagggacttagggggataggctttggaaatgggacaggtctttcagactcacagcttgataccctaacaaagcagagtatatttatttgtttcccaggaaggccattgcagtttgactggctgagggatacagagatgaaattgtaaactgtatccagattatcaaagctaatttgactagtttgaacctcgtcagacattcattcctttgggccattgccatgggatgaaaccgagatcntgcagtctgatctgtgggacttcttctgntgggcatatctttttatggattttaacccctttcccttttgatggaatccgtattttcggagtncagtttcnttgagtaacccccgtggccaccaaaaggatttgg

SEQ ID NO: 377427 - DNA, 684 bp, Homo Sapiens
tctagaggatcccggagtggaacgctgctgctacaactggtgctgctacctgcaaagagatgtgtccagcaacttcatcactggggcacaatgagctgttcttcacatttgagtgtcctggacaggagtgtcatcctccggcttggggactgctggctcgctctggacctcactgctggtctccagctgggcagggccggtctgggggctgcagcctggctcgagcactgccccctcctgttgtttttccttgccttttgccgtgcttggggacatctccgcccttcactcctccagggggactgtggggggtctccttcactgcagctccctcctccagcttctttgtttcttggctgtcatgttcaggtcccacctcttcattttgcaccctctcccccttcacctctgtagccttttccatctctgcttcctctccagctggcttttcctccctggggctcccacacctattttctgcctctgggccagaggtctggggcgattccgggacctcctcttgggccgggtgcctggccgtccacctcctctgaactccgcctggccttttcaccgctcttggcttcctctgtggccctgtcctcctcctgcttctctgtcctgctgtgtgacctcctcagaggaggcttttcagcaggtcccagggttctcactccctctccc

SEQ ID NO: 377428 - DNA, 458 bp, Homo Sapiens
atggtcggtgtccctagcatcatgctaggggacattgtgtgtgccaccattacgtgcctcgccagatgtaaagatggtgccacacacacatgctaactgtgatgtgaaattcacaaagacctcacacatgcatgatgccaactaagaccacacgcggtgggtgggcaagccttcaggagagctgggcaggcctggttgactctgttccactcttaaaaccaccttcctctctatcgatttggcatgggaagccaatatgcacgattttgttttttctatggaaggcccattacatgattctctttagtgcaatcaatactaatctaattgaggtaattagaaaattttgacaggtaactggcttacaggccaatgcagcagacaataaaattgccattcgccaccatcagtctcaaactttcacagtattcttcctccacggtaaccagaaaacgggt

SEQ ID NO: 377429 - DNA, 585 bp, Homo Sapiens
tgaccaagaactaaagatatgaaaaaatcagagtttaagagacgtggatgatagagtaagagggtctaacatatatctaatcttgtaactgaagttcagtaattaaataagagaggatggagtattattctatgcctgcctttggctggtatgttttcagaaccattgaaagaataccaaaccgcatatccagtaagctaaacaaatgtcaagcaggataaatagaaaccacatatggtaatgaaattgaataccaaagacaaaaaagaagacattaaaagagaaacaagagatcacctgcagaagaatggcaattagactatcagctaactcctgaacagcaacagtgtaaatctagaagatcacagaataatttttcaatgtgctaagaaaaaataactttcaatgcagaagtcaatagccattcaaactcaatgaatgccaaataaagatattttcagacaaaaaaacagaaattctaaaggatatactttaggaagcaaaataatcccagatggaaggtatgacataaaagaatacaaagacgcgcacagataatgagtaatacatgggaaatctgacact

SEQ ID NO: 377430 - DNA, 423 bp, Homo Sapiens
  misc_feature (160)..(160): n is a, c, g, or t
ctatgaccctgaacaaaatgaaaggagagagatagctcccatgatggaaaggaggatggagtagcggtgccgtcatcatgaatggatgtatttatgtcactggaggatactcctactcaaagggaacgtatcttcagagcattgagaaaatatgatccangatcttaatacagtgggaaatagtgggtaatcttcccagtgccatgcggtctcatgggtgtgtttgtgtgtataatgtctaattgaatctgcagaaatgaccaagcaatcacttttttggagtatagttttataaaaaaagaatgcagggtttgaagttccttacctgataattgtgtctggcacatgataggggatcagtaaattgtaattcctaaccctactgtactcccaaacatggtgattcatggtcaagaaaaatct

SEQ ID NO: 377431 - DNA, 241 bp, Homo Sapiens
catggcctggctaggtgcgactgctgagaggatgcgccctggactgacatgactgtgcccggactgacatgactgtgccgtggactgatgatgactgtgccggactgacatgactgtgccccgactgacatgactgtgccgcgactgacatgacgtgcctggaccatcacacaggaaatggactagttttgcagtgcagcaagcagacaacagcctgtaccatgtagctgatgggaccgcg

SEQ ID NO: 377432 - DNA, 321 bp, Homo Sapiens
cgacgagcatagaatgtagagagaggaatgcatcacctacgcctccctaagaatggtagtactttcagtaacaatagggaggtcaagattataagggaaattaatgacatctgttttcaggtatcagtacctcaagagattaaacatgataattaaagtgagagccaaaagggttttgaaaaagttgggcaacatgatttgtgagtagtggagaggcatgtcctagttacgcagtgataaatagtcttgcatacagttcgtgctgttcaattctgctcacccatgggcatgttcgagtattctctttcttgtgtcctccct

SEQ ID NO: 377433 - DNA, 242 bp, Homo Sapiens
gagaacagtatggaggttcttcggaagtatgtagtcagctaattaactgtaattctttttaaaatttgagtggcagctttagggttaatggactactgcagttcatcttcaggcaggtgatatgagaccacttcaaacaaagtccaagaatcttacaatagtatttcttcattccctctcctccccatcttttggttactgttagcatgcatttggctcttacaaatgttatacattctatg

SEQ ID NO: 377434 - DNA, 202 bp, Homo Sapiens
acaggcactaatgaatgctggtgaggatgtggagaaaagggaactcttatacactgttggtgggaattaaattagtatagccgttatagagaagaatatggaggttcctcaaaaaaactaaagctagaactacccatctgatccagcaatcctactactgggtatttataccacaggaaataagatcagtatattgaaaata

SEQ ID NO: 377435 - DNA, 206 bp, Homo Sapiens
cgacacagtagaagactacatacttccgggggttgagatgatatctatctcattttagttttggtttgcatttctctgatggtcaatgatgttgagcaccttttcaccttttcatatgtgtgtttgacatttgtatatcttcttttgagaaatgcatattcaaatctttcacccattgtttgatcagattgttagattcttttttt

SEQ ID NO: 377436 - DNA, 393 bp, Homo Sapiens
ctaatatttactcgcagcacttctccattaccgatggggtcacctcctgataaaccagtaatttgcacattacaatgggtttaccaggaagtagccccatcataagtagaggtgcattctgaatgtatactgcttttccaccaaaaatcccacatcaaaccaccaaaagtcggggactgtctgtattttaaatgctaaattatgaaacgctgtatggttgcaaaatagacttagctgtcctggtatgcaatttttcattataacactatcacataccaggagagttcaatgagatagtgtgaaataagttgtagcctattcaagagcacatagttttagcaagacactaaaaactagtagtttaagaaactagagttttttaaaccaaaaaag

SEQ ID NO: 377437 - DNA, 269 bp, Homo Sapiens
ctacatacttccgcagccccaggaaccagccaagctaaatagaagaggccggcacaggtgtgctagaactgggcctggactccttgtggcttgggaacagacctgtgaaagctcccacatctcctcgccagtcatcaccaactagtcaccaccaacaaggagatggcgcagccctgcctaatcacagcaattaactgttagggtctttgtgcaggaagcacacgatatgctgagataaaccagctttgtctacgcatccctcttgggca

SEQ ID NO: 377438 - DNA, 214 bp, Homo Sapiens
ataataatggactgacatatactctggcagaacatgagaagctagatcagctcctatgtcccctgcacataggaaatctcagaatgtaggtatgtgtatccacacccgaccttcgtgcacacacacattagagattctaattatgggaagacagcagaggcagtgcaagcttcatactgtacccggggagggggagtttgcaaatattttctcc

SEQ ID NO: 377439 - DNA, 383 bp, Homo Sapiens
tatactagagtgatgatgtatatgtccaattaagatgagcctgcgaaggtttcctttcacatctttaatctgagaagtaacaaccttctggcagagaagggtatattcttaaaaagggagaaatatgattcaagtcctaaatcaaacaggatactgccatgttgtaggaaccatagaactcgtgtgactgtttgatcctggtagttctgaaagagaccagtgtggtctcctgtgaatgttaggtgacaactggctgctgggcaggttcaatcaagtggaaatcatcgtctaattaagcgggcagcagctgggcagcatacatttatggagtcattaaagccttgtcaccaaaggacagtaggaggctgccgcagctgatccct

SEQ ID NO: 377440 - DNA, 346 bp, Homo Sapiens
tacatttggttctcagtgagtgtacattaagcacacgggaacatttaaagtattcatggaagtttataatgatagtatttcaaacaaagtaacaaataacttccgtatcacagtccatcatctataccaccttcctccagctcgcaccaagagaacaccagctgctctatcacctttgaacctacaaaactcaaaggatgatatctctgcatatttattggttccctttccctggggcagaaggtaattaatttgacttaaaaatcctcctcttcaaattccttcaaggctagataagctaagatcctgtttatgtaaacaaaagtgctttattaaactgaccatg

SEQ ID NO: 377441 - DNA, 354 bp, Homo Sapiens
acacatagaagtctcgtacatggtcatggtgagtattagatgagtaaatggacacagatatagaatagtgcctgacatatattatgtactctgtagttactggctgtgattattaagaatatcgccgcaccctaatatctgtgatttaattgaaatctgcttgtgtgcttataacgaatttactgagttctcacttcccttacagtcatacatggttttgccctattgcctaaatcagaactcaacagcctgggaaaatcactgacaaacagtggatataggtttcatttctgaggatcaataaacagcttgtaatgttgtatacacatttattctgtttgtacaaaggttttc

SEQ ID NO: 377442 - DNA, 411 bp, Homo Sapiens
ggcgtacgacacatagaatgcaaggtcagggatattctgagtcacctaattatacctaacattcttttggctctcggtaggtcagagtggcctttccttcatgcctgccatagcacaaagatcagtggcctcacccaagtctcacagagccaagagtctagtctggagatcccaggctctagcttatacattgtaccttcctggttttggggaatgcttgttcctctgtggccatgagttatgctttaacgagttggtgttctttcctggtggtaccagcagactgagccctgccgaaaataggtgatgcacgctgggttttttcccgctttgatcaaagaagcccggttcggcagcaccagatagaatgcttgctgaatctcatagtctctatctctagtggttgtcgga

SEQ ID NO: 377443 - DNA, 370 bp, Homo Sapiens
cagctcgtccgacacatgaaggaatctggagacattaatgttagagctggaaggtggcaatatggaaagacaaccaagttaaacaagaaccaagtcacaaacttgaacatttaaaataagaacaggaagaggcatacagagagagagccatatataaaataaacgataacatttcttaaagactacacaagaatacaagaaattatatacctctggggtatgagaataaagtcacagagggagacacactttttgactttatgccctttgtgtatactgcataatttttagaaatcataagcatatattatagcatacaaaaaaacctttaaagtctttaaaaaacctgatgaaccaagcttcttgtttc

SEQ ID NO: 377444 - DNA, 415 bp, Homo Sapiens
ggcggtccgaaacatagaatgtatggaaaaaagaaaaaagtggccagccttaggcagagtggaaagcaatggttgtgctgatctagagatcagtgttggctgaatgggaggaaaagctgttgtttgaggcactttgcagggctccaaggaggctacagagacctcagggaagatcaagacaagaggagttggttggacctaggtaaggcagccttatatttttgtgcatgtttttgccttctagattgaacaagaaaaaaaaaaggatgtcaaccatgaaaaagtaacaatttgtgctaaaaataagtatagcaatttacatgagttgaacagtatttttttccaagtcatctcaggtcttgttcattgtcatatttccatctcttcacattgatgaagctccttcatgtgtcgc

SEQ ID NO: 377445 - DNA, 441 bp, Homo Sapiens
agtttatacactgattagttgatagaaatagggctgtacaatttggggctattataaataatgctgcaaagaacatctgtgcacaagtttatgtgtagacatttgtttttatatcacgtgggtatccaccaacagtgcatgagggttccaatttctctgcatcctcaccaacacttgatattatcactttgattatatatctattccagtgagtgttaagtgatatctcattgtagatctcatttgcatttccctgatggctagtgatgttgagaaccttttcatgtgcttattggccttttgtgtatcttctttggagaactgttaattcagatctcttgttgatttttaaaaattgaattatatgccttttaattattattgtaacagttctttacatattctaaatacaaattcctcccttaactaatacatgatttt

SEQ ID NO: 377446 - DNA, 210 bp, Homo Sapiens
ctgtgtggctaggtctcccagtgcagcctgtgagtctagacccacaggctgaacagagacccagacccacaggctgcacagggagacctagacccacaggctgcacagagacctagactcacaggctgcacagagacccagactcactggctgaacaaagacccagacccacagactgcacagggagtgcctagacacacacgccgcaca

SEQ ID NO: 377447 - DNA, 643 bp, Homo Sapiens
gtagataagagcagacaacaacacggccagaaggagcacgcatgtgagacgtcgctcattcacacagcaagatgcattaagcacacatgctacacatcaggcatgtgcgagctaacagtgcatgttgcaaacccccaagaattacaacaaaagtaactgagggaagagtgacagtgagccaggtcctatctgtctattctcctcctctcaaggaggcccagagagggcagtgacttctccaaggacacacagggagctaatgatagagttagaactaaaacaaaggtcaccttcctcccatagcagagccttccatggacaaaatctgagcccttggcccatgatggccctaagaggatcatgagatcctttgtgtacaattaatatggaacaaacagcaggagccccagcaaagatgaccaggaaaatgacagataaggtctcctgggagctgcaaaaagacagggcagtgctcaaggtcctgaagagatatggaagtctgtgatagtaaaatagtatttcaggacaatcagtctccacgaaagcactctggttcgtcttgtctctggacctttgcacatgctgttccctttgtctggacgccgttcccaaatcttcacgctggataattccgtactcctaa

SEQ ID NO: 377448 - DNA, 539 bp, Homo Sapiens
ttctaagcttgatctagagaaaagacaagaaagaaggctgccaactaccgttaccagcagtgaatgtccagactcctggtgctgtggctgcccaaccctcacagcacagaccacttagtcccagctccccagatacatgaagggccttcaggtcgatggcacagcagtctgggctgctggttccactctgactgtggtaccacgtaggacctgggctgctactgaattccttgtgaacaggccccttcttcaatcctagctctagtactgaataccagtttcctatggctcagactccaggagcccggtgcctatggaacaaagtcactccttatctctagacctccaaggaatctccaagtctccactctaaacctcagtcccctggtctagccaggctgagtattcttaataatacatatgcacagtcatttctgacatagatgaacaaattatttcatttgtaggacattgtgtttccagtttctaatcatataagtgaatgcatcaatcagtagtcctgataaagaatactaaaa

SEQ ID NO: 377449 - DNA, 114 bp, Homo Sapiens
tatataatgggctaatgcagaaaccagtatcactttggagacagtcttagggatagagtaagtggtaggagcaaatcagttgagtgactaaagcctgtatatggctgactctga

SEQ ID NO: 377450 - DNA, 354 bp, Homo Sapiens
tgtggcaacagttttgtcaaggaaacagaccatagcgcttattaagctgcttgtagtgatattaaaaagtaaataatcattgaatgagattttaggtctttctgaaaatgagaaatttccattgaaagatatggctagtcatgtttttgttgcttaagattttatagctggaaatactgcattttaaaaatatcttcagtttttcatccacattacagctaggtgctcctaaatgtgttgaaagatttctattaatatatggtattaaatgattcataatttgaagactcttaaagttctttgatcttatagctaaaaatactgcaggtattatagttactagaaaaaatttcc

SEQ ID NO: 377451 - DNA, 190 bp, Homo Sapiens
agtgagtagttggaagactctgggttgatcttcttagaagaccatgggacctcctccctcattcatcttgcaagcaaatcccagttcttgaaaagccttggagaactcggtttgctagacttggacatctctctggctctggctagacccaggactacctcgtactacctaagcggggacttacttctgg

SEQ ID NO: 377452 - DNA, 472 bp, Homo Sapiens
  misc_feature (177)..(177): n is a, c, g, or t
  misc_feature (297)..(297): n is a, c, g, or t
  misc_feature (314)..(314): n is a, c, g, or t
  misc_feature (319)..(319): n is a, c, g, or t
  misc_feature (336)..(336): n is a, c, g, or t
  misc_feature (368)..(368): n is a, c, g, or t
  misc_feature (384)..(384): n is a, c, g, or t
  misc_feature (453)..(453): n is a, c, g, or t
ggggtggcgctgcaggtggtgcgggaagcctgtcaggagagcaagttgctgtgggtaatccgtgaggaccagggcggcgagtggaagcacgggcgggatcatcctgcccagctacgacatggagtaccagattgtattcgagggagtaatagatgaaaggacgttccggagagattnccattgatgacattcggataagcactgatgtcccactggagaactgcatggaacccatctcggcttttgcagtggacatcccagaaatacatgagagagaaggatatgaagatgaaattnatgatgaatacgaggtngactngagcaattcttcttctncaacctcagggtcttggcgcccccttcgaccnacaaagaaaagagctnggctgtacaccctgggatcccatcctcatcaccattcattcgccatgagctcaattgggcttcctcctnggggggccacctttgcaag

SEQ ID NO: 377453 - DNA, 401 bp, Homo Sapiens
aggcaattacaagtcactggcaaacatttaattatctctttctgtaactctcttttggtttgaaattaatgttcaggtgactgagatctgataaaggaaattatttcaaaacattttcttcttttaactctctctaggcagcataggaagctaagagtcatcagaaagaaggagaatgccaacaaaacaattagaaacaaagtaatactcaggtgagattttaaaattttctacaaagtacacatatatacacacaaacacatgtatacatatgcacaggaaaaggtctgaaaagctgtaaaccaaagacatttctggaaacttggaagaggagactggaattagaagtggcggccgggtctctaatttttagtattcttcatcaggactatttatttatg

SEQ ID NO: 377454 - DNA, 317 bp, Homo Sapiens
caaaggataatcgtattatgccactcctctctccatcctgaagagcttctcctacattctctatcctgactaaagacaatcaagtcagaaacaagactattcctgttccattaacattcccccaatcactcagtgagttactagatcctgtcaattttgccttgtaaacttctttcaaataaaatccacatccatatttccatccttgtccaaatgcacccttagttcaaatgtgtattatctcttgactggactattaaactaggcttctaacttttctcctcactttacgtctcattcttctccaaaccattttc

SEQ ID NO: 377455 - DNA, 369 bp, Homo Sapiens
tagaatgatagagctaagtgttatctggcagtcgcaaaagtgagagatgatgacaaggccaaggtaggtaggagaatggggatccctcattcatttatcccatcattatttatttgagcaccaactgtgtcccaggcattgttcaaggttcaagcacaaagccgtgttcaatgggttcaggtagaaacatgcacagttacatcacaacaaagtaaaccatgggaactgcatggtgcagagtagggggtatttgcatggcagttgaagacctgtgtcggacgctgatgcttctataataacccaacttggttcctctccacttttagagccaattaattaggaaaaacactttcttccttccctctctgt

SEQ ID NO: 377456 - DNA, 501 bp, Homo Sapiens
ctatgcagccataaaagagaatgaaatcacttcccttgtggcaacatgaactaatggaggaacagaaaaccaaataccacatatttcacttatatgtcttagctaaacattgagcacatgtggaagtaaacactggatgcttggaggtgaagaactgaagataattggtcctgtgtataggagcctttattattattattatggcagcttgatttttgtaacgtgttgattgagcacaatcatagtacagtagtaactaagccccccttcttcctggataagtgagcagatgattcaatattgatgatagcatccttgaaccatatcaaagtaggaatgtttggttactgcttcggtctgaaatgatgctgtgttttggttgtgcttcagagctttgaggtgctactgtgaaatctcctttcattctacggagctcgtgaccaggtatacacgacagattggataagatactatattagattgtgtctgcttgtctccttc

SEQ ID NO: 377457 - DNA, 301 bp, Homo Sapiens
ctagcatatatcacatcaaagtgcataatatcaagtgttgtggaaagctgcaaaacaagcatataccggcagtgcagcaatgggcgcatagtgtgtccaaacatgctgtggtgcaacggggcccgacgactgtggggatggctctgacgagatcccttgcaacaagacagcctgtggtgtgggcgagttccgctgccgggacgggacctgcatcgggaactccagccgctgcaaccagttcgtggatcgtgaggacgcctcagatgagatgacactgcagtgccaccgaatgcagcagggt

SEQ ID NO: 377458 - DNA, 502 bp, Homo Sapiens
ccacgctgttgtggaacaagcagctttaatttcaagtgcacgttccacaacgcagcgttccacaacaagcagcagcaagtggcacttggccctggcatgccagcaaagcctcttcaacacttttctagccctggagccctgggtccaaccctcctcctgacgggcaaggaacaaaacaccgtagacccagccgtttcttcagaggccactgaggggccctctacacatcagggagggccgttagcaataggaactacccctgagtcaatggtcactgaaccaggagaggtaaagccctcactctctggggactcacaactcctgcttgtccaaccccagccccagcctcagcccagctctctgcagctgcagccacctctgaggcttccaggacacagcagcagcgttccactaccttgaggccaaacgagagtgaggagatcccgcaagttccggtgaatccttgttccctgattttaaacgatccgcccgtggaacccta

SEQ ID NO: 377459 - DNA, 387 bp, Homo Sapiens
  misc_feature (369)..(369): n is a, c, g, or t
ctggaaaggcagcgtgaatctaatctgaagcaggctgggaatattcccgcagttctaggaccagtgtctttagagttttgccagggacaactgttattcctcaagaagtgtacagatgattttacagttttatagaatcttagtatataggatgtcaaatgtaggacattcctactatgacgacagccttctatgcccatagcagacttcactaatcaatcacagaacactttcctacagacagtggacaagcctggtcaattttcatcatagttcttcaagctgccactaccaaacaatggagatagccccaaaaggaaacctattggccagccctggtgtagtccaaccccatcttttatctgatgnggaaactaggtccggaga

SEQ ID NO: 377460 - DNA, 221 bp, Homo Sapiens
tgagctgctggggatatgggtactggcccgggtgctgagatttacacccgtctcccccgtgattttcaggggtgccagctgatgagctcagctgtgacggccgcctggaacctgtgacgcgtttccaatggcactgggccccatctctctggggcgaacccattccagggcgccctgcccattcacaagagaaaacgagaactctccaagtgtgcagcatg

SEQ ID NO: 377461 - DNA, 124 bp, Homo Sapiens
gcacgtggagagggaaccagatttcaaatgagctgcggctgctccggtgaactgggggaaagggagctgaggggtgtctaccctctgcaccagactcaagtctccctcctagaataggagcgag

SEQ ID NO: 377462 - DNA, 188 bp, Homo Sapiens
aaatcagaagggtgaggtcgcctgtcccaagttccacaactagcgagcaacagagccaggatctagacctagaagttttctggcgcccattttttctccttaaggaaacaggcattgggtgacaaagcgtgggatgcaggtgtctgtgtcttaggtaggcatttcttccaggaaaacgagggagcagg

SEQ ID NO: 377463 - DNA, 238 bp, Homo Sapiens
catacctggaccttctggctatacaacagctttgtgtcgtagcctctcttgctcaaaaaccttcaatgacttccttcatgaaagacaatgaaagcgatctggcctgacatccctggctttctagaatctgaccccacctacctttctagtggtgctcctcaaagtcagccctcccctccccgcaagcttccatgacaagcctatgtggcatcccctgcccagagaaggtccaggtatg

SEQ ID NO: 377464 - DNA, 237 bp, Homo Sapiens
ggctttcctggacttctgtgaggggtaggcactacccaggctgagagccaggaggggccagagatgctttcggtgggatcagtccttcctggctgggcccatggtgctgggattctctccaagggctgcaggcccagtcttgctcatggcactcactttctgttctccatgcaagccggatgtgagacaagaaactcagaccatctcaactgcttagtgctttcttcccccaaagcc

SEQ ID NO: 377465 - DNA, 208 bp, Homo Sapiens
cgtttcatccctgcctcagcctgcatgccaagctccctgggtgcccgcccacaggtgtcaccctttaaggagaaagtggcctggggctggaaacaggactttgtagggaaggacagcgcgtgtgagaaaaggcctgttgatgggcacgccagggtttaatggacggctctttgaggtcatgggctgagccagaaggtccaggtatgca

SEQ ID NO: 377466 - DNA, 502 bp, Homo Sapiens
catacctggacggagcactcagaacattcttgaaggccttcccgctgatgggggagacacaagagcgtgagcgggtcctcacacacttctcccgccggtactgccagtgcaaacccctgatgacagcacttcggaagatgggatcccacacgctcacctgtgccctgatgctgctcaacacggacctgcacggccacgtgaacattggcaaaaagatgtcctgtcagcaattcattgccaacttggaccagctgaatgatggccaagactttgccaaagacctgctgaagaccctttacaactccatcaagaatgaaaagctggaatgggccattgatgaggatgagctgaggaaatccctgtctgagctggtggatgacaagttcgggacaggcacgaagaaggtgacgcgaatcctggatggtggaaccccttcctgatgtcccacaggcgctcagtgccaccacctacaagcacgcgcctgacccgaagctcacgctgc

SEQ ID NO: 377467 - DNA, 163 bp, Homo Sapiens
  misc_feature (152)..(152): n is a, c, g, or t
ctatactaaaaatagcaggtgcacccgagcctctgacagtgacggcaccatccctaaccattgcggagaatatggctgacctaatagatgggtactgccggctggtgaatggaacctcgcagtcatttatcatcagacctcagaaagaaggntccaggtatgt

SEQ ID NO: 377468 - DNA, 768 bp, Homo Sapiens
tgactctctcaagttcaagtctcttacgaaagcctccgcggcctccctgcgcagcacccgccagccccgctatacattcctcccccgatcaggttctcaacccaagtatattttttcaaccatgtattctcttgcctgtgagcccctgcacattctattctttcagccttaaacactcattttcctgcctcttcaccagactaactcatgcctatcctttgggactcagtgtggataccgcttcttccaggaagccttccctgactgttaggtgggttaggtaaggtgctgaggcatctgtcactgtgtttgtgtcactgtgtggtagttgtccaatcacttgtctatacagtcagctctctgaggacagcagatcccagcaggtcttgcaaatcaatgcatcctccgaaacaaacccagacgcgaaccctgtgccctggtcacacacttagtacatgtctgtcatagctgccttcctgcctcgacagttccttggaaaacattccttaaaatcagcagtcctagcaacgaggatatgggaaatgaggaagggggagagaggtagacccactgcaaacctgaggcctgaagacccttgccctcttgtccttcacttctccctcgtgtcctgtctacatattctgcgaaagcccaggtggccaggccacagagggaaggggaaaagagagggaaagtgggccggcgggtgtgtacggaagggaggaggacacccacaaacaccagaccttcattagaaggtccagtatg

SEQ ID NO: 377469 - DNA, 245 bp, Homo Sapiens
ccatagaggatccccggcatactggaccttctcaaaggcggcgtctttgagaaggtaacatctgagcatggatttcaattaagtgaggcatcaagccttatgaatatctgggagaagagtattccaggcagagggaagaataagtatgaaagtccttaagcaagaatgaactttgtgcatcaaggatttcaagaaggctgatgtttctggagttgaattgagcaaaagcagaaggtccaggtatg

SEQ ID NO: 377470 - DNA, 608 bp, Homo Sapiens
catacctggaccttctgtattactcccgatatatagcaggcactccttggtgtatggatagatgaactgcatgaatttgtcaaggattaccaggaaaaacattgagcaacatgaacaagttgtctttttcctgtttcaagagctctcctgcccagtttacatgcgcacctgagcacagtccttcttccctgctaaaccttgctgaacgtccttttgcctttggtttgggaatgttgggcgcacatcccaccagatccagctctccctcccatttagcttcagcagaagaggtggcagaattactaattttagctgacatgatgtttactgctgcaagtatcactaattaatgatgtaaccgcagaataacaagtcccagatttcccttagcaaagcaaaactgagagtaaaccccacactggaccactccacagcatccgagcctaccaactggaaagagacaatcaccaggggctcaatctgacccagaatttgtgctaggagaaatttaaccccataatgccatgttaaagagctgcctgctacccactcaccccatgtgcagatcccagcttgtcagcatcagggagcctcagggagaagtccag

SEQ ID NO: 377471 - DNA, 297 bp, Homo Sapiens
actgaagctgatcccatacagcttctgctcctatacaaccttaggctgcaggattccacccacttaatcaacactcacatctcagcttagtcatactttcccagagcaggaccccagggaatgctatctggtaccagagggttctagatttaggaacaaggggtgagggaagcagccctctctcttaaacccaaaggccctagtgttgagtcctggctttatctgccttccagaaatcttcccttgttgtctttttcctgacagcagactttggttacagccaccgtatccactcca

SEQ ID NO: 377472 - DNA, 415 bp, Homo Sapiens
gacaagaggaagtgggtctgaagacctgagcttccacaaaagggcaaacaattcagaacaactcaggaaacccaggccctgtgttgcctgaacttcctcatctgcccccacccctgttaaatcaaagccaaaagctacctgaactgatggagaagccatctctagggagagagcctgaggggctctgggctgtggcagttacagcagcccccagcctcgcccacccaggggctggcactacatgctctgtcacagccaacccacccaacagttttctggctgagaccacttctccccactcctcccctcagatctagcacactccagtccacactctctctgaaccactatggcagggcaccttccaggtgcctgcagatatggcaccagggttcaggcttgcccatcatcctcc

SEQ ID NO: 377473 - DNA, 452 bp, Homo Sapiens
tctccagtgtgacgagttcatatcatcagcagctcccatgatgacactattttgatttgggattgcttaaagtgtgcctcccagtgcccagaatgagacccgttctccctccagaacatacacttacatctctagataacagtctgcactttcacccgtttcatgggttttctagtcttgaactactggctacgtggctaccaaatgcctaagggagttcgttcacagccgagttatgaagctggaattggttctagacgctgggtagatgcaaagcagcctaactcttcaagtaccgacatttctcacctctgattccggctctcctttgagaaggagacctttagcttccccggcttcaagtagatacagaagcccgtttccttccctcatcagtgagtaatgttatgatttcaaatgtaattgttcatagaaaaaggaacatacgaagt

SEQ ID NO: 377474 - DNA, 639 bp, Homo Sapiens
ggctactggacttctggaggcaggatttagaaagtgtagatctctttgaagagaggtttcagggagagaggtttcaggaattagggtccagccagctccctcccgatgccagccttacctgctaagtgccttctaagctttcccactcaccctgtctgtgtttccagcctcttgtgtttatctctctctccagcccacactgccttttggccgaaaagggccataccttgagtccctgttgcatgaagttggatttcctttcatgtgtcctcagaggccctggcttgggtgttgtcatggcattttgtgatttgatggaggaggagagatagagcggccccatcgcctgtttgcgctagcctctctcagcttgaccgatgactgtgatgacatctgtggacagtaagcaggtccctggtgggattgagtttcctgagctattccatatcagcattcgagaagccagtacactggctgctaattgtgctagcttgtacctggggctgggtttgggtttcaggtccctcccttcctccctttctcccaatgcttggtctcattaggaaacattgcatcgctaaaataacaattactctacagatagagtaatagaaggtaccagtatcgccggggatcctg

SEQ ID NO: 377475 - DNA, 457 bp, Homo Sapiens
cgaaactgcctgctgtagtcagggtataaccaagagatactgggtctgaatctccctccacccctagccagaggtgagactgacactaggaaggccctgtggttgcccagcctggcagagactgaatctgtgtgtgtttcccttgtccttcagcagagggcccagagagcttagcacattacagaatggcttggttcagtcacttggcctggctcagccctgctttgggatgtgttgatagtgcctttcttggactaaaatccttgctctctgcctgtcgtgctccatgtcacttcagaatgccagagccagaaaaggcctcagagctcggacgagccttgtgcttgatggtaagtctggggatgagcctctatatggtctcagaccaacctgtaggccacgcccatccaggtaggttccagaagtgcgcctgggtgcgggatcctctagatcacca

SEQ ID NO: 377476 - DNA, 497 bp, Homo Sapiens
tggccccttctggctgctgagctgcacacctgcaggaccgggcttccagtaccaggagccacctgggaaccatttaaaaactcagctctcaaactagccatttcctccctcaagaaatcagtgagaaatgaccgccctggggtgatggcactggggaacaggaggaggcccctagagaccaagggagaggcactgcccaatctgtggtttccatggtttctgtccccactgcagctgcaaagaggcaggagctccaatgccagggttgctgcccatctgtgttcggaggccacctgggagagatgccatgccagcccttgcaggtgcagagtcccactgcatccgttcttgacagctgagagcagatccagccccgcccagtgaagccccgctctggtcttatgaaaatgagaactgggatctgaactaggatcttaaggcttggcgggctgggtgagccacatttcacttccctgccccagaagtgcgcctgggtg

SEQ ID NO: 377477 - DNA, 493 bp, Homo Sapiens
ggctccccgctcaggcgcacatctgagtcaccacctcctccacctcccaacccacagctcagcatgtccgtggctcccacaccacttttcagtcatctttaacatactgaattcctgatgctagttctactggagaccctatgctccagagacctatgctctggagacccagatgctcattcctgcatctgtttgagtctgtgcctacctgtgcacctgtctgccatgtgctaccttgaaatgcaacaatggctttaggagagagagagaggagggaagggtgacaaaagagttgaccaccttccatctctgctgcctaggggacagatggcttgaaggtataagctgggcccaacatggctgcaaagagaatgggaggtttttcctcccttctatctccttccttcagtcgagcatcttctgtatacaaagcattgtgcttaatggaaactacagggagatgtaagctgtgacttgatcaagaagactttgt

SEQ ID NO: 377478 - DNA, 659 bp, Homo Sapiens
gaaaagtaacaagaatttaatgagtaataaggaaatgtaagaggaaccattaaacataactatagttacatggaccctacttactccaagtgtattttagttagatgtgggtgtattttgtgtctgttaaggcaggtgggcagtttgttcatttggctggaatcctggggcaattaggtcagcattaggggcttagtatttctgcaggccatttagttttaacctgctccatgaccccaggacaccttctacctcatcagtaccctgatttttgtccgtgagttcagggaggcaccaatcagagaatgtcgatagctttctagcacatccatcttcaccaggagaaagctgtgatcagataagtaggattcccctttacataaaaagaacagcctgttccatcgttagaaaaattagaaactgcggtgagaagtgcgcctgtgtcaaacagggcacaagggtatgatccacgattacgaagggcatggggttaccgagcaccgatggccaatgacttgggtgttgagtgaacaccagcccaactgaccaggtctgagactggtaatcaacgacaatcacaatgtattgtaactaggggctacatcatcgagatgaagcgtgacctgggagtcagaagtgcgcctggtcgcgggatcctt

SEQ ID NO: 377479 - DNA, 736 bp, Homo Sapiens
  misc_feature (705)..(705): n is a, c, g, or t
tgtggtagccagtgaatatctttcatactgtggcttccctggagagatcagagaagtgcgcctgggtgcgcacccaggcgcacttctggcattgcagaggccgtacaattacacagctaggctggggcgggccagagtctggagggggaagagtggggtcgccagcggcgcagagcggggtcctatgtttagaggaaggaagagcgtgttggaaacagagcaaatctgtttccccaatatggatactacgggcgaaatttatcatctgtgagaggagccgtggggactgaggacagcaaggccagatcaagggacaaatggactgactgaaggaggaggctccctgaggaggggaagggaaaaggagaaggaaaaaaaagtgggggttcataaatgtgtgtgttggcgggcgggggccgagtgaataaatgatcacaggaaagaggtggggagggacaaaaagacattttaaaaagagaagcgaacgagcatccaaggccgccgaccttgaccgagagcggaggagagtagagtaagcgaggaagcccaagccagcccagagagggcgggctaggaggcgccggctgccagcaaggcgctgcgccaagcaggcttgcgggcgggggccgcggtgctgcactgcccaggaggactcgagcgcttacagtgttcacagcttggagttggctttggacacgagcgagnctggggcgggacgccatggtccagtctctgc

SEQ ID NO: 377480 - DNA, 427 bp, Homo Sapiens
  misc_feature (244)..(299): n is a, c, g, or t
cgcacttctgggtgagacctccaatagaggtgtcagacaccctatacaggagtgctcctactggcatcaggctggtgcccctcaaggtcagaagtcccagaagaagaagcaggcactcatctttgctgttctccagcctctttgagtgacatctccaggcacagcagcgaatcagataaataggtcctgaagtgaacccccagcaaaatgcagcagccctacagaagagggacctaaccattgnnnnnnnnnnnnnnnnnnnnnnnnnnnnnnnnnnnnnnnnnnnnnnnnnnnnnnnnaaagtatccacaaaaactccatccaagggtcagcagcctcaaagaccaaaactagacaaactcacgaaatcaagaaagaatcaatgaagcaatgctgaaaacccaaaaggtcagagtgccttcttgta

SEQ ID NO: 377481 - DNA, 722 bp, Homo Sapiens
cctagaggatccccgcgacccaggcgcacttctcccggatcagtttgaagtcaatcccagacatcctatcatttcagccatcaatattttaataatgtatctctgaaaaataactcttttaaaaacattcaccataatgtcatcacacctaaaaatatcacaaagaaaattaataggcagaactattgttgaaacttctcaaccaccccttacaattgtctcatctaccactaactgccaacacttcaggaaagagtgttctagaagatgagggggaggtaggaaaataattcaacataatcccttctcctctcatcgctatccctaacccagtcaagactttcacgttgtgtaccctttcttttgatctgaagcaatatgcatttgggaaatttacataattggcgaacaagaattgggtatccagttttcttccataggcattatactattagcccccatattgctccacgcttgctcagtagcttcagcaatgataatagattccttgtaaagcctatagtattccattgagcagaagttccagagtttgcttaatctggcccttcactgtaaccatagtcagtaatgtaacccttgtaaataatgattcatgacaatatctattctcaggaagcccttttattgtccattctactcttatgattatttccttaggatagattaccagaaatgcgcctgggtacgaggatcatatagag

SEQ ID NO: 377482 - DNA, 524 bp, Homo Sapiens
  misc_feature (98)..(141): n is a, c, g, or t
cccgcatcaggcgcacttctggtgggattgcagagtggagtaactgtacggaagaacagtccggcagcactacttaggcaaactatttgcacatctcnnnnnnnnnnnnnnnnnnnnnnnnnnnnnnnnnnnnnnnnnnnncccgtatgaacaacatgtatgaagatataccctgaagctacatctgtgattacaggaattagaagcattctaggttcctatcgctggagaagcggactggtaaaatgtggaaacacattccaagtatatacagcaacatgggtgccctttaaaggcatagcttttaaatgagaaaagagacaatatcaatgtctcgtatatgctactctgtagggaggatttccaaaatcaaagtcagtgaacatttccattatcgaatacactgagttgtgctaataaggtcatatggtatggcttcaggtcagcaattttcctctaatgagtatttctctggctttcacacactcctagcacagtgtctggcatatatgagtggctcagta

SEQ ID NO: 377483 - DNA, 404 bp, Homo Sapiens
tgctcagctacatccatgtagtgcaaggacatgatcttacgtcatacacttaaagaagggctcttttaaaaaattactttccactaataaacggcataaatggcagtggaagaacttccactagtgagaaaagctaatgcagcagtctatagccagctttttttgtctgagtatcaggatgtctgtggtgggacctgtggaacagcctcgaagtcactgttaggtacaactccagtgagcaaagacagttcagaagactctatagaatcatatgagctttttacttatgtactgtttcaaggatggttctatcctccaaactcttaatgcctattcccttataaactgtgttgaaattcacgccagtcagatggtggttgatgaagactgaaaagactttttat

SEQ ID NO: 377484 - DNA, 597 bp, Homo Sapiens
aggacgacggagagctctacttttgcttaacatttactttagtttccatatttttttaatggcagttagatactcctgagatagtcagtaagattcgtctacttgctttgtcttctcctttgctctgtttgtgcgttgagttgcattatttcttcgtggttaacacactaaatagcatcatgttttgtcactggaatccccattacttgttcttaattataaaattaaacatatttagtccttatccagaagcctcacatgatgttggtcttactgtgcagtaagtaggacatgtctaaaaaagccatcgcaggaacaaggttttttaaaatcataaatatgcatgagtgttctacattccttagacatgattcatagttaggatgaataaaatctcatctcactactgtgttatctgtgtcataatcattaaaccatttctggattatcatcctgtataaaatgtggctatcaagaagtctattatcaatataaacttcttatcctttgaccttcatgctcaaataattgatatgattatttcaatttttgttcttagaaataaccattacatgggtattactattcttgggctaa

SEQ ID NO: 377485 - DNA, 614 bp, Homo Sapiens
cgagggagactctctgtcccctacagggagagatcagagagaaagtgaagagagaggttaggctactgaagacagaggttagggtactaaacgcccctgactcacttcctgtaggctacagagaggacctagctttattccttcctgagagagcccatctcttgcagtttcagctctctctctggcctctgataaatactccctcttcttgctctttcagcccttcgggtgtaaggacttcctgctattgttaagtcctgggacgcttacaccatctcttctgggtccctctaaactctgtccaatcttaacaaattatcctgtccattaaacttccctcagttccccaaggaacatgtgtgattttcttgtctagactctgattcaccatctgaggtcaatgtaaatgagatagcagaagttagtcactcacttttcatcatgtgtgggagatgagggtcggaggagtagatatttatcttccctctcatactgtaagctctggaagggcagaggccatatctaatactgcctttatgatttcttgcaaacctggcaaagggcttagctcacagtgcatgctcagtgcacatgggggtcctctagtcgaccca

SEQ ID NO: 377486 - DNA, 399 bp, Homo Sapiens
cggtacccagttcgacgcagactctccgttctctcctggaagagcgaaaacgcagcgataatgaatgagcttccactcaggctgatgagctttgtcatcgagctccacaccgggcaacagggcggcttctttgccaggggaaataacttcttaaaatattgaaataaaggcttttagaaattgtacatggattaaggtttcatttcttaaagaactaaacaaatagtgcaagaggtgacgtggcaggtttcaatatttgcaacaaagacagaaagcctcacgctaggaacgaaaagattttaagaccggagcttggctaagtttggcagaaaacaagcgacgtgctcgactctcaattctgcgccatgatggaaggcgattgagagtctccgtcgaact

SEQ ID NO: 377487 - DNA, 348 bp, Homo Sapiens
agttcgacggagactctcatcatcttcccacccacaaagcagtactcccgagcaattaactggagttaattgtagcctgctacgttgactggttcagggtagttccccatccacccttggtcctgaggctggtggccttggtggtgcccttggcattttttgtgggaagattagaatgggagatagaaccagtgttgtggtaccaagtgtgagcacacctaaacaatatcctgttgcacaatgcttttttaacacatgggaaaactaggaatgcattgctgatgaagaagcaaggtatttaaacaccagggcaggagtgccagagaaaatgtttccccatgggttctt

SEQ ID NO: 377488 - DNA, 561 bp, Homo Sapiens
  misc_feature (26)..(26): n is a, c, g, or t
  misc_feature (224)..(224): n is a, c, g, or t
  misc_feature (243)..(266): n is a, c, g, or t
  misc_feature (273)..(343): n is a, c, g, or t
  misc_feature (362)..(446): n is a, c, g, or t
gggggagccagtgggcagaggatganggggtgaatgcttaggatgtacctgttaaggagtgggcctggagctgcccgtctctcctatgctgtcacagttgccattcagggcacatagttaagtagaaaatgaaaaagggagggaaggacctttgcttccagtattattagatgctgttaccagactgtcccattacagtccaattagatgctggataaattacnataaatataattgctttannnnnnnnnnnnnnnnnnnnnnnnagacagnnnnnnnnnnnnnnnnnnnnnnnnnnnnnnnnnnnnnnnnnnnnnnnnnnnnnnnnnnnnnnnnnnnnnnnctcattatgccttattacnnnnnnnnnnnnnnnnnnnnnnnnnnnnnnnnnnnnnnnnnnnnnnnnnnnnnnnnnnnnnnnnnnnnnnnnnnnnnnnnnnnnngacaagtttgtcagactgacaataaatgagtaattcattgaaaatacaagaaaatgtcagctagtaaatttaaatccttgttgaaaaataacatagtgagagtctccgtcgaact

SEQ ID NO: 377489 - DNA, 573 bp, Homo Sapiens
cattagaaagttctgccttcagttgcactgaaatctgcatctttgtaacagaaagacttgcctcgccccctccaggggtgcccacatgctaaaattcatcaatgctgcttatttgaccttagtggtcaaggttgctgcagcctgtcacgtgggtaacaatattctccccatctctttccaaaccgtcacaatttcaagaacaggaagaaacttagggtaacagaggccatgatgttctgtggctgagcccacagccctcaatttaagtctaaccacaggaggaagatatatgaagattgaaatgaagttcgacggagactctccacaacctgatccatcaggatgtggagagatctggacaaatggcaaataatttggggttgaattatggcccagagaagtaagcaaatgaaaaactaaacaattataaatgtatctgggaagcaaaggtattcataatatgtcccatggccagctgcgagcagtatttaactagacatgctgttgtcaatattgaacatgaatcaagccaaatactgatatagctattgagagtctccgtcgaactgggta

SEQ ID NO: 377490 - DNA, 611 bp, Homo Sapiens
agttcgacggagaactctccagaatatggatgttgctattattgagctgaatgaaaatgaagaaaaccaagtaactcgagatatagtggagaactgtgtcagtagaagaacaagcaatggagaatggatttgagtgtccttcaacaaggtagaagatctagaaaggagagttgcatcagcaagtttgcaagtgaagggttggatgtgtccagagccagcatcagaaagggaggactcgggaatactgatgaacagtaaatcatgaactaaaatgtgccaaggagcatgatggagaatttacgggcgaagacgaaagcagggcacagtgcactagaacggaagagtgacaaccccctagagtatagctgtaaccaggctggctgattgggagcggaacatggaaagaaggtatctgaagagccccttaagtaccaccagttcagatcaaacgtggataatgtgggcacagtgactgtccctgctcctgcaccatccgtgagtggtgatgggtgaccgggaatcgaagaggatattgctccagggctcagggtatggagaagggcattatcagaagctcgcagtgctgcacaggtagctctgtgcattcagca

SEQ ID NO: 377491 - DNA, 680 bp, Homo Sapiens
  misc_feature (246)..(246): n is a, c, g, or t
  misc_feature (283)..(283): n is a, c, g, or t
agttcgaggagtactctcatggctgcacgtagggggaaaaaaagaacaggagacaatgtgctttcatgcgagttatttcctgaaacaaagtgaatgtctgagaatgtgaatttaaagatcgtcacgagtaatcgtactaagatgttggtaacaacagtatcgtgttatgtgtccagattatgcaagataaaacaggtaagtaaaggcaggatccgaaaactattcacttcaccgtatacatcccanaaccaggaagtaaccagcaagtggagtgctatccagntggacattggaggcataagacgaaagctacacagggaaataaggttgacctcattgtctcccattagctcctgatacatcctcctgctcccatttagtagcagaaattctctgaataatggctagcactcacaaactatctttccactcattccattctctcttgaaacaatcaaagtggcaactcaaccaaccccagtaaactgcgcttgtcaaggtccccaattatgtctacatcactaaagccaatgtcaattcttagttatcattatcatcttatgggcttatcagcagaatatgatatagttctgagtctctgtggctggttctttctctcactggtctctaaacattgaaagttcagtgctgggagaccagtgagagccccgtcgaactgt

SEQ ID NO: 377492 - DNA, 401 bp, Homo Sapiens
agttcgacggacgactctcagtgcagcagtggcagtgagagctccaaagatagttcgagatgttccaccccgggcctggaccccgagcggcatgagagactccgggagaagatgaggcggcgattggaatctggtgacaagtggttctccctggaattcttccctcctcgaactgctgagggagctgtcaatctcatctcaaggtttgaccggatggcagcaggtggccccctctacatagacgtgacctggcacccagcaggtgaccctggctcagacaaggagacctcctccatgatgatcgccagcaccgccgtgaactactgtggcctggagaccatcctgcacatgacctgctgccgtcagcgcctggaggagagtctccgtcgaactgggtaccg

SEQ ID NO: 377493 - DNA, 336 bp, Homo Sapiens
cgtaaccccagttcgacggagactctcaaattaccagattaaattcttctagcaggaaatttgagagtcatttgaagaatagtttaatatttagcttagggttttaaaccgccagtcttagcctatgggttcctcagttaatcattagcaacagtaattgtctctgtgtctggtacttggtgtcttaaaatgcagataatttttcttctcaaccctctagaagtgaagctggacaaggtttcatgctgttgctgcttagaaaagagctttgaactacaggaacgcaatgtgggactaaagagcaagatccagaagtgagagagtctccgtcgaact

SEQ ID NO: 377494 - DNA, 462 bp, Homo Sapiens
gagactctctgtgtgcccacacatacacacacacagagagttagagaggaagcaacagtagacaaataatgaaatcaagattttagaaagcaaaggtcagctggtaacaaacctagggactgcagaaaatcaggctgggtagagaaccataagaagccagctgattcatgctgcagaaatcttgtaatgctcaaaactggatgcatccagttacttctgaagctggagggtcaggatagaaccagaaacaagacttggttgaaagtctttataaagagcttcctcttcactctggctctccctcaccccagcagaaggttaaaggttaaaaggttcaatgaatgtctacttggtgattcattcatttctatgtctacatagtaattcttccagctgtttcctaagacactggtagccaggcttctacccctcagacggagactggagagtctccgtcgaact

SEQ ID NO: 377495 - DNA, 419 bp, Homo Sapiens
agttcgacggagactctccttcagtagctaacctaagggaaggagagtcaggagataagctgttagctgaattttattaaacgacagatgacttcactagtaaagataaagtgggacctcccgtggttgggctgcaatattttaagtcccaagtgactgctgaatactcgctttgcagttggaaaaataagctgtttttggccagataaacagtgtaagaggtcatctctgctctagaggaacatgtaacctaattgagacacttctacatataatgcaagatagcatatggttagtcaagtagttattcctgctcattattttagctagatgtattctaaagtctttatcccaaagagttgaatcaaaggttcttccactcctccaacctgattgtgctgacaagccactaagctgag

SEQ ID NO: 377496 - DNA, 479 bp, Homo Sapiens
taatctttttttaagttgtagactgtcatggatgatccttttaacaaactctaattcacctccttctgccatgatctctgtgatgcctcctgtattaacagaactaggcggaggtcttcgaggatttcgtgagtttactcccttttatgagatcagataagttattctgttccacatttttctttgcatagttgaaacacatatcatccacttctgttgcgaggaaataccagccattcaaggttgctccaagtaaggggtagatgcaagatgcccccgtgccatttttgcccgagggtatcctggctccagtgctactggacaagcacgtccttgggtacctatgtcaattcctcttcggagagtacttttgtcagaatcctggtgaccgatcagatcttctacccagtgaatatagttgagtctcaagggaactgtgggaattagtctctccaatggaggagagtctccgtcgaagt

SEQ ID NO: 377497 - DNA, 591 bp, Homo Sapiens
attatgtactgtaatttaaatcccttgaactatatggtacggcatgattttacagtggacatcttgatatggtatacacattaaactattatgtggaattaaatagtagctcttcaagtgaagtaagtataaatgtcaacgaccatcttttaaggaattttggatcaccgtaacacattttacacattgttaatcgctacccctgggattgtttaaactgtttcgtcatggagccacaaaagtttgaaatcctcctagtaagatactttgcatcttgtttgcagtctgttcagggagaactagtgaaaggctgtagtatatttggactagaaagtaactgaatctcaaaccaggtagtgtggagataccccctccatgaattacattcttcattccagggtaggtaatacacagaaacatgttactttacctgttgccaaggcctttgaaaaatctacttttacaaaattggaaaacgtcacttgtagtcaaagccattgccagtcattgattttaatgttgtaagattgcttataggacatttaatttaggaagaaatgatcatacgtctatgagagtctccgtcgaact

SEQ ID NO: 377498 - DNA, 366 bp, Homo Sapiens
ctcggtacccagttcgacggagactctcttctggacagggaaaccagaagagagactccaagaagaggacgggaaagaagggtggatgtttctcttttgctgatggaagggctgtacggcttgaaataatactggatttcttttctctttccctggctcactgctcactccttcaggagccacttaagaggcgacccagaagaaaatgtggaattggaatttctggttggaaaaacagttttatttaactcaggcagttgattttgagtttgcaagcttgcttacctagacttccatccacttctccaacctccttacgttagacggcgagacccagaaagcaaaaggagagtctccgtcgaactg

SEQ ID NO: 377499 - DNA, 359 bp, Homo Sapiens
  misc_feature (135)..(196): n is a, c, g, or t
agttcgacggagactctctctcacacacagtattaagacacacccacaatgacacacataccttccaaaggcactacacttacccacaccccatccaattactcacactcacaaattcccaagccaaatacatcnnnnnnnnnnnnnnnnnnnnnnnnnnnnnnnnnnnnnnnnnnnnnnnnnnnnnnnnnnnnnntccaaatacagccccactcttacagcacacgcacactccaaatacagccccactctcacagccccatgcagacacatccaccctctcatatatcatcatccagattcatcccatatagaccatggagatccactggatgatgatatatgagagtctccgtcga

SEQ ID NO: 377500 - DNA, 544 bp, Homo Sapiens
  misc_feature (24)..(24): n is a, c, g, or t
ctctctgggagggcattcccggcnacacacagcacgtgcacagggatgacagtatccttctgctacagcattagaaacggggatacaggccaggtgcaggagctcacccctgccatggtattgtaagtttttaacactagggaaagtaaaataaaggatacatgaaaattctctgtactatttttgcaactttgttgtctaaaattatctagaaataaaagtttttaatgggtgcattttgttgagtgtgaattttaactcattcaagttgatttaaaatcagttattaagaaataattttatctccagcctgattgtccttttacgttcattaatgtttaaatcaacagtaacattaactacaagaataacccaaaccctcttcttttcaatatttgactcaataaacccaattgataaaacacacagcatttcttacctaaaataatcacctcatctagaaagattactaattgaaataaaaatcttaagtgctctccttggaattataatgatatattccaaggagagttctccgtcgact

SEQ ID NO: 377501 - DNA, 498 bp, Homo Sapiens
  misc_feature (420)..(420): n is a, c, g, or t
  misc_feature (433)..(433): n is a, c, g, or t
  misc_feature (477)..(477): n is a, c, g, or t
atgtttctctatcctgaagtcatgaagatattcttattgtcctccaggagttttaagatttttgccttttccactggacagtgctggtctaatgagttccactccacatagtatgcacagataggccagaatgctaatatactaacatttgaagagggagaaagtcagttataaaaatccaaactccatccactgttgcccagatgtagtagaagctgaacagtttgagcttagaagtagaagaatctgacccagagagtaccctaaattcttggagaggagacagaagcagcagatttaaagggcttattgtggaggactcatgggtaggacagaactttggttttgcaaaattctctagacatttgagttatgtgtaagtctttcagagggcaaatttcattttaggcgtttttaccntttttgcagtccngaagggaagagatgttcacaggtaaccgcttgggtggttctccngggcccgaaggagttatgtat

SEQ ID NO: 377502 - DNA, 452 bp, Homo Sapiens
aagttaaactaatagtgtccatattgctaagctttcttcaaaatacacattagtgtagtgtgattaaatttcctttcttgagaaacatttttcctagaactgaaaattgttttgtacttacataattttccatttactaatattagtttctttacattctctaatttgaatcactttcttctcaaaatattcaaatatatcagatacctgtcaattatgtttatttcttggtgatcttgcacccagatctctacttcattcatactggttgctctataggctgtcaccctaggactttaaaaaatatttttctttgttggtccttttttataagagtccagtacattcttctttcttagtttactcacttatttggttgatgcacatctctcagtaccttcataaaaatggatacagaggaaataaaactttttgagagtctccgtcgaact

SEQ ID NO: 377503 - DNA, 437 bp, Homo Sapiens
gtacccagttcgacggagactctcgggggtgctgagaggaaccagccccgcatggaacagtgtgcccttcccagcagttcaacttggacactgtgctcagaggcacctggcaggctcctgtacccccggaagtctccagattaaaaagcactttgctcccggctgtttgtggcaatccagtttgtcagctggagggcagcgcgcagaaacttgttagcacaggcagaaatgaatgacaggtatgcaagccatcgcgccgggggatggggtgtgaagatttgctcatgggtctggaaaaaaatctttgggctctaaaggaacagcttagtcaccaggggaagaggaaaactgaccacgttgtcattttctgaagggcataagaacaacactgcaacaaaagagagtctccgtcgactgggatccttagagtcacgagc

SEQ ID NO: 377504 - DNA, 411 bp, Homo Sapiens
  misc_feature (392)..(392): n is a, c, g, or t
agttcgacggagactctcactggtgtccccagtgagagcagattcagctatgattcaccgtctgattacagaagttatcttatgattgcttttagtttcttagtgaaatgaggatctaagttatctgatgaaaaatgaggagggagggaaggactctggaggtttgtgaatagaggagaagctgtacatagttgtctgaggagtgaatcagctagaaaaatacagtcagatttcaaacagaactaagaactctcttgttagttaaggtcataaatttaaatgagaccagacagcaccattgtatgcttttctccagcctgttcggctgttcaggtgggtggaggaggcagagaataggatttaagctaggttggttttgctaacatatgatnagagagtctccgtcgaact

SEQ ID NO: 377505 - DNA, 647 bp, Homo Sapiens
  misc_feature (570)..(570): n is a, c, g, or t
  misc_feature (597)..(597): n is a, c, g, or t
agacggagaccctcgacattggcaggactgaaaatacaccccggggcgcagggctgctgacctagtaagtacaggactaaaggccagggtgctggccaccatctggccgcttcctttccaaaaccaactcagttatgtctacttggggatacttttccagagtaaatatatccctttcctacatttcataagaaaagacagaggtgaagcaagattgactttacctgaattcacttgacaaacacttactcaacacatacgtcctcaggacataaaaaatgctgcatcctcactgaagctcttgctgcaaggagtagcagtcagactttgtgtggtgatgaacttcggtttgtacatcataaagaattagcacatttaaaaagtaaacatcttaaagagactaaaatcaattcaggattcatttatattataaataagtattatatgagagaaaggagagaagaatcaacccttgtcttgccaaaatccatggtcatcattgatgaaaatatttccttacttaagcatctttggggttacagagttcatctcagctcttatggcattggntatactagccagataggagtttttggnttgggttcttatatagagaacaagtactaattgactcagatctggttggg

SEQ ID NO: 377506 - DNA, 611 bp, Homo Sapiens
agttcgacggagactctctatgcaggctgcaagttttctgactagcagcacctttcacagccataattattatttggacaatgtttaatgtttcttccagttgtctcatgaagcagggactaaacaccgggctgacattcaccagtgtatactcagcatctctcatgaagtgggcactcaataaacagttgaaccccaatttacctatgaagaaatgaagttcagtgtgtttaatgacttgcccagagtcacctggcttgactgcggtagtcagatttaaatccaggtcacctagttcagcatctattctaggggctactctggggaagggaggatatcaagactttcaagtgggttgggacagggctaccttctatgcttacagttgcctggtcccgagtggtaacagagttgctcatagcacaggggtcactttggaaagcaggactgagaagccccagcctaccaggggaattcataccacctgcgccagagccctcatgggccctgaggaagagcagaatggctcagcccaggcatactagatcccatcatgcagctccctcagggtagaaccccgcaggtgcgatttggtggtagtagcaaatatt

SEQ ID NO: 377507 - DNA, 199 bp, Homo Sapiens
  misc_feature (11)..(11): n is a, c, g, or t
  misc_feature (28)..(28): n is a, c, g, or t
  misc_feature (38)..(38): n is a, c, g, or t
  misc_feature (62)..(62): n is a, c, g, or t
ccagttcgacnggagactctccacctcncaggagtttntgggctggagttatcattttttgnaggccagacgaaattctatggaaaatcaacttcctggaggtggagagaaagaatgtggtgcttagttttagataagttaagtttgtgatacctgttgaatatccaagttgaactctaggagagttctccgtcgaact

SEQ ID NO: 377508 - DNA, 347 bp, Homo Sapiens
  misc_feature (36)..(36): n is a, c, g, or t
gtcatctgagatcccagtcgacggagactctcccangtgcgttgtcatccagaacactgggagagatcctaggagaactctgggtgatagtttccattttcagaagtctgggtgatagttcccttttcttcccatatcttactttgaatgaagcctccatggatgaggtagcccaggggaaacctccagctattatcttgtggggttaggtcgtatgaagctcttacaggagaactgggtctttagggtgttgtgtaggggggtaacttaggaaaattcagccataacaccttatacaggagattatgctgcatataaaccctcttggagagagtctccctcgaact

SEQ ID NO: 377509 - DNA, 282 bp, Homo Sapiens
agttcgacggagactctccccagatacatcattccctggccaggtctgggtgagtcttctctgcaacgatccattcagtccactcctcctagagagaccaggggcagtgacctggtccctccaaaacaggccctgggctgtgcaacggagcatgacgcccatgctgccacatctgggtccttgcctctgtgcagcactgaaggtcacaccaccacactcacgcatgggactcccacgaggcagcattcccaggtgctgcttcgtgagagtctccgtcgaact

SEQ ID NO: 377510 - DNA, 487 bp, Homo Sapiens
cccagttcgacggagactctcagaatcaccttgggattctgagagtatctctgagaattttccacagaagtatgttgatcctttagctggggctgcagacggaaaagaaaaaaatataggaaatgaacaagcagaagatgtgttttatataccttcttgcaagagtggatcaagaaactttaagatggctaaactagaggatacaagaaatgtaggcatgccagtagcccacatgagtctcctgagagagtctccgtcgaactagttcgacggagactctcactttgaataacaaccaaagtgagagtccacgcaaaatataaatattaaaaagttagaaatactcatttttgctcagttttatcttttgaatttgatttaaacgtaaaaattaactagaaaactattaaaattcttcctatttcttatcccattctctgtctctcataggtaatcatttttaattaatttcagtttatccttctgg

SEQ ID NO: 377511 - DNA, 511 bp, Homo Sapiens
agttcgacggagactctctacggctcacccctgtggctgcggctttttccctagggtaagaggaagtagtattttttaaattagcctaggagggagccaggtagagagctctgagatgagggtggggagcttcagctcccagccgaagcatcctgatcatttcattacaagatcaccttctcctgtaggtgagtttctgttgttttaatcagaggtaacgttgtgccctgactatgttgtataattgtgtgtgaattatattccagctccatataggcgagggctatttttttccttccaattttaaagctatttagagggaaggccaaattgtagcttgaaccctggtgctctctggctaatagctatatacagggagggagaacttggaggaacatttggggttatatttgtaattagtttcctttgaagttaaattaattttagcaatcggcaacgtaaaatattgtgatacctttttccagtggtcacctgtgggtgagctgaggcc

SEQ ID NO: 377512 - DNA, 573 bp, Homo Sapiens
agttcgacggagactctctctgaggatcagaaatccaggaggggcttaatagggtagttctggctcagggtctgtcatgaggtggccgccaagtgaaaccttccctggagctggaagagctgcttcagagaagattgccaccggacgcttggctggagttttcagtttttctccacatgggcctctcccagggctgctgagtgtccttgaactgtggcagtcagcttccccacagtgagtcgtgagagagggagacagccaaacagaagccctggagtctttcatgatctcatctcagacatgatgggccatctcctctgctgcactcgacagtcatacagaccaaccctgggaccacatgcaaggggaccacctgagggtgtgagtgctaggaggtgaggagccatcctggatgctggctaactcataggtgactggccaggcaaagtttattaactaaaagttctttgggttgactcaggtgaactaacatttactgcttcagttgttcatttaatttaattttcttgagagatttaaagtaagtgctcaaagccaggcatggtggctcat

SEQ ID NO: 377513 - DNA, 508 bp, Homo Sapiens
  misc_feature (162)..(162): n is a, c, g, or t
  misc_feature (312)..(312): n is a, c, g, or t
  misc_feature (478)..(478): n is a, c, g, or t
  misc_feature (488)..(488): n is a, c, g, or t
gaatgaatactttgagagcgagatagacaaataaactcatagtttattccagaaatctcagattgttcaatctagtggtatggaagttgatatggtgcaagtgaagcagtataggttcatgaaagaatgccatattagcaatttgagatatcatgcccaggncagccgggagcaagtgaaaaggtctgaagcagaggaatgacatgattggttacatattttagaaagatttcactggagtcccagtagaggagggaaggaggaggacaggagcgactgaagggctggagaactcttcggagacaaacctanggcttctgagagaggagagttggtgctggggcgatggatctttgctgaggaagcaccatgtgcaaccagtgccagatggcaagctcctgcattggcctgggcttctctgcctggcgcagaagtgcctggcacatgtgcccctctcttcctgggattgtaggttgcnttgagcagcntggagagtctccgtcgaact

SEQ ID NO: 377514 - DNA, 484 bp, Homo Sapiens
agttcgacggagactctcctagtgagtcgtgttttgtgaaaaacactgaggcagtgcttctctgcttttggctactgctgtccctaggtgatagctagtgaaaggattgctagtaggataaattatatatacctgagtatcagatatggtattaaaactgaataggaaatcgtatttgcaaactttgacttagacatacagatctattttgaggtatggtgactttctaagcagtttcctctttaggggtctttttaaaaaacttagagaaattcttttcagtgggactgctgaatcaagtgtttatatgtattttgaatttggataggctattagctatacattttaatgcgtaggaaagtagtcaataagaaaagtaattggttataaaaaaatttgtttcattagtactcttctgttctctatatggagacatgtaacatgaaagttgttactaatcaaatgaaagtaaagtcatggttaa

SEQ ID NO: 377515 - DNA, 601 bp, Homo Sapiens
  misc_feature (20)..(20): n is a, c, g, or t
  misc_feature (65)..(65): n is a, c, g, or t
cgaaaaataaagacactggntgcagagaaatccaagaaagacattccttcacaaaagagataatngctttgaagaatttctttcaacagaccacaacttcattccaaaatatggcattccaggatcacccagaaaagtcagaacaatttgaggagcttcaaagcatccttaagaaagggaaactaacttttgagaatattatggaaaaactgcgaatcaagtattccgaaatgtacaccatagtccctgcagagattgaatcccaggtggaagaatgcagaaaagctttagaagacatagatgagaagattagcaatgaagtcttaaaaagctcaccatcatatgcaatgaggagaaaaatagaagaaattaacaatgggcttcataatgttgaaaagatgttgcagcagaaaagcaaaaatattgagaaagctcaagaaattcaaaagaaaatgtgggacgagttagatctatggcattccaaactaaatgagctggattctgaagttcaggacattgttgaacaggacccaggacaggctcaagaatggatggataacttgatgattcctttccagcagtatcagcaagtatcacagag

SEQ ID NO: 377516 - DNA, 643 bp, Homo Sapiens
agactctagaggttccccagttcgacggagactctcaagcagacgcggtggatgagccacagatgctgacaaatgagaagctgtccatctttgatgccaacgagtctggcttgagagttatgaggcgcttccccagcacaaactgacctgcttcagtgtgtactgtaagcacggtcacctgtgtcccatcgacaccggcgctcatcgagaagaaatatcgaactcttcttttctggttcagcaaaaccaatctatgatgatgacccgtctcttgaaggtggtgttaatggcaaaaatcttggccccataaatgaatggtggatcactggctttgatggaggtgaaaaggccctcatcggcttcagcacctcatttgccgaatacattctgatggatcccagacccgagtatgcgcccatatttgggctgatgcaggagaagatctacatcagcaagattgtggtggagttcctggccgtcccggccatctcgctgcccgacgatgtccgcaggcggctcaaagatttggaaagagacagcttaacagacaaggaatgtgtgaaggagaaattgaatctcttgcacgaatttctgcaaacagaaataaagcatcagttatgtgacttggaaaccaaattacgtt

SEQ ID NO: 377517 - DNA, 187 bp, Homo Sapiens
tctagagtatccccgtacccaggcgcacttctcggtcatcttggggatacacttcctcgactgaacagagtatggaaacaatttacaatagcatctgaagagagagtacatagattggaaatggctattgcatttcactcaaatgctgaaaagattttgcaggactgtccagaagtgcgcctgggtg

SEQ ID NO: 377518 - DNA, 634 bp, Homo Sapiens
cacagaggaattgggcttctccagtaggtcccagagttttttcctcttctctgcgcagcacgtgttatcgaactcctcgccttcccgctcccgtagggtctcggcctcacgcttgagctcctcgttcatctgctctttcttctggtggtagcgggcctggcagcaggactccaggtagatctcgtcgatgccccagtagtcgagctcttggctgaagctgagcgcgcacatctcctccatcatgtgcagtcgcccagtgcggtagaagttgaggatggaggtgaaggcgcccgggtggcggtcaaagaagtactcgttgtcgtcgaggctgtagtcatcgcacacctcgagcagcgagtcgtgcgtgagaagtgcgcctgggtgcgcacccaggcgcacttctgcaggggattcagaggcagaggctccccagaatgttttcacatggtgtgagagagaagggtgtgaaaggtatcgggaaggcttctgggagtcagggttgtggtgtgctggaaaagtcccatagccttggccactggatcgtgagcatggacagcagaggaggtggattcggtgcagtacgtgtgacgcagagatgactgcatctggtggagaagtgcgcctggggcgggga

SEQ ID NO: 377519 - DNA, 296 bp, Homo Sapiens
gtcagactctagagagtatccccgctaccctaggcgcacttctccagcaattggggaggggatagagagtgctacccctagacatgatattctgcattattcaggccacacctgaatattgtgtgcacgtactcatgagaggtatctagacagctccaggactctcaaggattaaatggccagcttgagtcagtaccacaacctggaggccttcagtctctgagaagagaagactaggcatagaggctggggaagcaggttgttcacttcggtggccccagaagtgcgcctgggtg

SEQ ID NO: 377520 - DNA, 437 bp, Homo Sapiens
aaggatccccgcacccaggcgcacttctgtgtccggaactctggaagtcaaatcttatctcctgggagtggaacagcagaatccctggatggttctgtctttgaccttcctgtatccttcactctggacaccaccccatcagcccttcaaaaccctcatgggaaagaggagttgcagaccagtggctttggccagcacctgaggcttccagcagcagctccttacacagtggcgactcttaaagtccaatctgttagcccaagggacctgaacctccatctgcaaccagcaatggcacaaggtagactctcagcatttgtgctatgccgttggggaagagcttcaatttgtctgcaaacgatgctccatcagtctcatttggttccctgtctttggggagcctgggaatattgttctcgctccccgagttctgattt

SEQ ID NO: 377521 - DNA, 660 bp, Homo Sapiens
acctcatggaggcacccacgttaatccacactcagtagtaaaatgccggaagtctctgtgaaagtctactgaaagtgcttaacccggaagcaacttgaacgtaggtgaagtgatctccgcctcacagagctgaggtttaacgggacattaggaggactatgagacaacagtcgtggttacataggaactcatttgtgcatttgaatatgaggatgagtgagagagaggatttccatgtgacttttgggatttaagtacctggtagggtcatttcactgagataaggaatatgagcaggttattagaaatggaagtaatcttaaaagattttctagatagtctgatattcctaaatcattaggtaatgaaaccgaggggctgtcaaggttaagctcaaaaagcagttgagattcatccaaggtcactcagactctctctgccaataataagagggcaataatgtgactgctaaaagggcccttagagaacaggactgaaggtgtgatggattctacttgagaattttgcaaatgaaacccaacacagttttctctttgtagctagggaaggtcactgcaagctgtacgaattgaggagaagtgaagtggaacagaaaggggtgcgttgaggtcagattccgaggagagagagagtaggttg

SEQ ID NO: 377522 - DNA, 489 bp, Homo Sapiens
cggtacccagttcgacggagactctcaacatgaatgtgatttgaactcattcatgttgagaggtgaagtaaaatatttaacttataataatcaaggactcaaaagatgaaacaatgagaaatgtacaccatcccgaggtgaggtcaggtgataacacagaattgagtaagatgactggcaaaaatattgacaatgtgatgatgatttgtatagagaaggaaaatgaagagactgcatgtctatacctacctaacgaaactacctgtgttctttgcatgcattattcaactcggcagttacacatatttcatcctaaagtcacgtaaacctgtgtggatatgttgaatcaatagggatatgaattacataaaaagaattttgtgtaactggcagtttgagcaacaatgagcttgacgtttgttgtctgatctgttaagttacatgtatatatgccatctttaagttaatagagagttcctccgtcgaact

SEQ ID NO: 377523 - DNA, 345 bp, Homo Sapiens
ggtacccagttcgacggagactctcgcctgggacaccaagcgagagtccgaactggctgtctcaacgctgcccttatgctgtcggggcttagaacatgacaccccaaagcatgagtgcctcagcccgagtattttgaactgaaggacattggaaggaactcagaagcaaggtctttccaaccttctcctcataccctctcttctgctcgccttcatcctccaaagtgagtcacagaaaccagaatttatcttcctcaagatgggtcatagaacctagaaaccctcctggctaaagcaaaccataaaacctagaaaggtcactctctatcttctccttctcctttg

SEQ ID NO: 377524 - DNA, 261 bp, Homo Sapiens
  misc_feature (185)..(197): n is a, c, g, or t
aatattcgttgaagtctacttttcttaaagtctgttctttggattattaaatggataaaaggccagaaaaggtgcaaacggtcctgcaggcaacataagacgtatgtgcttcgtgacgtcaattgttacttggacacagacaaagtgactttcagacgaagtttgaaacattttcctctcaaacnnnnnnnnnnnnnaaaggttcattatggctttctacctgcttaagacaaagcaggtagaaagcaataatgaaccttt

SEQ ID NO: 377525 - DNA, 699 bp, Homo Sapiens
  misc_feature (106)..(106): n is a, c, g, or t
  misc_feature (120)..(120): n is a, c, g, or t
  misc_feature (143)..(253): n is a, c, g, or t
  misc_feature (268)..(378): n is a, c, g, or t
agttcgacggagactctcgtcacaggcctgtccgtagcacgggcagtagctgaagaggccctgcagaccctgtgtaatgggtctaggtctcctctacctctttttngtttgtatgtttgnagacggagtctcagctgtgtctnnnnnnnnnnnnnnnnnnnnnnnnnnnnnnnnnnnnnnnnnnnnnnnnnnnnnnnnnnnnnnnnnnnnnnnnnnnnnnnnnnnnnnnnnnnnnnnnnnnnnnnnnnnnnnncacgcccagccaatnnnnnnnnnnnnnnnnnnnnnnnnnnnnnnnnnnnnnnnnnnnnnnnnnnnnnnnnnnnnnnnnnnnnnnnnnnnnnnnnnnnnnnnnnnnnnnnnnnnnnnnnnnnnnnntgagccaccgcgcctggcctcgtctacctcttttgatgcatcgtacacaagccattggtcggggggcgggtccacaagctggtatttgtcttaatatgctgttactaatacattgtttacttgggaagaaagcaccatagcatttattggcagtccaaaggtggaagttgtgactccagcaacacaaatcatgtgacagctttaatgctcatttatgaatttcattgggccaaaagcatagttctgtgactcaagcacttaatgattaatagaactctagaggaacttaccaaaggggccaagaatggacgttgatggttg

SEQ ID NO: 377526 - DNA, 561 bp, Homo Sapiens
agatctccgggctcagatccttatttggaaaatgagaacaactttgcgagacgctatggatgccaacaccacatccggcacaggcgtggaggtctgggcagcagcctggggctctctgggcctaactctaccttccattccctccgcccactccttcttgtcccttctggtctctgtcctcatggctctagacactagtccctgtcagatgtgctagaaggacctgagacaaattgatggcagcaatctgttttgtaacaataaattgctagaacaataaaacacagcctgggcacatcagatgcatgcaaaggtgtgtatgcaaaggacacaccattgagggcgttctctccttctttaacacctttcccaagttagggggcgggaggcaggttaacacaaagcactcagagcagtgcctgacctgcgaagcactcctgcatggcagactctgtctttactctgcggtgggcccctccagcgctggtgcaagcactgggcctgttcccagaccggcagtgctgtggaggtactgcaaagctggcgtctgcgggttctcat

SEQ ID NO: 377527 - DNA, 513 bp, Homo Sapiens
agctacaacatggtcatccgagagtctccttcgaactagttcgacggagactctccaagccctgcctataaatctcccagggtggggttccagaagcatggtgccccggcaagccaagtttgaacctcccaagcaaatcagcattggaatgttggtggtgtcacaggatcaagagccatctggaagccagctgtgacttgggctgattcccatggtttcctatgagaagggcaagtacgatcactacagcagaaataccaaagaaaaatggcaattgttacctctggagcaaagaacaaggcctagagcagagccagttcctaaagagaatgacagatctgataatgctggtgaaggccaggcaagttctgtgcttcctaaccagttagaagcctttcctccggcggcggcagagctcggatccagagtttgggaagtgtgggacttgcctctctgagacctggctgtcagcaggaggatgaggagccaatctcagagagtctccgtcgaact

SEQ ID NO: 377528 - DNA, 415 bp, Homo Sapiens
  misc_feature (122)..(122): n is a, c, g, or t
agttcgacggagaactctcatctggtcagtatctctttcttagcagtattggcatttgaccattccctccccttcttgaaacactctcttactgtggcttccaaaacactgaaaaccttatnggttttcttccttttcacctatttcttctctgtcccctttgcaggtttaccccttcctactagctattaaataataagcttggttgcaggccatcttattattttgtctatgtaacatcccttaggtgacctatttcatatgtatggctcatacatacatccccacctccctacttgacatcttcacttggaaaactatagccagatttatgatctttcccacccaattccattctctcttaacattccctttcttaatgtagggaatgttaagagagtctccgtcgaactgg

SEQ ID NO: 377529 - DNA, 488 bp, Homo Sapiens
tctgaacctaatccttacttctatcagaatcttggagaggcagaatatgtagtagcactttttatgtacatgtgtttacttggttaccctgctgacaaaatcagtattctaacaacatataatggccaaaagcatcttattcgcgacatcatcaatagacgatgtggaaacaatccattgattggaagaccaaacaaggtgacaactgttgatagatttcaaggtcaacagaatgactatattcttctttctctggtacgaaccaggggcagtgggccatctgaggggatgtccgtcgcttgggtagtgggccatgtctaggagccagacttggactttatatcttcgccagagtatccctcttccaaaactggtttgaactgactccagctttcagtcagctcacagctcgcccccttcatttgcatataattccaacagaacctttcccaactactagaaagaatggagagagtctccgtcgaact

SEQ ID NO: 377530 - DNA, 592 bp, Homo Sapiens
agttcgacggaggactctcaagaagaagcctttcggtttcaggttcttcttgagagctcaatcactgggattcttcttttaacgacttggaaaatgtctgcttgattaggaagttagtcatttcacattttgacatctaaaacaatgggaagttaaaaagcctcacaaattacatttataagtaacaggatacatcactttaaagatgaaaacctcaaggatttgtggcgcctttctttgttctcgttaatcctattttacttttggagtgttagatattctgtaaatatcggcatttgaattcaaacaatagatgttgataactagttctctaactgggtacaaaaacattattattgtctgtcagcagattttgtattctgagagttaaccttctgtatttgatgttttctttgtcaatcactattattctagcccgaatactgtcttcctcattccgttttaaaaccttaagcagttgtaagcacaaacacattattatttatattacggtagaattagagtggtaaaactgagacctcacctgagcaggtctccatgaagctgtgaataaagactttctcttccctct

SEQ ID NO: 377531 - DNA, 377 bp, Homo Sapiens
ggatgactctgaggatccccagttcgacggagactctcctcactctgtgggtcacacctgggggtggggaaagagcagcttgaataagctctttcccttgaataagctccttccataggaaggccaggagtgaggagaggctccaaactggcttccatattcaagtctcctggactctacactttgtgggaaaaagagtagaaatcacgcgcatgcgtctgtaagcaccgcacagcacttcatttttctactataatactgccaaaggtcctaaggccaaagtcaagtaaaatacacacgcccactgccctggcccacgttgtccgatggaactttctccaacaacaggaacattctgccaggtgcaatgcgacagc

SEQ ID NO: 377532 - DNA, 400 bp, Homo Sapiens
atgagccaccgcacccggccctaattttttaaaatgtttttaaagaaacagggtcttgctacattgcccaggctgggcaacactaattgtataaacaggttgggcatcagtgtaagcctggctttcaattcaaactcaaactttgaaccaatggggtccatattatgaaggttccttttacatgtgaatctctgaatcataggttcactatgagattttctcctggctgagaggtcatcaggataagagttcctcagtgctccccctaattttccagggtagaaagcattctctttggtcccaaagaacgttttgtttgaccaaaagaaagagtccagctcaggaagaaactctctatgggatctgaaaaacagaccccatagagagtctccgtcgaact

SEQ ID NO: 377533 - DNA, 569 bp, Homo Sapiens
  misc_feature (91)..(91): n is a, c, g, or t
  misc_feature (103)..(104): n is a, c, g, or t
  misc_feature (264)..(274): n is a, c, g, or t
agttcgacggaggactctccactgctcgtctttgcagttggagagtctgatgccattctgattcttaaatcttttatacaaaacatgtttntgcttttggcannggaagctttaccttttctttctttcaagtgtcctgaaacttcactgagatgtatcatggtataggtccactttgatccactgtcctggacacttgctaggccttttcagtctcgaagctcatgactttcaggtaagagaaatttacgtctaagacctccnnnnnnnnnnnaaaagcatcccttctctcttaactgagttttttcccggcttctcggagatactatcctcgaattctcgggtaatatgtgactctgctcaaacttcaagactagggaactaaagacggacaggtgtttggaattctggggtaggactggtggaccttcatggtagggtgatcaaactgagatccttttggggggaatcccagattccctcagataggagtcttttactaaaaattacagagagtgctggtgcctctatttccttagagagtctccgtcgaactggggatcctctag

SEQ ID NO: 377534 - DNA, 557 bp, Homo Sapiens
  misc_feature (73)..(73): n is a, c, g, or t
  misc_feature (524)..(524): n is a, c, g, or t
  misc_feature (544)..(544): n is a, c, g, or t
ccttaggacccacctggagtactgtggatattaggtgtcctagaagaaagttcagatcttccgacggcaggtngcatgagagtctgcatgaaaccctaataaaaaagacagtgaaggagaatcatgtcaggagctgatactcatgagtctcgggaagcctccagggacagagcacagctagagcatccaagaatgagaagagccctagagcaaacgcaaagcccaggaagagataattggtttgagaagaaaagggtccaggagcttttgcaacccagctagcaagcagagtcctgggctgatcagagtggggaaaacccaccgagttgttcaatggtaggacaaacagagccctgctgcagggaggggacactcatctaccctgtacccccatacacctctgtcccactccccgttcaggctgacaatgtgctcaccacacagcagaacctcctggtcttgattgttggggccctcgcaatcattgcactggcccgtcctgccatctgaccagagctcttccntgctacgctcttctgagagntctccgtcgaact

SEQ ID NO: 377535 - DNA, 535 bp, Homo Sapiens
  misc_feature (362)..(374): n is a, c, g, or t
actagtccacggttggctggttcctgaggtcctattatgactggtattcctcacctaagtagtaaataagattgagagggattcagtgagaaaatccctgctcttgcctatgtgtatgcaaaggcaggatggacaagggatagagaaaatgcagacagtagatggaaatgatgattaagaagagtgggaatcaagagtcctagtgactgaaatgttattctgttgcaaaacaggaaaaaaagagtcctactgtgtgtattttgaggtatatcaatacatgttcatatgttcagctcatgggttaatgggaccaacaatagcctttattttcaataatacagatactttggttctcaaagaannnnnnnnnnnnnggagatggggtcgggcttcgtcacccagacgggagtgcaggggagcaatcatagctcacggcagagtcaaactccgggtcttaagagaatcctccttctcatactcctgagtatctgggactatgggtgcatggccgttcttagttgggggagccaaccgt

SEQ ID NO: 377536 - DNA, 249 bp, Homo Sapiens
  misc_feature (29)..(29): n is a, c, g, or t
actagtcacggttggctagacagctcctngcgtttccctctagccagcaaagcttctagccaccgctattccagaggaccacggcccctgtttttatgtctgagcttcagagaaaccccaccttcccagagaatcagttctgtggcagcatctactcccaaggcactaagcctcagcagagtcatatgatatacaatgacctacttggttctctgcccaggcagccaaccgtggactagtgggtaccga

SEQ ID NO: 377537 - DNA, 374 bp, Homo Sapiens
actagtcacgtgttggctagttgggcaggagttgggaaaagccaccttagtccggcgtgcagcagattggggaagggtcagggaaacaacaggagtgtaagaatctggcttctcaaaaataactatgagtcaaaaatatcaaaagtgtaacaggtgtgggtccagatgagaagaaggcctcaggtgtgggcttaggaagaagctttcaaaaaaggtctgagaaggaaaaaggtcatgcctatttctaaaagaattttactaggggggacggcttggatgtgcaggctaaggtggaagtgaggagggtgcagcaatctgactgaagccgggatacaatctcaaaaaacaattagccaaccggggactagggggta

SEQ ID NO: 377538 - DNA, 110 bp, Homo Sapiens
actagtccacggttggctagtataaacagacagtctttgcaaaacaatctggcaatagatagcaagataatttttaaacgttcggtagttgctctcctagaaatttcctt

SEQ ID NO: 377539 - DNA, 197 bp, Homo Sapiens
agaggtcgatctgaggatccccactagtccacggttggcttatcagtacatggactatactgataaggccagacatgaaattccattggatatactctgctaaataaatgatgcaagcacagtacattttagagacagaatcttaaagtacacagctctaaaggtaccatctcccttttctcgtctgtaagaataag

SEQ ID NO: 377540 - DNA, 935 bp, Homo Sapiens
  misc_feature (99)..(242): n is a, c, g, or t
tatcgattgccacagctctacctgtcatacaaggttctgtcagggaaagtagagcttagggttaagaacatggacgtgggaacgggtggattcctggtnnnnnnnnnnnnnnnnnnnnnnnnnnnnnnnnnnnnnnnnnnnnnnnnnnnnnnnnnnnnnnnnnnnnnnnnnnnnnnnnnnnnnnnnnnnnnnnnnnnnnnnnnnnnnnnnnnnnnnnnnnnnnnnnnnnnnnnnnnnnnnnnaatcaaaagcccacattatataaattttagccatggtttcattttgctgactggttctctgctaattaggctcagtcttgtgttctgagctgctttttctcttctggatgttgatattatctctagaactttaatattcattcacgaatctgtttgtatctgcctgagatttctggtggataggggacatgacaccaagcagtactactgtgtttcatttctgtgtcaggaatgtgatctgccccagagtccttatccaggactccaccaccaggcagcgtgtgaggcatttccacagtgaaagcaccaggtctgtagatctgcaccattctgtccacattgcccttagggctgaggacttctctgtagagctagaggtcttgcttaccgggcttggttgtattctgctttttctaacaggttgattccttttaaataagatatatctttcctttcttggtttcacatagggcttgtattcctccacagctagctggttaacatattttccttcaagtgtttgaatttggcttgcttgaatctggaggctttgagtttatgtgttcttatgaagtctctacctacacctgtgtgaagcaagtccttgagtcgagcaagactaatgcttagttttcccccaacaaggatagggagggaccaggaagacattcaggctatgggctatacctgctg

SEQ ID NO: 377541 - DNA, 528 bp, Homo Sapiens
  misc_feature (347)..(388): n is a, c, g, or t
ctgtttatcgatctcactttaattcactcatctcactcctttcgaaacaattacatcttgagccaattttgtttagtttataggctaatccaattagataatttgggaagctttgaaaagtttactaatgtctgataatattaacacacactctattgccagatgtgtattgaaatggtggcataggtggtatacacatagtgtagcaaatgggatattgattcggtcctcagagaccccaacctctttcttgagcacttttctctcagccccttcttggtatatctgtccctctgcctttgttaacccctctctcttcacagacacacacagacacacacacacannnnnnnnnnnnnnnnnnnnnnnnnnnnnnnnnnnnnnnnnngtgattttgtgctgttcttgatctaaccaggggccttgccaaaggcttcctttcccagtccattgaaacctggacactatacctgtctttttagcacacctgttctaggtttcaaagcaataggtggcatcgataaaccc

SEQ ID NO: 377542 - DNA, 323 bp, Homo Sapiens
agtctcttatcgaagccactagaacactccatctccagcctaaagataaaacagagcaaaaatgttattctaaacttgatagatttctggctccacttaaaacccttctataactcatacaatctttcccataactccctgaagcttcctcctgcagtgggagactcacagcgatgatgagagaataaattgtgttaggaaggcagagagggtgggagatggctgtagctaccactgtgtggcatcccttgtgatgggactgcttctctatcacccatgttctgattttcaccaatatctatagccggtggcatcgataagca

SEQ ID NO: 377543 - DNA, 233 bp, Homo Sapiens
  misc_feature (134)..(151): n is a, c, g, or t
tgtttatcgatgccaccaatcatgcgatcaacatgatggtggggagtaaatagcacaccaggttaagtgtctgattctgcatatgcttgtctaatcaccacgaaccatgatatgcatgcagagcactcaaagcnnnnnnnnnnnnnnnnnnggaaatagggttccgctttggtggcccagtcgggagtgcgggggccccatctgggctcacggtaacctcggcctcccgggtt

SEQ ID NO: 377544 - DNA, 570 bp, Homo Sapiens
ttcggcactaggaagccacacttattcttttcagtaacctgctagtgcacaggctgtactttaggtacttaaaatatgcactagaataaatttgcaaggcccctaaaatatcactgttatttttggagtaattcagtataggttcgtttaaaagagatttttataacttcagacatgcatcagtaggaaataacttgagaaattcatatggttatgttacaaattcatattctgttactacagtaaacgttaagagttttaaacagttaagattgtacaatttttcttcttttctatattacaagggccccagtgttaatgtcttagattttcagtatttgaacttatttttttaaattctgtcattgagataagaataattcaggtagcatctgaaattttaatgaatgtataattggcatatcatggaaaattaaccagaaagtatcagttcttaaaagttatgcctagaaattatgtaaagctaaactactggttagaaagtattcagtgtaatattgtattaatttgttaaattctaaacttgaatttcaataaaattttaaagct

SEQ ID NO: 377545 - DNA, 480 bp, Homo Sapiens
  misc_feature (219)..(219): n is a, c, g, or t
tgtgatgtgaagagtcatgacaccatttcctcacacctccacgcaatgccagatatgattcgacaacattcttcctgtcttataaaaagtgtttatctagcccgttggtttggcagatgaaatcaactaggcttttggcttgcttttactgagcatattcaaaaccatttcaggtcactatagtggtttgctcgggttgccataacaaagtaccacggnactgagtgggcttaaataacagaaatgtatttcctcgacagttcggggagatgggagtccaagatcaaggtgctgggcagggtcgatcgcattctgaggcctctctccttgggcttataggatgggcgccttctcccttgtctgcacatggccaataaaataaatagccacagttccctctaccaatgctcctcaaactttaacatgcatgcaaaccacctgaggatcttgttaaaagggaactgtggcatcgataaacac

SEQ ID NO: 377546 - DNA, 360 bp, Homo Sapiens
gggtttatcgatgccacaggcacaaagcacttggtggtgagagtgagaacactttgggctccccctaatccaagccaggggaactcgcggggctcaggcgcagccctcgctgggtaatggaaggccctctcgcccaccttgccctttctgcggggctggcaaacactgacatctgaggaccgtggggtgccaggccttcccattatcctctttcacaatcttccgaatcaaggtccactaacacctcatttatccaaaaatcagtcaatgaatgatcccagctgctcaagaaagccactccccacccctgcccaggagcccagaaggtgggagggggcatcgataaacaccgggtaccga

SEQ ID NO: 377547 - DNA, 119 bp, Homo Sapiens
gggtttatcgatgccactcctgatacctcacttgaggttgacaggagtggccagcagttagtgcctatggtcatgtaatacactaagtcaatacctgtggagtgaaatccggtctctat

SEQ ID NO: 377548 - DNA, 262 bp, Homo Sapiens
ttatcgatgccactgaatataaaaggtgtaaaagctgaaaaatgtggcatgaataagagactctgcctagaacagtagaagagctaggtaaatcagaagctgaagtttaaaagctacatattttaaacagcggttagaggtgaggggatatgaattgagtccagctgcaccagtctccttgtggctttcctgatatgccacatgtgcatttcctcttaggatatttgcacatgtggcatcgataaacaccgggtaccgagct

SEQ ID NO: 377549 - DNA, 402 bp, Homo Sapiens
  misc_feature (62)..(96): n is a, c, g, or t
atacatgtattggaaacatcaaaattgtgccccccataaacatgcacagcttcaatgtgtcnnnnnnnnnnnnnnnnnnnnnnnnnnnnnnnnnnngaactctatccacatcttaagattggccaggtggatgttacgagctttgagaatgaggtcacatgatttcttctgtgttagttaaaagcataattaatttagattacgcctttgactttactaacagaatagtttactgacttacatatgccctcacctcactctatcaagaagctgaggggtctaagcaaaataaactgccccaaggttacctttatacacaaattttcaggtaaatattaatgaactttgactcacatcatctacattttctagtacagagtgaaattttccctagtgccgaat

SEQ ID NO: 377550 - DNA, 383 bp, Homo Sapiens
gggtctatcgatgccacaaagaacttacattaaattaaaaaattctttttctagcataatattgttctactaacagttctttgtggcaggaaactattccttgaacatgcagtagttcttaaatggtatcccatttagatgagaaaacggatagatgtatttagatggcttagtcacggattggacctcgtgggatgactttttacatgtggctgttaaaacggttctattttcatccaaagcacattcggtgaactttaggatcaggatttcaaatgcggtctaccatctaacacggtatctgttaaaattgttttggatgattgggaagttggattaaatgaataaaaatggtgaactttattgggtggcatcgataaaca

SEQ ID NO: 377551 - DNA, 573 bp, Homo Sapiens
  misc_feature (542)..(542): n is a, c, g, or t
gggtcatcgatgccaccaccacatgaccgctgccccagaagagctacaggtaggtttagcaaagctggtagattatcgacccactcggataatctacaaggaagacagacctgagaactccaaccgggaagaacctctcaacatcagacttcataaaaaagactctgagagaaagatacctcaccaatttctcagggtgaaaaacactttgcttggaaatcacaacttactgagcaccaaaagattcattcagcagaggaacctcacatgtgttgtggcttgagagaagctttcttagttcagacctttatagacactaacatttccacacaagggagaaaccctaaaatgtgctacattttatgaaaagcattttgacagtgtgttttcagaatggtaagatatttctccccagggatcaagaaattcctcatcggataaactattccgaggggaaaacaaaagagcaaaacaaaattaaatctttatttatacactcgcacacagagagaacctccagtgactcagggactctctattgnagtgataataaaggaataaaccattctagag

SEQ ID NO: 377552 - DNA, 476 bp, Homo Sapiens
tatcgatgccactgaattacagaacataaaattcctctttctaaccatttttaagtgtataattcagtggcattaagtatattcacaatgtgtacaagcatactcagagttcttaacggtggtcaactaatcaaaaaatatttggaatactttaggaactgaagttatcaagtttataatactggatataaatatcaagtttataatatgtgataaactacactctttatacggatagactacacgggaggtggagggtaatacagacttcagctttagaaagcctccggggtaattaccctatacaacccggcctaagaatttggacctatgctgaaggtggacggctacatcccaaggtggtaaagcaacaagacctagctatgtagtgtctcaacaaaggctgggaagttttacagtaacactgaaggagtacagaaactaaaccattaaggtccccagttacacaatggggc

SEQ ID NO: 377553 - DNA, 1116 bp, Homo Sapiens
  misc_feature (32)..(32): n is a, c, g, or t
  misc_feature (36)..(36): n is a, c, g, or t
ctggctggctggacaccgggggacatcgtggntatntgccggctgggaaactgcagctgtaccatgtggtccccagtgcagaggagctcagaaggcaggcggggctgaacaaagacccccgatgtctaacaccggaagcccagcccagctctagtgccctctattcccaccgtgaaccaggtcatagccgcgtacccttttgtggccagaagcagccatgaagtgagcctgcaggcaggccagcctgtgaccatcctggaggcccaggacaagaaggggaaccctgagtggagcctgggtggaagtgaatggacagaggggttatgtgccttctggcttcttggccaggggctcggagcccagttctgtggggctggagtcttgccctctttagggtaaccctctttgggagcctaacatttgaccaaatgattggggggaggcttagaggctctgaccctgggggggaaaagaagcaaaggaaaggtggaggtggaagggaagaccaggccagggtgggtgaagcacactcaggaggcagccagaagacatgggcgggcctcgcagaagtgcttggtgtggtgggggcacaggaggctccagccaggactgctcattatgtctgcataaagaactcattccgacctggggtcacaatgcacttggacagcaggtcacagctgattggccaggactctcgataggttatggccagtcttagctgtgcctgcatccgggcctgcctgtgggcgtgggtcacacgggataatgttacctgcgtgatgtgtggttgcaggaagcgggttctggaggagtccagaactgcctggtcagacagttcacttcctacacatggtatcaggagacatcacaaccaatgagtcagcttttatttctctatgctggaagctgagtttatcttgggcagtgacccactgggagccctctcaagtggggaagccatggatttatcggtgtagcagagaggttcccaagactcttgactggtcctgggagtgggtgtgaccaagtcatagttctggaatgtgtgtaggcaattcagaggctgttccagggaagaggggattttgatactgttaggtggcatcgataacc

SEQ ID NO: 377554 - DNA, 207 bp, Homo Sapiens
  misc_feature (19)..(19): n is a, c, g, or t
atacatagcagcttacaantacttagagatgaacacatggcagtcaagacaggtaatttttcctcacggacatcgtgatcctcacggacatcgtgatcctcacggacatcgtgatcctcacggacatcgtgatcctcacggacatcgtgatcctcaccgacatcctgatcctcaccgacatcgtatctcaccgacactcgtatcctc

SEQ ID NO: 377555 - DNA, 998 bp, Homo Sapiens
  misc_feature (985)..(985): n is a, c, g, or t
tcgatctagaggatcccgaggatcacgatgtccgtactttctagaagtctccaaatcagaaaacaaggactatgaagagccaaagaaagtacggaaaccagctttgaccgccattgaaggcacagcacatggggagccctgccacttcccttttcttttcctagataaggagtatgatgaatgtacatcagatgggagggaagatggcagactgtggtgtgctacaacctatgactacaaagcagatgaaaaggggggctttggtgaaactgaagaagaggctgctaagagacggcagatgcaggaagcagaaatgatgtatcaaactggaatgaaaatccttaatggaagcaataagaaaagccaaaaaagagaagcatatcggtatctccaaaaggcagcaagcatgaaccataccaaagccctggagagagtgtcatatgctcttttatctggtgattacttgccacagaatatccaggcagcgagagagatgttggagaagctgactgaggaaggctctcccaagggacagactgctcttggctttctgtatgcctctggacttggtgttaattcaagtcaggcaaaggctcttgtatataatacatttggagctcttgggggcaatctaatagcccacatggttttgggttacagatactgggctggcatcggcgtcctccagagttgtgaatctgccctgactcactatcgtcttgttgccaatcatgttgctagtgatatctcgctaacaggaggctcagtagtacagagaatacggctgcctgatgaagtggaaaatccaggaatgaacagtggaatgctagaagaagatttgattcaatattaccagttcctagctgaaaaaggtgatgtacaagcacaggttggtcttggacaactgcacctgcacggagggcgtggagtagaacagaatcatcagagagcatttgactacttcaatttagcagcaaatgctggncattcacatgcca

SEQ ID NO: 377556 - DNA, 166 bp, Homo Sapiens
gcaagtacccagaagtttgatgttgtttcttgagaagaaagaaggaggaaccgagacatgtgtcattcccatgagagaaaatgaatcacaactcctgtagttacttggaaaatctctgaggtgctaccctcaccccatctcctcacccattccaagagaaagggtt

SEQ ID NO: 377557 - DNA, 638 bp, Homo Sapiens
  misc_feature (58)..(79): n is a, c, g, or t
ctctgttggatcgcgttcacccctggcgccaggcccctctggccccactcaaacgttnnnnnnnnnnnnnnnnnnnnnnttgatgttgttgcggggggagtgttgagatcgcctctcccctcaacctgtggcatagtcagcagacatcaacatgcccagctgtctttttcttttggcttcaaaataaacctcaagggtggacagtgaagaagcatcagagcgcaggactagtgcaggtcggggatggggtctgctggggactgcccccggataaaatgtggaacaaattatcccaacacagccgggatcgctttgacttcggggtcttggggcccaaggccctaagcgttggaaaggacactttgcctatgcagcagctttcccggcagaaagtgaattcaaatcgaagatgtttcaccacgcgggttttgcctaagtatgcattttttcacacctctctaaaacacaaccacaaactaacagaaaagactaaacgataccaagaaaacacaacgatccttcggactttcagaccaccagaatctgagtctaaccaaatctcgtcttaacaccccccctttttccctcctggaggccaccggactcccgggaagaagcggcgggatacacgttcacga

SEQ ID NO: 377558 - DNA, 717 bp, Homo Sapiens
gatcgagccggtacctcggacgtgtatccatacacaagataaaacataggcattaaaagctatccccaaaatgtccaagatgttgttatcagcagtcaagtatttgagagcagctattaaaactatagtcatggggtgaagaaaaaaaattctcataatgaatgaatacatgtggaatctcagcagagaaatgcacattattaaaaagaaccaaatagaaagataatgaaattttaaatagtacttttaggttgattcatagattagaaaaagacagaacaattgaaattattcaatctggaaaaaaagagtcaaaaagtttgaagaaaatgaacagagtcttacaatctgtgggcagattgtgtcctagaaagagtgaagggacagaaaaattaaatggggtgcaaaagtaacaactaatagctgaaaacttgcaaaaatttgtcaaaaccccacattttatatccaagcagtcaacagattccaaaaagaaaatccaagtaaaatcgtacaaaggccacattgtgatttaagaaactggcaggacagggcttccaattgactttctaaaatttctaatttttactaattataatgatggaaaataggttatccttgagagattatcttggagaaagtctctcaagataacacgttcgcgaggggatctctaaagtgactgaggctgaagttggactggcgcgtaagacgagggag

SEQ ID NO: 377559 - DNA, 368 bp, Homo Sapiens
aaggcatattttatttccaccaactttgagatttactctgaatgttttgggttctatttattcattcatcccatgaatctctattgaatgtgtgacgtttgctgtagtagacattatggtagtttaattttatgcctcagtgttttcagtcttccctgcatctatcttcttaccatggactcattatgggtgaagggtactttcttatgctttgactttggacttggccatgtgacttgttttggccaattatatgtgggcagaagtgagtgtgtcagttgtgagcccagcttaagagccatgctattgctttagagaagcttctccttgtcatctgctccctaccccctggataacacgttcgcgac

SEQ ID NO: 377560 - DNA, 450 bp, Homo Sapiens
gcaacattaacagagcacatcggtcgaaaaagactaaaacactaacaaatacaagtgaatgcacatattttaaactagtgtaatttgatctacattgaattaatgttattttgtataccggacattgcaatactgttcatttccatttcatcatgcaaacatgccaattttgtcattaagaagcctttattgggttatattcaatttgacctcccaccaaattaagcgggaaaaaaccaaaaaataagaaatcccagtaaaagagcccctcaagatttcataaactacaaactaaagctgctagttaataaggaaatggcagaattttcagagctgtataagacaaaaattcctgtaatttaagcagatgttttcctcactgatgacacagcttccgacacgatgtgaagtagctacttggatattggtcatcagtgcggaaacacgtcg

SEQ ID NO: 377561 - DNA, 311 bp, Homo Sapiens
  misc_feature (245)..(257): n is a, c, g, or t
cggaccctcgcggacgtgtatccttaggttaccatgcgtaatttaaaaataggaaggtacctaaggataacaactaatttaatcctgcatttttaaagctgagaaatctggtgctcagagggagtcaaaacagctagtcagtggcagactggagacgtgaccaaactctggagtctcccttgagttcccttcctaggaggcagtggtgctctagggctcagtgtgtatctctagcttgtctttcnnnnnnnnnnnnngtgtgcccccggtttaaattttggactctaagggtattcgggaagggggccaac

SEQ ID NO: 377562 - DNA, 624 bp, Homo Sapiens
cacacactttacacgactacaaaatatgcatcgtaggttccattagattcaacagatactatcacatgatataacagtccaaagggtgactctgaactctacattgacctcatcagcactggctggtggaccagagtgagcagtacctcttgagagctccatccctcccctagctaggcagagaagggagaagaacagggctttgaaacaggtctgtggagtaagaatttgtatttttagacgaaaattacaacatggtgagcgttcctccaactatgggaaaatatttctcatatcgtggaaaaattggccctgtatgatgctagctgaagagtgggtgaaagaataaaactgggggttacactctcaggcccatccttaaaggagtggtcttagatttgggggagttaggcatggggaagtgaagcaaagtatggcccacagaaggaattttctctcattccaatccatcctgccctcaaaaccaacattcttacagcataattcagaacctttaataagagctgtgtgtagttggctgaataaagactaggttcttcaaaaaaagagtatcaactttagcaaatagaaaatctctacaagcctaaggacaccagtgtttgt

SEQ ID NO: 377563 - DNA, 804 bp, Homo Sapiens
  misc_feature (55)..(152): n is a, c, g, or t
ggatccccctcgcgaacgtgttatccaggaatgcaatcatggtgtggtggctcannnnnnnnnnnnnnnnnnnnnnnnnnnnnnnnnnnnnnnnnnnnnnnnnnnnnnnnnnnnnnnnnnnnnnnnnnnnnnnnnnnnnnnnnnnnnnnnnnaaaatttaaaaattagccaggcatgatggtgtgcacctgcggtcccagctacttgggaggctgaggtgggaagatcacttgagcctgagaggtcgagcagcagtgagccgtgatcatgccctgcactcgagcctaggtgacagagagaaagaaaccccagtctcaaacacaaaacagccatattgcttcagggaagcagaactcaaagaaaacagagaatctgaaacaaatctcatagctgcagaagttgcagaagaatagaaatgaccaaaaattaagtgttgaaataaatgtctttccatatatggggaaaaatagaactagattcctatcttatactatatataaaattaattccagatatacccaagacccacttctgaaatactttaaaactttaaagctattaagaagactcaggagaatatctttataaaagcctccaagcagggaaagataaaagggagaagaacatcatagacagaggaagtagaatgacagctagaaaacagcctcatctgtaatatggaaactaataatcccacctacttcacagccattatgagatttaaatatggtaagttcttagaacctcttaataaatgtaagtcactgttatcctagttcttccactgtactagttatctgaaaa

SEQ ID NO: 377564 - DNA, 513 bp, Homo Sapiens
gatcattcccctgcacttcgagcctagctgacagagagaaagaaaccccagtctcaaaaacgaaacgatacgaaacaaaacagccatattggttcagggaagcagaactcaaagaaaacagagaatctgaaacaaatctcatagctgcagaagttgcagaagaatagaaatgacaaaaaattaagtgttgaaataaatgtctttccatatatggggaaaaatagaactagattcctatcttatactatatataaaattaattccagatataccaaagacccacttctgaaatactttaaaactttaaagctattaagaagactcaggagaatatctttataaaagcctcaaagcagggaaagataaaagggagaagaacatcatagacagaggaagtagaatgacagctagaaaacagcctcatctgtaatatggaaactaataatcccacctacttcacagcaattatgagatccaaatactggtaagttcttagaacctcttaattactgt

SEQ ID NO: 377565 - DNA, 522 bp, Homo Sapiens
aggatccccctcgcgaacgtgttatcctgctagagacagcacaaatcactctgccaacaaaatttctgttatttcaactcctggccactttcaccaggagcagtggtatgctcctatagttctagctactcagaggccaaggcaggaagactgcttgagcacaggagttcgagtccagccagggcaacatagcaagattccagcttttagaagaagaagaaaagaatgccattctcatccccaaatcctgcacaaaaaggaaatcgaattacccagccactgtgagattttccaaaacttaccaattatcttacaatgtccccacatgtcatggttagtcactgataaaatcagcatctgaattccacaaaagcaaccagagaaaatcactaggccatgtaaacacatgcctccttcgaggtattgttatggaacgtatatgtatccaagcccagtcctggtgaaaatcttgtccttgggctttggataacacgttccaggtaccgagctcgattctatcat

SEQ ID NO: 377566 - DNA, 309 bp, Homo Sapiens
  misc_feature (265)..(265): n is a, c, g, or t
tgctgggattacaggcatgagccactgtgcccagctgaagtgtgatccttaacttcaccccttctcatgccctccatttccaatccatctccagtccagttgactccagctactcaattatttccacttatctcattccactacctttgaagctaccaccatctctaactacagtcatctcccaactaactggtctcctggcatctctctggttctccatccactaatttccaacacagcacattactgtttatatccataatgnctaggacagtacctggcatcatggataacacgttcgcgaggggg

SEQ ID NO: 377567 - DNA, 654 bp, Homo Sapiens
aaatttagggtgagaactgtgacactcgtaattgaggccctgaatggaaatgtgctgagaaagaaaaacataacgagaaagacatagaaagaaatgaagatagccagacaggtatagaaggaacatgactccctttaaatagagaaacagccacacgatactctcaagtaatgctgctttgttatgtccatattttgacccattgtggtacctgtccaaatagccctgatttcaggccaagccctgccttgataaatggaactcacatagtaacaacaggtttcctaccacatcgatcttgttgatgttggagcaaattaaagcagatgtttcctgtcaactgtgaatctcttcccaaagaacacatcagcatcctcaacctcttcaagccacaccaaagacaaaggacctccatgcaactggatttctccttaaccgcaccattctatttgttaggtccattatctctgaacaattaacatgctctggaatactgtgttccagaatgtgtatataaatggaatatagcacgtggccctataaaagaaagaaactattaagaaaatggtccctttagccaattagaggaaatataatttctgacaccggccgctatggccagctggatacacgttcgcgagggtaccagctcgg

SEQ ID NO: 377568 - DNA, 651 bp, Homo Sapiens
  misc_feature (502)..(505): n is a, c, g, or t
gggagtgtatcccccagggatcctgggggtaactgagaagtaggtccctaggaaggacttcagttctgtctgtggacaattgggacaaaagggttaagggaaaatcaatgttgttctttggctattaagacaaatcttggaaggttcctagaaacggaggattgttagctgataaattcattcgaacttagaatgaaggaaggaatgaaatggcctcatttgtaatgtactctttttggttagtttgattgttttttacatttataagcctgtttgggtactctgattacttgttagaagactcgtaaggttaaacaatccacattattacagattgtctgatttttacgaccagacaagaagattgaagctctaagtgcctgaaaacccttttctacagagtagttgtttacacttcccttctgagaaccatatgaaaacaaggaccttatttgtctgttcaccactgtacccctagtctagtactctgtgtgtgtgtgtnnnnattacatatttaagtgagggaactttcattcacatgactagaatcaaaacaaaaataacctgcttttatctaaaaggggcagtaaaaactagaggatacctaattatacttctgttcaaatatgatttaatggatacacgtcgcga

SEQ ID NO: 377569 - DNA, 496 bp, Homo Sapiens
tcccagtgagaggacccgtacagagacatgatgctggagaacacagcctcctcctctcagggggatattgcattaccaaaccagaggtggtttgcaagttggagcatggacaggtgctgtgcatattagaggaagagtccccaagtcagagcccacctagactgctgcatagatgatgacctgatggagaagagacaggaaaatcaacgagcagcatctgcagcaacatgattttgtcaacaataggacactgactatggacagaaatggtgtattaggtgaaacattttctcttgacactaaccccgttcgatcaagcaatatacctggcaactgtgacgcatctggaatgaatttggataatatttcagaatttattattagtaatagaagctcctttgtaaggtaccctgctgagtgtaatgtacatgggaaatttctcctctgttcgaagcgtgagaatccttatgccagagggtaacctttggaatatgat

SEQ ID NO: 377570 - DNA, 262 bp, Homo Sapiens
agtcccccttcggctcctacccttgtcttcgccaggagtcctcagacaagaatctatgggctattttctctgaacacttgtttctactctgagtactgagttcatggttatacattggaattatctggggaagtttgtaaagtgaacattgccagcccaacatatttttgttgttataagagcttgcttatgattttagtgtacaccttgcagaaacactggtcatatgtgtgcttggcttcatgcaagatggcgtagaatg

SEQ ID NO: 377571 - DNA, 542 bp, Homo Sapiens
gaggatatggtggtagtggatgtatcaatgttggtagaattactagtgaagcatggttccagattttttcttactcagatttcggatactgattcaatcttcttagtattcatagcatattcagattttttatttgtggtttagtcttggtgcattttgtgtttcttgaaaatttccctgtcatctgggttatcgaatttttggccacacacttgctcatagtactctcttaaatctttttaatttctgtagaattgttagtaatgcccctacttttattttggtcttttgtagtatgattttctctgtgggtttccatctgtggctttggctatgttgagatagtttacttctattcccagtttgttgaatatttttcttatgaaaggatattgaatttggtcaaatgctttgctgtgtcaattgagaagataactttttttccattctgttaatataatatataaccttgattggtcagtggagtatccgttcgttacaataataaatttcacttgggcatgatatatcaaacttgtaat

SEQ ID NO: 377572 - DNA, 487 bp, Homo Sapiens
tcagccggtacctcgcgacgtgtatcctgtacctatcttggaattatataataatcagaaattggagtcagattaccttcatgtataatggttaacttttaaagaaatttaagtggattaaagttaaataaactttagagaaacctaaaagtcacagaagccttaaaggtacatacatatttttaaaatcctaattttacactgttagcatcttgatgtgatatcaacaccatttatgaagacactctttgttaattagtttatggggtgttaggtgaattattcagtaaatggttatcaaaaatcaaatatttaactataaacattgaatgataaacaatattcctctgatcttaataattgtcgtaagtacattacttcaacaactatttactgaattccttttgagtggaagacattgtccaatgtgatagggtctttgaaattaaaaactaaagaagcctgtatccattgatgagctcaattg

SEQ ID NO: 377573 - DNA, 601 bp, Homo Sapiens
gcgcggacgtgtatcccattcgaatctttaatgcactaagcaggttgtactgtcaggctgttagggattaaaggattagaatgggataatgtctacagggggtctgtaggtatccccatctgggctggtatgattgtcagggttgaggctttaaaaaccaatgtactattcctcagattacctcctatatcatcaatcgtgccttcaattcccaaacagtgatcaagacagagatatttggcttgaaagaaaaagtggagttagagcctgaagaatctctgagtatctctgagtcccttcttgctcagacaactaagacattttccctgtttctggttattaaaattcatcattggctcaatatttatttgtcaatttgaaattgaacatttagtttccattacccctcaatagtttgttttttaaccagaagccatagctatgttctcgctagtgacaaaatgctaaacaataaaaagtaaagctgcagttatcaaagcaagaataatacctttagccaggtgtgtggctcacgcctgtaatcccagcactttgggagccgagtggctcatcactaggtcaggagatgagatatctggag

SEQ ID NO: 377574 - DNA, 564 bp, Homo Sapiens
taaatattaatatgaagattatagagctaacctttttctaatctctaagagcttttgaaccatacaggcacaagagagaaaacacacctacctcatacattcacatcccaaatttcctatctccaatgcaacaggaataatctttttaatccactaaaatggtcactaacccttataataataaaggcatgttttaatctcttacctgaaggagtcttatcaatgtaacaagacaccgacaattgtgactggtccttgtgctcgtttacagtaccagagactctgtactgtattgcctttgtggagggctgaagtaacaaaatatgactaccgcctcctgagaaccttatgaaaataagatatatagctggttcaaataaatgttctaggccgtgacccaaggaatataattgagaaaaacaaattatttcacatacacgaaaacataattaaaatgttattctaagctttgctatcgtgtgtaatgtggtatgtgcatactaatgtgtatcctcaatcataaagctatgtaagaaatgattgcggactacacgttcgcgaggg

SEQ ID NO: 377575 - DNA, 564 bp, Homo Sapiens
  misc_feature (44)..(215): n is a, c, g, or t
tagaactcgagctggtaccgtcgcgaatgtgtatcccaagctgnnnnnnnnnnnnnnnnnnnnnnnnnnnnnnnnnnnnnnnnnnnnnnnnnnnnnnnnnnnnnnnnnnnnnnnnnnnnnnnnnnnnnnnnnnnnnnnnnnnnnnnnnnnnnnnnnnnnnnnnnnnnnnnnnnnnnnnnnnnnnnnnnnnnnnnnnnnnnnnnnnnnnnnnnnnntgagccaccgtgcctggctgaaaatttttcttttagtcatattttccatgcactgtttagaagtactggacgttatatacaaagtgcccaccaggcttcacttgagagaaaaacctttcttctcaggattccagccacaacccacaattgtatgacaaagtgcagcaaggtgctccccaaatctgcaaacaaaatagtctctctatttgggatctacagtcccttctagagcagttagactagatttctacaaaaatcacttcaggacagcaatcagttatttcacctccttcagtgctcctgtcatcttcagatctgacacggatacacgtcgcgagggtccggctga

SEQ ID NO: 377576 - DNA, 516 bp, Homo Sapiens
ctcgcgaacgtgttatccagctattctattgccacgatgcctctaaaaaccagactgactgggaacagcagtagggggttgaccagtgagggcaggtgactaagtggtgtgcaggaaactcgcatgtttccctgggttggcttcctgctcccctgtccctgtcaccaatagcagcttcattgtgagaagattaacacaaaggagacaaacccggcaaaactgtttccaaattgtaactaaccaagtctgtgtaggaaattcacaaggcagcagagcagaggctgcagaggtgctctgtctaccgggagaactaatgatccctgtgagcaatgcagggtgcaatgagtcacatggggaaatgtggacagaggcagaaggacatcaaggcccccactacacaccaaattagagtcaatcctcctgttctccccacccacttcgcaaactaatgacgtccgcgttatcccagaggagagtggctagggacactcagtcctgggataacacgttcgcgag

SEQ ID NO: 377577 - DNA, 446 bp, Homo Sapiens
  misc_feature (413)..(413): n is a, c, g, or t
tcgagccggaccctcgcgacgtgtatccctgttcttagcaaatagtaccatcatgtacacagatgcccacatcagaaatacaggtgcaatccttaatatctgtctctcaatgtccacatccaaacaatcattgagacttttagctttttccgacttacataataaatccatctgcttttatacattctcaacatcactaccaatagttaagatcaatatttgaggactgccctcttaaaaataaattagttctttcaaagcacaattcatgtaggtttacaaatatcaccttagtatacgatgctcttccaaaaaatgagtgattatagtccacttgatataaattatgatagggttaacccttttagaatcagtgtcattcaattaacagctaacattttcaaataaaggcntgtatgggataacacgttcggggagggggatcc

SEQ ID NO: 377578 - DNA, 558 bp, Homo Sapiens
tggtagtggttgtggacgaggtgtgtcagtactagggaccatgggcagtgtttgtgggcactgatgatagcctgtctgcgtgggccaatccctgggcctccatgtggcttctttggttgctggcagtggcagcactgggccaggtgggcaggttcgccactgggctccttggtggtgtgtgtggcaggctgatctctagttctccatgtgacgtatgcaggttctggtggtgggtaggcaggcgtttcctcaggcctctcagtagtaagtgtgggcactagctctggaggcaggtgagacaatcttcaggcactagcatattcctatgcatttctagataaaagtatttttcagaaaacctgagcatatgtcctattaatacaacttaccctcatcagctccacatgagaagaagggggaattccctcagtagaacagtcagaatggaatcacagacttgttttgagctagtcactggtaagggggtgtaggctaaaatgacaagctcagaatctaaaccttagactagggaatgacaaactttttccataaagaggc

SEQ ID NO: 377579 - DNA, 435 bp, Homo Sapiens
  misc_feature (56)..(111): n is a, c, g, or t
ccgaacgtgttatcccagctacttgggagcctgaggtaggaggacctgcttgaccnnnnnnnnnnnnnnnnnnnnnnnnnnnnnnnnnnnnnnnnnnnnnnnnnnnnnnnnagagagcaagaccctgtctttataaaaaaatctaaaaacaattgtcttatttctaactctgaactactttctatgctttggtgacatctatggtgaaaattgaaaactagcattaacagctagaaagaagcaaaggatttttccacatgaattccatctttcttagctttgcttttatttcacagaaacagaaaataaagaaaacctaatcagttaaattactcctctctggtgtcacatcctaataaataactgttatccttatgtccttcaagaaagaaatgatactagtaggacataaggataacacgttcgcgagggtaa

SEQ ID NO: 377580 - DNA, 419 bp, Homo Sapiens
gtggtgtacagtgtgggctgcagccagagagaggggggtgctgggtttggggactgttttagcccattatgctcatgtacagagagacagctgcccccaaggaaaggcagggtggcgggcggaaaaggaaccgtgtactgcaagtaggggatgctgctgttcccaccctctcggatacaactcagtgcactcaggaggctgcctgagaagtcagagacaggagagacaggcagtcacaatgggtttaggcttaggaagggaagggcctggttatccactgtggaaatcctgctaacagcagccaaacttctgctcacaaggcagaaagtttggtgtagaggggggtgagcagaagagtgaaggaatgtgagcaaacatattgctagagctgccgtctaggagcgtaatcggggatcctc

SEQ ID NO: 377581 - DNA, 455 bp, Homo Sapiens
  misc_feature (44)..(104): n is a, c, g, or t
  misc_feature (128)..(138): n is a, c, g, or t
tcgcaatcgagccggtacctcgcgacgtgttatccaggatggtnnnnnnnnnnnnnnnnnnnnnnnnnnnnnnnnnnnnnnnnnnnnnnnnnnnnnnnnnnnnntgagccaccgtgcctggcccccannnnnnnnnnnacttttaatatacaagtatttgaaagtgaattagttactgttagaatggctatgctaagaggaaaagcccatccttttcagttagttcatcattgtttcaggtatttggcagaagagaaatttgtatacaacgaataagggtggaaattatatttttaagtacaagaatgtgatttggtcttaaaaaaatatgtaccttactcagtgattgaaaatggagtaatagtattgtgggaatgatattctaagggttatccttaatgattctgaaaaagcattactaaacacagaatcattaaggataacacgttcgcgag

SEQ ID NO: 377582 - DNA, 108 bp, Homo Sapiens
ctggtaccgactggcgcacggtttcgtacgcggtacggcgcggcgatatcggtggtggtgtagagatagccgccatcctttttctggatgatgacgcccatcggatcg

SEQ ID NO: 377583 - DNA, 667 bp, Homo Sapiens
tgcatgatacgatcgagccggaccctcgcgaagtgttatccggagagtactgttcagtaggaactagtcctatgaaaattacctgcagttattatgtcagtcagagaataaatattttgagtatcatatctgtacttgaagttcttatcctttacaaataatttatatttaaggaaacatgctttgacagaaatacacatgaagtctacattctctatctatttcatatcaggtgctctagtgttttgaatataacagttaagagatcaagtccctttaatcataaggccctgttagctagcgagctaaaccaaagagggaaacatttagcaaactatctgacgttctctatatttgtttgtcaacttgtttgttttttctctctgcaagtagaatatagaatttcagagagtgacaagtgctaagagaaaaaaataaagcaggataagggtagaatagggatatttcaaagggtaggttgccattttatgtagtgggtcctggaaaagcctcacttaagaggcatacaaaaaacctgaaggaaggaaaggagggcatcttgcaggtgtcttggagaagagagttctaggcagagggaagaatatgtacactctgaggagggagtgcgtgtttgtgggataacacgttcgcgagggggatctctaga

SEQ ID NO: 377584 - DNA, 841 bp, Homo Sapiens
  misc_feature (627)..(657): n is a, c, g, or t
agagattatggttatggacacatggtgtggatggaacatagtgcctcagagtgagatggagctggattggaattgatgttcgcagttgtaaaatggaaaatgtggacagttgcaattggcttgcgggatacatatgagaatagaagtactgtatgtaaaggaccaggcaggacagtctcctgataaagatagctattactataaccgtttagacagagatatagaatccatgtgaccactaaaataagcaggttgccctactctctgtgtcagtgatggtttgcatattggctgatatcctatcacagtgtattaattcctaatagttgttgagttcagttctaagtgcctagaagagaagagagtgggatgtctttctctggggaagcttgcggtttaatccgggatacatagggataaactatttgctgaagtctatgcaacagacacatgctttggcattcagaagagagagagtgcccctatgggaaggggaagtcaggatggattttatgaaaaggtttacacttgagaggaatcatgaagaatgggtgaagttttgacaggcagaggtaggtataaggagtgggatcaaggtattaaccataaggcaatgaataaacatannnnnnnnnnnnnnnnnnnnnnnnnnnnnnnaacataacaataacataatcaaatgacctttggaaggcacaacatcagtctccttgtgatgagtgaggcaagagataacataaaccgtggtgcttctgctggtgtcattcctgagcctgagtttagcatttttattgaaaattaagatgaacacttaataaatttagtggatacacggtcgcga

SEQ ID NO: 377585 - DNA, 613 bp, Homo Sapiens
agacagatacgaatcgagccggtaccctcgcgaacgtgtatcactgcacacacatgatgaattattacagagtcaacatacttgtctatattccacctaactatagatatgaacatggcaagcactcagtatgctgcctcatgcctcctcataagcattacttccttcaacgttagccagtatcctgacttttctcacaatagattaattttgggctgtttcaaaactatgtataaatgtaactgcatggtttcattcttttgagcttggcttctttggattgatattctgcctgtgagattcctccatatggttgacagtggtagcactttcttttccatggtggtatagggctccatcgtgtaaattttatccatacacttgatttattcatccatccttttttaatggacattcgggtggttttcagtttttgactaccatgaataacgctactatgaacatgcctttgggtgactatatgtaggcatttcttgttgagtctgtgcctaggagtggaactgatgagtcataaggtttgacactgttcagcttcagtaaattctgtctaaatagttgtcaacagtggttgaaccaacttatatcctactag

SEQ ID NO: 377586 - DNA, 490 bp, Homo Sapiens
  misc_feature (374)..(447): n is a, c, g, or t
aagacatgatagatcgagccggaccgaacggtgtatcctaattatctgtattcttcagctttcttcacagaagtcagtgccgtgggtacccacttgtaaaatcccggccacttggggctatcggagtggcacacttgtcttacaactggactttttatactttattgacattatagcctacttatatgaaggagatccctaaggttcaatgttcaagaggtaagaaaaaataatcacctgcttcttatatatatagtataagaccatacacagaattggttctcatctgtataaaattcagttattctgtatcttccattttactctgctgtcctaaattttagagattcttatacatcaaaggactattaagnnnnnnnnnnnnnnnnnnnnnnnnnnnnnnnnnnnnnnnnnnnnnnnnnnnnnnnnnnnnnnnnnnnnnnnnnncatattaagaattcttaatatgtctggataacacgttcgcgag

SEQ ID NO: 377587 - DNA, 540 bp, Homo Sapiens
tcctgagtaatatttttaaaaaaattagaaacatcatcaaaaaattaggaaatggtcataaagccgaggaaattatctaatttggctgataatgggttttaaaaaaccttattttaatatctgctaaatacagtaaaatctccaccaaatggggagaatatgtcgagacaccatactgaactgcagaagctcaattagcctccacctaaatgactcatccatctctactccctaatccccagatctatcatactgacttctctccacgtcacaggccagctactccttcagtcaccaggcatttctgttcctatgcttaccatgggtcagttgggtttgttcccaaaactatttatacaactgcaccactattattatggtaccaattaattaaatgatgtataaactgatgaaataatgagtgtataaaacacatctgtgtagcgtgggaaatacaaagaatgtaagaaaacagcagatgaacaatacataaaaacagaagaatgatcacaggaatagaacacaatttcagacagaaat

SEQ ID NO: 377588 - DNA, 301 bp, Homo Sapiens
caacgctagggtctcatgataacttccaggagttaggtagcatgagatagaaaattattcctggcttcgactgcgtgaaaacgggtgccctgcggcaatgtgttcatttgcaaacgcatcttcgcgtagactcccaaattgccactcatccattttcaatcttaggtcattgccaaagcaaaagcaagcagtccaagacctggtgtgggtctcatacagccccagatgctctccagatgcagagacccctctccccattcctctacaggccacgctctcctgcagattggtggccaattgg

SEQ ID NO: 377589 - DNA, 447 bp, Homo Sapiens
atgcagatggaggcagaggctggagttatgctgccacaagccaccgaatgcctagcgactccagaaactgggacgggtcaaggactgattctctctagagcctttggaggaagcgtgaccctgccgacaccttaatttctaacttctggccttgagaaccaggagagaatacacttctgctgttttaagtttgtggtagtttctcgtggcaaatttaggatgcagatacaggtactaagagcaaaaagccaactgctgtcagggactggcgggtatagcacctgggtcaaacacctggatgggccccgctggaagggcagctgtcctccactccagtccacagcggacaggcagaatgtgggcccagagacaccagatcttctggatttctcatgagaaattgaacatctgagcttttaaataaaatctcctgatctttaaactttc

SEQ ID NO: 377590 - DNA, 591 bp, Homo Sapiens
  misc_feature (412)..(540): n is a, c, g, or t
gtgtcctccgagtaaagaggatttcctatggccgcattccttatgacattttaaacatcataatcaattttataattgtgttagccttttccacgtctatacttatacatatgtatatgtttatatataattataaaacattatgtaatgtcaaccctccgctctagtcaaactgggttaattcattatcttccaaaaatatcttgagcctctttacagctttacacagaaaaaagaaagctcacagagttcgacacttttttaaatatgtgaatatgtcctagaattgcttctgctcctcaatacatacctaccctacccaaacatacgctcttactaaattcttacccatccttaatgtttttgcccaaattccattttttcttgagacagggtctcactcagtcacgtnnnnnnnnnnnnnnnnnnnnnnnnnnnnnnnnnnnnnnnnnnnnnnnnnnnnnnnnnnnnnnnnnnnnnnnnnnnnnnnnnnnnnnnnnnnnnnnnnnnnnnnnnnnnnnnnnnnnnnnnnnnnnnnnngccatgttatccagactagtcctggacttgtctggatcacacgttcgcgag

SEQ ID NO: 377591 - DNA, 491 bp, Homo Sapiens
tcgcgaacgtgtcctccgatgtaccttcctttcatggggataggataactcgaatcttccttctgacttttattgtccaagaaatattttctacactctctatttctatatcagttattggcagttatatctgcaaacccatgagggttttctggattcagataacacacatcatttgtggaatatgaggaatttaaggagactcgagggtgggcaaagatttgaataaacatcagaacgaggatgattatttgtgaaacagacctttgagaattgagttccaagagcaacagacctttcgatgagaaccaaaaaattcattctgtagctcagaaaattcctaacttcatttcttcaggataaacatgtcattataccaaatagcaatctcagtgtgttaaaatctacctatgcactgtgtcccacagacatcgtcagatgccagctctcctggtgttgcagtgtgctccggggtccgagacgatggacac

SEQ ID NO: 377592 - DNA, 130 bp, Homo Sapiens
cccctcgcgaacgtgtaatccagacaagtccaggactagtctggataacatggcaaaaccggtctttacaaaagatacgaaaattaggtgactatggtgctgcatgactttagtccaagcttctcgggag

SEQ ID NO: 377593 - DNA, 565 bp, Homo Sapiens
aagtgtgtcgtcgatcgcgtatgataaggagagtggaagagttttggagagacagataaagttctgccctcagtacctatagctctagacgctgaagaattctcatacctttcgctttatcactgcaaaagggcctttattaactttttaaacttgtatatccattcatcatgtcacctgcaaatattttatcataatattttatattactttattgtaaagattttgaaaacatatttttaagggcagcatttgttcctctaaagattataagatgtaatttgtctgctttcccaaggaaaagcattttcctttgtaaaaatcaccttacattgatgatttcttggatctcacactctattgtagtatttctgtagcgaaacaattataacatggtggagagtatactataataaagttatgtataaagtctcatgggaacagatgtaagaaaaattaactgcctaggcagtttctgaggaaagataaagaaaatagagccgacatttgtctcgtggatgaaaaaagagtaagtaggcatggaccaggataacacgttcgcgag

SEQ ID NO: 377594 - DNA, 326 bp, Homo Sapiens
  misc_feature (26)..(26): n is a, c, g, or t
  misc_feature (33)..(33): n is a, c, g, or t
tgggctgcttgtgcagttggtaaaanggtttantgtcgacacactgtcgggaataatcatttgtaaaacagtcctttgttttgtgaaaagcggttctgttccatgctaacacactgttgcacatcgtgttaactgccaggacagatcgatctcacaatgctgctgcttaacattcatgaaaaaggcaaaagcaattttctgaagcctttggattcaggacattagctcactatagcggcaggattgcaccttaggaggccatgttgtctcttacgaaacacaatcaaaaaagtgtcttcaggattaaaataaatgttaaaatacta

SEQ ID NO: 377595 - DNA, 618 bp, Homo Sapiens
cagggcgatatgagatgtgcgttccgggagaaggctttcagattcaccacactcataaggtttctctccgtgtatgtgtccgctgatgggatgtgagctgtgactttagggagaaggctttcccacactggctacaattataaggtttttctcctgtatgagttctgtgatgtgtaataaactgagacttctggggaaaggttttgccacaattaccacagccaaaggctatgtctcttatatgtctgctctgatgtttaatgagacttggtttcttactgaagcgcttcctacattcactgcattcatagagtttctcccctaaacgatttctatgatatatgataatctgtgactttttatagctctctttatatttatcacagtcatagtattttaaccaggtatcagtatcctcaggcttggaatggagaaaaaaattatcaaacacattaaagtcatctgattctgcttttccataatctcctttgggaataagcaaatctaaatgatgttttaaaatcaatccatctaagtcaccttcactgtttgatttccttaaaggaacaaagttcatgttcagattgaattttttccaaatgcatcacattcatgacc

SEQ ID NO: 377596 - DNA, 668 bp, Homo Sapiens
  misc_feature (589)..(608): n is a, c, g, or t
caccacagagcacatacccgggatcttgaaaataattccatgcatgtgggactttcagaagctctccatgtctgcccagaagggccccacaatatactggggggactttgtatgtggctcagcatggagcaggggcaggattttcagtcccactcactcccttggccaagtgcccttgtgcagtgaacaaactgcgcaaccatgctgggcagaagcattttatatcagtccccttcggacttagtctcacaggcatcatttgaagggggaatgggagatgaaagtggttcctccgttttcctagatactttattcctataagttggatcacctcaagcaaatgccgtgagtgcagctagcccaagttctctatctcacagtcttcatatggctggctgtcgctgatgagtgagtgagctacgaaatcagcttaaagcacaacatgttatttttgaatttgaataaaataggaaaaggcagagtgcattgtgtgaccatggggtaagtaagacactctccctttctccttctcagttttcctgtcataaaaggacaaactactatctaaggtctccgtagttaaaattcnnnnnnnnnnnnnnnnnnnnatttgagacagtttggctcactccagcctggcaacaagagggaaatccgtctcaaaagag

SEQ ID NO: 377597 - DNA, 429 bp, Homo Sapiens
ctcggtaccctcggtctaccttgtctgtgtgtccacagacaaggtgggttgtctgttgaggtatttaggtattagacaagtagctgggtctcagacttacacagtgggcattacaaggtggatgtatatgtcttccccttattaatgcgtgatggtgacctagggaagatgctggagataggaaggtgaaccatcaaggatagcctagccacctggccctctttagcggcatttatgttctccagtgggatgagcagtcagtgcagtttaacaaacatttaccagactctactaagtagtaccagacactgatttcaaaacatgacacagagggaggcatgggtttagtaaacgtttattgaacacctactataatgatgctacagtgatcaagaccaacataatctctttagacaaggtagagccgag

SEQ ID NO: 377598 - DNA, 454 bp, Homo Sapiens
atcccccacacacgtcgctcacccgattcaatgaaccatatccacgcaaacacaggcatgcacacaaaaggcagcgctgggaagggaggtctttaacactagtttgcactaggtccatctcccacccctccctccagggcgagttcgcagacgtgacgtgtttgaatggagatgaccctgacaatattgctttctttccggtagagtcctccagagtggatccaagtcccgtgccttattttcttcctaggaagacccccaggccaacacccaccaaagaaggctctggagggagaaggcaggtcagagactggtcactgtcctatacaggaagtacatgcttcagcctaatgacatcacaggacgtgacctctaggcatcaccggaagtacaccttcccatgatatctccaaagtgaccttcaaggaagaactcaatgacacctggcttgtca

SEQ ID NO: 377599 - DNA, 550 bp, Homo Sapiens
cgtcatgcagtgtggacctgtcattactttgcacgctctgtagtgagcttagtctggtgtctcgctaaactacactgtaactctatagagtgcagagactctgccataacctggaaccctagcatgcagtatactttccagtacacaacaacttataatttaaccttaggtgacggaatactcttagctttttaaaagtcatcaagaaggagaaaatgcttaataaaatgaatgaaaaatcaaagtcatgattaaaattacttaaataggcacaggtagtatcacacactaaacggctaaatctatgatacttaccatgagccagttcatgtacttagttcatgaactcagtcacaacttagaggtaatactattattacctacatattacagataagaaagctgaggggcagaacctccatgaagaggttcagggaagacccaaaactctaagtttggtcttaaaagagaaaaatgaggtgagagaagaggggggaagtatcgcaagagacttagctggtgaaacagtatctgcgacgaaggcaaggac

SEQ ID NO: 377600 - DNA, 466 bp, Homo Sapiens
ctcggctctaccttgtctgttaaacccaccctagttagtttaacagacagatactttatttaaacttttaggtagcttacagaatatttcagagagctagataagcaggcttgaatgatgctagggtaaacagcccaatcactccaaagaactgttgcaatggaactatcattgctaagttaatggctggagacattgccccttgcttcgtccatcctgaatagtaaaacttaacctccagaagtgctacttcaagaaacatatctgcaacatccgtttcaaaaaccataacaaaagtaatagttccttcttatgttcattgagaggacttactgcttgaaccaagtcgctttgtctcaactaatgattaggcgtgtatagacgattctatgccttgtgtcattttccgactttatctcgtccccatggaattgcccgaagaggtaaacgtgggccagttagacac

SEQ ID NO: 377601 - DNA, 250 bp, Homo Sapiens
cgcggctctaccttgtctcattaagatgagacaagggtgtggtttataagttgcctgaattctggagacggctactaatcatgccacataacgtgattaagtgccctgtctttacactatcatttgttatttgatggacttgatactcggaaaagcagggcgaagtttccaaggcatgtgtttgaaatggtaggggaggtgcatgcacacggctctcctggctgtgctgtaactgcttttgaaagactag

SEQ ID NO: 377602 - DNA, 297 bp, Homo Sapiens
tagttgacagattaatgaaataacagaagtgatgtcatgcatggctcagtggccttgcctctcctccctgaatccaagaatctatgttctcagccccaggacaacacacaatttaaaacctgttctacaatgccacctccctatctgttgctagaagcctgctcccagcagttatgtgggccatccccctgcctctgcatgagatcccctctctttagcccagcctactctgccttatccccactctccctttcccaaactcagggaaagagagagtggagacaaggtagagccgag

SEQ ID NO: 377603 - DNA, 358 bp, Homo Sapiens
acgtctggcggcggtctgagctcctgacctgacgagatctgcactgggctcccagagtgctgggattacaggacttagtcagtgtgcccggccaagattttcaaaggaagcagggaactaggttttaaagaccttattcttaaggaggaaaaccaggacattaggaaatcaagataagagatcgtggcaagacactgaaaactgtccttggatttagcaatatggaagtcatcggtgactatagcaagggtaatatcggtggaatgatgagggcagaagcctgagtttagcaatatggaggtcatagctgacttcaacccctcttccctttctgccatgagtggaaggaagcagccag

SEQ ID NO: 377604 - DNA, 462 bp, Homo Sapiens
  misc_feature (13)..(13): n is a, c, g, or t
  misc_feature (41)..(41): n is a, c, g, or t
  misc_feature (63)..(63): n is a, c, g, or t
  misc_feature (81)..(81): n is a, c, g, or t
ccaaccccggccntatgttacaaatgttttcccagtggttnccctaagaagaagtcctgaaanggtcccttgaaaaattancccccggatcaaatgcctattgcagacaaagcccaataaaaagttggacctcctttggggataacaagttttggaagagaaatgcaggcccatatgtgccgcatgacccgagattttgaaaaaagatgtacatagtgacatgtttggtgccatggtttttgaggagggcttttgtcaaaaaggaggtataacctttcccccacagacctgagagctgtgccttttctatgcaatattacagacgttacatcggaacccagatggctgtattcacatgtaggtttgggctgtaatctaaacaattggacagattaaatgtacatggaaatgagcagtcttacttttgtagttttatattatacaataaacagttaaaagatg

SEQ ID NO: 377605 - DNA, 229 bp, Homo Sapiens
ctgcaacccactgatagtctctgctaactagcttaattgacctttttacaaagtttgatccccaagcatcctcaactaaatcattgaatacttcaatcaggatattatctgctttactgtacaaataaaaccaaatcttttgtcaacaggatgaaacccatcttaaaggaaagaaaaggaattggtgtgaagagagaagttagagaagggaaatgcagtgaattactat

SEQ ID NO: 377606 - DNA, 615 bp, Homo Sapiens
ggtttttttctgaaactgaatttataacctatttctctgtatacatatatttttaaaatcttctgaaaggaactatgttccctgctgcttcttccctttctgaagtgaatatgatcttttcatggtcattgcctagataaaagtagagccttttcaatcttagatggaagataattcattttcccacacagaaaaaaaatctgacctttacatgatttaatctgaagggctagaattttttaatttctagcccctcctccaaaaaaattttaaacacatcacatactctgaaaagtcagatttcaaatgcaagactagactttatatggaacatatatgttgggttttgattttgggtagcaattgacatatatttttctcaaaacaagttgaattttgttaacatatataattctttagtgaatttataaattaggacccctgagaagaagccctgttgtttttcttaagagtctaaaactgacaatcttttaaaaatcataatacttttctagtaattgcatcagggaattggtgataattgaagaaagatccatttcttaagaataatttgatctaaattattatatggaaataaacatacttgtgctaact

SEQ ID NO: 377607 - DNA, 526 bp, Homo Sapiens
aactatgtacctcatctgtgtctcagttacaaaagaaactttgcctatgtaggcgtggaagggttaaattaaataatgcatataaatggcttataaaattatatggtcaaaggaattacattctaatttttgaaattttttcaaaggaaagtctcagtactaatgcccaatctactgggtgaaacaaaagagattccaggtataccttcccctttcccaaaaaaagataatcaaaagcaaaacatagtagcttatcccttgtcctgatacaagcaagctaataaaatcttgtgtactttagggcaggtagtgccaactcacatacatggtttaactgaagtgtttcactgaagttagctgatcaagagccactttgcacttgaccaatctttaagtgctgctatgcctggaccaaatgtgacttcagccaggagaaaccaggccttagaatctaggagccattaggtcaagatgtctccagtggtgggtggggcagcagaagggtgatggttgatggagcaggtgt

SEQ ID NO: 377608 - DNA, 579 bp, Homo Sapiens
  misc_feature (289)..(339): n is a, c, g, or t
ggaggggcctgtgctctcaatcgcacttgctcttgtgcttctctttgctgcagctaaccatcctcttgcccctgccccaaagtgacccatgagccagaagtcaggagtgaaggggggcactgtgacatcagaagttgccatgcaccccctcctgaatcttctgccctgctctcttcctcctctgcaggctcagcggtcaccagcaatgcagtcctcaaacacggacattagagtgattattcccacccccaagagtgaacacctactatgtgctggaccctagaccaannnnnnnnnnnnnnnnnnnnnnnnnnnnnnnnnnnnnnnnnnnnnnnnnnncccaacatgcatgacctcatttgagatctctgatcatttcaacaagcagttactctggcccagacgcagccaactacagagatagacaagacctgtggtctctttccttagtgccagaatctcctagaaggtctattaagacagattgctgggtcccactcccagggtctctgattcagtatatgtggggtggggcccaagaacttgcctttctaaagacaaggtagagccgagggggat

SEQ ID NO: 377609 - DNA, 705 bp, Homo Sapiens
gatacgaatcgagctcgtgtaccggatgagtaaatctggctgagggatgggctggtacggagagtccaagatagtcttcagttcagcttattggataaggccttgagggaaatgataagaaggcagggttcagctaggatgtcaacaggaatgccaatgtgtggcttctccagcacaatggcctcaggtagtcagattggcttccctcagaacaaatgtctcaaagtaactaaggggaagctgcttctgaccaagcctcagaagtcacttggaatagcttccaccacattttattgttcatgcaagtcttacggccagctcagatttaaagggagagaaactagactgcatttatcttggtagagaaacggcaagatcacattgtataacagcatgtgagatggcaatactattgtgactctctttgaaaaaataccattttccacaccctcacaatctaccctgcccctaagaaagtaaacctggccaggatgtatctgaagagtactgagaaattgcagcagacatctctatcttttgtactttccttatctccctcttttacactctgccttcttccaccttttcactttattttcttacttccctttctttcccccagtcttttagttaactaaactcacaaggacatatcttagtgtgttctccccatctctcctaacatctgtaatctttggcagatta

SEQ ID NO: 377610 - DNA, 589 bp, Homo Sapiens
  misc_feature (199)..(199): n is a, c, g, or t
ttcttatgatagagaagaggaagaatagataatgaaaatagtaagttaactcaaaccacgtgtatttggctttaaagttagtttcatgattttgagaaacagctgtactttttaaattagatatattcagaaaatcattaatatagctttattccttaagcttataacaaattttatcaaggggcttcaggcgagaatngtgagaagaggctagaatgatccactgagaatgctttcaatcaactgttttattctgtagtcttgcaattaaacactacattctgtacccacactagcatctctatgaagtttcagtgtgttttcaataagcctttctgcaagtgaggcagtaaaacatagcacagtattgtttctagctttggtttatatttggaataagatattaaatgtccagagcaaaacctatagccatctgcgtaaaatgaatgtttatactttacttctctgaggtcactttttctctcactctctattcccaaaagatcatgattcactatattgagatgcctagaattatcaggtcagagtgcttaattggccaagatttactcactcggggatcctctag

SEQ ID NO: 377611 - DNA, 644 bp, Homo Sapiens
atgagtaaatctgggccgatgagtaaatctggcgatgagtaaatcgtggcatggatatgctgatgtgcacgaaatggcacttagaaaataatgctccgatatctcatcgacaatcaaagaactttggaaaatgacatcagtcctccatgggaattctccaaagactttaaaatattaatttctacaacatccttatttcccaaagtagcatacttcctttcccacgtcaggagtacttcccactaatcactgtggtcttatagccttgctcagacacatggaaaatgatttgttgactgctttctacctaagttaaaacaaaactttaactatatcttttccactaacagtatttctcattactattgcaaagtattaatggataactatatctccaataaatgcagcctcctagctaatttcatttctttttagtttcctcttcgatgttgagttacttcttagttttataagtggatttcgtcagtgcatctcttctcatcattcattctattatgatattacctattttttaggggcagtttggaaagcatgtatctcaatccttgattaatatatatattaatgtcatgtattcatttccttgtatttctgaaccctactcccacattagaatcactggg

SEQ ID NO: 377612 - DNA, 614 bp, Homo Sapiens
atgagtaatcttggctcgatgagtaaatcttggcccgatgagtatatcttggctcgatgagtaaatcttggctcgatgagtaaatcttggcagtatgataaatgttgcctgtgtcagttaactttcagaatttaccgtgtgtgtgaaatactcatattcattataaataaatggattaatctctatggccctttggctacataaaacccaaaaatctgccatgtgctcagagttcagaaaaagctattcttgtgtggtaatcttttaacaatcaggtttttaatactctcctttaacacaagactgctaaatgatcagcttctcaaattagtgtatcataacgcatgacagaaaatcattaaatggaatcactaatgaggaaaggcattgctgatttttataccttaatcacttgacattgttcatctttataagagggctaaatattacttactacctctgactaggaagactgttaagatggtataacggtgcagatatgcgagaaattctgtccaattacagaacttatctacattacttacaacatatgggccaggcgtggtggctcaagcctggccacgatttactccatcgggggctcctctagagtc

SEQ ID NO: 377613 - DNA, 627 bp, Homo Sapiens
gcgactctagaggaccccagcggggaacaatcacttcttgctgtcctctgtgctgtgctgaggaatccaacctctctcttaagtgacgagtgcaagagagaaataggattatttgtgttttggaaaaaaaccttagttcattgtagagggcggacagcaagaagtgatgaggacctttaagaccacggtagtggaatttgagaggcaagagcagatttgagaactattaagaagacagactcatcagccctgtatacatgattgtgtaatggaacagaggaatgagggacctatgtaagataacgtggagttctggggtgggtggctaggtggctcatggtaccattcaccaagatgggaagtgcagaacaggcttggttagaaagaaaatgagttcagttttgcacttacttaatcctggcagacaagcaggtataaaatgggttgagctggaagacaggtcttggctatagcttagggagattttatcatattgcttatagctcaagcaatgggtatggatgaggtaacacaggcacgatgtaaaaatgagaacaatcaaaataaaataataaaagtgatagttccccgtctaagtgattgttccccgctaagtgatttcccgct

SEQ ID NO: 377614 - DNA, 582 bp, Homo Sapiens
ctagaggatccccagcggggaacaatcacttcagccacatccgtccatgtggttgcagtgattgaacccatcattcagcatgccgactggttcttccctgaagaggtggaatttaatgtatcagaagcatttgtacctctcaccaccccgagttctaatcactcattccacactggaaacgactctgactcggggaccctggagaggaagcggcctgctagcatggcggtgatggaaggagacttggtgaagaaggaaaggtatgatttgaccgttcacttccaaaccagcagtaaatatgttgttagacccgtggtatctggtatcgctcagtggacttgggatttgagagtggtcgccatccacccatgactgatggtgtccagatagtttctggaattctgctgtaggtcattccaagcactaatctcaccataaagtcagtgtgtagcttctcagttaacgtttcttccacgtgtattccagcttaacttggtggtgtgcttggtaagccctgcagtggaacggcatcatacacatgttaaaagtgattgttccccgctgggatccttagacgaaacg

SEQ ID NO: 377615 - DNA, 286 bp, Homo Sapiens
  misc_feature (55)..(70): n is a, c, g, or t
ttttgagaaaaaacactggccacacatgccttagaccccttattccggaattttnnnnnnnnnnnnnnnncaacaaaagaatagatccagaagacacaccgatgggatcggcaactggatggatgtgttccaaatcccctggacttacacttctggaggggcctttttacaacagtaaatctttagatatgaaagaaaagaaaaatcacttctattttatatttttgagccaaatttaaataaaggcattaaatataaaatagaagtgattgtcccctgggtatcg

SEQ ID NO: 377616 - DNA, 423 bp, Homo Sapiens
gctataagcgcgtctgcgtctggtgttgacgtgcacgtgtaagctctctgcgtccgggtctctgagatgcaccgtgtgaagcgctctgcatactggtgtctgacacgcaccgtgtgaagctctctgcgtcctggtgtctgacacgcaccgtgtgaagctctctgcctgcctggtgtctgatatacaccgtgtgaagcactgcgcatcctggtgtctgatatgcaccgtgtgaagctctctgcgtgctggtgcctgatatgcaccgtgtgaagcgctctgcatcctggtgtctgaaatgcaccgtgtcaagcgctctgcatcctggtgtctgaaatgcaccgtgtcaagctctctgcgtcctggtgtctgaaatacacagtgtgaagcgctctgcgtcctgctgtctgatatgcactgtgtgca

SEQ ID NO: 377617 - DNA, 360 bp, Homo Sapiens
tgcactcaccctagatcgtggaactataattaccccacactccctaattcttcctggatgtctgtgacagagagtgtctgcagctatctccacaccatccccaacctcaaggggggcttacatcattagcccaagtgaaatgtagggaaggggaaggagcaggagccatgcaggagtttcctttggccacacctttctcctcagggaggtggcgccacctccatggctcaggttccaagatgtaacattcacttggcctaggcacaggcaggtgaccaggcaaaggtcagcaccaatggtcccaaagagccggttgccacccacttacctagtgcccacaccaagtgattgttccccgct

SEQ ID NO: 377618 - DNA, 582 bp, Homo Sapiens
tggtccttagctgagtggaggcaggcaaatatagaatgcaaaaagttccttgggtgattctcatgtattcacaaatatacacacctgtaaagaattacatgacacctgccagagttatctttccataatgcagatttgtacctgcagttgtgtgctggtaagtgttggacccccagatctctatgggtgtgggagggaagccctgatctgtaatgtttgccaatgcctgtggtataaatactcccatgatgcgcaagtcaaatgatgtcaactgtcttgcaacattctccaaaacttaccagttggatccaacacacctgtaactctgcatcacttctctgttcagtcctgaaaaaccttcaactgtttctgccttgcacaaaggctaagagccaaatgtttcagcacagaccagggtggtggcagtggaggtgatgggaagtagttggattctggatatattttgaaggtacagccaatgagatctgttgatggttcggatgtgggatagaatcatggattacttcaagatttttggcttgagcaactggaatgatggaattgtaatttactgaagtgtga

SEQ ID NO: 377619 - DNA, 425 bp, Homo Sapiens
agcggggacaatcacttcaacacctttagtgttgaactcattgggctatgggggatcacggcattgtctaataccaaaagaactttgagaggcagtcccttattggcaaggtacttccttagggaacaaagcattgatggaaccaatcaagataaagggttctcattgtccagactttcttttgtaaaatgaaaagactggcagctggtgtttatcttttccttccaaggctcaggggttagcagctttatagataagggcagtcctaatcataaacccaaactgcatttgcacacaatggtacaattctatccttctatcccttcttgccttaaatcctggggcttgcttcattactaattaatgttccttgtggcattttttccagaataaggcccttttgtccacattaaaaacctattcag

SEQ ID NO: 377620 - DNA, 430 bp, Homo Sapiens
gggaaattaagtaacttgaaaagattaagtgattaatattcctgtggctgtgtcagggatccccgagccttctctcaggcttgatgattcactaaaaggactcagaagagctgttatagtcacagctgtgtttttactgcaaaaaggatacagattaaaattagcagagggaagggtgcatggagggaagtccagaggaaactaggcacacgcttgggtgtctctccccagtggcgtcacgtggatgtgcttagctctcccagcaatagtgtcacatcatgtgtgaagaatggttaaccaggccagcgcacctgagcctcgagtctagagatttggtggggggccagtcacatacgcaggcagtgcccctgtgactgacctcactcaggctccagtgccccagtgcaaaaacaagtgattgttccccgct

SEQ ID NO: 377621 - DNA, 401 bp, Homo Sapiens
aaatcctgaattaagggtcttaggcatggctgccatgtttttctcagaaaacacgttaacattgagcagtccatggtttttcattgtcattgcctagcagcctatgcttgcttgcctgaacatctggagacttaccccatccatatgaggagatgagcacagagcatggatgaatcttctgcagagataccctgaattgcatggcctggcttgggtaaaagtcagcatggtgggggatctagaggtccatttctggtccacagggtcccagggtgctcccttcctttcaaccaaatatttattcagccagcgtttattgggcacctgtgtgctgagtatgtagagacaattttttaaaaggataaaaatttccagatcaaagtgatgtaccgctgtaccgg

SEQ ID NO: 377622 - DNA, 217 bp, Homo Sapiens
aacagatttttaaatgtgcatgctttgagccccagtgtttccctactagggacatgtgaacacttaggttgcttttgactttttacaattaaaaatgaattattctgcgcttcagtgaatatcctgatcatacatccttgttcacatgtccctagaagggaaacactggggctcaaagcatgcacatttaaaaatctgttttggccaggcatggtgg

SEQ ID NO: 377623 - DNA, 560 bp, Homo Sapiens
gcagcgggtgaacaatcactaggtgagtctcatcacagagcctcaccataatggaaactgccgtgacttcagatgagctctcatcacagagccctttaagcagccagggttggtgggacttggtgaaaacatccaggggagaactgacctaaggacttggacagggggtggctgtggccattttgtctctccctcagaggtggtttcgaatgtggaatggaggagtctacccctgggtaaataaatatacataggtatgtcatatgtatctgtatttatatttattggcctttctcagggctgttgactcacaggaaatcaggagctggagaggcagcagttttggtgagggaggttgagggtggaggtgagatgagggtagactgaccaggctacttagacttctccaccgtctccctcatcccacattattttcttccctgggtccatgacccccaaccctccatcctcaaggaaacttgagcctgtctttgccttgctttgaagcctgagcaacgggctccccatgggtcatggctgtacgggaaaatggggtttga

SEQ ID NO: 377624 - DNA, 207 bp, Homo Sapiens
aacagcgggtgcatcacttgaactcctgagttcaagtgatccaccctcctcagcctcccaaagtgcttgggattacaggcgtgagtcaccacacccgcctgctcaacttttttaaattgtattttttaatagctttattaaatgtagttcacttatcatgtaatttacccctttcacaagtctgcaattaagtgattgttccccgct

SEQ ID NO: 377625 - DNA, 270 bp, Homo Sapiens
catctcagtctgatcttctgtaaactgtggatgaattttataataagctgcctgatttggtattgtaagaatcaaataagtgaatgcatctactcaaatatgataagacaagatttagtggtacttagtaagattaaattagtcctaggtaatgatattttaaagaaaactcatctgtatgcaaatcttctaaataaaatttctagcaaaactaatccagttatgagaaaaaatagtgccctatgaacagttttactttaggattgcaag

SEQ ID NO: 377626 - DNA, 727 bp, Homo Sapiens
acgctctctctgtggggcagcccagagtgaaagggcactgtctacctgtcacagggcaccaagtgaaagccaagagccctcacttttgagggtgagggacagcacagcagaggtgtggcttctggatgcaagcagccatagctgtgtgaccttggacaggtggctcagcctctctggacctctgctaagcaacagggctggacaggacacactctcagggcctctcggcttgggaaaactgcattgactccaggactccaggcgagggaagatgcacccgactctaactaataccccctctccctcctcgggctgaggcctctgccattctcccaaaagtatgcaatcaggcccgcggtgggcctcccagccatgccggcctcctcatatgcaatatttcttctggcttctcatggggatggttcatccccgacttgaaatttcctgacacctttccccagagagcgccctgcctgcctatgcattttgggaacagcccctgtgacatgtccccttccacctgccctctcccccaaagctgtatttttctctggctgagattagaacacattccttgtaaagtatttttctacatcgggttttcttagggctctcgggaagcacaaggggctgtattgcaaaggccgcttatggtctgtttggggccctcgtctaagtctttgtcccaccaggggttgcagtggcttgggggtaggtgccatgggga

SEQ ID NO: 377627 - DNA, 477 bp, Homo Sapiens
  misc_feature (30)..(30): n is a, c, g, or t
  misc_feature (69)..(69): n is a, c, g, or t
  misc_feature (92)..(92): n is a, c, g, or t
  misc_feature (162)..(162): n is a, c, g, or t
  misc_feature (169)..(169): n is a, c, g, or t
aagacctctgcccaaactccccaaaaattngccaaaacaagcccgcgggtgggccctcccccaagccangcccggccctccctcaataatgncaaatatttccttcctggccttcctccatggggatggttccatcccccgaacttgaaaatttccctgaanacctttncccccagtgaagcgccctgccctgccctatgcattttgggaacagcccctgtgacatgtccccttccacctgccctctcccccaaagctgtatttttcccctggctgagattagaacacattcccttgtaaagtatttttctacatcgggttttcttagggctctcgggaagcacaaggggctgtattgcaaaggccgcttatggtctgtttggggccctcgtctaagtctttgtcccaccaggggttgcagtggcttgggggtaggtgccatggggatgattttttaaaataaaattatttaaatcc

SEQ ID NO: 377628 - DNA, 707 bp, Homo Sapiens
  misc_feature (16)..(16): n is a, c, g, or t
  misc_feature (562)..(563): n is a, c, g, or t
  misc_feature (621)..(622): n is a, c, g, or t
  misc_feature (632)..(633): n is a, c, g, or t
  misc_feature (660)..(661): n is a, c, g, or t
  misc_feature (670)..(671): n is a, c, g, or t
gcctcaggaagtgggnatgcgggcaattcctcaggtgatggtgacaggcgtgatgcctcagatgctggggacgtgggtgattcctcagctgctgggaacaggggtgactcctcaggtgggggcagcagtggcatctcctcgtttaggggggcctccaactggggctcaagttggacccctgctttccctagtggtttggcttcacattgcaggggacctggttccttgggttgcatagaggtcacgtgcccaccctttggctgcccttggcatgcaacgtacagagcatcgggctcgtcagtgggggtatcgccaggctctgggggtgaaaatctgctacacaccggggtatgctgctcagcaacggagcggatagtctgacctacctgggcgttgtgacagcggtgacagagagagtagttctcaaaccactccgagttgggattcagttctgctgagcccgccccacaggcccggcacacccggcacgccttgcacttccaagcagtgagcacggctgttcctccatgggctggttttacggcagaagagtactggtatnncctttgtcacaacgtctcagcaatagcaaacaatcttagagtcattcccagggtttcnnctgcaggctnntggcacactttgggcattcagggcacnntgccagccnnagcacgtttgggcgggcagtcagaaaagcagtgtcc

SEQ ID NO: 377629 - DNA, 811 bp, Homo Sapiens
  misc_feature (658)..(744): n is a, c, g, or t
gtacgacgctctctctgtgggggcggtctgagcctggtaggatgtttagcatcctggcttctacccactggatgccaggagcacccccccgtcaagttgtgacaaccacagatgtctccagagattacagatgttccctggtgggcagttgagaaccactgctctgaatggttattgtccccgagacgatgttctgttcctcacagtctcctgcacagctaccttgacggggcgatcacctgcactattttaaaccatctctctcagatttcaccaggatgcaagtcatttcatcagtgggaaactcaccagggtgacctgcctcaagtgctacacagggagggacagtctgaatttcccccagtctttagccctgtcgctgtggaggggagggggtagcagggacaggactgctaggacaccttgctcagccacagccccacttgtaaccgcgctggcgattgtgacacttgtagagcaaggaaatcagcagctcatggaatgtgaaggagcacctttgtccccacagagatttagataaaggttcaaggtgaggctaccctcccctccctgaggctgattttggtgagaggtgtggtcatcttgtagtatcaagactacaggcatgggcttgagaattaggaggagcctgagtgannnnnnnnnnnnnnnnnnnnnnnnnnnnnnnnnnnnnnnnnnnnnnnnnnnnnnnnnnnnnnnnnnnnnnnnnnnnnnnnnnnnnnncctcccatatatcttccagggcacttatcggccttggtaatggatattaaggccactggctttggaa

SEQ ID NO: 377630 - DNA, 444 bp, Homo Sapiens
agcggggaacaatcactttcccaacttctttactcttaccaatcctcctgagctctacttggttaattcctattgatcaacaaggttgtgaacctacatctgaggtccagttcacactaaaattaatctctcccttgcaaatactcaataaccatgatttgttccctgtgcctttattttacaaaactataacatcacttgaaaaattttccatgacaatctttatcctacctcctattaaaactttacattagaacttagtactatttgcactattatttagtttaaggatatttagtggttatattctgattagtcatgagactagcagcataaaaaacattttttacagtcaactgcttcttaatatactgtcatcccttcacgaagtctcaatttagctctcagtggctgctgttgtaagcgctgtgtgccagaatcagc

SEQ ID NO: 377631 - DNA, 450 bp, Homo Sapiens
  misc_feature (122)..(255): n is a, c, g, or t
  misc_feature (272)..(380): n is a, c, g, or t
agcggggaacaatcacttcatcaaaatagataacaaatacccacatggaaagatgcttaatagcattggctgttagagaaatgcaaattaaaacctcaatttattaaggatgaggctgggcnnnnnnnnnnnnnnnnnnnnnnnnnnnnnnnnnnnnnnnnnnnnnnnnnnnnnnnnnnnnnnnnnnnnnnnnnnnnnnnnnnnnnnnnnnnnnnnnnnnnnnnnnnnnnnnnnnnnnnnnnnnnnnnnnnnnnngcgtggtggctcacacnnnnnnnnnnnnnnnnnnnnnnnnnnnnnnnnnnnnnnnnnnnnnnnnnnnnnnnnnnnnnnnnnnnnnnnnnnnnnnnnnnnnnnnnnnnnnnnnnnnnnnnnnnnnnttagctgggcgtggtggcagctgcctgtaatcccagctactgggagtctgaggcaggatatctctgaacc

SEQ ID NO: 377632 - DNA, 307 bp, Homo Sapiens
  misc_feature (252)..(252): n is a, c, g, or t
  misc_feature (295)..(295): n is a, c, g, or t
cctggctcctgtgattcttccctgaaggtgccccacctcctgagtcccccgttctgtgtgggttgagaagctctctctgggaccttggcctgtcctctccctggtcagcgtgtcagggcagtgtgggtagcaggggtactaaccccaggttgaggtccttgctaaccctagtctctccccacaggctgccaccacggccccgcacccccaagccgccgacaccactgccgatccaaagccaagcgctcacgncacccagaaccctcgggctgaagcgccctgctatgtctcacanccctcacccgtg

SEQ ID NO: 377633 - DNA, 288 bp, Homo Sapiens
  misc_feature (26)..(26): n is a, c, g, or t
tcagccggtaccgacgctctctctgntggggattcccaagtttatctccagctgactctttcatgaaacaaataatatttgtttcctatggctgcataacaaattactacgcatttagcagcttaaagccactaaccaattattatgctcacagttccgcgtaagatcccagctgtatggagtgtgactgcggttcttaagctcaggtctcaaatagggcaacagtctaaggtgattggactgaggctgggcctctgtatccaggatgcctttgaaggaaggaactcc

SEQ ID NO: 377634 - DNA, 290 bp, Homo Sapiens
acgtgggggaagggcaggtgggcatttctggagcaatactgccatcaagaggaactggcttggcaatcccgcgcacccttcgcagtgctcgcctggggaggagtggcttgggactgtcctgggggaccaggcaggactagggcaggtgctcggacggatccgaggtctctggaggtccgagagaagcaggctccaccgcggggtcgggcggtgaagccccacagagagcgccagactagctgacagccagacgccgggccgttcccgagcagaagccacgcaaccacggt

SEQ ID NO: 377635 - DNA, 603 bp, Homo Sapiens
gggcggaagtgaggcgcccagcggaacggcctctggtgacattttcttgggggcggcgcggacgactgaagggacttggtggtagaggctgcggaggcggcgaggttcactttggtcccggcaggggctctgaccgcgacccactgctcgctgccggggcttgttccgaggaggagaaggcggcggtggccgtcgcgtcctgagtcaccggagcggggaagagtcccggccgggggttcggtgcgtgccccgacggggcgcgcgcgaagcgagcgagaaggcacggagtcgccgcggagcgcaggttgctttcctgttgcatctttgatatcatttcctagactctactccatgatttaacttgaaattctgaaatgaagatggaggaggcagtgggaaaagttgaagaactcattgagtccgaagccccaccaaaagcatctgaacaagagacagccaaggaggaagatggatctgtagaactggaatctcaagttcagaaagatggtgtagcggattctacagttatttcttcaatgccctacttgttgatggaactgagaagggactcttctgagtctcagttagccccacagagagcgt

SEQ ID NO: 377636 - DNA, 466 bp, Homo Sapiens
  misc_feature (105)..(114): n is a, c, g, or t
tgttcagtttcgggacgggggtcattgaggggaaaggaaaagtagagtagaaaaatgaactactttagaacaacaaggctaacaggcaaaagcaatgaatcaagnnnnnnnnnntcatgtggtattctaggctgagcacacgtttatctcccacaatgagaatccattaatgacagcaaagaggagagggaggtcagcagtagggagtttctgacacagcaaagtggatacacatgaatcctgaaaggtgacctcgcaaagtggaagccagggccctgtacaccagcaagacaggccagtggggataggagctcatctgccccctagaacactggaatggagaggctccaatggggaaccctagcagccaacctcaagaactgttgtggcccacaagagcacagggctgtaaaaagaaatccaggggcagagtggaaggcacgccatgcgtcccgaaactgagaca

SEQ ID NO: 377637 - DNA, 512 bp, Homo Sapiens
tgtctcagtttcgtagacgaacatcaaaaggatgaacagcaacagtgagtctaggaaatactattaagagttggtctggggaagactttgagacatcccgcattcttactcaacctgagtccattactgggaaaacaccctcgtggcctgccaggactctggttgacaataggcacgtatcatcgccctcagctccagtgaccaaacctctcctggcacaaggaaaaggttacagagaggaaacagtgatctgaggaccgcagggtgcatggggttaaactggagcagagagggatgggcagtggtcatggtaagcctgcggaaaagggctgagagcaaggcctccagaatgatctccatgtggttatcatatggaacccataaggcagatggggcaggtcagagaagctgaggcctgaagcaactcagtctcccccaggtgcagtgaaagcagcgtggaacagcacatagctgagaacaggacagagcagaggaacggcacagagcagggg

SEQ ID NO: 377638 - DNA, 477 bp, Homo Sapiens
ttctcagttcgggacggatgataacagatgtgctacctacatccacaaattgcatctgaacaaatgtggcacctacatccatggacggtatggatggcgtaaacagacatggcacctacgtccacagacggatggatggacgaagagacgtggcacctacatccacggacagacagaaggacaaacagacgtggcacctacatccacagatggatggataaatagacgtggcacctacatccacggatggatggatggataaacagacatggcacctacattcacggacggatggatggataaacagatgtggcacctatatccacagacggataaacagacgtggcacctacatccacggacggacgggcagataaagagacgtggcatctacatccagggaaattgtatccagcctcagaaagggaggagattcagacacacaacggcatatgggtgaagctcaaggacatgagg

SEQ ID NO: 377639 - DNA, 915 bp, Homo Sapiens
gagctcggtaccctgtctcagtttcgggacgtcaggaccgcgcacgcctcctcggagaacctggtcatgcgcgggttgagggcgcagggatcgctgtgctgcttctgcaggtcctggcagtccccgtgcagcttccaggcgttcccgaagtcctccacccggggctccgccagcccagagggggtaaggaagtcgtcgccctggttgccattgtaattcccacacaggccgcaggtcttcccggcatagacgggggacagcttcaccagcagcctcccgcggccatcccagtccatctgcaggtcctccccgtagctgaggcgcacggaggccgtcactgtatgctggatgcggaggtcacctttcaggagggggagctggacgtcctggccatccatggcaactcctgccccatgcttcagtttcacaaggctgttgtgcaggccaggcagccggacggtgacggagcgggtgcacacagcgtcgcggtcatcagcacactggacagtctcaatgacaatggagaaggagtggtcctggcaatcccgggccagcaggtactggcagatcccactgaaggtgaagtatctgttgtcaaagctcttgaagtgtgattgacctgtgacaaggcactcccctggacattcttcattgctgcagatccactggctgtttcggcaaatgcaggtgttgcagtctcgagagagggaggtgccgggagggtagcgctttccggaatgcacgcagggacactcggtgctctccacgcagaggccttcatccaggagctgtccctcagggcagctgcagccatccacgcatcgctcctgacacatttctttgatgtgcaggctctggcaggtcctggcgcaaggggacacacactgcctatactcccgtcccgaaactgagaca

SEQ ID NO: 377640 - DNA, 556 bp, Homo Sapiens
tgtctcagtttcgggacggtctgctgagattctgcaaagaggaacggcttggcaccatgtctctgctcagaccctggtcctgctagccaccccaagggtgaaggcctatctgagccaaggggagcgcttcatcaaatgggatgatgaaactacagttgcctctccagttatcctccgtgtggatcctaagggctactacttatactggacgtatcaaagtaaggagatggagtttctggatatcaccagcatccgggagtactcgacttgggaagtttgccaatgatgcccaagagccagaagctccgggacgtcttcaacatggactttcctgataacagtttcctgctgaagacactcacggtggtgtccggcccggacatggtggacctcaccttccacaacttcgtctcctacaaggagaacgtgggcaaggcctgggctgaggacgtactggccctagtcaaacatccgctgacggccaacgcctcccgcagcaccttcctggacaagatccttgtgaagctcaagatgcagctcaactctgaagggaaga

SEQ ID NO: 377641 - DNA, 534 bp, Homo Sapiens
acaacatcaatgtccaaaagagagcggcagtccgaaggctggtgggaaacgggcagctggagattgcgacaggaggctgggtgatgccagatgaggccaattcccactactttgcattgattgaccagctcatcgaaggacaccagtggctggagagaaatcttggtgcaaccccccgctctggctgggcagtggacccctttggatacagctccaccatgccttacctgctgcgccgtgccaacctcaccagcatgctgattcagagagtgcactatgccatcaagaagcactttgctgccacccacagcctagagttcatgtggaggcagacatgggccctaggtccagttacagcctcgcggtctatcagggctgcctttagcctgaacagatccttgcccccctggcgtccagaggctgcctgctggtggtgaccacgtggtatgtctcctgcagactcggactccagcacagacatcttctgtcacatgatgcccattctacagctatgacgtcccgaaactgagacag

SEQ ID NO: 377642 - DNA, 183 bp, Homo Sapiens
ggtaaatatgttaagtaactcactcaagatcagtgagtaacttaatctattggtagaccagttcaactatgagtggaacctaggaggcataagcctaaagctcaaacttaaccactaagcaagctgggatggtgagaaacaatgacttaccaaattggagatatgcgtcccgaaactgagaca

SEQ ID NO: 377643 - DNA, 489 bp, Homo Sapiens
cctccaaagccccaccccacagcttctcttcctcctccccaagacacacacagcaacgggaacgtttatgtctggctctgctcctctatccgctcccctggccaagaacaagactctgaaggcagggtctgggacggggctcttttggggaccctggggtcacccagctcagagccagggacagagaggtgatagggctcatggaacaaagtatgaaccaaggacccctcctccaggaagcctacctggctacaccgagtcccatgggctgctgaggccaaggcctgcatgggacacagctgcctgccccagccctggtggccctggagctgtgagagctgccgccaccccaagcccaagccccactccgggcctgtgggggaaggcgggcacccggctgcacagctgtcaggctgggaacagagcagccattcaggcagcccacgtgcccggcccaaaggactcctctctcgtcccgaaactgagaca

SEQ ID NO: 377644 - DNA, 389 bp, Homo Sapiens
tgtctcagtttcgggacgagagaagagcatcacagaagttgctcaggagctgacagagctggtggaacatcttgtagacattgtcagaagcctgcagaatcagaggcccctatcagaatctggaccagacaacgaactgagcatcctgggcaaggctttttcttctggggtggatctttccatggcttctccaaagctggtgacttccgacacagctgcagggaaaatcagagatattctccatgacctagaagatattcaggaaaaattacaagaaagcgtcacctggaaagaggctcctgaagcacaaatgcagggagaactcctggaagccccgtcttcctcctcatgcccattgcctgaccagagccaccctgcactcaggagag

SEQ ID NO: 377645 - DNA, 484 bp, Homo Sapiens
  misc_feature (472)..(472): n is a, c, g, or t
tgtctcagttcgggacgggactagggtgagggtgcaactttgtctccagaacctctagcaggaagagtgagccaaagtcacccttcggggtgctctgcgcagcaccgctccctcacctggcctccccatctccccactgcccgatgctcctaaaggcctttcctggaaacattttctaatccttcactctcacagccacacaatcctcagctgagggtgagctttggagaaacctgacctgaaaccagtggccaacaggtttcacttgatggcagcttcactcaactggcagtggctgccttatttagagacctgtaccaaggatccagggaaagggagggaaagggatccattagcaatgcctgccttggtcccgggaggagaagggtggcatgcgtgctggaatgcaagaccaggtgtcagctttccttcctcctttcttggggtggcaaaatggaaagccatgggcatngttgaggaaaaa

SEQ ID NO: 377646 - DNA, 487 bp, Homo Sapiens
  misc_feature (105)..(180): n is a, c, g, or t
ttgacatcacagaccaaccagaatgagaactgttgaaacctcgctcaggggaaaactcggtaatgaagacctccttgacacaaagctcaggggatcaaggtcaannnnnnnnnnnnnnnnnnnnnnnnnnnnnnnnnnnnnnnnnnnnnnnnnnnnnnnnnnnnnnnnnnnnnnnnnnnnaagctgcctttccctaagcaaaggcttggaaagcaccaaagcctcctaaagtcctcaacaactggggctaaggcccacaacctccaatgcaaaaagacaacggcccctggaagaaaaggaaaactttcatgccaggggagagatgtgcagtgaaggaagaagggtctgcagcctgcacaactcagacatgcttcacgtggtctcagccagtcagccttgggaaatgtacccccatgctgtggcatctacaatcgcctcctgttctactctcgtcccgaaactgagacaggggatcctcagagcgacg

SEQ ID NO: 377647 - DNA, 158 bp, Homo Sapiens
atgagccaccatacccagctggaaataatatttgaatgaactctaaaggaggaaaggagttaactgattgaaaatgaaaggaaaacccttctaggtaaagcagccagcaactgcaaaggccctaaaaggggaacattgtgcgtcccgaaactgagaca

SEQ ID NO: 377648 - DNA, 452 bp, Homo Sapiens
gaggctggaagaacacactagatggggcagggactggggcctaaaagcagacctggagcggggtgtggatggcaggcatgaggggagaggtggccccagcattcagccccagggaggggatgacgcctcctccggctgggggaccttccttgcaagtccacgccaagtctgatttcttcatgaggggcccaggcctcccacctacgtgctgggaaaggccagggaacacctcatcctgtcctccaagagtctgctggatgcctcagagacacaaataaatcccaggcagaggcccaaagtgcagacactcctcctgccatatagccccaccgccctaggcctcagccctggaacaatggagctggcacagtggaccacgacggaagagagccactggacttgtctgtgcactcaggtgtacccgttctttctggcgtcccgaaactgagaca

SEQ ID NO: 377649 - DNA, 686 bp, Homo Sapiens
  misc_feature (498)..(498): n is a, c, g, or t
gggtctgtgaaaatgcctatgacaaggcctggctgagttgatgggagtttatccagacttcacacagctaccggcagtttcccagaagacatcctgtctgctagccctcacaagaagggtgtagacatgtgcaggctggccaggcagaatggctctcactgtggctcgctttgggaatatgccggcccagcaaagcagctgtgcctctttgtggtcacaagacagagccaatggtggcagcatcagtgttgcccttcctaatgcaaagtgcaaactgcagaggtcctccctcctccacccacctgcccactcctcccggctgccatcagacagtccccactatccacacccatctcaaagctgccctggcctcccccacctctcacctgtggagttactaggaaccccattcagcctagtgataaagggccaaatggcttacactgccagcatggtagcagttgtccacaacctggacaattatggaccccaaattcncccgggtaatttcggaggttttactttggccaggagtcacttatcctgaggaagtagcctctgatgccttgatatcaaagaccacgcagtggccacatacacacagctttttgcgtcctgcatccccttaggtcttatttataatttggtatcttatcaccagaaagaatccgtcccgaactgagaca

SEQ ID NO: 377650 - DNA, 419 bp, Homo Sapiens
cagagccaaggaacagcacagagcaggggaacaacacagagcagggagcggcacagagcagggaacggcacagagcagaggaacggcacagagcagaggaccggcacagagcaggaaacggcacagagcttgggagcggcacagagcttgggagcggcacagagctgggagcggcacagagcagggaatagcacagagctgggagccaagagcccggatcacgcccttcttgctggcccttactggccactggcacttactgctgactgctcgggtcatgtgcccgggctttcggaacaagaagagctcccagttctgactcgtccccgtgtcactgcacacagctggcaatcaatgctcactgcatggctggaaaccgagttccagaacctgctgtgtcttaacaggtcgcccaggtt

SEQ ID NO: 377651 - DNA, 674 bp, Homo Sapiens
ctcaaggctatatacttcattaatccttgattattattcaagatctcctggtgttgatgagcctgtcccgtagcgtttcgtgctggtgaaatgctttggtgacacacacatgcaagcacacatccttcagctagctacaggtggacacatcagaggactttgcacgggtgagaaccactcttactttcactcttacagagtgagacctcacctgctctctctagttggactctggtgagccttctgcctggagtaggtatgcttggtaagtggcactgagtgcccatgctcctcgggggcccatgatgcctgggactgactgaaaaactgggtggttgggatccttctgctgcagccagtgaggagggagccctgacacggcccctactccctggatgcccctcagactgcactatatagagcagggtggctgctgctcgggcctcccagggaaaatacgtaggaagcccactgcttcccatggcccagtgctttcacagtgaggagaaggggacacagaagagactgggacactccggtggggcccagaggttccacagggatttgcaggatgattggaactctgcccgtctggccgcccataatacaatttgtacacacctgctcatgcattcttcttcccttcaaatcgcgctttccttccgcgcaggctt

SEQ ID NO: 377652 - DNA, 506 bp, Homo Sapiens
agccagctgagcctgtggtaaacttgactgcataagaatagttctggcttggggacctgttaagtgtccactcatagttttgtcatgactattgaataattgcctgtatttcagtcttgatgactgaggaacagcccactctgccactggtgggacactggccacatcaaatgactgtgccttttgtaatttagtgtttagttgtgaccctggaccagatctatctaaaggaagaaactctttggcaatgtggctgcaggatgagcaaatgcaggcagaggttgtataacagggggtagccccgttagccagggggggcacagctgctgtgggaacagaagatactagggttggagacattccaacaactggaatggatcccattggcactggagcaacagctgtaagcggtggcatgctggcgatacctcccataccaaatgctggtgcgctagaaatagcaactggttgctgtttcatgacaggggggaatataaagcgttgag

SEQ ID NO: 377653 - DNA, 558 bp, Homo Sapiens
tgtgcacacatataacaatgaagtctagctttctgcctttaatcttgacatccctcctaaactgcaggtttccattatctgtacctctctacctggtcacccacaaaacgcagacaccaggtctacaacttagtcaattatccttgcaggcatccaaactcactcttttattgttctagcttggtaagataatgacctattctactctgttgtcaaacctctcaaattggtcactaagttatttctattcttgcctcctaaatatttcttaaaaccttccccactcctgctccatctccattagcatgttctctcatcacctttttcctgaactattataatgtgctggatgtggatactcagggagggtgtcagtcgagtgggactgctctagccagctggcctctgggctgagcaacctacgggaggaaccagcctcctgagggactgagggaaggatcttcccatcgagggaacagtgaggcaacttcttcatcttgtgcctctcctaactgggtcctcaagtagccacagccgaatataaagcgttgagggtgt

SEQ ID NO: 377654 - DNA, 419 bp, Homo Sapiens
gagcggccgcccgggcaggtactattggtctggaatccgaagtcataattttctctccattctgctgtcgtttttccttgttgatagatttgaacttactgaatgggttgatatccttttctgaagccaggtcttcccattctccaggcgatggcaaggcatctttgatcttcatgtgagaaatgtcattgtagagcgcaatggaaacaacctcttccatggggcagatgagaccatactcctcacacccattttcaataaccagaggatcagatttatgagggtcaaacatgatgttgttaggagtcactatcataacaccgccaaccacaccctttccatcggtgaagtatcgacaattcatttttaaaaatttcaccacacctggctcatcttcttcagaagtagacgataagact

SEQ ID NO: 377655 - DNA, 541 bp, Homo Sapiens
  misc_feature (321)..(437): n is a, c, g, or t
  misc_feature (518)..(518): n is a, c, g, or t
cgaaatgatgcacggtttgatacttgttgtctctctgtttggaagaattcctatcagtgtccagcgactcacgactcaaccacacaattgccttatgacaaacactatatttagaataacacagctcttcattcacatggggaattagaaaaaaaccctgaggactttattctccattcataaggatgtctctttatttttctcatgattgattaaacatatcttggaataagtttttcagtaagggtaacatccttcttcagaatatgcatatgtaagaactcctttccatcgcctttgcagatacacaccaacttgaannnnnnnnnnnnnnnnnnnnnnnnnnnnnnnnnnnnnnnnnnnnnnnnnnnnnnnnnnnnnnnnnnnnnnnnnnnnnnnnnnnnnnnnnnnnnnnnnnnnnnnnnnnnnnnnnnnnnttacacaagtaaactgttgtcagtatagggaagaaagccaatggattcagggggattttttcatgctcctcttgatcatcntttgtgtggttttgatttgcatt

SEQ ID NO: 377656 - DNA, 575 bp, Homo Sapiens
  misc_feature (494)..(525): n is a, c, g, or t
caacgatggtcctcagctacctaaaacagaaaacaactccgatccaatttaagtaatccttacctaaggaagccacaagttcttgacataacagattataaatccaaaggcttaaaaaaaataccaaaaaccaatctcaactagatagtgaagcagacagctgtgagttacttggtaacaatcacttcttcctcttcttaaaatgaggaatgagataatttaaattcagatcaagccagcgaccagtaaaaactaaggattatctatatttgcttatattctataatgaatacatattcttctataacagttaaccaagaaaatacctgatagttgctaaatgactcctcaaaattcatcctactatgtccatctcaaggatttactcaaacttagtaaaaactgtaacttagaattgaaattgaaagcacaaacataatactgttaaaatgcttttatttatttttctttgagatggcgtatcactttgtcannnnnnnnnnnnnnnnnnnnnnnnnnnnnnnnaatccccgactcctgggtccacgcattctctgtcctcgggctcctgagta

SEQ ID NO: 377657 - DNA, 595 bp, Homo Sapiens
  misc_feature (109)..(125): n is a, c, g, or t
  misc_feature (445)..(462): n is a, c, g, or t
  misc_feature (485)..(529): n is a, c, g, or t
aacgatggcctcagctacgtaaaacagagacactcgatccaatttaagtaatccttacctaaggaagccacaagttcttgacataacagattataaatccaaaggcttnnnnnnnnnnnnnnnnnccaatctcaactagattgtgaagcagacagctgtgagttacttggtaacaatcacttcttcctcttcttaaaatgaggaatgagataatttaaattcagatcaagccagcaccataaaaactaaggattatctatattttcttatattctataatgaatacatattcttctataacagttaacaaaaaatacctgatagttgctaaattactcctcaaaattcatcctactatgtccatctcaaggatttactcaaacttagtaaaaactgtaacttagaattgaaattgaaagcacaaacataatactgttaaaatgcnnnnnnnnnnnnnnnnnngagatggagtatcactttgtcannnnnnnnnnnnnnnnnnnnnnnnnnnnnnnnnnnnnnnnnnnnntgggtttaagcaattctctgtcctcggcctcctgagtacctgggactagaggcatgagccaccaca

SEQ ID NO: 377658 - DNA, 549 bp, Homo Sapiens
acttttgaatgtgaagggcaaaaattttaaaataccaaatgaccacgtcagaggtgagacttcactatatcgagggcttcatagtattttggaaacataaccccctttgagaacatctaagatgtcaatatgctataccgacttaaatacagcagactctgcccctccccctgtttctcattatttcactctcaaaattcacattttgaggatcattctgcttctggatgagggagtacaggtatgtgtgtacatcctaggcatggatcttatgactatcttcagctttctgtggaggtaggtttaaaattagttcagttctattatgtaataagtttcaggatttgggaatctttgggtaaatgtggaacatgttgcttataacacatattcaaacacagaattcaaaggtgtgtctccagaatagaaatgtttaaattattgtctgtatctggtaagcactctcatgagacacttccatatgttgtaccataagttctgtctccaagttatagtctctgggtaagtaaaaggaaacccgagtggatc

SEQ ID NO: 377659 - DNA, 879 bp, Homo Sapiens
tcctaacgagttctgatgtggagagctggagcaagatttgagggtctgctttccagatggttcacctccaggactgctaagctagtgctggatttgtccaggagctcagcctaggctgagggtcccaggcttaagtgtccctgtatatagatctctccatgtaccctgggcttcctcaaagcatagcagctgggttccaatgacaagcatcccaagagagagacagacagaagccatatcacctcttagggcctagcctcagaacccacacagcatcatatgcattgcattttatttgttagaaacatatgactaaggctagccatacctaaggagaaggaaattacactatacttcacgagggaaaaatatcaaaggatttacagacacgttgtaaaactacatacacacagtttcacactttctcacccacttcacctccattctgctcaactattcataaaaataacacacctcaaccgcatcagcatcactgaagggaccatcaaacacaagattttcactctggagctctccttctttaactgtttcctgttctcaccgctctcactaccttacttgcttctgaacatgaccttctccgccaagaacttgaatctttttctccatatccttcaagtctgtcatctctcagtttgggttccatggtcaggaatttcatggctgccctttccagtaccttataagtttttacaccctcttcattatctactctctttttcatcaccttgtaatctttcttttccacaatttccctcagtttattcaaattactcagattaggaggttcttctaatccccctaattatcaagtaccttctaatctgagtaatttgaataagctgaggaccatcgttg

SEQ ID NO: 377660 - DNA, 637 bp, Homo Sapiens
gaatattggtagagattcctacaaagtctgacatagtcattctgagatgacctaatagctggggagtgcttttcttcccctataaaataacaagtcccattccttccctatcctcaaaggatcaccaacatttttaaaacatttctaaaacatttcaaatgttagaaacatttttctgtcttatgagtggaattgcaatagaaggaatgaaatgaaatagtgggtgaaagtacttaaatgctagttactaagaccgagatcattgcagaaggagactacagcaacagtccagtgttattcatgggatgggtacaggtactcctggtgcaggcaggaaagtatttaaataccacacacccaccaaccttgaaaccttgagccacgcttaggtggcagggattcctcactacttacctataaattgggaataacaacagcagctttccctgccagggagaataaatctggtaatagatgcaaagaccttactccactgcctggcacaaaggaaactctaaagtagaagctgctattattactaattattattattattcttttttagagacaggtctagctctgtctcccaagctgtctcaaatttcctggccttaagcatcctccgcctccctggtca

SEQ ID NO: 377661 - DNA, 572 bp, Homo Sapiens
  misc_feature (111)..(128): n is a, c, g, or t
tcggtaccaacgatggtctcagtcgtgttagatatacttgccaagtctctgtcaggtttgtacctgccacagaaatatccttgaaagtttatctaacagctggagccatgnnnnnnnnnnnnnnnnnnccacgggagcttggtaaaacagggttgggctatgccaacaggaagagcccaagagaaagtacgaggttgccaccgtggttggttgccagaggtgccccaggtgggaggcagggaattggcagtttgggggaagctgggggtcccttctaccactgttccttccgggccccagtgatgtgttctctctttacggtgcacacattcttttcttgaagatgaccaagcccatacataaccggggcatgaacaccccactggggttttttctgcactcaggaacaagcgggtcctttggcccagctctctgctgtatgggcgagtatagagggggagatattagggactacttctcatggcactcctgttatttgccagccattagtaggggctttataggcagagccattgtgtttatgttctcaccacctggagaggtcgagtcct

SEQ ID NO: 377662 - DNA, 828 bp, Homo Sapiens
gtatcttttgttattcctgagataattccaagagaagaggaatgttgactatatcctatggcatcattattgtttgtctgattggacccaggctagaaatcttaaagatatttgtgaaaaataaagctcatattcaagatgaaacattaaaccccacagtgaaggtcattctcattctctctggcttgcccctctttctttctcacttgactttctcataatttttttcaacaacgtctttggaccccggttcattaaactctccctccccacatctgatttttccccaagaaagtgcattctggagagggcagggggagtgactattcatttgtctacacttcccaggctcaaaggagctgtggtcactatagcttccaaaacattcctttgccataatcctgcaaaactgtatgatcccatacctcccagtgaaattcccatagaccatattctaccctttttcctggctgtcttattgtatccctgttacttcctctggtcccatgaaggctcagtcccttggctcatgtcctctttgctatctgaactgccaccatcagggtggtcttcagcatctgcgtgtgcaggaaatatccagtgacttagcttcagagttgcaagacttcatccccaccatactttgccagctcagtcacattgcccacactctggccttgtcttctgtaatgtctctgcttccagaacattaaactccagtgtaaccatatctggttataccctcatagcctctctgcttgctcccctactctccctttttccaagttcattaaccatgttttccctcacgccaggtattcccagtca

SEQ ID NO: 377663 - DNA, 713 bp, Homo Sapiens
  misc_feature (345)..(643): n is a, c, g, or t
tggtgtgtctggtacatacagcatcctaactaatacgaggctaaagcggtcagtagtagtatgcgtacggcacgatatctatcttaggagctagggaaagggagtggataaccaggtgactctaaaactttcttttaaaaaatgtgctgttaagttttgtatcagctaaaacttaaagtggtacagaaaccttttggtatgctagtgcagccagcctttgttagggcatgagcttattaactatttgtttctgggaaatgtcataagaattgatgacgatttggaaagaaggaacaaattcaagttctctacagaaattaattgctgttaaaaatgtgtcacatnnnnnnnnnnnnnnnnnnnnnnnnnnnnnnnnnnnnnnnnnnnnnnnnnnnnnnnnnnnnnnnnnnnnnnnnnnnnnnnnnnnnnnnnnnnnnnnnnnnnnnnnnnnnnnnnnnnnnnnnnnnnnnnnnnnnnnnnnnnnnnnnnnnnnnnnnnnnnnnnnnnnnnnnnnnnnnnnnnnnnnnnnnnnnnnnnnnnnnnnnnnnnnnnnnnnnnnnnnnnnnnnnnnnnnnnnnnnnnnnnnnnnnnnnnnnnnnnnnnnnnnnnnnnnnnnnnnnnnnnnnnnnnnnnnnnnnnnnnnccatagtgccacataattgttttcaacttcagtttcaatccttgtgttctctacagtaaaattgtaggtg

SEQ ID NO: 377664 - DNA, 722 bp, Homo Sapiens
  misc_feature (683)..(683): n is a, c, g, or t
  misc_feature (701)..(701): n is a, c, g, or t
  misc_feature (707)..(707): n is a, c, g, or t
tggagcagtgcacgctggcagaagagcatgccaagctgttcatgtaccagctgctccgcgggctcaagtacatccactccgccaacgtgctgcacagggacctgaagcccgccaacatcttcatcagcacagaggacctcgtgctcaagattggggatttcgggttggcaaaggaatcgttgatcagcattactcccacaagggttatctgtcagaagggttggtaacaaagtggtaccgttccccacgactgctcctttcccccaataactacaccaaagccatcgacatgtgggccgccggctgcatcctggctgagatgcttacggggagaatgctctttgctggggcccatgagctggagcagatgcaactcatcctggagaccatccctgtaatccgggaggaagacaaggacgagctgctcagggtgatgccttcctttgtcagcagcacctgggaggtgaagaggcctctgcgcaagctgctccctgaagtgaacagtgaagccatcgactttctggagaagatcctgacctttaaccccatggatcgcctaacagctgagatggggctgcaacacccctacatgagcccatactcgtgccctgaggacgagcccacctcacaacaccccttccgcattgaggatgagatcgacgacatcgtggctgatggccgcntaaccagagccagctgtncaactngggacacgtgcagtt

SEQ ID NO: 377665 - DNA, 693 bp, Homo Sapiens
  misc_feature (461)..(504): n is a, c, g, or t
gtatactgatgctgactatagtgagtgctccagaagcaaaggttacagtacttatcacagtggtgccatagctccacagggaaacattaaatgaaaataagtatgcgttccactgaagctgaaggggaaagcgggcagtaagggcaattggtgggtgtacatatatcctcatatgaaatgaaatgtttgtagtctctctctatgggataatgcagagtctgactgctgtctgggatgattaccttggccatggccatcactaacatgtagatcttgtctctattggattagcatgtccaggattcccatgactccacttcttgatttctgatttcttgccagtttattttcactgtgacaactgaacattttaagtgctctcatgggatgactaaggacatatttcctctaattctacttccacgcaaaggatcaagggaaaaatgggaaaggggattgcnnnnnnnnnnnnnnnnnnnnnnnnnnnnnnnnnnnnnnnnnnnnttgggagtagagtgtctgtttctcctccagaagaagcagagttatatggagctcctaccatgctaccatgaggtctatgctgtaaggcacagtatatggatgctacagaggggatgcaggcttcccccgagacagagcagaagccaacacattcatttgaaatctctcttcgccatggttttcccattc

SEQ ID NO: 377666 - DNA, 402 bp, Homo Sapiens
  misc_feature (299)..(299): n is a, c, g, or t
  misc_feature (306)..(306): n is a, c, g, or t
ctcctagaggatccccgagttacagcgcctagacgggaggcttcgaaacaaggccatctgtctttgtcattctgcgagattccaagagccaggcacgagtcgtcatgactggaagcaccccggcaggaatggctgctacagccagggccactgcaatttcaaagtagtaaatagcacctctgatccaggaccctccatgaaccgggtcattgaagtgcccaatatttatgatccagactgcaatgcaaataagggagatgactttggaaagctgttccccaaattcatctagtttttgnctgaagngggtgttctctcctgttctgttgccaccatttcatcccggatcttgccaatttcggtgttaactccagtgctaccaccactccatagctttcggac

SEQ ID NO: 377667 - DNA, 422 bp, Homo Sapiens
ttaccacgattacgctcctagacgggtagttgggggatagcaagaagaaaaaaatacttgatagtgtccaggataattttcaggttcaaggatatatgatgttagaggcagctggcattaaacaacagatctgaagaggagactaggcattaagaagcatttctgtgggaaccatgaaatctccagatttgggggatatactctaccaaattagacatggacctcagatcctggccagaagctcattctgtaatgggagctcctgttatatttatcgtatttacccagcatgagatcaagggaatggaatactgcatgtgataggctgctgtgggcaaactgaggaatattgagagagacttgaaggtgtggagggaacaaagtaaaagacagtgagaatcgggaggtgaaacgagatactt

SEQ ID NO: 377668 - DNA, 781 bp, Homo Sapiens
  misc_feature (664)..(707): n is a, c, g, or t
caccgatgacgctcctagacggaatgggggtggggtcaggccagctgaacaatatgtgcctttttgactcttcagaggctgtgaatttctggtcttggaagatcacagtggagcaattggacagataggattttatccttcatatcccttgcaaaagatctctaagaacccatggagagccagccagcgcaagagtgtctgatgcagatgtttttgcccatcgagccagcctgctttgtggaattgctggggacttcaccatcacagttagggttaggcacaaagagttgaggtcagggaggtgggtaggggaagatggggatgagttcctgggacttggctgccacccagaaaagccaaagaacaaagagaaagaaggtgtcatgcacataactgagttaggaggaaaccaaggagcatgcagagtcctgtgagagttgaggtagaaaggcttaacttgctcctgtctccaaaagaagaaacagtcaagaatgatgccagcagcagttgtcccacaggacaccaggagcttctaggctatttgaatcacagcagctcaggtctattacccccagtcagccttgctggcccacccttattgaaagggaccctgccttccacttttttctcctttaaaacgtatcagccgggagcggtggctcannnnnnnnnnnnnnnnnnnnnnnnnnnnnnnnnnnnnnnnnnnngaggtaaggagatcgagaccatcctggctaacacggtgaaacccgtctaggagcgtcatcgtggatactctagg

SEQ ID NO: 377669 - DNA, 378 bp, Homo Sapiens
aactaaaattgtaggtttcaagaaaatagcacttgtttgcttttaagtggagtgttacactatcaaagacattaagtctcagtggatacttcatcagtgagtgagtttgggtggggactaaggcaagggcaaatcctctctctctgggcctttatcatctctcatacgctctagtccatttgggagttactgaaagctctgtgtgatcatctctcaactgctgcccctgtgtgtcaaagaagtttggctatgatccacccagtgccccttcccaataggagccctagaaaaggctttccccaaaccttgcagttggccctctgccccagtcgtcagtgccctcggactcccgcttccgtcaggagctaatcggtaccg

SEQ ID NO: 377670 - DNA, 430 bp, Homo Sapiens
gtcccctatggacttctctgggtaagtcccgtgaggctgactgggacagacaggagaggagtgagcacagcttcctgccccttccctaggctgcgaagaatccactaagggaaagtctgggttccccggcccctcacagcaggaatttcctgggactgctcatgcctccccacagcgcttgggcacctcacctgctgaggcccctgtgccccaggtgagcaggcgagatggagcagtggaaccatagaagactcccacatcctggggagccaggagctcagagaagcgggtaccccggaacacgtcccgcttgaaacgcagaaggacggctgcctgctccgaaatgtagacgattcggcccgtcaggaaggagacagccactgagaaggtatcctggttctgaagctgtgtactcagacgtgatgtgctc

SEQ ID NO: 377671 - DNA, 517 bp, Homo Sapiens
gggcaaccttgccccccacccaagaagccctgccctccagccacagcagtccacagcagcagggttaagactcagcacagggccagcagcagcacaaccttgaccagagcttgggtcctacctgtctacctggagtgaacagtccctgactgcctgtaggctgcgtggatgcgcaacacaccccctccttctctgctttgggtcccttctctcaccaaattcaaactccattcccacctacctagaaaatcacagcctccttataatgcctcctcctcctgccattctctgctccacctatccattagccttcctaacgtcctacgcctcacactgctctactgctcagaaaccaccaagactgttgatgccttagccttgcactccaggccccaaggtttttccaattcagaactttttggaagcctcccaagctattctgtgcttatcgccagacagctcgacatcctcacgaggatctctgcattatgtagtctagtctaggagcaatatatgc

SEQ ID NO: 377672 - DNA, 469 bp, Homo Sapiens
tagttgttccttgaggtatccccctatcaggctttggagctgagacatgggctgcgcacgtgcatagtatttgagtatatagaggcagatccaggtagaaagttcagacccagattcaagagaaggcagaagacaatcccagggcgagattaatatttggagggtgggtgacgtgaggcgacgtgaatagtatgagactctctgagtgctccatgatagatgaaaaatatcagcgtagtagtagtgtctcagctgtgaagaaggcagagcttgtggcaggatcccttctccgtcactaaaggaacttaactgtcccgaacactgccaatgacaaacacatgcgcgtgtcttcctttgagcatcaccatcttccaagctgggcagggcacccagtgttattctcatttagcgaatgaggatccggaagcccaaggaagtcacacgcctcatgagtgggcttgtgggttgt

SEQ ID NO: 377673 - DNA, 398 bp, Homo Sapiens
ccctatcagggctttgggctgaacgcagcacacagcaggcgctcaaacgtgtctgtgatctggagccacctctgggagatggacttccccggagctggagccatcctgggagatggacttccccagagccggcaagtccctccccaggcagtgccaggcccagcccaccaggcagcacctttaggattctctgaattcactcgtcaatcaattaaacattcaggaaggaggctctggaaaccagcactgtcagccaacggggagaaggcggggaagaaaggagcgctgaccaggtgccctctccacacggttctcatgcaatcctcacacaccaccaagagatccagcgtgtatcagcccggctgacatgctggggaaactgaggcttgcatgacctg

SEQ ID NO: 377674 - DNA, 202 bp, Homo Sapiens
acggagttctatcttgacagttacgatgatatgacactgtctgactggaaaaccctgcgctgacactgtccatgttagtttagacgcaggtggaggaggattagcatgagatgaatgacaaagcagcaggtggatgctcagaccttgtgacctttcaaggctcctgcgcagttaggatgaagtgattctatggcaaattgag

SEQ ID NO: 377675 - DNA, 585 bp, Homo Sapiens
accacgaaattctggagaagataagagagttgcatgtgcctgtctgaatcatcagcagaagagaggcatgaaatctgcaaggaaggatgagtccttccaggaagagagtgcagggggaagagaaagagaagcggggctgagccccaaggagggccagaagagcaaagaagggagagagggtcagtaggaaagatcaagacgttgtcggagcagtggcaggaataccgagagagtctggtctcctagctgccacaggagaggtggctttagcacagggtctgctggcggccgcctcttggacattgctgctttctcagtgatctccctgaagcctcgttgcctgtggactctccaagtctgtagagtgattaactatttgaggtagattctattttcatagtcattacacagagaatacctaaagctgagtcagttttggtgacttacaggacatcacgttccagcttaaacccacatagcaccctctccagagctctcccccagtctgttagatgcatctgactttctaaggtgctcctggatttggagggtccatctgacatcttgtgttactctaggaatcaa

SEQ ID NO: 377676 - DNA, 484 bp, Homo Sapiens
  misc_feature (25)..(25): n is a, c, g, or t
  misc_feature (307)..(307): n is a, c, g, or t
cctgctgtgtggtttcacctctcanggaactctgacggctgctgtgccttactctgctcggcaaggcggtcccctgaggcacaggtgggccgtctggggctggaaactcctcgctaggcgcctaaaaacttccctctccctgccctgtggcagaagccaaagcccttgcaagggctgttgcccagccatgggatgagtctatgaaaacacgtggcacgcagtaggtccacagttaccactggcagcctggcaagctggcagggcccggacggcagatgcgcttcggtgctgctgtgagtcttgtgtntctgccttaggcagaaagtcctgggtttgtgttttgtgaatgaatgacgcatgagtgtgccaaatatcctttacgtgacagaagaggagagggctggcttgattgagtgtgggggggaagaacctggatcttgtaatgtaatttttgtttaaaacaattagggaaaaaccccaaata

SEQ ID NO: 377677 - DNA, 466 bp, Homo Sapiens
tgatggccgattcctagagtatccccgagagatcagatggagcacatgagattgtaagaaaaaagctgttctctacaggagatttagtaagggcagtttataggtttagattctgctgttccttattttcattgttcttccttacccctcaaaaatataggttaatgagacattagctcatttcacatcctaaatccaaaccctcttcccttggctaacacggggctgggttgggatgttcacattgaccataatcattgggaaaagaaacttagggacttctatcaaacatgagagtttgggaatgatatctgaagttcacaaattaaaaggattctgagctgctggttataagtaaggaggggaacaaaggagcatcaggaagcagggtctgagggggtctctgctccttttgagctgggtttctttgggtaaatcacttcatctctctctgggcttcagtttc

SEQ ID NO: 377678 - DNA, 377 bp, Homo Sapiens
cgagactgggtgaagggatgttccggtcgtgatgggtaatgggctgtcgcagtgtgagcagatgacggcatgttccatgtgatgggggagagggatgtaccatgtgacgggtgagattgtgactgggtgatgggatgttccgtgtgatgggtgaagggatgttctgtgtgacgggtgagatgtgatggctgacgggatgttccgtgtgatgggtgagatgtgacaagtgatgggatgttctgtgtgatgggatgttccgtgtgacgcgtgatcggatgtcccgtgtcagcaggtgacaggatgttccgtgtgaggggtaaagggatgttctgtgtgacaggtgagatgttccgtgtgacgggatgttctgtgtgacg

SEQ ID NO: 377679 - DNA, 573 bp, Homo Sapiens
tgcacagacttacttggctgtttacagccacttcccttctgcctgagatcacagcacacctgtcaggtgcagcagggcccaggctgtgccacttgtgaagtattgtgaaaactaccttggattagctcacagaatcactgaaagtgtggagaaacaggttttaggctggtcttcctagaacaactcccagaaccctgctaaagaactgacccaataagggacctgataccaatacactagccactcacccaaactgctttctcaaatatttgcaaatcaaaattccacataggattatctggttaggagaacctagaccatgattctactctcttgctgcaatggaagctgggaattgtaggtaggctggttggtttacggtttttggaacctaccttgaggtgacaagattcacgaaacatggcactactgaaatgtggaaatatttacaagatttgggcagccacacatggtagatgttccattataactcacaaggcggaaagcagtggccacaactgtacggcttatagcgtcaacgaactgaagaaagagtgacgcgagtaactgtac

SEQ ID NO: 377680 - DNA, 493 bp, Homo Sapiens
  misc_feature (72)..(174): n is a, c, g, or t
gtacccttgagattattcagctagcaggagaccacgaactgcttgagctggtcatttcatcagttgtccctnnnnnnnnnnnnnnnnnnnnnnnnnnnnnnnnnnnnnnnnnnnnnnnnnnnnnnnnnnnnnnnnnnnnnnnnnnnnnnnnnnnnnnnnnnnnnnnnnnnnnnncaacattacttcttacttgtgtttgtgtccatctcacatttttgtgtctcacatttttgtttgtccatctcacaaacacatctcacattgtgtttgtgtaccatgtcacatagtacctggcatacaatactgatgctcaatcaatgtgaggttgtcttgggtgaattgagtgcagcatgaactgaaatggaagtccagtgctatttctggtaattttatttaataaaaataagatattattccatgaaaagaccgccatgtcgttatgttttattttattaactatccctatccatctgattggatggcaatactgatc

SEQ ID NO: 377681 - DNA, 375 bp, Homo Sapiens
agcagagaccacgaattgcttgagctggtcatttcatcagttgtcccttattaaactgagcacctactatgtgccaggcaggaatgggttctgggaaaacaatggcgaataagaaaaaatcccctgccctcaaagagcctgtggtttaatggcaacattacttctcacttgtgttccgttgtccatctcacatttcagtgtctcacactttatgtctgtccatctcacaaacacatctcacattgtgtttgttgtccatgtcacatagtacctggcatacaatactgatgctcaatcaatatggggttgttttgggtgaattgagtgcagcttaactgaaatggaagtccagtgctatttctggaaattttctct

SEQ ID NO: 377682 - DNA, 560 bp, Homo Sapiens
  misc_feature (560)..(560): n is a, c, g, or t
atataggttcgctggtatggcacagtcctagctcctgtactgcagacttagaacctagaaggaagaactgtctcacttgccagcaccatcttctctggaatcccgagttgctacattgtaggatatccctctgtacactgcagattggagaacacaattatgtttaaaacatcttagatggccttcaaggaacaaagagctatgccaaattttcaaaacctggttgcatattctatcccaaaagaactccaaagtcttaaatctaccattaaagaccctagataattctaaaccacttgacaacagagagagaaccagaaactctggatccaagtggttacctctgacacttatgcaagccactttaacttctggtttgagtaagagcaagcgaatagcaaaaggtctttaaaagaactataaagtgaaatattcccacaagtaaacatgtgtcaccgaagactcaagaaagaagaatggcattaaaagacatactctctcccagatcccaaagtcaaacaataaaggtacatttaaaacaaaaccaaaaataaaattgn

SEQ ID NO: 377683 - DNA, 338 bp, Homo Sapiens
actctagagtatccccttgagatgattcagctagcaagtcactagagcgtctcttgagctcaagtacaggcaagtaatctgtagcaccaccctgtagtcagaagatgagaaagctcctgaagtttaccatttgttctcattaggtcaccttcctactgcaaatactctagtaaatgaagtgtgtcacttcagtactcagcctttgcaaaagacagtgaacttctgaatagttgccacacttcctcctgggagcgccggtttgaaagctaactgctatttggtagttatctgtagttcttttcatgcatcaaaataatggttactgattagtccacagg

SEQ ID NO: 377684 - DNA, 496 bp, Homo Sapiens
tgcagtgttctggccttgctccctgtagttctgttgcgctgattcggtcgtgaaggaaggtgctgccaggccggttcacctgtatcgccttggctttgggaggtggggctgagtgggcatctgggttggatctcaggcaggtggcagttcctctgattcatggttgtcagtttcctgttgcctggccctcgctcctcgcccagtaggtgtggtgggacaaggttctgggagctggggtagaatttggactcttaacgggaagtgcctcgtgctgccgcagacacatctggatgggtgctgagctttccttcccaagcctggtcctgatcggggtggggtacaggcaggagcagcccggccttgtcagccgttgaaagtgtggtatctgctgggttgccagtaagctcgcttcgaggtcttgagaggcagtgcaggggaggctgagtatgaaccgtgtccagccagtacttatgtctctcttcatctttctgctcca

SEQ ID NO: 377685 - DNA, 464 bp, Homo Sapiens
agcataaggcgcgtacaggtcttaccctgcccctggagagaagcaggacgtgatcattctagggagggggggcgttacccatgttccaggtgccgatgaagatggtgatcatgtcgggctccggctgctctgagtgcttgttcttcatctgctgcaggagctggcagaagccttctctctttttggagtcagcaaaaacatattccttccgcaggatcttctccttctctgtttccaccaagatcaccaacttattcagaaatttctgtgacttaatcagctgcaggattttcttgtggctgtagaacttgtcctcagaaccatccttggacttcttaatgatcagtttcccagactcaacgtcgactttgagctgcattttctgaggaatccccagagactctgccttcacctcaaaggtgactggagggataagggagggccggtgcggagactcaggaccc

SEQ ID NO: 377686 - DNA, 690 bp, Homo Sapiens
cgcatacgcgcgtaataggtgaagaagaacttccaatactacctgtggacctgctgatctgaaagatagcgttaattccgcactgtatttcatagatgggatgacgtggcgagaggtgctacgggtgtactgtgagagtgataaggagtaccatcacgttcttccttaccaagaggcagaggactacccatatggaccagtagagaacaagatcaaagttctacagtttctagtcgatcagtttcttacaacaaatattgctcgagaggaattgatgtctgaaggggtgatacagtatgatgaccattgtagggtttgtcacaaacttggggatttgctttgctgtgagacatgttcagcagtataccatttggaatgtgtgaagccacctcttgaggaggtgccagaggacgagtggcagtgtgaagtctgtgtagcacacaaggtgcctggtgtgactgactgtgttgctgaaatccaaaaaaataaaccatatattcgacatgaacctattggatatgatagaagtcggaggaaatactggttcttgaaccgaagactcataatagaagaagatacagaaaatgaaaatgaaaagaaaatttggtattacagcacaaaggtccaacttgcagaattaatgactgtctagacaaagattattggacgcagacgcgcttatggaccgcc

SEQ ID NO: 377687 - DNA, 474 bp, Homo Sapiens
ggagcataagcggtcagcgtctgagctcaggcaatccacccacctcggctcccaaagtgcggagattacaggtgtgagccaccgtgcccggtctgacctgtgcctttcaccttctctgcacacctgtggtgccctttctacatggggcctcaactccagaccccgcaaacaacaactaacatgaggacaactgctgggaagaggctgaagcaattgcagcatgatcacacaaggttgggatagatttctttcccatctctcatacacaccccttgcaaaaaaataggtgggcagaaaagtctggggctaagcttgccctgtttcatcaatgtacagttggcattactgaacagactagaacaatgtgtcaatgtaaaaacatttatatctggcttaaatgacaacagtttatctgccctccctccccaaaatacaaagcagtacctatcttatctctgatgtaattaaagtgtc

SEQ ID NO: 377688 - DNA, 752 bp, Homo Sapiens
atataggcgcgtcatggtgggcgtacctggtgctgctgaggggccaaggaataagtgggtgcagaaataggggtggtttctgagggcatcttgccaagcagagagctcaagtccctcgtctcagctctcctagggagagggagagagcagggaagggcagctaggctagggtggaagaggcaggctctgctggtccagggcccccttcagggttccagctgtaccaggcttaggcttcagttgtgagtgtggagccctgagctcaagcatggaggcagcgtggttgctcagctcagcctctcataggaagacctggcaccagttccggaagtgcctcgccactagagagggtggggaaggtcagatgctctagaatcagttcatacctgggagggctttaaccccatcttcccctcccacctgccccctgcttaggccacaaagcctccatgttatgtggcagattaatttgaaaattgagttgcagctgaatgagttgatgtcttcaaagttcagtggtgtttgattagagccgtccagagactagacttgctcccaggaaatgattctgactgaataattaaagtgaataaaggttagatttgtgtttcaggccaaatctgtgttgcattcagcatctccaaaacatgaattccattaatctttcatgaactagcattaaattactttcaattagttgtcattctaattaaagttgagttaccagaacgcgccttatgtaccgctcgacc

SEQ ID NO: 377689 - DNA, 450 bp, Homo Sapiens
ttaggcgcgttctgcgtgcactatttctcctgggtgttggagaataaccttcctaaaacagaaatctagtatggcaatgatctgtttcaaaccttcccatggttccccattgccccaaggccagcctcctcatgcacggcaaactgagtccttcaggtacttctggcttaggctataattcaccttgcttattaagccccagcactttggatctactcagaaatcccctaacatataatgctaatccacacagctgtcttggcatatgcacttggcttttcctggaataccctcccttgtccaaattctatgcctggcaaatatctactcatctttccagtcacagcctttcaatgaagccttttatgggtcctattccccatccagattaatcaccacctcctctatgctgcttctgaacttacacatacatcattacactgtgaccat

SEQ ID NO: 377690 - DNA, 527 bp, Homo Sapiens
  misc_feature (437)..(452): n is a, c, g, or t
gatcattacgcgcgtttgcgtcgctgagggctcaatgcagccttcagcttcaaggtgtgggagagaagtccaacccacccatttctgttgggggaacctggtcttgtggctgtggccaaatggtgattctctttccgtgggaattgggaacggaggcctgtccatgagcctggggaactggctggaactgacactctgcacactcaggagcaggccaggtgtgtggaaaagcatgggtatcaggtctcccagatgaagcacagatgtgcagtgggaagcggagatggtggtgacccggtggccccagagggaatgagggagggccttgcttgttgacctcttccagtgccttgtgaggtctgaggccatctcctgatcttgggtaccctgccctctggaatcctgttagtaaatatccctctttcgtggggtgttgnnnnnnnnnnnnnnnnggaaatggagtctggctcggccattgaggttgaattgaaggggcacaattccggatcacgaaaaaggcccttgga

SEQ ID NO: 377691 - DNA, 742 bp, Homo Sapiens
cgtcggtacataaggcgcgtatgcgtagctgcccaagggatctgtcaacacacacatcaacatgctgattccctgcttaatcccttccccaccagtttcactctggataatgttgaaattcttcaggtgtcatccagagcccctaatctggtcatgaccttttctcccaagcctggctacttaccctccaaccccctccctatggctgctctgtcaaactgcctttcatcctgtcccgagtgctcactcactctcacctatttatgccaggctaatggctacatcatttagacttttacctcctctacaaagctgtcaatgcctattccttccaagctaagttgggtcttctcctctgccttccacatccccttagaactttctctcttacatctcatcccattctaccttactctctattcatcacctatccatctgactggagagtgagcttcttgagggcaaagaatgtgttttatttttgtatcctacactccaagcatagggtcttgctcagagtaggtgtaaaacgtgtgtggaataatcaaattgaatgtatggatgaggtcaaaacaaagacaacgttgggaggcagttctccatgggttgcttatgtttctgcatgtctttcaagtaaggcacttgcctgctgattgttctagactttctttcacggatatttgaatagctaaccgcagccttggaagactgatattgtctcctgctgggacaatgcaccaga

SEQ ID NO: 377692 - DNA, 136 bp, Homo Sapiens
tatacacatgagtgcaatgtcccatattggcaataccacatggtaacgtcctgcacgccacaggagctgtatatatgagctgtattttcatgatggccaccagcacgcgcctaatacgcagacgcgcctaatgtcc

SEQ ID NO: 377693 - DNA, 506 bp, Homo Sapiens
gcgcgtttgcgtatacgggagggtctctggtgtatcagccaggacctttatctccaaaggtcagaacctgggtcacgctagcttaaataacaaacgagaacgtactgcccctcttgactgaaaaatccaggaagattcaggtctggctggatccaggcactccaataacatcaccagggctctctccttccccatctgtcagctctgtttcctccatgtgggcttcattcccaggggagccctcttcacactgtggccccccgcagctccagaccacatcctgcccgctctccccagtggaaagagaccctctctagttcagaagttccaggaaaatcctagaatctgtctcttatgagaataactgggtcacatgggtatcagcagagcctggtggtggggtcagcccatcccaagatacatagctgggcaatggggtaggcgctttacccaaagggaactcagggaactgtcacagaaaggatgggggatggatgtatccagac

SEQ ID NO: 377694 - DNA, 577 bp, Homo Sapiens
attaggcgcgttctgcgtccagcaaacatgtctcccagcccctgagagcccctttgctacccgttcccccaagcaaatcaagattgagtcttcgggggctgtgactgtgctctcaaccacctgcttccattcagaggagggaggacaggaggccacacccaccaaggctgagaacccactcacacccaccctcagtggcttcttggagtcacctcttaagtacctggacacacccaccaagagtctgctggacacacctgccaagagagcccaggccgagttccccacctgcgattgcgtcgaacaaatagtggagaaagatgaaggtccatattatactcacttgggatctggccccacggtcgcctctatccgggaactcatggaggagcggtatggagagaaggggaaagccatccggatcgagaaggtcatctacacggggaaggagggaacgacctcccgcggttgccccattgcaaagtgggtgatccgcaggcacacgctggaggagaagctactctgcctgtgcggcaccgggcagccaccacgcagaacgcgcctaatggggatcctc

SEQ ID NO: 377695 - DNA, 552 bp, Homo Sapiens
tcagctcggtacattacgcgcgtctgcgtgcatgtgtccgccttttttgtaacccaaatccagcattcttcagcttacctttttcatgtagcactatgtcttgtatctcagtccctatcaggatataaaaagcatgcttctgttttattggcggcgtcctgtcatgtggattctctgtgcttgctaatctgtgttgtaaacaaaacacagcaggcctcagggatggggctgataacaggatcaaagcaggagtttataacagcattttgtttttgttgatttattttcatgggaaaattcaatttatgcttagtgaggctggcttttcacttgtggagcagatataaagttttcttgatagaatgaagagcgttaagtaattggaatgtatacaggtgctatgtggttgttgggaaaactaaacccaggtcactcccactcctgcttacaccctcacaggatgaagctcctgctcggtccactggcctcatgccccacagcgcacccatccccacacttcatgccccatgtagacgcagacgcgccttatgg

SEQ ID NO: 377696 - DNA, 462 bp, Homo Sapiens
attaggcgcgttctgcgtccacacccccatggcaccctcgaatccccttgatggctaaaaacaccagctttgaagtttgtcagaacgagttccagtcccagtaccaccactgtacaaactgtaacctcgggcgaggtacctgacctcctatacccggtgcccacatttgtagcaccaggatagggaacaacagtccccacatcaaagggtgttgacgggatgaaatcacacaatataggtgaggccctcagcaggatcctggcacacagtaagcactcaataaatgttcaccccaccaccagcaactcagcaggaagactccgcaaaagcagctagctatttccagaggactgaattccttggtccgagcagctctcaccagtgagaaaatgtgtctaaacttccactctcaggccgaaattcgatgccttggagccacgcagacgcgcctaatggtccgct

SEQ ID NO: 377697 - DNA, 507 bp, Homo Sapiens
ggctcggtaccattaggcgcgttctgcgtgcactccaatgaggtagggcatgggcgcgcagcagtagtccagcaggtgtgggggcagcgtggggatcagcacgtgctcccagcgcatggggtacaggagcgcgcaggacgcgtggacgcacgaggtcagctggggagcgatggcggggcgtggagtcagggcctggaccctctagcgcgaggtctcttccagctgcatttcccacgtccccagtctcctgttccccctccccatccactgctggataatgagtgacaactcgaacccctttagaaatcatgtggagaccaggaatttggccacttacagcgctttaagcgggtgaagccaggactcataccgtcctgatccctctctgtaaggggcgcagttaataggcaacacccctgagtcttccccatgcaggtagagcaaggactgagcctccactgactccaccccgaaagaggtggagctatgacgcagaacgcgcctaat

SEQ ID NO: 377698 - DNA, 691 bp, Homo Sapiens
aatatgaactttcaaaaatagctgaaatgactacacagatgaagatctctgcaacaattggcatgtgagccagaattctgtaagctatgatgaaaagaaaggagactgttcttggactaaaagtttattaagtataaatatgtcttcaaatatacttactgacactattttcagatgtttacctcccaggatcaaggtacttgatcttcacagcaataaaataaagagcattcctaaacaagtcgtaaacactggaagctttgcaagaactcaatgttgctttcaacttctttaactgaccttcctggatgtggcagctttagcagcctttctgtattgatcattgatcacaattcagttacccacccatcagctgatttcttccagagctgccagaagatgaggtcaataaaagcaggggacaatccattccaatgtacctgtgagctaggagaatttgtcaaaaatatagaccaagtatcaagtgaagtgttagagggctggcctgattcttataagtgtgactacccggaaagttatagaggaaccctactaaaggactttcacatgtctgaattatcctgcaacataactctgctgatcgtcaccatcgttgccaccatgctggtgttggctgtgatctgtgacctccctctgcatctagcttggatctgtcctggtatctcctgat

SEQ ID NO: 377699 - DNA, 263 bp, Homo Sapiens
cgttagctgggcaacttcacaaaggtatcagcctgtttgcaagttcatacgacagtccagtggcgtgatcttaaagttatcaggaacttgtgtacaagagatacgcgtcagagtattttccataaatcttgaagaagaagcaattttgaatggtagctgattgcaaatgctttgaggaagaataaaaacaactgtctgccagtcttcttgaaatgcagaaactacaccagagctactatatcagagccaccctggccagtact

SEQ ID NO: 377700 - DNA, 492 bp, Homo Sapiens
ctaagaaggtctgctaataactgctgaaaagctggcaggatttagcatgcaaggaaccaactggtgacgtgctgtgagggatggattgaggacagagcccaggtttcagagagcgagatgtgaggagagagagcatcctttcaagaagtttcggtttgagccaaggacacagaaagaaagtttacaaaagtcaaagtccaaattaccattaaacatatagaaaatatagaaaattaaaagtaatatttaaaatcaatagcaaattaaaatgaagagatgctgttgtttaatctatgaaagtgaccaagtgtttttcctttcccttaacaataatacacagttttggtaaacgtgatgtcgtgagcattttcagagaaattagtaaatagttctaaaggtcagcatcgactatgtaagactagaggattaagtatgtttatgcccttctatccagaattccacttctcggagttattctaaggaaagaatcag

SEQ ID NO: 377701 - DNA, 687 bp, Homo Sapiens
  misc_feature (516)..(574): n is a, c, g, or t
  misc_feature (621)..(630): n is a, c, g, or t
gtccttaggaaatgtgtcttacaggcatttgaaaactatagggaatagtgatggggtcagaaatggcatcactggggctaagaaaccaaagataaagtcactttggagctaacctttgtatgcagagagcttagtcctaatcctgcttagaatttccacggcgtcttgtcttcccttaagagaaatcaaaaggctttcactttgcccctctctgccccgtgaagacaggcatgcaaaacctcgttttgcagggtaaggaaattgagttcatggtctaagatcacagtgaattgaacagactctaaaagcaagcatgttaatcgtgctgcactctctgctcttaaatgtgagtgtcttagaatgagaattctcagtggttttaagaaaatggtaatgtttgtactatatttaacccccagaaacagaacatcaaaaccaagacactttggcaatcgtcttatccaatgttctcattttaaagatgtggactctgggccgggcgcagtggctcacacnnnnnnnnnnnnnnnnnnnnnnnnnnnnnnnnnnnnnnnnnnnnnnnnnnnnnnnnnnnaccatcctggctaggacagtgaaaccctatctttactaaaaataccnnnnnnnnnnttagctgggcgtgtgcgggcgcctgtagtcccagctaccagtacgcgcttatgtacg

SEQ ID NO: 377702 - DNA, 782 bp, Homo Sapiens
attgggtataatgagaaatctgaaccaccgcgtagtcacattaacctgtactgctcctcatgatctagcacaggccgcagaacgcgtaggatcctcatcttaaggagcacctcaaagagactgaagtcaggtgagatcatctggggcagacagacaaggcacttgagcaggacacgtggtcactgggcagcacactgcacacacaggatgcctagtatcgtacctagggtcaggagcagctgcctcacataatccacggtgcacaggacgcctgttcgcccacaacccgcactgacaagagaatcagagtgtgcctgatcaggtcctgaccacaacccctttcagatggggcatattgggaatgggggtgacgctcctgatggatcccctgcagagcctcttgattcccagaatcttcagattatatctgaacagggaaaacctttttaatcacttacatttagttgagcaagagctgtgtgcttattccccagctgagtctgtgctgaacaagtgctcacaattacagcccatggagggtgcgcaagggttctcaaaataggcactcagactacaagactagccccatgccctgtactcccctccatgctctgtcccctctgcctcaccagaccctcctgaagcccatttccaaaacctgcagtggacacagaggggttcagggccagacccctggaggcgacgggcttcgctccaccatggcgagcatgtgtcaggactgctggggacacccacgctctgccatgacatatactctagct

SEQ ID NO: 377703 - DNA, 512 bp, Homo Sapiens
aacttgagaccagagtctgtttctcctcactgccctgccgagggagcagatggggggtggtgggggaggtgaacgtcacccctggcgtcttctctagctcaggggccaggaggcctctcatctttaaagtaggaatgacaaccggcaggccctgggtactgagctgtgctttaccgaagagcggcaggtcctgacgccgtctcctctcaggagtggggtggcggcgtgctcagctgaggagccaggtggcagtcaggcttggcttggcctgcccagaagcagggctgtggcaggaccttggacacgtggcttccactgtttgagacttggtgaaatgggggtcatgatgcccttcacttgagcatctgggaattaagtgggtgaacaatgtgacctctggcacctgggttctcaggtgaattcctcatggcatcacagcagtgttgaaataggagcagatacgttacctccgctgccagataagaaactggaccagacgcgcttatgtccgc

SEQ ID NO: 377704 - DNA, 522 bp, Homo Sapiens
tagcggtaccggaacgtctgcgtgctcccgtgagaaatgggattcctctggagagtctctctgcagaagtgaggggcatggggcagggaacaggcggggagcgcagccactgggagccatgtcaaggccagcgccaagccctggagcccagaatcctcttcctccagcccgttctgtctccatagtccctccatgccctgataaagcagtcgctcttcctttagccacctgacaatgcgatgactacattttctgagctccatgcccttctcttttagggaattataaatacgctactaggtagttcactaagcacaaataaatctaagagaaaccacaaaacaaacagtggaattccgctgcacatcacagctaatctcaccctccaagggctggagaagcctctccctctccccttaggagcctgcatccacttgttcttagtctggccttccccaggggacagaggctcacccaggagctgccagggactagttgtcacatacacacagcagctctcct

SEQ ID NO: 377705 - DNA, 150 bp, Homo Sapiens
gatatgttgctgataaatggaactacagaaagggacaagatcaactggagttaagaagagaatttaaggtggcttatgcctggcaaagcactgtgtttatacatcttttgtgagattatactgccacgcagaacgcgcctaatggggatc

SEQ ID NO: 377706 - DNA, 484 bp, Homo Sapiens
tcggcggtaccttaagcgcgtctggtgatgatacattaggtgagaacttggttcatgcagtcggctgcgcagaggttgcacccaaaacccgcagccccggcacccaaagtcagtcagcggtggtggctcatggtgtcagccgtgctccttccacaacaccaggtgaatactgtggtcaggcatgctggtggcaaagaccaagcccgtgtcattgtgcccgtccagtccattcagccaggatgcttcgcctgccaggaagcttgagcctctctttgatttcctgtactctggcagaggccagcgactaatcaggctctctgtccgcaagtccatgatgtacaggtagcggttgtcaaacagcagggcaaagatatctccaaagccaagcaaggccaagtttgctatctcaggagtcttgatgaccctgagaatatcataactggcaaagtcccactggtagagaccaagtgctgaactacagaca

SEQ ID NO: 377707 - DNA, 392 bp, Homo Sapiens
caggtcaggttcacagagtccttatctcctgtgactgtggtcttgctggctttgatttggggctttgctactactggacttagctctgtggacaagcagagtatctgagataacctactgagaatagggttggggcctggggcctagggctatgctcctttccctgagattttagccagctctcaggtcccacagtgagctgtgcaaaggtcaccaaccaggggatagccctgaccctcagcagaaggtcgagtgtctttgttcaggtgatgaattgtaaggagagggctgcacctccctcctgaccccagatcgtctcagagtgaccctctggatatctctatatccccacttggaatcttcttctcagcgcacagaccgagcaacctcat

SEQ ID NO: 377708 - DNA, 192 bp, Homo Sapiens
attaggcgcgttctgcgtatttctggttttgaagtcctcagcagattagaggcatcccaaaaggagaggagtaggtaaggtcatttaacaacatcaggaatggagaaatattagtcaatgacgaggaagattagaaaactgtaagaggccaacaaaagaactcgaaaaacatgaccgtgtaataggtaccga

SEQ ID NO: 377709 - DNA, 231 bp, Homo Sapiens
ggccggtacccagaagaaatgtaatcttcctctgaacttcagctgccatgtgggaagctgacctggacatagtccctgttcatagggtcgggcatagctgaagcacggcagataagcaaagccaaacttcaaagatgacatcaggaacctttagatcaagatgtacatcaagttagaaaaatcttattttgcagatacgcaggcagaattatgatcttttaatttttaaag

SEQ ID NO: 377710 - DNA, 328 bp, Homo Sapiens
gggctatatactccatggccagaagccaacactgaggctgttatatgaggtgggggactacctcatgaaaacatgagtcaggaatggcttctgaccatggtgtatgaaaagcccttgtctaaaggttactgccctgagaaaataatccaggaagaagaggatagacatgaagacactttaaagcctcctgaatagaatgcatccagaagcgaattccaggagattctgtcatcatgcttgcctttcaagcaaacaaaattagctgctagaactgagaaagagtgtaaacaccaactaaatgcctcaaagagccatggagtaaatggca

SEQ ID NO: 377711 - DNA, 300 bp, Homo Sapiens
gtgtgagccaccatgcccggccaattgtaatataaataaaggtcaccaaccctgtttgtctgggcagtaagcacctagtaggattgcttcagagttctataatgcgcatgtaaaaattccaaagtgcgttatggcgatctcgggctgggcttctatagagcagcccaggcagcagcagtgagaaactcctgtgtgtgcctcgtactactgagtgccagggattaatgccccacttgccaggtgaaaggactagaggctcacacagatgggcttgtcacagcctaacatgtgagctgtgga

SEQ ID NO: 377712 - DNA, 441 bp, Homo Sapiens
tgccatttactccatggctacaaagtagcagagccaaaatagtgtgggattctagaggctctattatttcacattaccttttaattcattttatcccctttatagctctaaggtatgatgcaaaaatattctctaagatttgagaaatgcattttctttagtaaggctgataggatcacacatcctgcagcagtatatttataaagaatagaacagccttatctctttacctcaagagacatgagaatttatacatcctaactccccttccccaacactagggggaagcagctaaaacaaaaatcagactggattgagctgctggaatagccgggcatctccacaggtttgtccctattatacctagcattgctgtctaacagtaaaatggggagatacacatggcctgatcagctatgcctggccatggagtaaatggca

SEQ ID NO: 377713 - DNA, 386 bp, Homo Sapiens
tctccctactgtatcctagtgtaggggccacttaggatgtcttcctgccaccatgacccaataatctctagagcctgttagtgttctccagattgaagccttccctctaactgctcctaaatctgtgatgtagtggaaaaagtttcgaggccttgattctcatcccaggtttttcacctacagatcatatggccttagcctcttgacaccattgtctccttatggccgaagatggaactgtacttgggtggtatctgagcaccctgttggctttgactttctagggctcttcccttggcgccgctctcttattttaaggataggatgtgggcttagcgggtgtgtctctcgcctatcctctcttctctgcagctgatccgtggtgc

SEQ ID NO: 377714 - DNA, 350 bp, Homo Sapiens
  misc_feature (144)..(157): n is a, c, g, or t
gttcgactgagcggctgaacttacaaaataaatacaagcagaagtttttttagttatactgtaaaaagggaccactccctggcaggtaccctgagaaaaaattcaggggttccacataatctaaaggcatgatgttgttgtccnnnnnnnnnnnnnnaagaatgaaggcaatttaatatgtgggtatcccaaattatgttacaccaaacatccttaagaacacagaaaatacttagcacatttatcaatcactctttggcctgggatcaaaacaagcagcaacaacaagctgttctgatttacactaacttagagggggcagagacacacacaccattggttcagttcaa

SEQ ID NO: 377715 - DNA, 356 bp, Homo Sapiens
ggtgatgggactcccagtgcaccggcttcttttcatcctccttcagcactgtgagcttggtgatgggtggcgggccaaggccgggcagctggaaggcatccctcctccatgattgtgggcacccagtgagcccaggctgctgtgagctgggtctgggacacttgtgccagaggggattcttcctgttggggctgcaacagagccaggcagttccacagaggcaggtgagcaacagcaggaggccgaatcaggcccaggatgatgtgtagctccgacccctctggggtcaaggtcatcagggtgaggactgtactgttggtgtgcccagcctggctggcagccatgaggtggatgtg

SEQ ID NO: 377716 - DNA, 441 bp, Homo Sapiens
  misc_feature (34)..(34): n is a, c, g, or t
  misc_feature (423)..(423): n is a, c, g, or t
cgtccgaaatatatcccaaactcagacctctgcngcatcactgtagtccagactttcctcataatttgtttgtagcattacagtggcctcctaactggtctcattctttcttcccttgctcttccacaggttcttctcaaaatagcagtttgctttagcagtccagttaaagtaaattagatcctgtagctcctctgcttggaatctttccatagcttctcatcttgtccaaagtaaatgcccagttctataaaatgactctaaggccttatattataatctctcatgcttcctactgcctctgttacccatctgagtggcctcccaagttctaaccccctcctcatgccacttcaagtatactggactcctaattgtttcaaacaggccaggtatactcttgcctttccctttatgtttggnttccagtattctaaccca

SEQ ID NO: 377717 - DNA, 227 bp, Homo Sapiens
atcagaccaccacactccagcatgggtgacaagtacaaggtcacccctgaaacagaggacaagggtcttgctgtgaataagagccgttgtaactgtaccaggctggtgactggcattgccatcttcttaacttttccccttcaaggagcccaacaggcccttgctttttaaagaggaaactgctgaggacaatagtgtattaagagggtttttctccccagtccttt

SEQ ID NO: 377718 - DNA, 454 bp, Homo Sapiens
  misc_feature (440)..(440): n is a, c, g, or t
cgatcggctcggaccccgaagccactgcacactcttgtgtgtttacagtggctcagtcaatactgttgcatgaggaaagcaatgcattcagactccagcccagggtgttcacggcaccctgcaaagttcagcgccaaccagctgattccttcagggaatttttaaatttgtctgagatgctgtcactttaccatgacagttaaggggagaaggaaaaagaagtccttgcagtagcaccaagcactagggagaggttggagacacggctgtggtggagagcatgggctctggtgtcagacaagcctgggtacaagttccaggacccacctcactgcatgcccacacctaacccgctaacagggccgttgtgaggaccagagattgtgaacagagcactgagcatgaactaatgtcaccacagggtctaatgtattccaggngaggattctgccct

SEQ ID NO: 377719 - DNA, 836 bp, Homo Sapiens
acagatgaagaataatgggttcaaaatggaagtgggacaatacatttttgtcaagtgcccaaaggtgtccaagctggagtggcacccttttacactgacatccgcccctgaggaagacttctttagtatccatatccgcatcgttggggactggacagaggggctgttcaatgcttgtggctgtgataagcaggagtttcaagatgcgtggaaactacctaagatagcggttgatgggccctttggcactgccagtgaagatgtgttcagctatgaggtggtgatgttagtgggagcagggattggggtcacacccttcgcatccattctcaagtcagtctggtacaaatattgcaataacgccaccaatctgaagctcaaaaagatctacttctactggctgtgccgggacacacatgcctttgagtggtttgcagatctgctgcaactgctggagagccagatgcaggaaaggaacaatgccggcttcctcagctacaacatctacctcactggctgggatgagtctcaggccaatcactttgctgtgcaccatgatgaggagaaagatgtgatcacaggcctgaaacaaaagactttgtatggacggcccaactgggataatgaattcaagacaattgcaagccaacaccctaataccagaataggagttttcctctgtggacctgaagccttggctgaaaccctgagtaaacaaagcatctccaactctgagtctggccctcggggagtgcatttcattttcaacaaggaaaacttctaacttgtctcttccatgaggaaataaatgtgggttgtgttgcagtgtgcttccg

SEQ ID NO: 377720 - DNA, 620 bp, Homo Sapiens
gctctagagatcccccgaagccactgcacaggtagtcaaaggtgggccggtcctctgggcgctccttccagcacagcctcatgagttggtacagctcctctggacagttgtcagggcgcaccatgcggtagcctcgctccaggttctgaatcacctccgggttggtcatccctgggtaagggatgcggccgtgggtgacaatttccgtcagcaggatcccaaaagaccacacatctgacttgatggtgaatgtcccgtagttaatggcttctggcgctgtccacttaatgggaaacttggccccctccctggctgtgtactcgttgtcctcaatgaggcgtgctaggccaaagtctgcaatcttgcagctcagggtgtcagacaccagaatgttggcagcccgaaggtcacgatgaatataattccgctcttcaatgaatgccatgccttctgcaatttgggctgccatgtccaggagtttgttgatggtcaacttgatgcctgaagggctcttgagaaaatccactagacccccattctccatgtattcagtgatgatgtaaatgggctcctgggtgaccacagcgtagagccgaaccaaccgctggtgtgcagtggat

SEQ ID NO: 377721 - DNA, 645 bp, Homo Sapiens
gtggatgtgatacagactggcgggctccaggccatggaggtcaaagccacgggaggaggcattcaggatggcggagaaggactggttctgagcgttggtccagaagatggtgtagtgggtaagggggctcttccccagctcagggggctcaggcacccactccagctgtgcccaggtcttgccaatgtgctttagatgcagctctggggcatgggagggagccatttcttgagagtaggcatagacatgctgggagggtcccatggtgtcctggtacaagggagtcacgatgatctcatagagctgaaagggcctgatgttctccttcagcagaaaccccgtggctctcccattctgttccatcctccaggtcttgttgctattgctcgcactgggggggcccaggccccactcaatcacatagccctgaggccatggattggggggctcccagcctacccagaggctgtgagggtctcgggccatggcatggagtctggtcagagctgggcctctgctttctgagaagaccaccggagtgggacgagaggtcccggctgagttataggccacaagggccacctcctgggcttctgaaggcaggtggaaggtgcagctgagctctgcggtgtgcagtgtgctgcg

SEQ ID NO: 377722 - DNA, 520 bp, Homo Sapiens
gctctagagatcccccgaagcacactgcacataagcacctcttggcccacaggggattgggccctgagcacactcaggtggcactgggacctctaagggctgcgtcccctgccgcaggctctggcaacatcgggaagggaaacggttagagccctgggctgaaggcctcttcaggtcttggtcctactggcatcttagatcctgagagtgggaagcaggagagagaccactggggcttggggtagccttcccccatctccagctgttgatctgcctctgaagctggcatcttagtcccatggagagcccacgctcgcctcctccagcccacgcctcagcaggccccccacagccgcactcacctgagtgagagggcctccccccaaccctctggggcaggggatgagtttcacagctggtcctgaggcagtctgtataattgctggtccattatccctgcccgctgccctgtggcatgattgaaggaatccgctcaggtgcctcaatttccttgcaacag

SEQ ID NO: 377723 - DNA, 477 bp, Homo Sapiens
  misc_feature (400)..(400): n is a, c, g, or t
  misc_feature (458)..(458): n is a, c, g, or t
gctctagagatccacctcataatgggagcccaaagacatacacttggcgaaaacatcgaaagagtagcgaagaaaggggccgcgaatgaccttctagaggtgaaacttgagctgatatgtagagaactaagcctgtaaatctgccttatcccccactttctctgctcccaatccttcctaaactgagaaaccctgacctaatgcaaccttagctgtcttcttctctgtaggctgctctgaaccacttgcaaaacatttcctaatccttttaagatgacctacccaccaggtcttgccttcttcccttttatgatctttaacaatattgactaaatggaaatattgcattatttattatttctgtcaggatttagatgatgtgccgcttttccccttatgngaagaaagaaatctccctacctccactaaatgcctaaccttctagattgaagattcgngattgtgactcttcctgag

SEQ ID NO: 377724 - DNA, 156 bp, Homo Sapiens
cgaagccactgcacacgatagagtaatatctattattcatatggaaacattccatgtaacacacaagcttaaaattacaacaacttgtcaattaagatttacttaactggcttaagacagtatttctttaatttggctaagaatataaatcatctg

SEQ ID NO: 377725 - DNA, 304 bp, Homo Sapiens
gcgctctagagatcccccatctcttacatttcgatgtatcatggcatgttagattttaatgttggcgagtgaggcttcttgaatcaaaaattacactggataaagtcaaacagacaaggaagactgtattcaaggccgctgcaataggggaaggaggccagaactaagtgtgaactcaactcctctgaaacaaaaggcagaagggtttttaagggccaggatgagctagtggaaaaatactgaaagatattatgtggggcagttaatcgggtgtgttgggcacacattatggaggggtaccgag

SEQ ID NO: 377726 - DNA, 738 bp, Homo Sapiens
  misc_feature (593)..(593): n is a, c, g, or t
  misc_feature (610)..(610): n is a, c, g, or t
  misc_feature (633)..(633): n is a, c, g, or t
  misc_feature (642)..(642): n is a, c, g, or t
  misc_feature (650)..(650): n is a, c, g, or t
caactgcacatcttacatatcacatacacactccttagcccgatgcactctagctttgtgaccatgtgactgaagtttgtgatggcttggttatcaagtagagtggtaaaatttaaccattcctggtgaggtgcccataagaaaatcataggccaagataggaaggggcattccagcaaaccccgtgttaatgctactgtggtttttaaatttttgtctaggggtttctttggggattatagaacagcatctgctgtcctccggggtcaagaaaagcacggaaagacaatatatgatgtacccagggaccagaaagaaaatttctttgcatcttagaaatggtagacattcattgtgactaaagagcttctatgcttccttgtttccatgccaacatgctgagcatgctcacaaagaaggctcgtccattcctcctgtgttttagtatttggcccagaggtttcctaaatggttgccttgaaatcactgtggtccaaatgtaattcttacacactcaaattatcactgtctgtaacacacttgtgcacctgtcttacattctctgttgctcccccccacactcttgctcagtnctgtcacctgttcagtnctgcttactcactcaattgttancccttttgnctgttgtncgtgtttacagtttggcattttgaatgattagttgggattaccaaacattttttaaaaagatattatgcaataaatatttttttaatt

SEQ ID NO: 377727 - DNA, 174 bp, Homo Sapiens
tcgactcggaccccggagcacactgcacactgacctatgtacacatggaaattctcaatcagctgttctctcagagaaaattagagaatcccagtgacttaagtcacctgacagagtaaagcaactcctaggagttagtctccatattctacaaatgtctattattttcaagac

SEQ ID NO: 377728 - DNA, 403 bp, Homo Sapiens
tagcactcaatgcttagctactacttataaataagaacatgcagaattcgattatctgtttctgggttaaggcacttaagattatggcttaagtgccaatcctaagctgcatccatgttgctgcaaagaacacgatttcattcttttttatggctatgtagtattccttggagtacatgtatcacattttctttatctggcgccactattgatgggcacctaggttgattacatgattttgatattgcgaacagtgctgcaataaacatatgtgtgcctatgtccttttggtaaaacaatttcttttcctttgggtaggtacacagtaatggggttgttgggtcaactggtaattctatttgcagttctttgcaaaatctccaaactgctttccacagggatg

SEQ ID NO: 377729 - DNA, 393 bp, Homo Sapiens
cccttataatgagagcccagtcacaaccctgcctgatgcgctagaaccaggattagggttatttattctgttcagcacttactgagtaccggctaagtatttagggagagaaaagaaaagtgtatagacgatgttatctcttctaataaagcatcatttttgcgggggaggggttgctttttattctgcacatgaatacatgaagtggcacaacattcaaaagagattataaaggataggcagtaaaaagtaagtcttctttccctgtccctagcccacctagttctgctaccttgaggcaactacagttatagtttcaaagtataatttttaatatttttaaaatactttaatactttaaaaatcagaacatttatctaaggaatagaataa

SEQ ID NO: 377730 - DNA, 430 bp, Homo Sapiens
caaggatgaggtgtaaagactcaaggggcaacatgaagtttgaattagagtgaaatattggcaatgacagtcctttagtattagtagaaatagagctaaaatagaaaagatgccaagttgagtttcagacgctttgaatttgaagtgatgatagaacatctcggaagctcagataaatgacaggtttaatgataaagaattgggagtcaaatgcagagtgaggcaggtgaatactatgtgaggagatttgcactgaaagaactattaagaaagaaaagcctaaaacctgcgttatggaggtctgcggctttagggaaaatgaggaggttctagagcagtaaaagaagcaggatagtgtaactgatactaaggggggaaagaattttcaagaaggaatgggcactcattatggaggggtacggagctcatc

SEQ ID NO: 377731 - DNA, 379 bp, Homo Sapiens
gcagctccgacccctcataatgagagcccagtgagactcttaagctttttagagcacaagaacaatgccttatatgcattcatcgcccctgccaatatttgacacatagtaggtcttgccctagagacagaaccaatttggacagcagttttaacaattcagacaccctgtaacatgtcgcttctgtaacaatccatggctttggacttaagcccagtgaaagcacattagtggttatgagtttctccctgtaaggtttttcctctttgtctcctttctattttttgggacgtgagcagcctctgtctctctgtagggaagcaacagacagcttcagggagtacaaatgttatattcacatgtggaacatagccccaga

SEQ ID NO: 377732 - DNA, 247 bp, Homo Sapiens
gtaattgcttctacccaggtcttattagaaggcattgggctaaatggtgacacattggctcccatggagacagataaacctactgcttcagactctaagggcaaatctaaaatcacaccagcaatggctgccagaattaagcaaatcaagcctttgttatcagcttcctccagattaggccgagcacttgctgagctatttggacttcttgttaaactttgtgtgggatctcctgtcctgcctgggt

SEQ ID NO: 377733 - DNA, 305 bp, Homo Sapiens
tttgtctggaaccatgagtcactacagagatacgataatgtgaagagagggaagagaggacagcatctctagatatggtagaatcatgtggctcggtcactcagtctcttagggtagaaagagaagagtgaagatgatgttcagatctccaacttgcggggctcagagagcagctgctgtggcaacttagtacacaaggaagggaaaggtgatggtggactgtgtcatcaggatggtgggaattgggctaaaatgtaactaagcaacatgcacagtgtcctagaagactgaagagaaagtcagtg

SEQ ID NO: 377734 - DNA, 254 bp, Homo Sapiens
tgcatggggtcacatacagacgatttcacatcggccggctcagtattcaccagcagcgtgcagcacagtgcgggcttctaggaggcagtcggtggatatctacccatgatttcaagaggtctgtcttgaccaggaatgttgagaagtgacctgtgtctctgcagcattgctgctagttagtccctgcgtggaagaagtggcatgtccctcctgtgtctggctcacggagaccggcgcctcctgtgtttgccccc

SEQ ID NO: 377735 - DNA, 365 bp, Homo Sapiens
aagtcggtaccctaactccccagaaaaggctctctcattctgcacctttcctccccttttctgtttatctcctctttatgtctgttctgcccgatgctctgcaacttacttcacctctcgtagctctttctccccaatctttctgattgtccccaatctccacgtatttccgcctctttttccccatctgagctccctctctgctctccttgttaaaattccctcttacctgttacacctcctttgttcccactctctagcacccccaactccctaggcttcctccctgctgtggttctccctctactctgcttgtcacccactgccctctctccctctcctctctcattctgcacctttcctcc

SEQ ID NO: 377736 - DNA, 448 bp, Homo Sapiens
tacctctctcccataaaagggactctgagttgctctgaggcaggcaggtagcctgtaatatgctcttcaatcaaacacttttattccagggactctcctcaagtgagaacctccccctatcttgcgagggtcagtgatgtccaaggtttgcagcacaagaaaaatactcacagaccatgcctcaaggttttaagtcaaggtctctaaatttcttatgggcaagattctggttgttccaagatgcccaggcagaaataatgtttccaagagaaccaaagagctgcttccaaaacatacatactgccacagatggaaaagacccttccagttcatgcttacagacatgcagcaattaacagccactctctggagaaaatgttaggatacaaccagtaatatacattcactactaggcttttgagaaataagctatgaaaatgccaacctg

SEQ ID NO: 377737 - DNA, 172 bp, Homo Sapiens
tttgcttactagtctgtgaaaaaactattatgtagcctggcactgaactaggcagtatagctgcatggtttctttgttgtaatgtctccatcctactcctatttttcaattactcttcacaaggttcggacccttaaagagtgggaaatcggccaggcgcagtggctcacac

SEQ ID NO: 377738 - DNA, 254 bp, Homo Sapiens
  misc_feature (113)..(128): n is a, c, g, or t
gggacctctctcccagaaaagggagaagtatcaggttgtgaaggcattgctgagtgtcagaaatgaactctacttctggctattctagttccttgagacaataaatttcttcnnnnnnnnnnnnnnnnggctgcgagttggtgtggggtttccagtccttggaaatagatagggcccaaccgggtataaccctgataataatggtggtaaaacccaagagaaacctagactgacgggacatacacatacccttt

SEQ ID NO: 377739 - DNA, 560 bp, Homo Sapiens
ggcggtacctcactcccagaaaaggctcagcgtgagataaaacagtgcaacaaagatattcagaacttccctttcccctccacctctaagcaatcaactccaactctctttcccttaagggaagtgccccttggagaaggaagcatcggctttgttaatggtcccttaactagctcagaagtccaaagtttaaaagaggaactcagatcattattaaataacccctatgggactgcagatcaaattgatcaattcttagggccacagctgtatacttgggctgagtgaatgtccatcctgggcatcctcttttcaggggaagaaagaagcatgatccatagggccgctataatagtctgggaatgtgaacatccatccaaaacattcctgcagcagaccaaatatttccagcccaagaccctcaatgggatggtaacaatacagctcacccaagaaaagcctgaccctcttctgtggacttctgatgaaatccactaggttgagcagctaaaacacctacccatcgctattcctgtcttagcgctgccatccctagaaaa

SEQ ID NO: 377740 - DNA, 191 bp, Homo Sapiens
gcccagtgtggccagaacagctggaactcctctcaaatgacccacccctggggtttggccttaggagaaacatcacgtctgggctccccctcaccctgccatgggttgaggccagcacctgtctagggctgtttctgcagctgctgcctgctccctttgtcctgcctagtgctcttgctggagccacgtgc

SEQ ID NO: 377741 - DNA, 211 bp, Homo Sapiens
ggacgctcactcccagaaaagggaaggaggagaggacagagatggagacatgatcactctttcaataaaatatactttaaaagtttatattccttgcagcattatttataaagaaacaggcttagtgtaaatgaatgatgataagaaacatccctacctaatttgttactttccacaattggaactttcctattcacagttctcttgtccc

SEQ ID NO: 377742 - DNA, 180 bp, Homo Sapiens
tccaggtttcctcgtggctggagagaggctcgctaagggtttaccccagtctgcctgctcatggcctagtgcctggcccagactccctcacagcctgttaagggagaatatggaaaaatcatcgcaccaccaacttggagttgaggggtccaagtgcatccccccttttctgggaatagg

SEQ ID NO: 377743 - DNA, 453 bp, Homo Sapiens
accgtcactccccagaaaagggaaatgacaaagtcatgacagctcagtagccttgaaagaaacaaaaatccacattggtgatactttccctgggcaatgtttatgtctatttctagatgaacttccaggttcaagcctcaagttaaatcacttacttcccaccctccccattctaactcttaaccaacctcatcgttaatcagacaaatactaactacaagccctgggctctgaaaataagtgccaggcaaagttaaaaagacttggacagactgcatgccagtctggccattgagaagcaagtactcaagactaaccaggtacttttgagccctcagactctgcatcttggaggaatgccatttttcatcacttactgaggttatgaagtgtgccacagtttacataaagtactttcacaatttacagaggtggcctcagaaggcatccatg

SEQ ID NO: 377744 - DNA, 768 bp, Homo Sapiens
tagcgcacagatcagaagctgtcagcgtggtctttgccatagcgactgcccattggaaacctctccagttaagtccatcatgacaaagagaagtgctttcaggaatgtctgctggttctggagaacccaagtgagaggcagccgccccatgagaaacttaatagacaccacaccccccagctttgcataccacgcctgttcataacaacatgcacacaggcgctccacgatgtaagaaaacaggggcagctggcaggccctctccttggagcccaggatgatacttgcaacatcaaatatcacagctagggccacctccccgattttgcaaagctccttttcttcatatgccatacaaatagcaattgcatcaatgagaaccaaaggatccattcctttcgagccactttcttcactgtgaaacatggctgtgctgggctggatgcccacctggtaccaaggcagcaagaaagggccacactgctgggcgactgccaccatcgtatagtggcggatcaagctggcgacaaagggcagggcgctgggccgcaggtccttaatgacagcagacatgaaggcgcctgtcagggcctgctcaaaagtcttccgggctggagtgtcctgggctttgtagcgatgtgagatgataacattggggatggtcttttctgtaaagttggggtgtgccaggagctggtagagtgcgtgcatgttgtcctccaggctcatcatggccaccaggaagcatttgatcacttcccacgggga

SEQ ID NO: 377745 - DNA, 295 bp, Homo Sapiens
ggagggacctctctcccagaaaagggggtagtggtggagaggtttgcgggaagaattcagtttactcctattgggtttgaggagaggtagactagtggaaatctagcaaaaatacaggtctcagaaacataatcactttgaacccctttagttctttatttgcatgagttttagtttaaggagatttctggtagagggagaacctggagcagagggagaaggaagggtgatggaaggaatgccttagtgtcccagcccagtccctaaatgtgatggtgaaaaggcttaaggagag

SEQ ID NO: 377746 - DNA, 496 bp, Homo Sapiens
gaggtcagaggcctgtcttcaggcatggctgaagcaaataaattcacctggcagtattgagctttctcaggtaggcatttcaatggaggggcaggggaactggggtcatcctagggacagggcctcatgctgctagagatcatgctagactgtggtcctctcttaatgcagaggcttagatagagtcattatgtgctgagatttctgcagttctcatagatcatgtgtctagtcctcccaagaagtctctctacacagacagcaacagagagattcctacaacaacagagattcctacaaactgcttcagctctgctagcatgtgtcccactatcaactatttctgaatgatgcttttggggatttcctcacttggtttgtggtgggggtaggatatgcctcagtgctttctactcttaaattcctctgaagaatcatcttctttgatacactctaacttcataagatttggcggagagaccttttcccggagtta

SEQ ID NO: 377747 - DNA, 524 bp, Homo Sapiens
ttggactggaaaatatctatatgcttagcaatcaagataattacaagttattgattgaattagaagactggagtgataaaaaagtctatgcagaatacagcagctttcgtctggaacctgaaagtgaattctatagactgcgcctgggaacttaccagggaaatgcaggggattctatgatgtggcataatggtaaacaattcaccacactggacagagataaagatatgtatgcaggaaactgcgcccactttcataaaggaggctggtggtacaatgcctgtgcacattctaacctaaatggagtatggtacagaggaggccattacagaagcaagcaccaagatggaattttctggtccgaatacagaggcgggtcatactccttaagagcagttcagatgatgatcaagcctattgactgaagagagacactcgccaatttaaatgacacagaactttgtacttttcagctcttaaaaatgtaaatgttacatgtatattactgcactctctgtagtgga

SEQ ID NO: 377748 - DNA, 527 bp, Homo Sapiens
tagcctcactcccagaaaaggaaaaaaaggaaagagacagaacaacatcgattagactctatttgaatgtaagccaaactttattacaacaatggcccattgccctggagctttcaaggatataaacagcagcagctgatatggtttactctctttctcagaagtaatcatccccactgaggcaacacccaccatggagtcctggagcaggtcttcaaggcgggataagctggtgttgtggtcacaggaatattttcgtttaatggaatcttggaggttcctcaagaatgactccagctctcgtgcatcactgaagaactatgggaatacaaagtaaggatgccttctgctcaaaacattagaacactggaatattaactaagaaagaacaattttactgtgcagagcttagcaaagctgattacaccctactgcattagtgacagtttattacaaggaccactgaaacataaaccgaagggcttaaaaagccatgcagcaaaatattagtgctgactaccccaaac

SEQ ID NO: 377749 - DNA, 326 bp, Homo Sapiens
gtgcaggcttagacaggtttataatcacacagataaagtggaaatgtcaggagttgaacccagcttagtctgcatccacagtctgtacttttagttattatacagatgtaggataatccgtcagagtaactcattagcactacactaagttcagggtcacagtcaggccctctgtctcacatagcttgcctctttagttcttggattaaaccttgacaatttctttctacaaaatgtgtgaaatctgcctagaaagcctgagaaaggaagaaagacacatgagctaactacagaccaccacatgagtatagaggaagaaaaattac

SEQ ID NO: 377750 - DNA, 501 bp, Homo Sapiens
  misc_feature (198)..(198): n is a, c, g, or t
cagcggtatttgaccattaaaacctcacaccttcagtaatatgcttcgcaagtcaacgtaactgaacagccagcactcctgagaacacccggggcacatccctccttcccaccaggagaggccggaatgagcaggtaccatgcggctttcttccagcaaatctctcccaagggttacactgggagcttgggctgatgngagatacgcataaacttctgcgctgaggactgctgcaatgcagtgacagcactgagcatccttcagctgaaccgtgaaccaggggagaaacctgcacccaggtggagctgttgcggctcactctgcagaaagacagcaggtgccacaacctgggatgtcgcccactggggtacaactccatgccccacatcacagcaggcaggagcccagggaaacatccggggtggcccaggaccaggtctcaccgagacaagacaaggggactactgtgtccagatccccccccgcggtgctaagattgga

SEQ ID NO: 377751 - DNA, 452 bp, Homo Sapiens
  misc_feature (178)..(222): n is a, c, g, or t
  misc_feature (364)..(364): n is a, c, g, or t
gctagattcattttgtataatcatgtatcctcttgtgtgctggtagagattttaatcctgatttttccataaaacatgagtattaagaaataattcctggtttggagaaactggagaaatcacccttttaaggaagaaacactggaaatttctgctaacaccaagatatttaagagtnnnnnnnnnnnnnnnnnnnnnnnnnnnnnnnnnnnnnnnnnnnnnggaaaaactgggagagtcaaaagtgagcagaagctctccatttctacttctgtcacaaaccacattaaattgtaaagtaaggcccttctccacttgacttcaggcagcagattgtctagaagcctaaggacagcaatttctnctggacaagacaaagtaggatattttattacccgggggttggccaaactacttgcccacgggccgaatttgggccagttctgtttttt

SEQ ID NO: 377752 - DNA, 555 bp, Homo Sapiens
agttcgggaggtgctctggtggcctgggttatgggaggaagaggtggcccgggatggcaagttgtactgggtggggccaaaggaggactggggtgggtcacgctgggctggcctgctgggagaggatgtctgaggcctgtcaccttgggttggccggagggcgatggatgcccagggaacctcgctttgcttggagcgagatggggaagaggttcggggaccataactctgagttgaccggaggggaaacgaggcccaggggatgtctttgttagtacgatggggagatgaattcctgggattgttccattgagtggagcggtggggagatgatggtctcagattctccttttgggtgcagcattgagatgaggaggttccagggctgtctcgttgaaaagaaaaggactgtgtgcggtcccgctgtgtacaagtgggtctgaggttatctcgtttggtacaagaggttttacggattgtcctgttgggtagaagatgatctcggaatgttctgttgaatccaagttctgcggctgtcctgctgggtgcctctgg

SEQ ID NO: 377753 - DNA, 260 bp, Homo Sapiens
tcttcatattactctcctagagtggagagtttgaggtacattttctaaaacttgcttctgaatagcctggaattctggatcagttggaacagcatagtcagtatttggaagatggtgaaacactgaatttgctaatttactggtgattataggtacctgaatacagaggtgatacggcctgcatatgatccaggcagattttattcatatgctgtagtttgtagtctgaatggtcttcttcaaagtgtactattaggtat

SEQ ID NO: 377754 - DNA, 483 bp, Homo Sapiens
gcgcgctatcagagcaccgcgggagaagctgtaagtactacctaattcagaatctctctccagttcccttgggtattaattatgcagccacagaagccagctgcatactgggaaggtgacacacttcattccccaagtacagagacagggagtgtggcttgctccaatgtgggctgggccaacacagaaggaaagaggacagaggacacccatgagcccctaacagagcacaattttgagcagaacaggccatcaccccaaagccaggagtaggaggcccatgtgggacagtctaaagcactaaccaaccacagtccccaggcttaatatccattccttcatcaaaaggccccaatcttcagagaactccattattaaaaacgagatgtgtgaatcaccactttccctttctgcagattggggttggggtcacctgtgaagctatgttctacagcttccgctgaggtcccccacgcgatgccc

SEQ ID NO: 377755 - DNA, 214 bp, Homo Sapiens
cctggcttgctcaggtctggctgagagcaaagcccatgttctcagtctccatatgataaccagattctgactgagtcaatgacagaaaaaaaggagttatcaaaggaaatccaaaaggaatgaccaagattgagggtgatgacaggaaggcactacccaggaccgaagtagtccagagaagggcatcacagcaaagacctgagcagacgggcca

SEQ ID NO: 377756 - DNA, 394 bp, Homo Sapiens
tgcagtgggcacgtagagcagctgtaagtgccattgccgttgtccttgaccaacgcctccacaggacagccttcattgtcctggacttggacccgaagtgggggccttgccaccgtgcttggcatccactgtgaactctgctggcttattgacggccacacctgtcttctccaatccaggcccacgtgccttcaccctgtctgggtggaagtcctggggcgcgtcacggatgtcagccatgaaggggctgaggcggatgtcttcgctgttgcacagcacgtgaacggcatactcgccagcctcctgcggccagtagcgcacatcacaggagccgtcgcccttgtcgtcacattcgatcttagcctgcgatggcccttccaccgagaagcccagc

SEQ ID NO: 377757 - DNA, 453 bp, Homo Sapiens
  misc_feature (188)..(197): n is a, c, g, or t
  misc_feature (222)..(275): n is a, c, g, or t
  misc_feature (287)..(362): n is a, c, g, or t
ttcagctactcaggaggcattgggaacctttaagaattctgttacttttagaactttaataccagataggatcagataaataaatagttgtaggtagaagaattcccagagtaggtgtataagtgttaggtgcaggataaactatagtgcccttccagtaacaggacatctggatgttgatcgtttcnnnnnnnnnnggagacggacgtgtcactccgtcannnnnnnnnnnnnnnnnnnnnnnnnnnnnnnnnnnnnnnnnnnnnnnnnnnnnngttcatccgatnnnnnnnnnnnnnnnnnnnnnnnnnnnnnnnnnnnnnnnnnnnnnnnnnnnnnnnnnnnnnnnnnnnnnnnnnnnntaagaaggggttttggccatgtttgcccaagttggtctcgagctcctgacctcaggtgatcttgccccatttggcctcctgagtagctggg

SEQ ID NO: 377758 - DNA, 407 bp, Homo Sapiens
  misc_feature (304)..(324): n is a, c, g, or t
acatgttctcatagacaacaacggcactctcggatatatacagcagacacacactcacaaccactctcagacatcgatgcccttcagcaacaaccttcagggcctcagactcacagacaacaaccacacttttggatgcatccctcacggacagcattcacagatgcacactatcctacaccattctcagacatgcgttcttccagacagccttcagaaacacactcacagacattactcgcctgctcagatatagagcccctcatagacagcgttccagaacataccattgcacacttgcttnnnnnnnnnnnnnnnnnnnnntccccctgtgctggtggtgctcccagacctgggactgtcaggatggctgatcagtgaagactgtcctagtggctgccaccttc

SEQ ID NO: 377759 - DNA, 523 bp, Homo Sapiens
gaggggctacttccactagctgcaaccctgggaagcatgggaggggaggggtgtgaccctcaggaacagtgtggtccttggagggtctagacagaccctgagcatcaccaccccagttattgtgaccccacgtttccacccatcagcctcctggggtctctgcctgtgtgaacagtagggcccaacctggaaccagatggtacggccatgccggtcctgcagggagctcatgcctggcatgccatagcagcgcagccaggctcgaaaggcagcaaagtcctcctccccgctctctgacccgtagcctttgccccctgtgggacagaggaacaggcagagatcagagggcaggctcaggttgggaggagtggggagcctggttagacctggcccagacctcagctacacaagctgatggactgagtcaggggccacactctccctcctctggtgatgtgacctcagctggtttcttcccactcggccatgggtttctccatcctggagtgggcttaaggatctc

SEQ ID NO: 377760 - DNA, 377 bp, Homo Sapiens
gtcatggtctggacactagaacaggactccactccgacattccgggtacacagaacttcccagtgggaagagctagccacacagtggcagaagcttggaaaacaacccatcccagccctacgctctctgaatgtgaccttgggtgcaagctgggtttgtatgaacttactggcatttttaacaagacagcgtgtacgggagcatttcaactgcaaagaccactgaactggacactgtcggcgtgacagtatcaagtaaccattaggcagagcaaaacgtaaatcaaagtactctgtgatggggtagtcagtcagatagggtggggtcggctagggggcagtgaggacaactagatgccgaggtagacagaccaagac

SEQ ID NO: 377761 - DNA, 590 bp, Homo Sapiens
gacagtagacctggtactaactgacagacacacacagctgcagatgtacctagagtctcatctggttcttaaggagccctaggagcccttgagaaaacgaatgtcaaatgtattagagccactttgggtggagaaattcgagctagacttcgttaaatgcaaggggagcagactgagacttcccccttcccccaactctctgggttgcattccatagagtctttcctagaggcagggaaatgggctaggtggcctttggagcacactgctggcttggtaaatttctgatcttacagatgaaataagaggccttaaaaagtataaggcctttggctcctaagcactaatctgggcaggttagaaagctactcagggctttgggcgaaagcccaatatgcccattcagtaagtatataaaaccaggattggcttattgccctcaccattcacgtgcaaatttatcccttcccttcaacattggaaggggcctaaagtgggtgacccagatttgcgtttcagttctgaagaaaacatgcaagaaaaagaaaatggcgggaggtgctcgcgagctggttcagcccattgccctg

SEQ ID NO: 377762 - DNA, 762 bp, Homo Sapiens
  misc_feature (471)..(471): n is a, c, g, or t
  misc_feature (489)..(489): n is a, c, g, or t
  misc_feature (570)..(570): n is a, c, g, or t
ggccaccctattcacacacacacacctatgtgtgtatagatatttgtatatatgtgtttttatttttaaatgattctgtcagggtctcagatagaggtgaaattctaacctactcagagtgatttcttttaggttcccagacctgggatccacattttttgctctactgaggtaggaaggtgtcactagatccattaagaactgcatattcaacatctgtgagaatggttgaagctcagaagactggccagcttctcaaatacccagtgactgaaatacgtaactggccagcttctcaaataaccaaggcagtgccaaggttactactcaggagaatgtcttccatgtgcctggggcagacaggaagtgttctgaccctctgcccacagctttgttcctgtacccaccaactcaagtgattaatggggtggcaggtggtgcagcagccaagtgaccttcacacactgtaanttcttttgtttcctatgngacactttccagatggggttttcagcactcaggaaacctctttgtggctggcagtaatgaagaagtgcagtgtttatccangtcctctcctgaagccctgccctttggagcctcgtccttgtattgctgcccaggtatttcacaaattccagatcattcccacactgttcctgcacacacagcgctatgccctgtcccctgctgtcctcttgcatgtgacaagccacagtgactttatttcctatgtggtctaaccacaaggctcttacagaa

SEQ ID NO: 377763 - DNA, 456 bp, Homo Sapiens
gtaagatcgagcgaggaggatgaacaaagaaactgtttatctgtctccttgtgaaatacatagagtaagggagcgccgtaactaacacatctcttatttgagaagtgtctgttgccctcattaggtttaattacaaaatttgatcacgatcatattgtagtctctcaaagtgctctagaaattgtcagtggtttacatgaagtggccatgggtgtctggagcaccctgaaactgcaccaaagttgtacatatttccaaacatttttaaaatgaaaaggcactctcgtgttctcctcactctgtgcactttgccgttggtgtgacaaggcatttaaagatgtttctggcattttctttttatttgtaaggtgggggtaactatatagttattggctagaaatcctgagttatcaactgtatatatctatagtttgtaaaaagaacaaaacaaccgag

SEQ ID NO: 377764 - DNA, 491 bp, Homo Sapiens
ggccttggcccttgctttcctggaaatcaggtagtgtggctactccttgtcctatgcacatccgttaactgtcccactgattttgatcacgccctgtcctcctctactgctttattctttatcagagatttgtggtttaggggtaagagactgggctctacagacctgacccttgcacaagccattgaatctcactcagcctcagtttcgccattggtatgatatgggggaaagtcatattgtatcctattatgttgaagcctgagtctggacgcagtaaaagcttgtttccctctgctgctttctgagatctgcaatcgtctttccgccctgtctttccttgtagtttttcccccaccactctctgcagctgccgctccttatccctgccttctggcaccaatcccctcctacagctcgtccccctcccttcatccatccttctgcccctgtctactgtcttgttctgaagggctactaagggttaagga

SEQ ID NO: 377765 - DNA, 340 bp, Homo Sapiens
  misc_feature (115)..(115): n is a, c, g, or t
ggtcgcggtatggcaggcaggcttggaagagctgggggccgcgcacatgtgtggcagcagagggccgggcttggaaagcctgggggacaccgtgcagcttgtgtggcagcagagnggccgggcttggaagagcctgggggacaccgtgcagcttgtgtggtagcagagggttgaacagtgggatgctggtttaaatgggctttcaagaagtttcagaaacaaagccgtgtgcaacttgtgtcttcctgggcacgggtttctgggctgaggtcccaggtaccccttctcgtatttgggaagagtgaggcattaatgagagggattctcctctcccctcccc

SEQ ID NO: 377766 - DNA, 211 bp, Homo Sapiens
gtcgtcagtaggggactgtaggggtcatgagtaggggactgtagagttacactaggtgtggtgagtaggggaccgtagggttacgctggaggtcgtcggtaggggactgtaggggtcatgagtaggggactgtagagttacactaggtgtggtgagtacggggaccgtagggtacgctgagtggttgtcagtaggttactgtttcagtaca

SEQ ID NO: 377767 - DNA, 331 bp, Homo Sapiens
cagtatctttgcactccaatcattcacggagatatgaagagcaactgggacctgagtcaatgcgcaaaatgcagcttgtgtgcaaaagcagtgggctcctggcagaagggagcagcacacgcgttatagtaactcccatcacctctaacacgcacagctgaaagttcttgctcgggtcccttcacctccccgccctttcttagagtgcagttcttagccctctagaaacgagttggtgtctttcgtctcagtagcccccaccccaataagctgtagacattggtttacagtgaaactatgctattctcagccctttgaaactctgcttctc

SEQ ID NO: 377768 - DNA, 194 bp, Homo Sapiens
cgtcgacttctagtaggatcccccctcgggaatcgcaccggaggaacggggcggagagggacctctgctttgccaggctgccttttatacggcctctggtcacctgaccatggaacgaggcgcttggaaaccaccgtgaattggaccgcactgggaaacacagatgaggaaagtcaacacgctttcatcatact

SEQ ID NO: 377769 - DNA, 123 bp, Homo Sapiens
acagagggacttgcagatgcaaagatcccaaggctggtgtgggggactggggggagtgctccaggaacagtgggaggccagagcagagtgagccacgcaggggcagatcaggtgggagctaga

SEQ ID NO: 377770 - DNA, 577 bp, Homo Sapiens
gcctgctgaggaggtggcgatatttgccagtcacttggaccagtctcccaaactatctttttccacccgtggtggtgtctttcctccttactgaatcatttaggtaattacctcaattcttcactttactttggctgtgaagacagagtcttaatgagcccagagccctggacaatcccagctccagggtgaggcagccgggtggcggctgtgggaggggaagacggtattaggatgctcacattgcataacctgcacgtccaagtggccaagctggctgccatctgcagcccgggcgagaagacgggagaggccctccaccagccaggggaacgcagtcgctttctgcagtagctcccaaagcctttaggaaaagctttgttttacccctttgtcctccagaaataatgacctttgtgtgtcaacttttgtagtatctcatttctgaacccaaagcagatggttctggtgatttcagaaggcttagtgaggggatttgaggagcctgggtgagatctcaggtgaactgacacaaagcataatttctagtttctatagccaaggcttggggataagg

SEQ ID NO: 377771 - DNA, 215 bp, Homo Sapiens
ctactgcagtagaaaaccctcttctcagcatctaccttcagcgcctccatggggtcctacataattggtcagagaaacccaaccccatttggggacctagccagtgtttgcttattaacctttttaaggcctgcactatctgagcccagcttcccgtttccacaccctcagagcagctgtgatacctagcatgtcctgtcagagattgacacagg

SEQ ID NO: 377772 - DNA, 326 bp, Homo Sapiens
cgacatcctgactggcatggcgtggtatctcactgtagtttcgatttctgcaacccattacttgaattgagttgatcttgagagattccttggacacgggaagccacttaatccagattacctatttctgttgatccacattcctccagcttgaaagcctttttctggcggagaaaaacaaccttcttcttaaagctgcatgaaattttgctgctcccaaaggcatcatttagtagctctgccccaattattgatgaccacttttcctcctgaaaactgtttttctctgtcccacccttccccctagttccaaatgttaggctgat

SEQ ID NO: 377773 - DNA, 673 bp, Homo Sapiens
tgtttgcagacatctgaagtcagccagaggagagaacaaaagggaggaagcacattttgtgtctaagacagatgacacctttcagatacctgccagccaagacctcactcaccatcctgcagcaggcaaacgtacaatcctgtgtgaatacacgtgacctgacactaggcaggacactgtggggagccaggggacgggtaccactgggggcgccaaggcagctggaggtgataagatgccacagcagaatgttccaggggtggcaggagccggcgggcataggtcagaagccgtggccaatggccacataaccatgaggtactgacgcagcaaagagctgcggagcatgggtgaaaagaacaggcatctccctggaaaagtccccactcattcctgagggtgatcccgcctaggcagggaagtaggtttcctagcatagaccaggatttcattgaaaagaagagagaaaagcaaacgagcttcctcagcagggagggcaagccccaggcagaaacgctgcgggaagcatcaggttgccagattctccccctgggacattactgtcagctctgcagtaagactcactaagtctgactttaattaagacagaaattcaagtgggtacaaattagttttggagctaagaaactgatctctgaggcctctgaacact

SEQ ID NO: 377774 - DNA, 567 bp, Homo Sapiens
  misc_feature (388)..(522): n is a, c, g, or t
gctcgatttcctgaaagcagcctgctgagccagtgttcagacctatttaaaaagtttgacggtttctcatgccacagcacatccagctatggaccgtgctggactctgcctgatcctggaatgctagcccagtagccctgagtattggagctctgcagactctctgctctttccctcacccaggagctggctgtcacagtttgcctgacttcgaggactctgcctatctggtgccgggtcccctctgtgacctgctgaggccagcacacagtgtaagaaggctatgccagaggccaccccactgatgtgacttacagggggctaaaatgctccttgccctacaatgctctatccgcaggactccaaaatccaccttacttccttctannnnnnnnnnnnnnnnnnnnnnnnnnnnnnnnnnnnnnnnnnnnnnnnnnnnnnnnnnnnnnnnnnnnnnnnnnnnnnnnnnnnnnnnnnnnnnnnnnnnnnnnnnnnnnnnnnnnnnnnnnnnnnnnnnnnnnnagtttctgcctaccctctgcaataagcccacgttcctacaggagc

SEQ ID NO: 377775 - DNA, 499 bp, Homo Sapiens
tgtgtgcagcctgcgcagcgtgaaaggagatagttatcaatctgaccagggaaagggagtggtcatcaaggtcatttgggcttggttataaaggtcagaatgactttgccaagtgaagaaattaacactgggcccactccaaacagaaaaaaatggtacatgcaaagctacagagaacctctcgtgtacgccatcttagtggttttggtggctggcatgacttaagcaggtactggtaagaaatgaagccagagataatggcagagctgttcccagaacaccttctgtgccatacaaagaaatcctacttttaagtatggcagaaacataaccaactatacagtcaaatttaaagattcaacaggtgattgagatttaaaagcaaaattaaaaaatcttatatcatgctgggggaaaaatattaaacttcatggagctatttataaggcttgtcaattcaccacaattcattttgtgtctgtactcccacacagtaccc

SEQ ID NO: 377776 - DNA, 522 bp, Homo Sapiens
  misc_feature (57)..(173): n is a, c, g, or t
ctttgaatgctgcctgctgagtaactgggattacaggcttgcactactacacccagnnnnnnnnnnnnnnnnnnnnnnnnnnnnnnnnnnnnnnnnnnnnnnnnnnnnnnnnnnnnnnnnnnnnnnnnnnnnnnnnnnnnnnnnnnnnnnnnnnnnnnnnnnnnnnnnnnnnntgagacaccgtgcctggctttcttgtgtaaattaattccccttctcaaatagaagatctgtgagtcagggaaaggggctgccattgctgtgcaagaagctgttctgttggtgtcaggacctgtcttttcaggagagtattgaactttgaatattgagtgaatgaatggctggaatttgtgctgtaaggcagaatcagggcttataccaaaatactattttggtctattcttgtataggtggaaaagaagtattagggatagagagaaggtgcagaaggttctgttttagaagcagcatgggcttttagagtcaattctcaattcaaatctcagatttgctacttacagg

SEQ ID NO: 377777 - DNA, 427 bp, Homo Sapiens
agctttggagaatttgggctgcaagcccgccagaaggcaagagctgtacctggagagtccatcttttagcatgagctgggcctaaagagaccattgtgaggcagcacctgcctgggaggcaggcagattcgtggcctggggaggccaccgtgaggcaaatgctcagttttcggaggatgctgtgaggcagggagaaacttggctttcggtggccgcagtgagggaatagtttgattgctgaggctgccgggaggccgaaggtgggcctggaaagctttactttaagaactctgtggcccacagaggctgccaagcagctcagcaggagttggaccaaaggaggttgttgtgaggcaggagacgggcctgtagacgcactgggaggatgagctcgtcctggagacgccgagttaaggacattctgggc

SEQ ID NO: 377778 - DNA, 405 bp, Homo Sapiens
gaagcgtcagtgacaagaagagggctggcgtgacctgtggatgctgaggaagggctagtgacaggaagaggcgtggtgtcacctgtggatactgagcaaaggctggtgacaggaagaggcgtgaactgacctgtggatgccgagcaaacgccggtgacaggaagacgggtggcgtcatctgtggtacctgaggaaaggccggtgacaggaagaggggtggcgtgacctgtggatactgaggaagctgtcggtgacaggaagaggggtggcgtgaccggtggatgctgaggaagtgctggtgacaggaagagatgctggcgtgaaccggtgaatgactgagtatagtgtgtgaataaacaggacggggggtggcctgacctgagatatactaggtttctggtgtac

SEQ ID NO: 377779 - DNA, 365 bp, Homo Sapiens
  misc_feature (198)..(317): n is a, c, g, or t
gcactgatgatacaaacatgaataagacaaagtccctgaccttgtgtaactcaaaatctagtaacagcatagaactaatcataacacaaaataagttgtaacacagcctaatgagtggtgtgttacaaataaggatgcttcctttcagcagaggtgtactaaaaaaattaaaacaggccaggcatggtggcttacacnnnnnnnnnnnnnnnnnnnnnnnnnnnnnnnnnnnnnnnnnnnnnnnnnnnnnnnnnnnnnnnnnnnnnnnnnnnnnnnnnnnnnnnnnnnnnnnnnnnnnnnnnnnnnnnnnnnnnnnncacggtggcacctgcctgtaatcccggctactcaggaggctgaaaaca

SEQ ID NO: 377780 - DNA, 358 bp, Homo Sapiens
gatggtgagtgccctaagtcaggtgtccgttctcctgatggcctcacccactgaagagaatgctgatcactgtcttgatcctttggtaacaaagtcccacctgctgagcttgtcctccctcacctaccaccggcatagcaatcgcacagctgaggaggagctctctgctcgtgatggggatcctacctttcatacacatcagctgcacttagtagatttacggatttcctggacaactaccaatcgagacactgcctttgggttatatgatgggtacaaaaaggcagctgtactcaaacgtaatctttctactgagaccctgaaggggttaaagattgatccacagatgccagccaaa

SEQ ID NO: 377781 - DNA, 178 bp, Homo Sapiens
actgcctcgtactcccaaaatgctgggattacacgtgtgagccaccgcccacacttagcctaaactttgataaaaaataaataaatatgagtagaacactactcatcatgtcctgttctggggacatgccactagctttccaaagctctggccacccacactgctccggtaacgcgcg

SEQ ID NO: 377782 - DNA, 376 bp, Homo Sapiens
agtagtttgttggcaagtgatggttctggagctgttggggcttaggaagagtgtgtttactctttgctcaacagtttgttctagtgaaggacttgaagcaggagagtaacaagctcatgttttttttcctatacttgtaaaaattattcagctttccactctttaaatatactaaaatgggcacctaaatgttgtacgataagaattggtttcttttctctaacagcagaagggcttgggatactgaaggaaatgtgacttttctgcctttgtctattgggtaagtggctcatgcctataatcccagcactttgggagccaaggtgggcgtcacgaggtcaagccacgtccaccacgggtcctctagaacgacgca

SEQ ID NO: 377783 - DNA, 353 bp, Homo Sapiens
gtgggttgaccgtggcttggacaagagcagtaacaagtgggaaaaattggttagattaagaatactttttgtatataagccaagaagtcttgatggtagattagatgtgggatgagagaccaactggatgaatggtggtaccatttactgacatggaaaagactgggaaaggattgatttggatgggggaggaattaagagtttgattttggacatactgagcttgaaataagttgatacacaaaaggagatgtcagttagccagttggatatgttagtctcaaggaagagattggagttggagataataatttgccaagcaccagtatatagatattatttaaagcaatata

SEQ ID NO: 377784 - DNA, 120 bp, Homo Sapiens
tgaccgtggcttacattaggaataagcagaactaggattcaaacccagatgggcctggctacaaaatctgcttcttttgatttatttgctttttaagagtaattttttgtttgtctgttt

SEQ ID NO: 377785 - DNA, 186 bp, Homo Sapiens
  misc_feature (129)..(141): n is a, c, g, or t
aatatcgagccggaccggttgaccgtggcttgtgggttggacttctactgtcttgggagtagcagagatggaagaggtagaggaggtggaaggagaggcaggagaagccaacacactcagtgaatttgnnnnnnnnnnnnngtagagatggggcctcacgtatgacagccacggctcaaccctggt

SEQ ID NO: 377786 - DNA, 504 bp, Homo Sapiens
gtgggttgaccgtggcttgcctacctgaagatgcttgttggtctgtaggagagggcaaggaaccttagcacctgcctctgaaagaggtgggataagtataaggctgagaggagctggctaaaggacaaagatcgagaagttggcacggagaggtgagcccatgctaaacaaagaccaccttcttggaagaaagggactagcaactcagaaagcaaatacctgtgccttgttcccttgctttacaaagccctgcagttaaggaagggaatcagggtgagagacctttcctggcactatcagccacaatgttaaaggagtggtagatcccacagaaaccctaagtttcgtgctgctgcattatcctatctaggtgggcaccagttgaggggcagggtggggagaagaaaagcatgcctcattctgccccatgaaatgatgccccagatggtgtggcactggtccttcccaaccccaagccacgtcaacccggtaccgactcgcacc

SEQ ID NO: 377787 - DNA, 636 bp, Homo Sapiens
  misc_feature (15)..(15): n is a, c, g, or t
  misc_feature (36)..(36): n is a, c, g, or t
  misc_feature (60)..(60): n is a, c, g, or t
aaattccggccactncaatttaaaacccattacccntggcccactttttcctatttatantgcttggaaactaattgagaatcccgggtgccacaagtgtgtcacacgccaagggcttgggtacttgggcaagtgtaacaatagttcaggaagagatgatcagcagcccaccctttcctgggttgaggaaacctccaaaaaaaccgaatagaaagtatcaaatacataaatttgaagggagaatatatgagcctggcatcttctcagctgcaacctgatttattgaaaaaaatggtgattgggggaaagtatagaatatttgcttgaaggaatccacttctctgaatagctccctcgtttctgtggcttggagactgagacttagaattccacaattatactgtatagatgagccttgttctatatttgggatgtaatctccacactcaggagctacatatggccgtgagcacccacttaagagctaaaaatgtaagttaccgcctactttgtcctgaattggaatcatacataattgctctatgctttaaaaaatcttcctttgaggaaagagttcaagatcaaattgttagtgggtaatcttatatgaagccaagtatcactagctgttgaaag

SEQ ID NO: 377788 - DNA, 147 bp, Homo Sapiens
gccaggttccgtctcaagtacaagtttagggaaggcaccattgataaagaactcaccctccaaaatgaaaatcgataggtattatgtactcgtctaggtttcaagaggctatattgaagctttagaaacttattccgtctctgcact

SEQ ID NO: 377789 - DNA, 218 bp, Homo Sapiens
aagttagtactggatacaacccaagcagaaaaagaggcctgaatgttgagttcatagtagctgtattccccacacagttcaaatggtgacattcttaaggcagacgaagaagaacagccaatccttttatataaatttggcaagactgtgggttatggagctctggagaaatgcagctcacagacgtgacaacctttaaaaaaattcttgtcagtctc

SEQ ID NO: 377790 - DNA, 853 bp, Homo Sapiens
  misc_feature (807)..(807): n is a, c, g, or t
  misc_feature (815)..(815): n is a, c, g, or t
  misc_feature (822)..(822): n is a, c, g, or t
atttaatgactacagcatgaatgacatccactctggggaaagactcagctgtgcacgagtgactagcaaggaaagcagggctcaccaagagatccttgacacttgttaaggcatttgaacttcctcctggggataagggggagctactgaaagccttagagcacatgaatgacctggacagacttccagtttgcaaaagatcttctgtgaccatgagtgagcccgtagaagtgaaccaggctgggagcaggttgaagtcaagaccagttgaagtcattcttccctgagagtgaaccttcttggctgagacatctgtcactccatgaacaatactgaacactttgctgtgatccagggaatgttctagaagctgggggcagcagggaaaggaccgtcttccagatggacttcgtggaatgttcttttcctgacgcctggagcttgagtgaggggtaccctcagaacttccttgaccctgtgactggtcgaagcactgggatgcagtcattggctgtgctacgtcacatactctgtaggggagggcagggttggtacctgtggtcgacagccccactgaaccagcttccaaccttgccactgccacaagcgcaagttgggctgtgtgactgcagacccgccactgttgctctctggggcctatttcttccgcttgcacgtaaggcagataggagggcttaatcccctgtgcccaagggccctggggggtctccgctgggggagaagctaaggggtgaactaataacccagggttttgggtcgaacaacaggttttttgggttcaaaaanccgagttnttggggngaacaaaaaatcccccttgccattttaaggg

SEQ ID NO: 377791 - DNA, 416 bp, Homo Sapiens
  misc_feature (143)..(143): n is a, c, g, or t
  misc_feature (235)..(236): n is a, c, g, or t
  misc_feature (401)..(401): n is a, c, g, or t
agtgcagcgacggaatggtttcccagacctcagagctacctccccacctcgatctttttggtctcactggtaatatggccagtctggctccagccggcagagcacacgcaaggaggctgctctctcaccaggcaaactgaggnactgagtacaggaagggcgtggagaattatcctctcgggcaagccgaagaacaaagcctactgcttgccatatttcccaaagccatttcccnnacttctagaggccctgttctgtcctgtagaaagagtggagaacaaccaacatcacagaccaaatattgctcacctcagggccagccttgtgacagggcacccacaggatggttcatattgaaaactggggggaccatgctcgggggaggtggtggtagtgaaagntcacaaacattcgcc

SEQ ID NO: 377792 - DNA, 417 bp, Homo Sapiens
atctggcaaaaataagcattaatgtttagtggttgatagggaggacattggaagtcggaagagagataacccacactgttttatacataataaaaaggcattaagggaaggtatatgtgctgatactgatttaactttttgcccttgttctgattctttgcaagactacttttctggtttctgtaacaactgcaaagggcttcccaagtttggggctagggtaaatggctcaatttgttgcactctaaggatgattgtattaatagatttttcattctaatctctggtagagtacggaaaaacaattataattaggctcagactcaaggggaaaactttaggtagatgaatttcaccatagacaaactttaatagaataagtgacttctttttcagcctggaaacagccataaccat

SEQ ID NO: 377793 - DNA, 231 bp, Homo Sapiens
gctctagaggatccagtaaagccaatcccccgaccatcgacaccaaaatcagagattgctcaagtcccttatgtaaaatggcatagtatttgcatgtaacctatgcacatcctcatgtatactttaaaccatctctaggttggttataatacctaatacaatttaaatgttaaataaattgttatactgtattttaacattttatttttaattgttgtatttttttattgt

SEQ ID NO: 377794 - DNA, 490 bp, Homo Sapiens
ccgagtctagatgatccccttcctctcctcccacctcatattatgtcattaaggacaggttaatgacaaagtttgagacaataagtcagtcttactaactccgaaattcggtgttgattccacaacagtacactacctccctgggaggaggtggccaatcttctataatctaggtgaaattaactgacctatccttttatctggtctctaatgaatttaaagaggtggattcatatgaaaaatatttactatttattacacaggtagaacattcccattcttcaaattatgtttttctttatttctccaattatttgttacatataggcgcatcatatctgaataaaaggtttccttttattcgtcaaagaaaaggattttatatctaaaaggaaaacaactctatacataggttatatgatattttggtggagtttttaatcctaaaccttaaataaaaaatgtttaactggaggtgggaggagaggaa

SEQ ID NO: 377795 - DNA, 406 bp, Homo Sapiens
acctcgggagagccctagtcacaccgagactagggggagggctgttttaatagtgggtttggccgactgacgactggagtgccctcctcggctgtcttagttgtagtcggaggtcatgtaaatcgaccttaaaagaatgcataagccataaattaaaataaaccctcatccaagggctgatccatacgtagacaatatccaacctggacaaaacgggcttcccttgcgagccgacctaaaccgcatcccccaaagaatagagactaaatgcaaagtaagtttcctagcaaatattttgttttcttgaaaagtgttgggttgattcgctgtgtgactgagacgccacagtgttcggagcgcttcagtgtcacccaggctctgggtgcgggaggtgggaggagaggaa

SEQ ID NO: 377796 - DNA, 507 bp, Homo Sapiens
tgccgactcccgaggataaacttcctctcatcccacctcggaaagctccaaagggtccaagcgcccgaagaaagggcaggctacaggacaggaccagccctaccccactcctcccaagctccgatcccacacacatcaatctgtgcactgacagctgaggtagaaaatggaaggccgggatggggggatggtagagatgatcaagatagaaaccaaaccaaggaggccataagcccaggcagctgtccccactaatgggatagacccaggagtctgcttctccccagttgatcttgaccttgtgtaggaaccagctgcttggaccagtgacagagacaactgctgaggtagggtgacagatactcttgctcactgagggtacaaaggactgtctccaaatccatcctcaaccagcctggaactatcaccccatcatcctaaaacagtgcacagaagaaaaggaaacagtagaaaacttcaaagccagacagagtcctcagggcagcc

SEQ ID NO: 377797 - DNA, 544 bp, Homo Sapiens
ttgctctagacgatccccttcctctcctcccacctcccggaatcaggttgcttctagacatcttttccttccctagtgtacttgggtctggactgggagagactcattgacttttctcctgagtcactttgaggctgggtcaggtttatagccattctatagatttaggtctattcatttgcttattcaacaaacaatgagaatctgttatataacaggcactgatttaggtattggaaatacagtggtgaaccagacagagccttgtttctcatggaattcgtaatctactgggcaagattggcaatagtcaaacaaagcaaaaaataccagctaataatatgtattattaaaatgaggggacttagtaaagataggtttcagaaaagacttatctaatgaagtatgagtactaatctgaatgacaaggagcagccctttaagatcagggcagagagaatttcaagaacaacgaacatttggtaaaatacctgaggtgaaaacaagcttgacatgattgaaggacagaaaaaagccagcatta

SEQ ID NO: 377798 - DNA, 461 bp, Homo Sapiens
cagcctgttatagatatcatctttcccttagtttctaaggctcagaatcatacccttccttgattcctcatattttctccagagtcagttaattatacatcctatccatcctctttcctgtcatttcctctttttgccattgcacggctcacacacctgctatggtcccttgttatttcttcttttggaccattttggtattcttccagagaagcaggacagttaaatgtggcaatatttggactcatttgtgttcaaaatttgtgatatggattcttcccacatcccctgccccaataacaaaacttaccttataaatattcacagctttctttgctgccctctctctgacaccaaggaggaagaattctctgatgaatgagcaaagtttaaagactttgtgtttatgtgttctgggtaatggatttactttagaagagcaagaaactgttcaaaagaaa

SEQ ID NO: 377799 - DNA, 456 bp, Homo Sapiens
gcgtgagccatcacaccctgcccaactgttcctttcttaaggggcttcaaaggtggggagaaataaaaagtagcttttcttctgggaaatgttacatgaggactaattcagtaaaatataatgtccctgtatcattcaatcttacagagtatttgagcagtctttctagctcccagttttaaagagggtcttgataaatttgagcacttgtctaagaaagacagtgctcaaaggatatgggaagaattgtgaaaatatctgcatctctttatttgaagaaaaattctattgacaagaggagttaagtttatttcatgtggcttcagaaggcagaagttggattactgggtggaggcagcaggaagtagatatctccttaaaataagaactttctaacatatgagagtggaattggacaccttgtgaagcagggaggaccctgtgcttggagtcttt

SEQ ID NO: 377800 - DNA, 539 bp, Homo Sapiens
  misc_feature (341)..(394): n is a, c, g, or t
tacgccatggctgactctagaggatacacttcctctcctcccacctcccagaatacataccatggcaatgccaaaatatgaccatgcttgttaatatttaggccaaggcattaaatgtttataacataacacaaatacttgtaatctaaatttgaatgaatgtcttcaattttcagtaaaataagaccctattaaagccctaccattaatatatattcattcataaacatactgagtacctaatgaatgttaaacactgtagaatctctaaggaaagaatactcggtcactttataagctatgtggtagtcaagaaaaatcctttctactcattgatacgnnnnnnnnnnnnnnnnnnnnnnnnnnnnnnnnnnnnnnnnnnnnnnnnnnnnnntttagtggctttatgcttccaattccattttcttctggcctcttttctgaagcttgcctaaatcatcccaggaatgctaaaattgggtgttatttaggcataaccaaaatgaaataacaaagtaagtaccccaaataaaactagg

SEQ ID NO: 377801 - DNA, 490 bp, Homo Sapiens
  misc_feature (322)..(361): n is a, c, g, or t
tacgccatggctgactctagaggatacacttcctctcctcccacctctatttcggaccttctctagtcaggctttttccgccttcaacttcatgcagccaaaactactctcgatgaggtccccccaggacagtagtcaatcttcaggccacatcctgattgactgccagttatgtctgacacagccctgtccctcccttctccatgagacactcttcccaatttccaagaccccacattctcccggttctcctccagccatgcgtccccatcagcccacatgctaaacactggagtgcccagggctcagcctgccctcctcnnnnnnnnnnnnnnnnnnnnnnnnnnnnnnnnnnnnnnnnatgagccaccgcacccggtcaggtaaaattcttaagaggaaaagtaggagaagattggcgtgtttccatcagaaagcctgggtgagtgcccaggaatgggtgaaggtggggaggagaggagtgcagtgc

SEQ ID NO: 377802 - DNA, 450 bp, Homo Sapiens
acgattacaggtgtgagccactgtgcccggcccttgttttatttttcaaataaatgcaggaagaaagaaagagaaagcagaggtggccatatctcaagtaagtcatgccacccccaccacaaaaatccgtggaggctgagaaatacaatacctggcaaaactcagcaaacataaaagccagcagttattcaaagatatttgttgagaaaccactagggcccagttactagagctaccgagatgaacactactttaaaaaccaaaccaaacaacctgcctcatggaggcacttgcccctcagttcagtggcaagtatggtaagtgttctgcagaaaagctaagcagctgaggggagcggcaggggcccgagggtgtgcattagcattctcttcagtgggttcagggagtcacccccggtggaggtgggaggagaggagggtaccgagctcg

SEQ ID NO: 377803 - DNA, 554 bp, Homo Sapiens
atgagccactgcacctgacctcagtcttttaaactgtgatggatacagattgctgacagttttagtcttgagatctagattcaagcccccagctcttcctcttaatcggtgacctcaagaaaattgtttcatttctctaacctgttttctcatgtgtccattgggaataatgacatccaagcccggagttgtgaaaattcggtgacataatgtctgcacaagtgctctgtcaacatgtaggtgtttgtgtagagggagggatttgtgtttttattacttagtgggtgatgattccactgggctctctcatgatcaagtgactccagggaaatcacatttcattctgttaccccagttgctgtggaaacagagtgactggaggcagaagagacagaacctgtctctggcctgggagagactgagggagtattgcagcggtcaccaacatggtaaaccccagagggagcagcttggggaggtgatgtgtttcagttgggatgtccagtgttgatgtgctatgggcgattcaagggttgaatctggagcagagaggg

SEQ ID NO: 377804 - DNA, 262 bp, Homo Sapiens
ttcctctcctcccacctcctaagtctttagtttccacttagcaagattccactgctcttcaaagtccaattctccaacagttgggactaacagtcctcaactcatacttccccaggggccacagcactttataataatatgccatgtagaaactagttttgaacatgctccacgcacctgtgagcttccttagtgcttgagacttcctgattaatgggtcaggtgcctgcccaccattagcctggaggtgggaggagaggaa

SEQ ID NO: 377805 - DNA, 512 bp, Homo Sapiens
ctcctccaaccttaaaggcagtgcttgtagcatgcctgataggccatagtaggacgtgcccgtcgcaactgcacacacacacagctccccgatctcatccgttctgcacagctgaggaaccccgtctggcttcactgaacacatgatgtctaaaagcaaacaggaaagcacatgcagtgtgagagggggcaggtggtgagaataaaggaaacagggaagacgcgaatatgaacgacaccagtgaacaggaatggggtctgtgagcaaaactgcacggatggtagtcagccaggcactcactttccctaaagagccatgagttttcctgttgcagcaacatgtcaaatttcatagttgaaacatcaataaatatttcaattgctttaatgttaatgcgcaagttgtatttagggggcgtgacatcatctgccatttagatatggggaggaacctcagaactaacatcaggaccacctgccacaccagacatcagcaacgtggtgcaacttgac

SEQ ID NO: 377806 - DNA, 775 bp, Homo Sapiens
ctacaatggtcatagctgactcttgaggataaaactcctcccacctgaactgccatcagttcaacctcccctggtgtgaggacacactcctcctgacgggacatctgatgtcctgagcagacactgtctctagccgccctctcaggtgaggcgtacctggtggaaaaccaatcacaacctgtgctggagggcgcctttgcaatggccagcacatcagcctgaaacttggcgtcaaggccagaggtggtcttcccaatctagccaaaggacctcaagacacagccttcctctcctcccacctcagtccatgtgcctgcactatgccctctcgacacacaaacggaatggctgcttttccaatgggacgtcccccctaccgatgtcccaaggaccaggcggatgggatacactgcctttcattttccttgcattggacacacccacagggctatcctgtactgacctctgaggcaacatcccattatgcagccaacttgactgcactactacccgccgcaatgcctcaaagtcaacactacctgaacaccaccactgggtctacatgcatgcagctagtgagtgagctgcgagctcagaaccacccatcctttccaacattcctaagccatctgcatgcccttcaacatggcatggctgtcctggctgcgctgagacttcaaaccggttaagggagccaaaacagttcatcacccctagggtgtagtggactccaacacttaaatattgccaacatgcagaggtgggaggagaggaa

SEQ ID NO: 377807 - DNA, 558 bp, Homo Sapiens
ttcttaagtgagatgctgaagagtttggaagatctgaagctgaaaaataccaagatcgaagttttggaagaggagctcagactggcccgagatgccaactcggaaaactgtaataagaacaaattcctggatcagaacctgcagaaataccaggcagagtgttcccagttcaaagcgaagcttgcgagcctggaggagctgaagagacaggctgagctggatgggaagtcggctaagcaaaatctagacaagtgctacggccaaataaaagaactcaatgagaagatcacccgactgacttatgagattgaagatgaaaagagaagaagaaaatctgtggaagacagatttgaccaacagaagaatgactatgaccaactgcagaaagcaaggcaatgtgaaaaggagaaccttggttggcagaaattagagtctgagaaagccatcaaggagaaggagtacgagattgaaaggttgagggttctactgcaggaagaaggcacccggaagagagaatatgaaaataggctagggcgctgggtacgagctgaattgtat

SEQ ID NO: 377808 - DNA, 461 bp, Homo Sapiens
tgggtggcactgggaacctttgcctcctgcccaccgtgggtcccttgaagcccatctggggttccacgatccagcaggtgagtgaggtgtcagcatgatgtgagctcagacacggagccagtctgccaccgcccggtggatgttgctcactctgtaaactgccctgcagctgcctagagcagaggtgcatcccgacccatgagacactcagagactgacccgggactctgagaacatcaatggaagaacagacaagtatgatgatgtcctcctatgaaatctttattgataaaaaactcttaaatgtacaaaataaacgaaatgatggcgttattaaaacagcagttcccctacagtatctaaattcatttttatatcttgacaagctataggaatttggaatcaaacatgagggttcagactgctgctgatagaaaatcagtcagggaagagtcagcgtt

SEQ ID NO: 377809 - DNA, 452 bp, Homo Sapiens
aaggttcctgggcggtggaaagcgacagttcctgcacttgcagctctttgccaagcccgattgtccaggatgtgttgagcaaagactcctgtgacccaaacgctggcagccagttgacatttgaccctgagcagcctcccacccctctaaggcccaccacacccaagccccagagccctcagagcccccagagccccggggcaggaagtgccagctgtcacagcaatcacagtgccctgtccgcgaattcagaggaaagtgaaggaagggcagaagagcctgctcagagagagccagggcctgtgtccttgcaggatcccctggaagccacacatggtgatgagggcagcaaggaccttctggtgaacatttggtgtggcagccggcccagaagaaaacggagaaggaggaggtcgtccctgatggcccctggaggcgaagctcatcacagg

SEQ ID NO: 377810 - DNA, 172 bp, Homo Sapiens
acaacgctgacctcttctacaacgctgaccttcttccacaacgctgacctcttctacaacgctgacctcttccacaacgctgatctcttcctatttcttttgcataactcataaaataactaagcattcaggaaagacatatgggcaggaaataggcagagatcagcgttgt

SEQ ID NO: 377811 - DNA, 173 bp, Homo Sapiens
cggtcctctcttcaacccagatacactcagttcccttcctgaaatggtctttccccagtctgaatgctccctagccaccactgcatttcttcctctcttcataccaccatgcttctgtgtttgccacttgccaatttttcgcgtcccgtttctcatcaagtctttgcgattgt

SEQ ID NO: 377812 - DNA, 580 bp, Homo Sapiens
gctcggtaccattcaacgctgactcttcccttgctgttatagcccaggatctcgaagctgatgctggagtgttcggtccagactgtaatctcatgcagtgtgcggaatgaggttgagccgagcccggccccgcccattgtccagctctccctgggtcaggactccaagcagagttgacttcccagagtccacattccccaagacggccacaccgaggtctacgagctgttggttgtcagggacctttcgtactagcacctcggtgatcttccggggcatgtcgctatcataatccacttctcgctctcgaagaacggttatgtctgccccaaccttctctgccatccggtgcagggtcttgagcgaagctcgcatttcctcctcagccagccccaccagcagcccattgtcctctaccccaatctggtagacggcctcaccacgtccctcctggagccgccacttcatttgtgtcaccaggtgctcaaagcggtatttatattcaatgtttccatcttcagcctcggggggcaaatacggggggttgttgctttgccccctctgttccttccgttcttct

SEQ ID NO: 377813 - DNA, 293 bp, Homo Sapiens
ctcggaccggttacagcttcctgagactttgacgtaacttgttgttcaagagagggctgaggtttcttccagggatgcctgctaactgtgaccagagctccactgagggtcgtggccccgggtgctgtcacttctctttctgtggcgctgttagtggggagtggggtcccaaccgtggcatgaggtgcagctgactctgtggtgccggctgtggacagggtctcggcagaggctgtgacctcagtgatgtgtggttttgcttcagtggagtcaggaagctgtaaccggtccga

SEQ ID NO: 377814 - DNA, 588 bp, Homo Sapiens
  misc_feature (132)..(132): n is a, c, g, or t
  misc_feature (405)..(449): n is a, c, g, or t
gaggtcgagggagactcggactggccaggacctgcgtggggtctgggggccctgggcacccagtaggcctccccacttccacagagttggagtgggatccggcgggggacattgggggccttgggcccttgnggacaaaagacagcccggacactaggagtgccctgtgagctgtgtggccacagggggccccagggcaggggacaaggccttgaggaagcagacacctctcactcccgacaggacatgctggagtctggcctcggccaccagaaacgcttagcacgtcaccaaagacactccctgctccggaagcctcaggacaagaagaggcaagcatctcctcatctccaggatgtgaggctggaggggaatccaggggcccccgatcctgcatccaggcannnnnnnnnnnnnnnnnnnnnnnnnnnnnnnnnnnnnnnnnnnnnggtgggtgccatgtttctcctgcccgcgtcaggaggcccctgctgctctcatgcccgaatacccaggacaccctacctggtgctcagctatgtcaatggtcttcccccagtctgatgtgtgtaataaatggtcactgtc

SEQ ID NO: 377815 - DNA, 275 bp, Homo Sapiens
  misc_feature (52)..(106): n is a, c, g, or t
aggcggcccggcttcagctcctgagcagaaagctagaggggggactgtcgcnnnnnnnnnnnnnnnnnnnnnnnnnnnnnnnnnnnnnnnnnnnnnnnnnnnnnnngatggacgcaatcttaagccaccctggccttgctcctgggaggtgagcgtgcacaggtgtgtgcaggtcaggaggtgccgtccaggtgtgcggcgagccgctgcgcacagatgtcaggatttccgtttgggtctagtttagaacctgtccttaaacctaggggttactg

SEQ ID NO: 377816 - DNA, 277 bp, Homo Sapiens
tggtcggcccggtgacagcttcctgatcatcacccagagccacagttaatgtacatcagggtgaaataaaactccacttagatgtgggaactgtctccaaagaatgatttagtctaagctgagtgacaccttcctgagtcgctgtcctgcatcagttagccacaagaacctacctccagacccctgctccagctcaggcaggaagttggacatggaccaccgtgccgcctccactctcccactcccactccaaaagaatacagaaagagagagagag

SEQ ID NO: 377817 - DNA, 394 bp, Homo Sapiens
  misc_feature (302)..(302): n is a, c, g, or t
  misc_feature (341)..(341): n is a, c, g, or t
  misc_feature (369)..(369): n is a, c, g, or t
  misc_feature (382)..(382): n is a, c, g, or t
ataaagaaaaagtcagggtaaggaaagatagctcagacagggaaaatcctccccatgactctagacgggattgccatggtaaaagcaagacacatcccctttcccacagtgtcaatgcaaaggtgattagaaacttccaaggatgacccaacctttgcctttgccccatatattggggaaaacccatacaccaaaaggattttagcatatgttaagaggaattgcagtgaaaaggataacatttttccatagtaaattgtcttgcagtttttgaaaatgtttcaagtctagtttttacaagncacattacagtaattgcaggttgtccagaggttggtttnttcagaggctattggggaacagctgggnccggggtatttgnctcagtggaata

SEQ ID NO: 377818 - DNA, 378 bp, Homo Sapiens
aggaaagatgccagacaaccattgaaggaggacagtacctcgtatccactcaatcctgtacattcatcatatagtcagaattcatgatagtattttttgtgacagatagttcagactatcaagattttcaagaaaaatctctaaataggttttggtataaatgtagcagaagaaaaactaaattactacagtaatttatggctttcattgctggggtttccaagaaagttcctgtgaatcctggtatccgatttacttctcacaaggttattaccattcatttaattcacacagctgtaatagttttgttataaaaactagaattaaagttagggatatgataattatcttatttctcagcttgtttttaattgtata

SEQ ID NO: 377819 - DNA, 435 bp, Homo Sapiens
  misc_feature (32)..(32): n is a, c, g, or t
  misc_feature (68)..(68): n is a, c, g, or t
  misc_feature (203)..(203): n is a, c, g, or t
  misc_feature (225)..(225): n is a, c, g, or t
agaagaaaaattcttatacctgcttttctggntaaaccgtcaggctggcccaagagtacgaccgaccnaatctccagaactgctgcccaggagaaatgctgccccacaggctcccaggggacatggtggggctgccctggactctgctctgacaaatgctacccctggcagaaacagcaggaccaaggccaacttttaccatnaatgcaaaagcagaaattctgnaccccagacaagagaaggtccctgtacagaccagcctcctacaaagtaggagactggtttttcaaccaacacactcacacaaccactgagatgttttaaaagagcctacacaagagccaccttaagaagatgatatcacttagagtgtccacttccttttagagatctttgtttacaaactagagccattagtttattcccactgtattt

SEQ ID NO: 377820 - DNA, 596 bp, Homo Sapiens
acagaatcgatcggatctcctatcaatcgggtgaaacaaagacccagtactctaagcttaaagcattccaggcaaaatattagttaacaggcaataggaaggtagtgataggccagtgctaacaagaaagccacagatgggtttctttgagctgttaagacactggaaagggctggtatggaagcccagtggagccattaggacaatggaaaaggaggtacccctccaccaggcactttgcagagaaaagctatactctggaagctgcctgcactgttgatagggctagacgtatgataaacagctaaccggaggggcacccgaggagacaaactgccaactatgaagaacaaagcagagacctcaacttgtcacgtctcaagctcagatgtacaaacttggggatcgtcaagtgaggctcgtgtgtatgcctggggatatgactgtattccagtgatcagccagctagctgacctgccacgaatgggtgacctgtggtgacttactttaatcaactgtagtacttctagatagatggggtgatttaaggtgctgacatattcaggcaagaaaataaaggcaagtgtttcctagac

SEQ ID NO: 377821 - DNA, 392 bp, Homo Sapiens
aggaaagatgcccagaccttaattctcagtaaagttgggaatctgattaatatcagaataaagctatttataaaagccactcttaaatatgccaagatgttatgtagctgcagagagcacagcaaacttgtagcttaaacagcaacctaacaaaatacaaatgtgcacccagcacaaaaaataaattcgctaatgaaaccacatagttaggaagtcacctcagggcacggggcagtcctccgaatgcagcaaaggctttttttgaacaatagcagtcagtgctcaaggtgttgcacgcaaaacatccagctctcctggaggagtggttctgggtaagctgcaaccggtcctctgctgtggagtgacatgttcaggaaggacctcagatggaa

SEQ ID NO: 377822 - DNA, 606 bp, Homo Sapiens
ccccttctcgttgaaaatagcagcggcgctgcaaattcctaaacacaggctgcctgcactcggtgttacctcgggctgaggcactgataatattttattttttaaagctgtgaggaaatgaaagtgaggctttggttggggcgaggcagttgtgaaagaaattaaaataaaagaccctttgtaaatgcagacttagaagaaatactgaatttgtgtcagaagttctccagtgtttgtgttaatcgtgtggtgataatcctgtcctccttttaaagcgaattctctactgaaaggtctgctctgcttaaggagctacaaactgctctcaaaagaattgaaatacttgagttccaattcagtgaggcacagtgttgggactatgggcacatttagttggagtcggggggaggtcaggaatatgatcagataatggattttataccttagagcaaaatctattagtctctctcagtttatccaatttaaatgggctttaggcttataggggggtgttaaactttaaggaatattaattctcccatttcaagttttaccagccaaacatctaggcccacctttcaaaacaaggagggttacagaccctcc

SEQ ID NO: 377823 - DNA, 421 bp, Homo Sapiens
atagatgccagacttctcatatcaggaaggctgactgagaatctgcacagaactgaacaatctatagtccatgcagcaagagccagcattccaaactctagatgtctagtttgccatgtttcctacataaaatttttttgtaactacaaaatcttttccaatgacaatctacaagtcactacaataatcaacacagagtaattcctccagcttaaaaactgaaaatcaacaacaagaaacaatgtcaaataaagcccaacaatgagaaatagagagcattctatttccaggaatacaagctccttgcaagaattcgtcaagtccctttggcccacggttgaaatgtttaggggagtgatccaactgattaagtctccctcggcaagacttatcccaacccttactttgtacctttgcctcc

SEQ ID NO: 377824 - DNA, 295 bp, Homo Sapiens
  misc_feature (270)..(270): n is a, c, g, or t
ctgatctctgacgaaagctcttatcacacgtatcacatcggaatggtttctctgccgtgtgaaccatggaatgcctattaagtcttgatctaccacagaagctcttaccacatatatcacatttgaatggcttctcccccgtatggattctctgatgttcctgaagctgggaatcatgaatgaaggccttcccacattcctcacaattataaggtttctctcctgtgtgtaatttgtgatgaacattaagtgctgatctacgactgaagnctttcccacattccacacatttgaa

SEQ ID NO: 377825 - DNA, 364 bp, Homo Sapiens
agagagcgaccctcctcttctgcttcttcctcctctcctcatcatcttcaccttgagcaacatgaatctcctgttccccttctctattatatcgacaatctaaagaaggaggcaagtttagagcccttatgttggcagcagatctgttgttaatttcacaattagaattaactgttcgcccatctctattattagaaacacactgtgcattactatgactatttacttcattccaagtggaagctacttgtggatttcgaatgttagtaacaggctcggaattttcatgctcagaatcatattctgactcttcagtttcttcatctttcctgttttcattcacagcatctgtcatcatgtctga

SEQ ID NO: 377826 - DNA, 350 bp, Homo Sapiens
aaagggcgatccttaatgtataatataaatggatcttaattattgctgataaacgtattcatatttattctctagaatagagtattccattgtctgagataaatctagcttccctatatcatagtggctatttttcttccagcccagaagtttttcctttgtaagataactttattttgtgagtttatagatttggattataaaaatagatcggaactgttagactaatttggcccagagattttatgggtccacttgggagaaataggagtaattctcaaaaccaaaatgagaaaatccatgtttaacaaagaaaaattagtttttagctgaaggatcgccctgtatcg

SEQ ID NO: 377827 - DNA, 164 bp, Homo Sapiens
tgagccaccacgcccagcctttcccaccttcctttaacctccttccagaagaaagaaatagccaatttaaataaacatctattgtgtgttgatttggttgtctgtgatgttcaaggtactggagaatgagctgtaaataagacagacagcaattgtgcccccca

SEQ ID NO: 377828 - DNA, 522 bp, Homo Sapiens
tccccaaaccccctactgagaggcacagattggagagaagcacccaagaggctgcaggaaagtgaatgtttccagcattgggcagcaccgccccagggctccaggtagacacttgagtaggggcaggtggcagcaccaggctctctgatagccttcccttggcccatcagggctgaaacacggccttcccaggcagctgctggcaggggctgggggacccagccatcccccactggtctgctgccaagagtcaccgtcatagtctaccacgaggtggcaccgggcggcagctgtcctcacaacttcttcttcttcaccacagggatgggcacaacttggaagattttggctttgtgatcctcagtgtccagtgtcacccagatgggccggaagctgcctttgaagccttacgaatgccatgttgctctttcaacttgagacgcctgtctgccccaagcttttccagcactctggtccatgggcctctggacgatcgtatcttcccttagaggccatacgcac

SEQ ID NO: 377829 - DNA, 199 bp, Homo Sapiens
cctcctgtctcaaaaggcaccagagtcttctcagaaaagccttcctgcttgatccagtgacaaacaccacctcctgggcactcgatgccacctccatgcctccttcaggacgtggggatccattatcccatcttgcttcaaaatctttaaatgagcccactgtcacacaaaggaaaatgagggggatctgtcctggccg

SEQ ID NO: 377830 - DNA, 456 bp, Homo Sapiens
gtcatactgagaaacaggtattaccttcagagtgggaaaaccctcgacggcacattttacacagtagaactgtgtgccatgcactccggagtagcatacatctagttggttatcctagaagctcacgtcgtgtggctgggcagcacgatgagcgagccggttgccagcccgggccagccggacaccaaagcctctgggtgccgcagaagctgctagccagcggagtccaaagtcagctccatagaagatggagcccccgactcagtggcgtcctctgcctgactactgtgttcactactataataatctccactccctgggagcctggggagctagagaggccaagctggttcgataaggacctgccatttggacaggacggggacgctaacaacgatccagagtcactggctgcgtcctacatgcagggccctattcaaagcctccacagcactg

SEQ ID NO: 377831 - DNA, 374 bp, Homo Sapiens
  misc_feature (324)..(324): n is a, c, g, or t
  misc_feature (326)..(326): n is a, c, g, or t
  misc_feature (354)..(354): n is a, c, g, or t
gcacggacacatgcagccatgtgccaaacaaacactgccattcctgctggccgaaggcgacaacaggagacttcgctgctccttgataacacctttcctcctgctggccgaaggcggcaacaggagacttcaccgctctcgatacacctttctggtctttgcgtttctctaccttccctgtctttcttgtctctctccatcagtggagacaccgtctcccgggacactcagcaacctgagcagatggctttgaggcagaaactagcgcgggcagtggcatgagaacacaggcttgcagaacactcccactaggcaggccatttntncttgacttgccgaaaggatcagtggcanatatacgactcactataggg

SEQ ID NO: 377832 - DNA, 277 bp, Homo Sapiens
aaacagtgataaccctgagtgggagcaaaaccacttggatagtccttaccctatagcacaagatttctaccttgaggatggggtaaacagctggctggctaggtagagtcacagaagtgacagccacccttgacaaacctttccactccagagagctctaatgctcactcctcttcccccatgctccctctctagggtgttgtggagggaaggagagaggtaagaaagtccttcccagtaacctcgaaatagtgagtgcgcctatttaagtccagca

SEQ ID NO: 377833 - DNA, 158 bp, Homo Sapiens
caactttttacatctgtcatagcacttagcactgtacttagcctacacagactaattaataaatatttgttgattaatttatttgaggcacagccacgagttcatatcagtggcaaagacagaacttgtcctgtagggttaaacaagtcgagagtgcg

SEQ ID NO: 377834 - DNA, 153 bp, Homo Sapiens
aaagcagttctcttacacaaggcagtccttgccccaccccgcggtcctccgcatttcttaccaagcagtgagcccagcttgcttgacattttctgggtgtcctgccttttgatgttcatggagcgtgtacttacttatttagggatggggtct

SEQ ID NO: 377835 - DNA, 146 bp, Homo Sapiens
tctcccacctcagcctcctgagtagctaggactacaggggcacaccaccatgcccagctaattttttaaaacattttttatagaaatggggtactgttctgtcaccaaggctcatcttgaactcctgggctcaagcagtcctcccg

SEQ ID NO: 377836 - DNA, 452 bp, Homo Sapiens
  misc_feature (110)..(173): n is a, c, g, or t
acttggcccgccgtgctcaaccccttgtgggagggagcacgtgagtgagtgtggcatctggccagctgctttgggagctggcaggagcaagctccgtgcaggccctgcannnnnnnnnnnnnnnnnnnnnnnnnnnnnnnnnnnnnnnnnnnnnnnnnnnnnnnnnnnnnnnnaagctccgccgtctatggacagtagtgtgttatcagctcagtgggtcccttgccttgttgcctagggtggctgccctctgccagggccaatgtgacagcctcttttaggtacccacactcggtgggtcccaagctcttgtccagcatccaagaagaatgaggtcacccggacacttgaaggatggtgaaggtggagaattttattaagcaatggaaatggctctccatggagaggggagctggagaggggatggatcaggtggggatcttcactctggc

SEQ ID NO: 377837 - DNA, 458 bp, Homo Sapiens
cagatgcccagactatgaggacattcctggggcaaagattgatgccgggggtaacaccaatgccatgtgtaggtgggggcaggggcagatgtgagagcttgtatacaacctcagactgtggccaagaaacaggctgaggtgacgtctggtgccaggattgatggtaggggaaataccaatgtcatatctaaggcaataactggagctgacatgagagctgctgctcagcctcatagctcttgccagtactcacgctgaggccatgcctgatgctaaggttaagaacagaggctaatcccaatgccatgactaaagcaggggccaaggcaaacttgagggccaattcccaggttgaggccttgcctgatcccagggataagagcagaggctaatcccaatgttatggcgtaaggtgggggatgggacagacatagttgtcttgtacacagcaatacagc

SEQ ID NO: 377838 - DNA, 313 bp, Homo Sapiens
ctcttacaaagatgaatttgaaggtgcttaacatttatcttcagttttaatgctcatccccccaaacctggatcagaatgccctcttccagcaagcagagtccagttttgaagcttccttaatgagagctaccatttcttcttaagttggacagacacttgggggaaaaaattgctagtgatgatgaacaaggagcttcccattgggcattgttggtttttccttaaactctggtatatatttactctaggatatatcctttttatctgggtcacacacatcctattacagtagtgtggtgtcctgaccaatg

SEQ ID NO: 377839 - DNA, 372 bp, Homo Sapiens
tcaagtgtgtgtgtggggtcggtgacctcactccgtctgctcccatttccccaacagcacctaatgcacagcggagacgggcagacccttcacacgtgactatgtcccaatgatctttatgtgttggagaggcctgctttggaggtcacctggacccaaaaggcacggcttagctagcaccgtctgcataagcagatgaaacctcagacgtccctctaatccaaacacaatatgactatataagagcaaagagattgctttaatgtcctctaacaggttaaaggccaacacagctaaagtaggggccacaggtaatggattcagaaagaaaagccactttcatgaccgaaatcggctaaggctgggccggta

SEQ ID NO: 377840 - DNA, 667 bp, Homo Sapiens
  misc_feature (31)..(31): n is a, c, g, or t
  misc_feature (95)..(95): n is a, c, g, or t
ccccaaatgaaagggccaagaaaaaagcccnaacaaaatgtgtgtgtgtgccgccgtttttttaaaaaaacagcccaattacaccgtatccctantcaaaatgaaccggaatccctaaagccaaccctgcctgggatgtccccacttaatcctaatgcctgttgcccactgtacgcccacagcacccggacagtgttcctttgggaacatctctgggaaatgcctctggaacatgcccccttgatggaaaacactaatttttgaaagaagtagatgtctggaggcaggtctggtgaataaactgaatagtactgccttggaccccagctgaggggtggcagtaagcaatgaggatgggctataaagctgttaactggctaagggccatccttgggcaggcatttcagacacatctgtagagagggcagtagcatctccgataggccagctctgaaggaagcttaatgcttaatacagtcacactgcataaattagcttagaatgctctcttgggtaaaaaatattaatagtgtatatgcacttgaaaagcaaaattcctcaagaaaaaaagtttaatagcaaggagtttccatcagtcccggtctttgtgaggattaccacaacaaacacttaaaaggatacaacaggtacttcattaaatgctgcc

SEQ ID NO: 377841 - DNA, 576 bp, Homo Sapiens
  misc_feature (430)..(430): n is a, c, g, or t
  misc_feature (519)..(519): n is a, c, g, or t
agaggagcattctaagctaatttatgcagtgtgactgtattaagcattaagcttccttcagagctggcctatcggagatgctactgccctctctacagatgtgtctgaaatgcctgcccaaggatggcccttagccagttaacagctttatagcccatcctcattgcttactgccacccctcagctggggtccaaggcagtactattcagtttattcaccagacctgcctccagacatctacttctttcaaaaattagctgtgttccatcaaggagcatgttccagagcatttcccagagatgtcccaaagaacactgtccggtgctgtggcgtacagtggcaacagcattagactaagtggaacatcccagcaggctgctttagaatccgctcatttgactagatacgatgtaattggctgtctttaanaaaacgcggcacacacacacaatctgataggcatatctcatgcccattcaatatggaatgttcttcgcttgctgaatttaagcctgtantttaaggtttttgtggttcctcggccacaatgggtgatgtcactgatagaacgaagc

SEQ ID NO: 377842 - DNA, 270 bp, Homo Sapiens
  misc_feature (39)..(39): n is a, c, g, or t
ttggcagggaaggtggtacaatcatttaagaggatcatnttggcagcatcaagttacaacaggcaggaagaacaaaaaacaaaagcaggccctctgctcaagcagtccaagtctttgcaggtactctacatgtccagagtgagacacagatgggcagcattatcttagagaaaaccgggaacattcttaactgaataatgtaaccatgccatggaatatatatgtctgtcaaaatgtaggtagactgggcacctagtgtccagcaaggtc

SEQ ID NO: 377843 - DNA, 184 bp, Homo Sapiens
tgtgacagacctctaagaaaaaataaataaataaccctttctgttaactaatatgatgttttgacttttgattttagtatgttgtagtacaaatatccagggacaaattcctcaactgaatctatctgagagacaaattgtcaactgatccaggagtactgcctgcactagtgtcctaggtccc

SEQ ID NO: 377844 - DNA, 326 bp, Homo Sapiens
  misc_feature (298)..(298): n is a, c, g, or t
tgctctagttcacctcctatgcaccactccactaatgcaccaagttcacctcctagttcaccactccactaagtgcaccagttcacctcctattcaccactccactaattcaccagttcacctcctattcaccactccactaattcaccagttcacctcctattcaccactccactaatgcaccagttcacctcgctattcaccaactccactatatgcaccaagttcacctcgctattcaccgagtccacgtaattcagcagttcacctcctattcaccagtccactaatgcactangtgtacctccgatgcactagatgtcctg

SEQ ID NO: 377845 - DNA, 246 bp, Homo Sapiens
aggacactagtgcaagaccccgcctgcaggagaacctatttttaggtgttaattttctttcttcaggaagagcaagcaagtttcccttctattaaaaaatgtctttgtgctgcaagagatgttgtctctgccatctccccacattttctagtatgtaagagaaaagcagtctcaatattgcagccttgcctatcttagtgttgctccccagtaagctctgaaatgagaggtttatcttcttcagct

SEQ ID NO: 377846 - DNA, 306 bp, Homo Sapiens
  misc_feature (295)..(295): n is a, c, g, or t
ccatcatcatcagccgagcagctctgagtgtcctagtgcccatcatcgtcagccgggcagttctgtgtgtcctagtgcccatcatcgtcagccgagcagctctgagtgtcctagtgcccagcatcgtcagccgagcagctctgtgtgtcctagtgcccatcatcatcagccgagcagctctgagtgtcctactgcccatcatcatcagccgagcagctctgagtgtcctaggtgcccatcatcgtcagccgaggcagctctgatgtgtcctagctgcccatcatcatcagccgangcagcacttag

SEQ ID NO: 377847 - DNA, 325 bp, Homo Sapiens
tggccagaatactgtaacacacacaaactctcaagtggcctaattccctctcaccaaaccaatcacaatacagataaaagagaataacttgtgttcatttttgtacaaacaaaaaagatttaattgtgaattatgcatgatttttatttacaagttaactgggcaaatgcttctgcattatttaaagctaaaaggtgatcagtggaaactttcctctgttagtactctaatactttttatatttatcggctcactacatcctgtgcctaccaggttcaagcgattctcctgtctcagccaccttagtatcctagaccacaggcac

SEQ ID NO: 377848 - DNA, 452 bp, Homo Sapiens
gtggagaggaacgcgcagcaaggcttggggagccacgacctggcgactgtgacgaccttaggaggaatgaaatgctatgttatatagtgcagtaacacggaagaaagaaaatgggctcagtgaactcatggacttgagcaatagaaaactccaaatgttgaaagcatgaactggttgctgttagatgcatattctaagcttgctgtaagacatgaagaattagctcagaaaataactggccagtttgcaagcagaattcagaggcaacaaaatttaattaaacgtagcatatttcagaaacactgggttagttgaaaacaacggcaaaaaatgttttctcgcctctatcctctccagctagcaaaagaatcccaaattaagtaacagcctgtgagcaaagatcaaatccagagcactgccaggaagccatggactcatagtaaagatcaaat

SEQ ID NO: 377849 - DNA, 462 bp, Homo Sapiens
gctggacactagtgcaggattatcgtgatcacggatgcgggtgacagtgtacctgatgttgctgtctgtgagacactgctgaaccagcttcgcagtggcactgtggcttgttcctttgtccaggtgggaggagtttactcttatgactgcagttttggccatgtgcccaatgtggaattaatgaagttcatcgcaatggcaacatttgggtcctacctgtccacttgtcctgagccggagccaggcaacctgggtctgactgtctaccaccgggcatttctcctctattccttcctgcgcagtggggaagcactgaaccctgaatattactgcggtgagaggcacactcgaggctctcagcaccgcctatttaatgagcacctggtctctgcaagcagcaaccctgcctggccttgcgccggaagaagcacactgagaaggaggtgccagccgacttgtcaa

SEQ ID NO: 377850 - DNA, 455 bp, Homo Sapiens
gggcctttcacggacactagtgcgtggcacgtagtcatagcgggaccctgtgtcactcagacttagcactggatagaggcgtagctaatctgtgggatctgaaatagcctcaagaggttggccacctggatggagacatcactgtaggaaccgccaataacaccagtgatggcagtgggagcatcaccatgggtcgcataaagagccggtcaggggcacgatgtggcgcgagccatcagcaccacggctgagtgaggcacgcacaaagtccagtgcctgctccagcgcatgtgtgtccttggagcaactgtcgaggatgtgtgcacccaggcgcacgccaggcagcaggtgcgggtcacggttgatgcggtccagtgcaaaaagcatggcctccaggcgctggatgccacggtgctcattgacaggaccacagtcctctgtctggccgcccattc

SEQ ID NO: 377851 - DNA, 786 bp, Homo Sapiens
  misc_feature (117)..(117): n is a, c, g, or t
aaatggtgacatcactggcatatactcatcatgggcgacaatatcttgctcaagaaggagtaattgaccaaatttctaatataattgttggggcagattcagaccctttctctagcnttctatctgccaggattcgtgaagttttttggaaacctggcgtgtcatggatagtcctcaacagatctgtgagcgttatcctatctttgtggaaaaagtctttgaaatgatagaaagtcaggaccccactatgattggtgtagctgtagacacagttggaatcttgggatccaatgttgaaggaaaacaggttttacagaaaacaggaactcgctttgaacgcttgcttatgagaataggacatcaatcaaagaatgccccagtggagctaaaaattagatgtttggatgcaatttcatctcttctgtacttaccacctgagcagcagactgatgaccttctgaggatgacagaatcctggttttcttctttatctcaggacccactggagctcttcccgtggcattagtagtcagcccttccctgaactacactgtgctgccttaaaagtgtttacggccattgcaaaccaaccctgggctcagaaactaatgtttaacagtccaggttttgtagaatatgtggtggaccggtctgtggaagcatgacaaagcttcaaaggatgccaaatatgaactaggtgaaagcacttgccaattccaagacaattgcagaaatctttgggaacccaaattatttgaaggctcagaacttacctgagtgaaaggg

SEQ ID NO: 377852 - DNA, 213 bp, Homo Sapiens
tcctgctcagcattcccttcatccctcttggtgcctgctctccctgttccctttcccttcctttcaaccttctgacttctcccctcccatgccctcttgcaatcaggtctcccaaagcacccctgcccttcaaaaaagagcttcatggcagatggttcacagtaaggatggtaaggccattctagcctataacaaagggcaatctttccagag

SEQ ID NO: 377853 - DNA, 210 bp, Homo Sapiens
gacctcttaactagaattctctaataaggtttatggtttagcttaaagagcacctttgtatttttattatcagatggggcaacatattgtatgaggcattgtgtgataaatctactttacagctttgcttctacctgcagcttacatgataaccatgctgtgaagtgctacatatgcttcatacaatatgttgccccatctgataataaa

SEQ ID NO: 377854 - DNA, 408 bp, Homo Sapiens
gactgtaggaggctagaagtagagatgaaggtgttggtagggttggttccttttgagggttgtgaggaagaatctgtcccatgcctctcctctagcttctggaggtttgctggcaatccatggcgtggaggagcagagtcccagtctctgccttcatcttcatatagcattctccctgtgtgtgtgactctgagtccaaattttccttgtttgtaaggacattattcatactggattaggacccactctaatgacctcatcttaactaattacatctgcaacaaccctgtttccaaataagttcatcttttgagatattaggggtttggactccaatatgtcattttttggggaaacagaactcaacctatagcaattgcttacactcacatagcattttattgtttg

SEQ ID NO: 377855 - DNA, 203 bp, Homo Sapiens
aggcagtctgtaggaggctgctgagttcgaagatgaggaagatgtgtcaaagcctttaaacccagattttgtgcctggctttgcactttcacatgccaaacatttcgtagactctgccttattctgcactaggcacaattcacagtcccagcttccctcgggtttcttgaacttttccaatcctagagagcctcctacagact

SEQ ID NO: 377856 - DNA, 321 bp, Homo Sapiens
ctcggtaccctttgctgttgtaagaaagaggcctgtattactggaacccccactacagtttatcaagggacctggtccacaagtccattcagagctagcaggcaagatctcttgtgataatcagtatttagtctgggggggataggtccttgcactaaggtttaaaaaatattagtcctggaggaagatgggggctggtagtagctaaaggaagacagaccttggggattcctaacctgtatgtactcagacaccacttctgactctcagagaaaaatcaggcagctggggccacacacacattttccccaaaactgctgt

SEQ ID NO: 377857 - DNA, 370 bp, Homo Sapiens
tcagcatagctaatgcaagaagagagtaactccggaaactatgaagaggaattaacatggtggtcccattctctgaaatagtctctcttctcacctctcctagtcaagcacatatattaggcctaaatattgttttctctttgaaaacttctcaagttctcttcaggaaggaccagtagcacatatccaagcatcaccattttaggacatgagccatcaatctgtgattatttgtttgcaggaagcacgagatttcagactccaggcactttgaagtggaggatcctgagttttgcattcccattatcaaagacaggaacaattgggtattaagttctcaaacatgtttattgagtcaatgaatgcgtaa

SEQ ID NO: 377858 - DNA, 248 bp, Homo Sapiens
atatagtttagatccagagacttgctgcacttaaggaacacactgaacaagggaagttctagaattgggcagacctggacttctgtccttgggcatatcacttaagttctctgaatcttctcttactcatctgttaaatggccatatttcacatgagtgtaaaatggagtaaattaggtaagtcctataaagccctgagcaaaaattctcaatcaatattagtgttgaattaagtttcacttaaagct

SEQ ID NO: 377859 - DNA, 144 bp, Homo Sapiens
cgctaggggtacccccgtgcgcctctctgcgcctgcgccggcgccctgtgcctttgcgagggcggagctgccttctcctcagcacagacccggagagcattgcagggcggagctgagttcgcctctcagactcgagggtacgag

SEQ ID NO: 377860 - DNA, 604 bp, Homo Sapiens
atatatgaaagctgtgataaaaatgtttcagatgtttagtcaattgtgaaatttttcttaaggcaattttcttttctatcagtttgtatattactaagccccaagagacatttcctgtgctagagtccaatatttgagtctctcgtgcaaatgagactattctttgtggtacaattccacctatcatatgtgaaaactgcagtaaaaataaacccagatgctaaatcattcctacaaaggtttgactgaaactgtggcagatgtctcatcttctttatatgttaagcagcatactcttctgatttttattgcaatcttttaccaagtggtgcacaaacttggtattgatgtctttattccattttgagtttagattgagaatatttttattttctgaaggcagagatatctactgtataattgcaccaaagtacatttgaaaggaaggttttcaatagtgtaatactgcagcgatgtagataaaatcacaaatgtataatgtgttaggttgaataaggtgtggaaaatgcttttctgttagtagaatgcaaaaacctacctaagccacataataataaaattcttttaccaacttttatgggta

SEQ ID NO: 377861 - DNA, 419 bp, Homo Sapiens
gcagttaaaaataaaaccccagatgcctaaatccattccctacaaaggtttgacctgaaaactgtggccagatgccctcatcctcctttatatgttaagccagccatacctccttcctgatttttattggcaatccttttacccaagtggtgccacaaacttggtattgatgtctttatccccattttgagtttagattgagaatatttttattttctgaaggcagagatatctactgtataattgcaccaaagtacatttgaaaggaaggttttcaatagtgtaatactgcagcgatgtagataaaatcacaaatgtataatgtgttaggttgaataaggtgtggaaaatgcttttctgttagtagaatgcaaaaacctacctaagccacataataataaaattcttttaccaacttt

SEQ ID NO: 377862 - DNA, 621 bp, Homo Sapiens
ctgggcttgggaagggccagtggtctttgttgagggggctgtgaatggcctctgagaggatgcagtttcaccagagtgctgggctgaggagagaaggtggagcatcacctcaagtacacagtcacctttcacaggccccagagagaccctcaaactagcagatgatactgcctggccacatcttactctctctctcctcatgctgatattcccccattctgattcctccagtacttttcttattacccacagtcctctaagtagtctgggaactaagcccagtgctgaggcctctctaccacccctgctcctgtgctcaaccttacatctcttctgggggccgccattcatggtctctccctccttccttctctctccatcctctcttcctaattccattaacaggaagattcaacagtatttctggtcagccaggaagtccttcttatggcctcagtctgttccatgtccaccaaccaggggaggctttcagtgcacacctggtcaggcagccatcttacaggcgccagttacctaagatggcggcctccctcaccctccgcttccgttcccacagccttgcctcctacccctgcctctttctttctgaagcctcagccc

SEQ ID NO: 377863 - DNA, 507 bp, Homo Sapiens
  misc_feature (23)..(23): n is a, c, g, or t
gtgaactacacagataaagatcncggcccttgtggaaccgacattctagataacaaagaagagacacgggtgaagtatagtatgtcagatgatgacaagttcctaagaataaacataaaggagggaaggaagataggaagtgctaggggtggggaagatgctgcagttttagatgaggtggacaggggaggcttcacggaggaagtgtcatctgagcacagacctaagggaggtgagagagtgagtcatgcggatatctcgcggaagagaagtccaggcagggggaacggccagagcaaaggccctgaggtgggactctacatggcatatttgaggaagagcaaggaagccactgtgggtggaacacagtgagtcaggggaatgtggaggcaggtgaggtcagaaaggtggcgaggtcagatcagggaggaagcggcgagaactttttcctctgaatgagatgggagtcacgggaggattctgagcagaggccagatgtggtatgat

SEQ ID NO: 377864 - DNA, 342 bp, Homo Sapiens
agtgttatggagcctgtttagcaaatggatgaacgtgatgggcgccccacagatgctcgaacgggggcagcctctagccctgggcaaaaactctgctttgaggcgctgagctcattcacttgggcagaggctgtctctcagcagcacagagggcatctttctctgggaacgaatccatatctgcacaggcacgtcgataggaagagacagattcccttattaaccccaagaaccctgtcctagccctgggaacttgctcactgtaaacccagctatctggatctaaagcccagaggtgaaccaggctaaactctacctctgaaataagaagagtgacacaag

SEQ ID NO: 377865 - DNA, 343 bp, Homo Sapiens
tgaggagctcattctcattgtcctaagagggctctgtgacctcccagtccttagtggattagggggtccctgtcagccaaaatgagcttatagagaagagcataggtatggcccatgggcagctgacacctgccagcgggagatggaccggtgcgccagcctgggaagcagatctggtgatagtagccacttggcttttcttgatttgcccgtcagtgggatggggctgatgcaagcttctgctttctaagattgctagtggccagcaactgtgctttgcactcgttatcttactcaattctctcagcaagcccatgagagaggaactgttatcctcatttta

SEQ ID NO: 377866 - DNA, 417 bp, Homo Sapiens
gtctctaggcgcactttaattccagtgaatttaaatctagacgctgttctctggaccgcaaaatgatcaacactcaggaagatggacccaagcggatgacctcatctgaatgcccccaatgccaaaagttaaggatataaacaccatgtggaagctgttgacaatttaaaaacacaccccccagaggcaccttgcaactccactgggaagccatcttcttcatcacatggtcactgatgcatctgtagtaagtaagtgactcctgcgactatcatacagtcaagtatgggtatcttaaggggtgcgaacctacacacacatcacagaaactctttttgctggaatcatctagtttggtgatttcacataacctccaatctcaaggttactagactctctcctactttcttctgatcg

SEQ ID NO: 377867 - DNA, 709 bp, Homo Sapiens
ctgtttcccactccccaccccacattcatgtaacctgaagcatgagtaaaccaagaatgaggtaggcctctgtcttctaagcaacattagaactctaagaacatgagggactcttagaaaactctctggagctaaccacagctgggtcactgctcatgtactgaagaccagccagagggttcccctgaaaaggagggaaactgagcaaacattctccagttctcttagtgtgcacatgtttcaggaggtgtgaaccccacatgtagcttgtgtaggcaagaagacaaatagtgctactgtctggtcaaggatttgtttgaagagccatgattatgcccatatggtaagccaccagtgctccccatccctgtaagacacttctttctcattattttctcctctgatggtgtgccaggatgctggccaagagaagccaagtggaaagaaggctgttcagtgacaagggacctaagacttagtgccaaggactgaaaccaagtaaacttgtaattttccatgatggaaacatctacactttctcattagtggcctctacagcagttgccccaaagaagcgtctcattgtttttttactacatttatgtgaagcatacaggcaaactcagaaagactgtgataaggctcgccagagatgcctgcacaggtgctgggggaaaagcaggaccatcctgaagggagatggtgtctg

SEQ ID NO: 377868 - DNA, 446 bp, Homo Sapiens
tgttacgctgtgaagttcgagtgctggataagtatcaaatatttcatcttttctggccactgacaagtgtcaggcatagaatgaaaactattcttactgatatcaatgttagtcaagtttttcagagtgagcaaagtctctccggttttttccaatgatgccaaatgattttgccttaaaattaaagtttgtagagagggccaggcatcctcacaggctgaatttttcaagcattcttcaaccatcaaattttcactgagatccaagtattctaatgattttaaatgttgcgaaagtaaacaaggaaccagaaaaactttactgttttctactgtgattcttttaactctttctgtaagtgaatgtaaagtgctcagatcataaaataagtaaaaccttggaatatgcagcctccggattgtaacgtttccactttaccttgatct

SEQ ID NO: 377869 - DNA, 162 bp, Homo Sapiens
ccatgtgggggatttgagggctgagggggctgagccgacggcagctgctgagggggagcctggtaggacatgctctcatccatgccggggactgggggctggttcagagacccttggtgttggggtgcggatggctgctggggtgtggctgagccataggag

SEQ ID NO: 377870 - DNA, 420 bp, Homo Sapiens
  misc_feature (395)..(395): n is a, c, g, or t
caagacctcctcctcctatctctcaatcaagagaaggtatgctaatttatggcccaggaagagaagaggcagtgtggccttctattaatagtagcaagccaagaagcaagagatggatattcggtgcctgggtttttccctgacagttaagttgggccttagtggaggttagcatgcacctagaagccaaggtgggctcagatcccacacacaaggtggccctggaaagtcactgcctctctctagatttgatgctccctttataaaatgaaaatgtttagttcatctcagaagccccctctgtctctgacagtgtatgactatgtggggaggcaggaaccagatgagaccaaatgccagggcattacaggaccaagccgccaatcctgatgcanatgacaagccttggaggagtgactc

SEQ ID NO: 377871 - DNA, 428 bp, Homo Sapiens
aaaagagaaacgagaggaagtccaggagaaacaagggaacaatggaaaataaatggaaatgccaatcaatttgactagtgtggctctaaaagatgcatggcttgcaattccacagaatagtaaggtatgcatgtactaaggaaggaggccccaactaaagagagagccacactaaggaacattaggcaaagaatgttctggaaaagagactgcatgcggagcttagtactgattagggaattctgttattgtttgataagatggagctggaatttgagcccagggattgacagaatatcaagccaggtgaaatttctagaacagcgggactttgtgtatacatttgctaggcaacactctatcttgtgtcagaatggaagttctggaatgcaaatcctgggacacaactagccatgccaaagaatgca

SEQ ID NO: 377872 - DNA, 393 bp, Homo Sapiens
  misc_feature (57)..(57): n is a, c, g, or t
agagccacagactctctgaaggaagcggactgctcctgcaggacccaggagacaccncaaatactgtgagtgccccaattgcggagtgggaaagggagagcctcctctcctgaacacacccccagaatggagaaactgaaggtctgtttgtaggagaggtttctgaccttaactggaagtgagtcaatttagagagtggagcaaaatacaggggtagtgcaagtagcagaaaggccctgggagctcactatgtccccaagcaggccattcctaacctgataccatagggatccattgagggggtggccagaaggaagacgggtaaaactccacagggagaaggaaatctctagctgaactgtgtaacaattcgaacaggacaagacatccggg

SEQ ID NO: 377873 - DNA, 462 bp, Homo Sapiens
tcggtcagtgtaacggagcccctacatgtgcagtttggctcatctcattaaagatgcttgatgtaataattggttagtttccttttattttcctgcaggcttttccatgagtattatttttttcaaagaacaaatctagtatggctttttccccatctccatattttgtttcgctatgaattgcttcgctttggtgaacttggcctagtatgcttgcctcacaaacgttttagccattgtgaattttcttcatctctgtaaatagttcatctgtgcttctccctgatgacgttttatttttttcccctgtaagcaaccgaggtagaaaaataaattgtttaccatggacatactgtgtgctgccgtctcttagcctgacagtgtcctgttctcgctccgggggaggtgaatgcactgaataaccagcaccgatgacagcctagtgcagtttctaaaagcatg

SEQ ID NO: 377874 - DNA, 437 bp, Homo Sapiens
tcgtcaatgcaatccgcacggtggtgcccctgaatggtagcgtgagcttcagcctgtcgctggaggccggcagtgatgtgcgctattcctgggtgctctgtgaccgcagcacgctcatgcctggtggtcgtatcatctcttacaccttccgctccgtgggcaccttcaatatcatcgtcacagctgagaaccaggtaggctccgcccaggacagcatcttagtctatgtcctgcagctcataaagaggctgcaggtggtgggcggtggccgctacttccacaccaaccacatggtacagctgcaggccgtggtcagggacggcaccatctcctacagctggactgcctggagggacaggggcccggccctggccggcagcggcaaaggcttctcgctcaccgcgctcgaggccggctcctaccatgtgcagctgcgg

SEQ ID NO: 377875 - DNA, 218 bp, Homo Sapiens
aaaaataattgtgagtctatttatagaccctatattcccttctattaatctttttaccaataccatagtgtcttgattactattactttataacagatcttgaaatcagatagaagtagtcctccaactccatccttctttttcaaagctgttttgctaatttggctcattctattgtggaggattggtaaatcgaaaatctaatgggttatcctgtt

SEQ ID NO: 377876 - DNA, 186 bp, Homo Sapiens
aggattgggagatcatataaataatatgagagaaaatcatgctgttttacaaacgcctctggcaaataaaaagacccgtgcatgtcaagattagaaatgaagtcttacgtggtttcggcccctttttaatggccttttcctcttctgagtataaacacttcttacaaagggaaagtccaaggagct

SEQ ID NO: 377877 - DNA, 258 bp, Homo Sapiens
gagggcagcaggtagctgagcacggggccggagccagcggaggatggcgggcacctggcatcggagcctgaggcgcagccaagtgacaggtcccccctagagcactcctcacctgagaaggaggccccaagcccagagaagactctcccacaccagaaaaccgtggcggctgaaagtcacgagaaagtccccagcagccgggagaagcgtgagtcgcgtcggcaaagagggctggagcacgtcaagttccagaacaaa

SEQ ID NO: 377878 - DNA, 235 bp, Homo Sapiens
gggctctgtctgcggctggagaacaggtgttttaaggtgccaactgacttcaaacatgctgggcatgtgattttgcaaactgaaacagcttgccatgtagaagctagttaaaagcacccattgcagagaggttaaaggaaactcaggctatgtccataagcaccctttctctaagtgatctttatcctattcctcataaatttactaagaatttaggaaagttgaagaaagttcg

SEQ ID NO: 377879 - DNA, 583 bp, Homo Sapiens
taggttagctcctctcctttggggattcgccggctggagatgatgatgattttgtcctctgtgtcaaatgtcacgacttcggccacacagttagaggcacaggaatggttaatgtacctggcagggccgacggtcaacgtagcatcaatcacatgttcattgtttattcggaacatgtagatgcctcgattctgctcttcgtagattttctcccgccggttggccacctcgttccgaatgatggtgccaatgtactcgataaccattgtgtgcttttctaggtccttggctgcatagagccccaggccctggatacgggagcgagccaggtacacgttgttcctccattcggtgcgcagccgccggtactgagatgacctggagtgcacaaactgcttgctgtagggggtgttggtctcgcctgtgaaggtgctctgatatgccttagacatgctggtgctgttcagggtatggggccgtttgtagtgtgtgaggattttaggctctgatcgggcacagccagtggggttgatcatgagtggcagctccataagggggtggcgcccatagcggaataaatagt

SEQ ID NO: 377880 - DNA, 666 bp, Homo Sapiens
ccatataaaaggtagattaaaaaaacaaagtagcatgagtgaaattgagagagggacaggtaatgcctttcagccactaacttctaacaatctggaagcacaacgtgaaaatcacgtagcccaaccctatcattttcatattatgaaactgagtccaggtaagtgaatctgtccaaggtcacccagcaaggtatcagtagacctgagggtaaggactctgataaggctcgggagggtcctggaaagcctgaggcggcaggaagagtgtgcagagttgagcgtgtctggaaggctgatccactgctgggcccacatcaaagcccccatggggagcagacccgactgcacatggctctcttgctggaagaagagcatggctgcgcagagaactaaaatttcatctgggaaggcttcttttgactgtcagtagcaggatgtcaccagatgagggtgctatgggaccacagctgtctttgttcccattgcaactcaaccctgcgggaggccgcctacatccctgagagccttctggagcctacagaggagacattggccagccaaaaggaaaggagtggccagggtacgacctggagtagggaagggaaaaagttcccggaaagaagagaattggatgagaggtctcggtggaaataaaggttttctggc

SEQ ID NO: 377881 - DNA, 472 bp, Homo Sapiens
  misc_feature (39)..(39): n is a, c, g, or t
caaagaggttgagaaacaggaagatccagagaatcatcnccagaccccagaatctgctcctgagaataaagattcagaactgaaaactccaccttccgttgggcctacaagtgtcacagtcgtaactctagaatcagccccatcagcactagagaagaccactggtgacaaaacggtagaggcgcctttggtaacagaagagaagactgtggagccagctaccgtctcagaagaagcaaagcctgcatctgaacctgctcctgcccctgtggaacagctggaacaagtagacctgcccccaggagcagaccccgataaagaagctgccatgatgcctgcgggtgttgaggaaggttcatcaggtgaccagccgccttatctggatgccaagcctccaactcccggggcctcgttttcccaggcagagagcaacgtagatccagagcccgacaaagcccacagagtccttcgc

SEQ ID NO: 377882 - DNA, 375 bp, Homo Sapiens
gtgtggaagactctccatcccccttcttggagcaggaccttcagtgatatggacagcgggtgtcaggccagctgacctggatttacttcacaccggcagatccagggatgcagccaccatccactctgctttatttagtgagacagcacttcataccaacagcaggcttaatcacagtctataccaacatttcacttcccatttctatgtctgtactccttgccttttggttatttggggtggggggtggcaatagcatgctgattctatcttccaagcaccctccccaaatctcctacttccctgctgaaaacgattcccttctcatgttaatttgatgacccagccagctgcacccctccgcccccgcacccc

SEQ ID NO: 377883 - DNA, 376 bp, Homo Sapiens
cttccctctcccgctccaacttggagtccatagttcattgttataatcattcctttgtaaaggctcctacttccccagcccttctgtgccatcattgcacttacctggcaatccctcaaccctgggaaaaccctaccatctctttttacatccttaagcatttgttgctttaattattgccctctttagatcattcttactacaatacaaacatgagctagaatttctaatcttaaaaaccttttcttggttctatagtcctcttttagctacatttctgggccgtaactcttagcaaatttttacaaaaatggactatactcctttctttgtatgtacaccctcccttcccactttcttctgtacagccatccca

SEQ ID NO: 377884 - DNA, 371 bp, Homo Sapiens
ttcctcccctctgcagagtgggcccggctatactcctcaccctcacaacttcctgagaagtgatagcatgctgtgctcagtggcctggtggctctccagtccccgtgcccagtgcaaaccagcggaggatgccagctcaagtttctggggacgaaacaggcagacctccgggcctggcttgggatcccagtggcaccccaggatcaccccatgttcgctggctctttctttaaactgtgtaagtctgtggaatgacctagaggtgctgacccaggggccccggagtctggttttcagaagagacagttctgctgccgtggccatggagtcctcacccacttgagaccccccagttgaaagggttaggaaca

SEQ ID NO: 377885 - DNA, 493 bp, Homo Sapiens
gagctcggattccgagctctttcggcggctgcagggggctgtacagctccttgccgccatggctgatgtagcaggagaggtagaaatcttcatagctggtagcccagatgatggggatgcggtgggtggcatagacagtgaaggccagggacctggcgaaatggcaggcctcctggaccaggtcatgcttgcggctcccgggcactgccgtctggaagtctgcgttgaatgtgttgcagtacagctccaccaggtccaagatggcagcggtcagggcttccacgaccttctctcggttttccctcacagccaagacactgggatccttctgaattttaggctgcatgcgggaggggcaggggggcagctggttgagagcactggtgatctcaggggtttccacggcggccagggcgttgcagatggccttgacggactggaccaccctgtcagcctacagtgggaagtctccctcaggcagcaggaagagctc

SEQ ID NO: 377886 - DNA, 448 bp, Homo Sapiens
agtacagtcggccggcgggctggcatactaggcatcgtggccggcgctctacaatctctgggacgtggaaaaatctggccacctgtggactgtatctctgaagcttctttctgtggctcttgaggtgctcctttagggcctggctgaggcggaattcctcacggcaggcaggacaggcataggtgtctgagtagaagttggaaatatcttcatgcatgctggccatgtggcggttgagtgcattcctctccaccgcactgtagtggcacagtgggcagtggtgggccttttcacccagctcccgcagcagatgggtcttgagcttgctcttactggtgaagaacttctggcagttagggcactggaggctggagtctgggaagtggagatgcatggtgctccaccagatgagtccgcttcttaaagcagcgcttacactctggacaca

SEQ ID NO: 377887 - DNA, 360 bp, Homo Sapiens
gagctctttcggcggctgcacttggtgaccttcaaggtctctttgagggcctggagctgctcctagagctggtccttctcctgggcccacctttctttctcagttgctttatgctgctcagaccgcagctgcaactctagctctgcaacctgagcctgagcctcatgctgttcctggcgggctgtctcaacacaggcctggagttcctccaccttccggctcagctctgccttctcccgctgggcctgtgtcactgaggtctgggcactgtgcctggcttcattagccccctgaagttgctgctgcagactctccagcttggcagccttctccttctgcaaaactccagccaagaaagag

SEQ ID NO: 377888 - DNA, 501 bp, Homo Sapiens
gtgtctacagggccgctgcatctccatctacagcggcgaactttcagagctgcaatctattaacccagccgagctacacaaggagtgtcccaaccccaaaccagacaaggtcccactgcagaaggtctccctgaccctaaactctcgctactacctgagctgccccatggaatcccgccacgccacctactcatggcgccacaaggagaacgtggagcagagctgcgaacctggtcaccagagccccaactgcatcctgttcatcgagaacctcacggcgcagcagtacggccactacttctgcaaggcccaggagagctcctacttccagcgaggctcaccactgacagctgctgcccgaggacggcatcatggccgagcacctgctgggtcatgcctgtgccctggccgcctccctctggctgggggtgctgcccacactcactcttggcttgctggtccaatagggcctcccgaggctgggcatgcctcaggcttctg

SEQ ID NO: 377889 - DNA, 376 bp, Homo Sapiens
tcgactgctgctccttctgcttcaggctactgcttagctgctccacctggtggcggaggccctgggaggcctgttcttgctgttggagggtctgtgctagctgggcctgcttctctttggcctgctgcttcaggccagccagttcttgatcctgttgctggatggtggcattgagtgtggtgagctcagaggtcagagaggccacctgggcagtcaaccgggccccatgagcctgagaggcctgctccagctcttccttggcctggctgagggtggagatggagctctgcaggtcagtgatcaggctagacagctgctgcttttcttcttcgaagtggccccgctcagcaagcagcttggcttcctgctggcctcg

SEQ ID NO: 377890 - DNA, 291 bp, Homo Sapiens
ggtttcaggaattcatctgggtcatttaggggaaatttctgcagttccatggtgattttaatcactaaatatcaactaaaaatcaacatccctaaaaatgtggttacataataacagaactcacagaaagtgagaaagagtagcttaggtaggtcgtgacatgcagcaacaaggagtcaggcagtcctagagccaaatcacttaattataatgagcttgagatgacctcatctataaagtggagaaaatcatgcctggttgataagactagtgataatgcagcaaagagct

SEQ ID NO: 377891 - DNA, 389 bp, Homo Sapiens
gtggggagaaatccccacacctttttctgtgttgcatggtttgtttgagactaggaaagacattttcattttcctatctctactgtaactacagacagaactaaagccccctacatatggccctaatacacctttcccacccattccaactgttagagccatctcagctaaggtaccaagcattgtggagcaaagataagtcatcttcactgtgctctgcctgaattcttgcggtgcaaaattatgagcataataaaatggtggttgtttatgccaccatgtcttggggtcagaaatagataaatgaaacgcctggctagtgttctggcagtcttcagtggcaatctggtcaaaccccaggctcaattaagattgtgctccaatgccca

SEQ ID NO: 377892 - DNA, 484 bp, Homo Sapiens
ggataccaaaagcaaagcaacgcttaaaaaggctccgaaatattcactacctctttaatactgccctcttccttatcgcctggcgccttctcattgcaagatctcagatggctcggaatgtctggctcttcattgtaagcttctgttataaattcctctcctactttagagcatcccagcacgcctcaaagtttaagagcatttagccatcgctttttatctggaacctcctcagatacctcctaaaacagcaaactgtgattctcaagattagaaagtaacaaggaatatgcccaaactgtcaaatgtcacctgttatgtattcgtccctaatccttaactatgtatttttatttcagtgagagaaggaaagttgtaaactaacccatagtcacctatattttagggaaaaaaatccaaattgtttcctaacattctattttatgcccttgcgtattaaacgtgaaagtactcccaaaaaaaa

SEQ ID NO: 377893 - DNA, 287 bp, Homo Sapiens
ttacaatcggctcggacccctctttctgcggctgctcctgtaatgaggcacttatttttagctgagccagtgggtgcctgttgatgaaatcgatgtttatactcttcatccctatgggtttgtacctgtccctgtttatctctgcatatttatctacctacataaacaacttcaaaagccaaatattctactgtttacctcacatcctcagctctttcctttccttcaccattccttcttatttatagcttgttttcagcaaggaaagctgctctcatgaatagcaa

SEQ ID NO: 377894 - DNA, 346 bp, Homo Sapiens
tatgatctctccacatggcgctatgacaacaacacagcgttcaatggtatcacggtggtgaaaagagcacagattcttaaatcagatataacagaattagaatctgcacttcccccttacaacctcatcatctagggcaagatgagttaattaacctcccaaatttctaattcatcatctggaaagtgtacagaataatctgcacattgcaggatgcgccgaatattgctaggcgcacaccaacatctgctctcccttgctcccagggcacaggcctgaactacgtttcccaggtcctcccccaacccctggaagcaggcacagctacgtgactaaggtcgctcca

SEQ ID NO: 377895 - DNA, 197 bp, Homo Sapiens
aaacagagaaagcaacagaattggcccttacacatcatagctctttctctttagcaacatacctaaaatctctaagtcagaaatctctccctttaggccattttctttgctctaaagaaatctctgggttcattttattcagaaatcaaaaacttggaaacaggtggggcagtataaaaaatcacagtattgaaaaa

SEQ ID NO: 377896 - DNA, 385 bp, Homo Sapiens
agtggttatgcaagtgttcgtgtcgggaaaacatttcccgtggtcgctagcactgtgcttatggtgatggaggggcctcaagagaacctgtaggtctgggaaggacacacgtgactctggtttgttctgggacagcagcagtcactgcaggaaaccccctgatgtggacatgggcttccctcagaggcgactgggcaagagtgtgggtgtcaccgcgaggggcctcctcctgggcctgcaggagagacagaaccacaggcccctttgcggcttccaggcgggactgggattccctggggggctgggattctgtgcccttcatgactgcctggcccaggatctctctcacctgcaacaggaatgaaaactacaacagaactgggaa

SEQ ID NO: 377897 - DNA, 260 bp, Homo Sapiens
ccaaatcagcttcctaccatgcctcaccactggctaaacccactattcccatctcctggcccttgccctaggagcatttcgtagcagcttttcctctaatgtttttcatccagcaggatttttcatcctaagtggccagtctcaaaggggaggctgaccttattctcgtgtgaatggagctcatctggatcactctcacctccctccttcacacagagaacaggcagaaaagttaataacgaatccgcgggcactgggaa

SEQ ID NO: 377898 - DNA, 366 bp, Homo Sapiens
accaggtgctcaccagtacacgcaatcccactccaccgggagaccaggcgctcgccaatacacgcaatcccactccaccgggagaccaggcgctcgccaatacactcaatcccactccaaagggagaccaggcactcgccaacacacacaatcccactccaccgggagaccaggcgctagtcaatacacgcaatcccactccaccgggagaccgggcgctcgccaatacacgcaatcccactccaccgggagaccgggcgctcgccaatacacgcaatcccactccaccgggagaccaggcgctcgccaatacacgcaatcccactccaccgggagaccgtgcactcgccaatacacgcaatcccg

SEQ ID NO: 377899 - DNA, 184 bp, Homo Sapiens
tttaaagacaatttctaatgaaaaagaaccaggactccttagagaaatagttgattccaagtgtgggacaggcatttataagattttaaagctcagaacttatgctataagcaagaccactggagtcatcttaaaaggacacaagagccaactttgaggagctccaccagcagcggtcaggaat

SEQ ID NO: 377900 - DNA, 370 bp, Homo Sapiens
ccgcggggaggaatggggttagactcaatggcaatccaaggctgacagctgagctaacggatgacttaggcaagaaagacagtgattgactcatgaaatgaaaagcaggactggtctcacggacagctgggattcagacttcagaaagcctccatcaggacttagcttctttccagccctttgccctttctgctgtgttggccttagtcttgtgcttcacagtggcaggatggctttggcagctccatcctcatgtcctctcccctccacatcccacctctctgaagtctcagcaaaagtctcatgatttattggctttggtcaggtcaggtgtccattgcttgaaaaccaattcccatggctggttctc

SEQ ID NO: 377901 - DNA, 317 bp, Homo Sapiens
tataatcatgacaggccatggttaactacatcagatacacgtagcagccgtgaccaagacatggtgccctaataccaagtgttcttgggttaaaggcaggcggctttttaattaaatcttaaagcactgcaattactggcaagacagctggtcttaagcagttttgtgactgcccttttcatccactacatgactattccggcctttctggagcacttttgaaaatctacttgactctgtccacaagactgaggaaagtgaaagcaaagtcccgggaaagcaggagatgattcagcccggggttctgcccctcgccc

SEQ ID NO: 377902 - DNA, 314 bp, Homo Sapiens
gcccagctgttcctggggctgctatccagacctccctgccacagttctctggaagccacggtggtgcttggttttggttttggtttaaccagcttttcaaactttacattaaagaggtttagaaacctttgttcagatgggagaagaacagaggcagcacctttcaatacatgctttttgcaatctatcagattggaaggcaggcaactactttgtttgcagatcagtcatttggaggaaatacaaagaagggggccctggaaggggtttgctgtgatattctcagggaagcctcagtctctagcctaggctat

SEQ ID NO: 377903 - DNA, 622 bp, Homo Sapiens
tcatgcagaggctaaagacacagttgttcaggaatgttcggcattgagcagactagcaggatccctccaggtgagactttaggatgctctatgacattttcaaagaccattggagaaaaagtatctctaccccgggtaactcatagtgtttaattcaccctgccatcttaccaagccatgggaagtagggggaagcctggacttgggctgccccaggccggtctgtgtgttcaattcaggtgggactgagcagggaaggtgcagcctgatatgcacttgggtgctggacatggcagggggcacagtgactctggctgtgttcccctcctgccagtattgggctcccaatattgcttcaagtggagttcaccttggtttggggtcagggagggactgagaggcattcatttctggcaggcagccaggctggcctcacaggttcatgtgagctgcaccaagcactgccaagatcaccttgggttctagaagaccatcttttattcattcgagaagcaggccgagagactctgctctatgacattttcaaagactgttggagaaaaagtctctaccccagataactcacgatagtgtttaattcagcctgccatctaaaaaaatc

SEQ ID NO: 377904 - DNA, 399 bp, Homo Sapiens
ggtgctgtgttcctcagcctctgagttgtcccatggatagttcagaagtagcccaggaaacctgtattcctgatgccttatgcacaacttataaccaacacttcattctcaaaaatggagtcactctcatggggacaccagtgacgtgaaataaggccagagggtgtggtatgtgttgcaatgtcctgtaagatacaagtttaagagcctgtctttcttggaagtgtctaatacaggtagtaggtgctagtttctggtatctacataggccagaaagtttctcccagggttcaagtgctgaggatttgctgtgagccggctcagttttagagggtgtgacactgctccctctcctttaggaaccacatacaggactgaaaactcccacaggacttggaa

SEQ ID NO: 377905 - DNA, 366 bp, Homo Sapiens
gttttccagatcaatagctaacgatcctggcgcagggctgaatggagttaaggaactttaacactttaattaggctgccaccgaaaataaattcctacacatctgtcaattcttacttgagcggaaatctactcttccagctagacctgccacttcctgctcactgcagcagctgcttccattcagccaaggcttccttcttcagagcccctcctactacatttctctggggcttcccatttcctgggtcatttaagacagggagctgagtttgggcttgtttctgctgtctactgctggacttctataaaaggacaggaactggactcttaataaaatgatctcttaggccctaccagttctaat

SEQ ID NO: 377906 - DNA, 407 bp, Homo Sapiens
attaaaagcatagcccttctgaaagctccaacatccctcttggacctcagtgggggcctgtgagctgaggatgggggagcaagaagacagaaggagcctgcgtccctgacacatgaaccgtcattccagccctgggctccacaccaacagacttctttacaggaggaagaaattaactttgatctggggatgtttgtttcatgcatctgaatcatatccctccagctctaggcacttctccaggtttctaccccctccatttcatctgagagcagtttgccttagcttttcatttagtaaaggtgaaagatcattgtgattttgatgggtgtctcaatgactggtattggacatggcagaaaacccaggtggctaatacgctgagagctgctcacacccactgggaa

SEQ ID NO: 377907 - DNA, 491 bp, Homo Sapiens
gcaggagtgaatgtatgtgaaatgatcaaagaagccaatcaaactgggggaacaggagggacagtagggtggcaagctgctgatcttatgggactaagagggagtgtggcctaaaggaacatgcagacacatcctgaggtctgctggagtctccacaggcctcctgcctgcagaatgcttagcttggtaacacactttattactgatcttcaggacatggtgaggaatggggcaagagtccatggaacagggaccagaagaggtagggtagggtagttgggaggtaggtgtggagaacagtgcaaggagaaggaaccatgcatggtaagggtgacacagcaggatccttgggtgtgtccacgttctagaacctcaactgttgccacatctgtctgtccagacatcctggcagcagtaatgccctgagagcaaagtgccagtgcctaggcctgcttgacacaggactgccagattaaatgcagccccaccag

SEQ ID NO: 377908 - DNA, 205 bp, Homo Sapiens
tgtgcctgtcccaagggaccgttggaaagatgagagaaggaaatccatataaaatgcttaacacagtatttggctttagtaattgctcagtaagtcatagctatatgttattaatatgatacacagtcattcttctgaaatgaatgggcatgaatgcttccctctctgcataaggaattatttgtgctggatccttcttaagagg

SEQ ID NO: 377909 - DNA, 256 bp, Homo Sapiens
gtgaggggtagcgggcagtggggaggagttttcacaggggtggactgagccccatgcagcccccctcctctgctgccaagctccatggtctctgccctgacagctgtggtggcggtaagagtctgaggccagggctctagagttcacaggggttttgaccatgttggatctcaccgccttggcccaaagcccagaatcacctgctggtaaacactcagacaagagtaaacacagctcagacaggaggagccaagag

SEQ ID NO: 377910 - DNA, 411 bp, Homo Sapiens
cccttgtagtcaatgcctgaatgggaacctgggaactgggagaggcaattccaaaagtcacttcccccacaaaccctgaccaagccactaagttttagagcctagcagtccaataaggagggctcacagcattaccttcctcctctaccgataggcatctgatcttgtagatgcaggaatctgtctccttattttccaaataccctccctttctcctcttccttctttgctctggtttagccattatcatttccttggaagaagtaggagatagcattggttgggagttcaagcattggaaaaataatacaaatgagatttggaaataatttctaggtttcagcagccatgtctttacccctaccctcttgcaaatgccacccatgcttccaggtccagggtaggttctac

SEQ ID NO: 377911 - DNA, 355 bp, Homo Sapiens
ccagagtcaacaaggaggtgaatgttgtgagaactttctgtagagagatggaagcagaagccacattggatacgactgacgaataaacggaaagtgacgacctatgactcttgaaaagcttagttatgatggtggagatcggggagtagctagagagtagaggtgaagaaagtttttatgttgctatgggttgtttgatttcaaagatgaggcaaatatgtaaatgacaacaggaaggagccagcctgagaaacattttaagagacaaagaataactaacagcgtcaaaatttcttttattatgaaaagaaattaacagctaattaagcatatcctatgtaccaggcaatgatta

SEQ ID NO: 377912 - DNA, 363 bp, Homo Sapiens
aatgttgctgggtatattatattatactatgtgaattaagaattctctattaaacagttttaagttgtaagaaagccaccctaagtttaaaactttcagtcttttaaaactgatgcattaaagaactactccaaataagagaaacaacactgaggtgtgattcatttgaacttgagtcccggttccttaacccaatgcctggatgctagagatgttcaataaagacttaacgactgcataaccaacttattagctgtagaatagttataataattaacttccttgagcctttgttttctcttctgtgatcagggaagaaacctcttctgtctacctcagagaatttttgtaaggatcaaataa

SEQ ID NO: 377913 - DNA, 423 bp, Homo Sapiens
gcatggggaccctgccagcccttgacgggtagtagcgtgcatgagaatgacacttcctattaggagccaccaagatttcagggttgtttgttgctgcagcataacctggcctaccttaactcacacacatctccaaaaagcaaaaccaagatggagctcagaaatagcatgaaggacattgtgtttggagaccaaacgctcatagtggacatctttggtgttcacgccacaggagggactggaagtggcaatagagttggccctttgtggggccttagtaccgttagggcaaacctcagagaaaatccatccaaactcttccctggccaaatacggagactgaggtccagaaagggcagggcttcacagcatgctatagtagaggctggcacagaacctgctaacaatagactgcctccattt

SEQ ID NO: 377914 - DNA, 556 bp, Homo Sapiens
cctgttattccctccacctgtgctgaggatgtcagggaaaattctgtagatgcctctcgagttcttcttgagccttgattttcacattgatcgcgtcttccttgttttctgtgtttgtacctcatctccaccctggactacgagctccttgacttcaggagctaaggctgagtcctctcctcctcaaagcacagctcagcacaggctgggcccagagcacacttaagtgtgtttgcagaaggaactgaaatttgggagggcacaagtctcgccgggagtattctcctcttctgaatacccttttctgaactcatagcgtcctctccaggtcacacagtctagatttagccccaaatcccaaaactaccttccaataggactaccaaaatctgagcctaggagacttcacattgattttaaggtaaaagttgaaaatgtcaacttcatagtaaagtaaaagtagggtatattaatgtaatctcaattaaaggcatagtttgtttttttctaaaaggaaaaattatgaaggagacattatcaggtaattttaaaaaaa

SEQ ID NO: 377915 - DNA, 348 bp, Homo Sapiens
ctctgagaagaaaacctactacctgacggccgattcacccagcctgctggaggagtggatccgagtactccagagcctgctgaaggtgcaggccaccgggcctccagctctgcttcggggtggcaccaagcccaccgtgaagggctggctgaccaaggtaaagcatggccactccaaggtggtctggtgcgctcttgttgggaaaatcttctactactatcggagccatgaggacaagcgacccctgggctgcctgcctgtgcgggatgcgcgcatagaggaagtagatcgatcctgtgactcagacgaggactatgaggctggaggaaccagacggttgctttcctt

SEQ ID NO: 377916 - DNA, 407 bp, Homo Sapiens
agctcggttccccccagacctgttggaggcgcggcaattggagtcttgcctctggctgggttaatgttcttgagcagggctgtctcttccttgagcctcagtttcccctcctgtcaaataaagggcaccaggctgagggcacgccagggtctcttcccagtcccgtctagctcctgggtggaaagccaccattctgctgtaatgcttggcttcctcagagcccttgtggtctcggcacagatagggagactgaggcacagggaagccctcctgccccagcctcactcctagaggccctaggttctgtgaccactgccactctgcatctgtgtgtctgtgtgtggctgactggctccatctcctctcccaccattcccaaatttcctggactggctgtgtgagcttca

SEQ ID NO: 377917 - DNA, 474 bp, Homo Sapiens
cagagatctgatagagcatggcggaggggagtcctgatggggaccttgaagaggactctgaaacatgaacagagccactgtggggaaagaactgaccgtgggcatctagatgacacactgctgggggtgggagactccgctgggcgctggaggcagtgccgttgctgtggtcactgctctgtggccaaaggacttttcagcacccaggtgcaggggtggtgtgggtggatggctggcctgccccagggctgcagtgttgctggccaggtgtgggagaagaacaaggatgaaggtattatatttgcaagtgagtggtatgttgaggggattcgcctcggaggctgaaagcaaagccagggaggagctgatgaaatgagagaaatcggaggtgtgatgagagaaattggaggtgtcgggagctgggattctttatgaggaagacagcaggcggaatgcaggcacgagggtggaaag

SEQ ID NO: 377918 - DNA, 376 bp, Homo Sapiens
ctgcttctgtcttgtaggcagggagctcgtcctgtagcccttaggtcctcccagcctcctcctcctctgatttgtgggtgccactggggcagctgctgagtctcagtggttcctagtcatcaccaagttctgcccacctagatggtttgcacctgtccttaccagaaccctgcactgtctagatgactgaggctgcttctgcctaactgatctgctatctgtgttccgggggcaccccagggttagaggtaaatggcacaggcattgaaatctccaactgctctgactccaggttggtgcacttcaatgccaagtactaaccacacaataacaggatgccaccaaaaccttggtatggggctgctgcatcctaatt

SEQ ID NO: 377919 - DNA, 416 bp, Homo Sapiens
  misc_feature (267)..(309): n is a, c, g, or t
gaggtacatctacgggtgaggtacagctacgggtaggtctggcaggatgcagtctaatgtgtttgttaatacagtggtttacagagtgtgcagaaaggggtgttcgagatagataaaagtggggcagaaaggtgacaacagttaaagcatactgataggtacacatgggctttgtttaaagctattttctctacgttggtacactttgaatatttctataacaaaaaaatgctagtggcatacaaatgcatgactgccttgggagannnnnnnnnnnnnnnnnnnnnnnnnnnnnnnnnnnnnnnnnnnggcccactcggttttccgcgctgaagtgcggtggcgcaatgtcggttcagaaaaaccttggcccccggggttaaagcaaatccctatgccacagtttccccagaagt

SEQ ID NO: 377920 - DNA, 398 bp, Homo Sapiens
ttcccagtcccgttggagcacctggggtcagactacctgcacctgatccctacagaacctgtgtacctaccatttctcagtacaggtgaataaaggcaacccctcaccacacctcctccctgcctctttaattagatcccaggacgtttgcttacactggcctttgcaatggccaaaagagttgttgctgaactttcaaaatgagacagcagagagctctgcgtaacagttgcctagactggtctccttgcccccagagctttacttttacttctctctggaaatgccatctgatttcattctaatcttcaatcttctcaatagccacttatctcatcctcttgtggaccaatgaaaggagcccagaattcacttctggtttcaactctgctcagtag

SEQ ID NO: 377921 - DNA, 456 bp, Homo Sapiens
agtagttaagatcgcagctctggagggagttactagcagttgtaactttgacagctcgtttaaccttcctaagattgtgtttcctgtctcttgagtaaaatgaggacaaatttgtctcactgtcacagaggatagaatggagacagtggaactaagagaaggtggcacatgctagctatgctcaacaaatgtcagcaaattttgttgaaatgtggaagatactgacaagagcaaagttttcagatcagcaccagtaacttgtcttacttaaaccgttaaaatcacatctgttttaatttttcccctttttctcttttgagccttttattgggaagagcagatgcagtctgtgcgggtatgcagtgctgcagtacgaagtgaatgggcaccccctgggagttggggcagtgcacaacgcttcagtgcctttacgtagggaggatggggctttgactt

SEQ ID NO: 377922 - DNA, 631 bp, Homo Sapiens
cgtttttatgcggagtcactcgtggagacctatgggaagatcatgaaccatgaagagcgattccagttcccatcccatgtcacggatgtatctgaagaagcaaaggacctcatccagagactgatctgcagtagagaacgccggctggggcagaatggaatagaggatttcaaaaagcatgcgttttttgaaggtctaaattgggaaaatatacgaaacctagaagcaccttatattcctgatgtgagcagtccctctgacacatccaacttcgacgtggatgacgacgtgctgagaaacacggaaatattacctcctggttctcacacaggcttttctggattacatttgccattcattggttttacattcacaacggaaagctgcccttctgatcgaggctctctgaagagcataaagcagtccaacacattaaccaaagatgaggatgtgcagcgggacctggagcacagcctgcagatggaagcttacgagaggaggattcggaggctggaacaggagaagctggagctgagcaggaagctgcaagagtccacccagaccgtgcagtccctccacggctcatctcgggccctcagcaattcaaaccgagataaagaaatcaaaaaaa

SEQ ID NO: 377923 - DNA, 477 bp, Homo Sapiens
ctgctagcaagcaacccttgttcactcttccgccctagccttagtcctctcttctgaggctcccttggtcccttcccacagctgtccctcaagcctccacatctaccttcttgatacatctcatgcaccaccatggtcttccctatctgggagctgtggtccattcattctgttctcgttagtgaatcgctggattgtttatctcacaccttctctcccaactcctggctatgagcccctggatgcctggggctatgtcaatttcactttctcctcctctgcctacatcagaccttcgatatgggtttgctgaatgaataggtggcttctcccttcctgtctccttcgactgaggttgggatggtcaggaggaagcctcaaaattagatgaatgcatatctcatttttcataaccaatagcctacaaaatcagctggggaagagaaaaatcagccacagcatgggaagccttgggga

SEQ ID NO: 377924 - DNA, 741 bp, Homo Sapiens
gttcatagtggagaagagttcctggcacttacgaaagatcagctgatcaaaattttgcgaagtgaagagcttagcattgaggatgaataccaggtcttcttagctgcaatgcaatggattctgaaagatttgggaaaaagaagaaaacatgtggtggaagtgctagacccaattcgattccctttattacctcctcagagacttttaaagtatatagaaggagtatccgattttaatcttcgtgttgcattgcaaacacgtctgaaagagtactgtgaagtatgcagatctcccaaagagaacaagttttgtagttttctgcagacatctaaggttcgacctcggaagaaagcaagaaagtacctgtatgcagtaggtggatatactcggttgcaggggggtcgctggagtgatagcagagccctcagctgtgtagaacgttttgacacctttagccagtactggaccactgtgtcttcacttcatcaggctcgaagtgggctgggagtaacagttctgggagggatggtctacgctattggaggtgaaaaggattcaatgatttttgattgtactgaatgctatgatccagttactaaacagtggacaactgtagcttcgatgaatcatccccgctgcggcttaggagtgtgtgtgtgttatggggccatctatgctttgggtggatgggttggagctgagatagggaacaccattgaacgatttgatcctgatgaaaat

SEQ ID NO: 377925 - DNA, 320 bp, Homo Sapiens
tcagggtcaagggagttggttgggtcccaaggaccccggaaggagagattgtgcagtgagtagggaagacattaaccagttagtgaccaaaccaacatccctactgcctacttacccaaccatcagccaaccattcattcccccatccacctattcacccatccacccatccaatcattcacccagccagtcaactacccatccacctgttaaccaactacccactcatccatccaattaagcaactattcaatcaatcaaacattcaaacaactaaccagtcagccaatctgccagcagatagctgagcatctaaggaa

SEQ ID NO: 377926 - DNA, 311 bp, Homo Sapiens
gaatatgagctacagcagtgggtgggtcgtgggtgttgaagtctctcccaggagcataatcatgcaccagggactgtcccactgggtccctgccacagcccactttacatgtaagcagtgtgaggatcagagagctaaggtgactcgtcaggggtcccagggtcccagggtcccaaagagataacacggggattgtggcttctggtgaggcccagcccttagtctcttcctaatccccactttgcctcgtctgtagaaggccactatagacacggagtcccttttctatgatcccatcgccggatttcgga

SEQ ID NO: 377927 - DNA, 438 bp, Homo Sapiens
tccgaattccggccatgggatgccgcagagagtcactgaagaaagcctgaagagagtcctcatcctctttttctacttcccttttctcaaggacatcagctagacctaactataggaggtaggatcaaaccataggtagcatgagatactgtgatcagacttcagggagcactgtttgctagcaaggtaaccaggggaggagagcaataatagtctgtgttgcaggtcttaaaaagaggggaaatggggaaatgaatgaatgacctccgggtcccctgccatggcttaaaggtggctggtgggggtcttagaagacctattatgaatgagagctgatgatttcaggaatctctaaaacatcagcttgagcatgttatacctggtgactcatgggttctgtcaatgttccatatatcccatgctattttatgccttttc

SEQ ID NO: 377928 - DNA, 557 bp, Homo Sapiens
ctcagaggtcgaggtcggggtaccccacgaggaggaaggaagggtttacttcccactcctgacgagttccctcgctttgaaggagggcggaagccagattcctgggatggaaacagagagcctgggccaggtcatgaacattttcgtgatactccccgccctgatcatccccctcacgacggtcattccccagccagcagagaacgctcctcttctctccaaggcatggacatggcatccctacctccccgaaagcgcccctggcatgatggcccaggcacttctgagcacagagagatggaggcccaggaggccttctgaagaccgaggaggcaaaggcgagggggccaggacctgctcagagagtgcccaaatctgggcgttccagctccttagacggagagcaccacgatggataccacagagatgaaccttttgggggccctccaggcagtggcaccccttctcgagggggccggagtggcagtaactggggtagagggagtaacatgaactctggccgccgagcaggagcttcacggggtggtggaaggggt

SEQ ID NO: 377929 - DNA, 529 bp, Homo Sapiens
gctcgtttccgaaatccggccatgggatgaatccactccgactggatgtgagtaccaggtattatctgagaacgtgatttgaaactgctccctagatagggcccattccttagtcaggggctcctagtggctgtggaataattcacatttgtcattagactgtaaggaccatcactttattgcttttgtgtcccttcattgtgccgagccatgcaccatgcatccagcagggaatcctgtgagtgccttttcacaaaagcttccagctgcacgaggtcggcccttagcgcttttaaaggtaggcaactgacatgtccactcaggacacagaccccagcaaggtgctagcaggtcttctcagggctctcgtgatggctccaggcccagtcattggtcggcgatccagagcagacacgctcctcacttttggaattctacactttagaggaagaacccaaacgaaaagctaggagacaagccagtggggcgaggaacagattaaagccacttgcttctcaaatgaggacat

SEQ ID NO: 377930 - DNA, 490 bp, Homo Sapiens
agataagccttcatcaaagtgttggcatctaagctcacacttgaataatggacagatttcaacatactaggatgtgagagaggcattccagactgggaaatccagaggcaaaagcacaaagtcagaaaagcatggtaaagataaggaatagagtgagatcagtaagactgaaaaacagcattactatatagttttatatttggtttatcttaccaattacgatttttcctaaagaacaaaggaataaagaatgattaagtgtaggcaggaattaattcataagattctcaaatgctagtgtaaagtagcctgaactttactcagcagacaaggagaaatcactggaggttgcagagcaaacaagtgagtgcaccatggtttagaaaaatcactcttgaagcattacatgggatgaaagggacagggtgaggtagataagacaaagggtaattacagtagttcacacaagaagtagccatcccatccgcgg

SEQ ID NO: 377931 - DNA, 183 bp, Homo Sapiens
aatcatcgtatcgctgatctacgtaaacaaactgaagaattgtctgaaagaaaatatgacatgaacttatgaattcaacaggtgaagatttacaacttgataaatcaactttaaacagctcgagctgtaaaagccaaaggtccggtgatgatcccatccgcggagttccgagatccagactcg

SEQ ID NO: 377932 - DNA, 410 bp, Homo Sapiens
cctgtgctgccaaactcaagcagctggaccagaagtgtaagcaggcacgaaaggcaggtgaggcccggaagcaggcagagaaggaagtgccctggtctccaagtgctgagaaggcatctccccaggaaaacggccctgctgtccacaaaggctccccagaattccctgcccaagagacccccaccacattcccagaagaggcacccacagtgtctccagcagtggcacagagcaacagcagtgaggaagaggccagagaggctgggtcccctgcacaggagttcaagtatcagaagtcccttcctccccgattccagcgccagcagcagcaacaacagcaggagcagctgtacaagatgcagcactggcagccggtgtccccccaccatcccatgcccggatttcggaac

SEQ ID NO: 377933 - DNA, 629 bp, Homo Sapiens
ttccctacgccgatgggatgtattcatttagcagaaacaaggaccaaaaaagacattttcagaattggaaactcacaactagttttaaaactgaagtgttcggagctctggtctgtcccaccactgactgagaccaacaatccaccctcctgccatctcacctacaaagcgaaggcccatttgctctgctcttctctgacagctccctgggcccaccaatcagacccaggaagtgttcctgaagaagaggaaaaagcccatgcaattgctgaatcacaatcacagtgctacccagccctcaaatggatattaatggtgaacaaaaaacaatttctaacccaaaggctaaaaatctactggacagcatcgtggggtggatacaggaataggagtaactgtaatacagggctgacaaatcaacatcacatttgtaaatcaagggatggccaggaactctttagaagagcaagacatcccagggtagagacagattaggcaggcacaggaaaaaaggcaagcgctgaagttaaaatgcaccaaacaccagaagttctaaagccagacaggacacaagctgcaagtattttgaggcctccccctttaaatcatacacctgacaggaaaaattt

SEQ ID NO: 377934 - DNA, 411 bp, Homo Sapiens
  misc_feature (223)..(240): n is a, c, g, or t
  misc_feature (344)..(344): n is a, c, g, or t
gagccattgcgggaatgatagtagctgaaattaagatcaggaccaaaatacataaagaggcacgtacgtgtgtgcagtgaggacttggcagtcactgtcattggacgggccaagggggcttgcgatggaatcatgctgcctgctccacagccgtcgtccaaggagcctgtgacccaaggaatccaaggggccaacgacacttgtccctggctggtgcttttcnnnnnnnnnnnnnnnnnnatttcatggtgcgtgggcctccagtcgtgcccagcagcaggcttcataaccactgtcgttctgaagcaggcatgagcgcagatgatgcattgagaatctgcagntacaacgtgctatgaaaatacccctgatttgtgttggcggcagtgtcatagaaaccgctaagactgc

SEQ ID NO: 377935 - DNA, 332 bp, Homo Sapiens
tgtttgcgcctgctgagttctgaaatttacatttgcatttacatttggatttcccaaaaggttcttaatccgtatgctaatcggttacgcaaaggagaattagaggggaagttacaaatgcttaacacactaaccatgtgatcttcataaaatagagaatcagatctgagaactccagaaccaacggcagcatcttcccaagtgcccttttctaaaataaaaatctgatggtgttattcccatgcttaaagcgatcaacggattcccaccatttttattccaaacatctcaatgtttgattttaaatgtcctttcgtggcaaaatcgacata

SEQ ID NO: 377936 - DNA, 499 bp, Homo Sapiens
tgctgaggctgaggagacaccttacgtccctccctcctgagagtcgaatcctcatggctcctcacacttcgtgaaggtttaattgtggattctccacgttgtgtctcagcctacaaagacctgcagtggttgtaccttggtttgaatggatcctcatgtcaccctaagagtctctttccccatttggcacagtttgccgtgggtgtcatttgacatcacaccaggtggctccggcttttctgcgcgtcggtttctgccgcgctgagttgccgccgcttgctctctgcccctcaggtttcctctgtggtttgggctctggctgcctctgcagcagctcaggatatcggcgagattgacacccacagcgcaggggccgaaccccaccgacagcacaggtgcctccagagccggctccaggccccagaccaggaacctcacccacattaacgcgtgacaccccctgcggttcctctgaggtgtgatatgatatgtataaaca

SEQ ID NO: 377937 - DNA, 496 bp, Homo Sapiens
acgagcagagatccccactgatgtggagagcttacaagtgctccgtcagatcctcgtgccttacagttctaaacattgaagcgccgtgtgcctggaagtctcgtccactgtcaggaatactgtccctaatactttttctcatcataatctgataatatgaagaggtggctctgagttgcttttccccaggccccacagaagtgcttctcttccctccagtgcaggacaccagctttcctggaaagcactgaatgaggccttgggtttttcatgcacctcacccttctcggcagcttgtgtttttcacgcgcctcaccgttctcaacagtttgggtttgtcacacacctcacctttctcggcagtttgggtttatcaagcgcctcacttttctcagcagttccggtgttgtcacgcgcctcacccttgtcaacagtttgggtttgtcacgtgcctcacttatctcagcactttgggtttgtcacgcgcctcaccttt

SEQ ID NO: 377938 - DNA, 554 bp, Homo Sapiens
cggaggagtacagccataatgcgctaacgcatgactcggtttaccacaagcgctgagatcaggagcctatgggggcagtctttgcaagttggccccgacaagtgccatattcaggaaattcatcctggaaaagctcgaagaagctaatactgatccgtgtgcccctccttttgattccctccagacctacgcttttgagggaacagggtcattagctggatccctgagctccttagaatcagcagtctctgatcaggatgaaagctatgattaccttaatgagttgggacctcgctttaaaagattagcatgcatgtttggttctgcagtgcagtcaaataattagggctttttaccatcaaaatttttaaaagcgctaatgtgtattcgaacccaatgggagtcttaaagagttttgtgccctggctctatggcggggaaagccctagtctatggagttttctgatttccctggagtaaatactccatggttattttaagctacctacatgctgtcattgaacagagatgtggggagaaatgtaaacaaacag

SEQ ID NO: 377939 - DNA, 176 bp, Homo Sapiens
gtttcatatgaattttaaaagcgtgtgtgaacaaatggaaataaagcagggactgtgaacatttgtttttggtctgttgaagatctatcataatcttaattcttaattttgggaatagtgcttataacaagtgctttttattcattaaataatggatttgcttctcagcaagctgc

SEQ ID NO: 377940 - DNA, 548 bp, Homo Sapiens
gctgaggctgatgcggagggggcaatggaggatgcaacggcccctgcaggttgggctgtgtgtgtgtgggcagaaacggctgtcctgggcctggcaggaacggctgtctaggaggaatgaagggccgtgtggttgccgacccaggctggctaaagtgcagaatccccaccggacctggaggctgcaaggctggtcgtacgggccgctctcttgggaacactggctgctgtccttgctgattaaatgctggtcctggctgagtgaatggtagaggactctgagtaggaacaggatggctactgttaagaagggtaggaggcggtggtggtggagggggacttcgctgttccagaaaaagatggctcgggaatcttggttcacctgaaactcctaagaagaaagggtctcgatcctgaggcgggggtggggctctccactggtcctggagagggagtcgtgggggctggctgaaactgttgggaacaggtccaggtgtatgctgtggaaattctggagggcctgggaatctctggggtcccacggcaggt

SEQ ID NO: 377941 - DNA, 670 bp, Homo Sapiens
gcttagagacacagaaagtggctgggacgacactgctgtggtcaatgacctctcatccacatcatcgggcactgaatcaggtcctcagtctcctctgacaccagatggtaaacggaatcccaaaggcattaagaagttctggggaaaaatccgaagaactcagtcaggaaatttctacactgacacgctggggatggcagagtttcgacgaggtgggctccgggcaaccgcagggccaagactctctaggaccagggactccaagggacagaaaagtgacgccaatgccccctttgcccagtggagcacagagcgtgtgtgtgcatggctggaggactttggcctggctcagtatgtgatctttgccaggcagtgggtatcttctggccacaccttattgacagccacccctcaggacatggaaaaggagctaggaattaagcacccactccacaggaagaagcttgttttagcagtgaaagccatcaacaccaaacaggaggagaagtctgcactgctagaccacatttgggtgacaaggtggcttgatgatattggcttaccccagtacaaagaccagtttcatgaatctagagttgacgcacgaatgctgcaatacctaactgtgaacgatttactcttcttaaaagtcaccagccaactacatcat

SEQ ID NO: 377942 - DNA, 428 bp, Homo Sapiens
  misc_feature (91)..(152): n is a, c, g, or t
tagctgggactacaggcacccaccaacacgcccggctaattttttgtatttttagtcgagatggggttgcaccgtgttagccaggatggtnnnnnnnnnnnnnnnnnnnnnnnnnnnnnnnnnnnnnnnnnnnnnnnnnnnnnnnnnnnnnntgagccacagcgcccagcaccaccagctaatttttaaatttgctgcagagaggaggtcttgctatgttgcccagactgatctcaaactcctgggcttaagggatcttcctgcctgggccccccaaaactttgggattacaggagtgagccactgtgcccagtccaggactcggttctaactggtttcttcctgccttatggctgctccttctcacctctctccccgcctcagtctccccaaatcctctcaggcttgcacgctcaaatgtctgtcct

SEQ ID NO: 377943 - DNA, 246 bp, Homo Sapiens
  misc_feature (1)..(1): n is a, c, g, or t
nttaatgagcactgctcctggcctccacatttctaaaatcgaagttctgatcttttcctctggacctgccccacctgcatcttccccatctcagttgacgtcagttgcatccttcaggtgctcaggccgaaatcctcggcaccgtctttattcccctcacacattttgcaccaggaaattctgctggctctaaggccatcaaactgtgcccagaatgtggcccctcctcagcatctccagtgctac

SEQ ID NO: 377944 - DNA, 563 bp, Homo Sapiens
agcagcctgctgagggaactgtgtgtgcctgtgatgcctgcggagttggtttggcacagctatttccagactaatcctgagtcctatttataggctgagatgattaggttggcctgtgtcaggagaggcccacatagctccccccagcctcgcgatggccgaggaagaagccctcaggggcaattctgacccatgggtgagtagtacgggatctggggtggtccccgaagccagctcagaggagggacgccagggagacccgagggaaagtcccgctcctgactcctagttcaacaccagccaggccccctgcagagatgaaaccagttccaattctattctctccctgcttaaaaatcctcagtgtgtccggtcaggccaggactccgtagcagccagaccccttctccccgaggtatccactgtctcaaccccagccatgcttctccaaactgtttatgcttccttgtgcaggccacacccccaagcctttgcgtctgttgttcccaccttcccaaaagggaaactccatttatcctccaaggctctgccccaatgcccct

SEQ ID NO: 377945 - DNA, 496 bp, Homo Sapiens
agcagcctgctgagggtggtgccaacgtggagtggctggtggtcattgcagggcatcctggagtgaggtgactgaagtgcagggctctgagtccaggctgcgagacaggtgtggtttcacaaggcccgagcctctttccctgctgctgtatttgccctcccctttcctccccatgaggatgggctgtactggctcccggagcctcagcctcatgactcctgtggggagagtgaggcacaccgcccagattcctggaacaggaaatagcctgtcggaaacccagggttgaaagtctgcaagaagaaatagtgctggtggccacagggctgcacgctcaccaccccttggactggagacgagaacagagacagtgatcattgtaacgaccaacgattgagcaactcaatcattcactgagctcttgctgtgtattaagtgcttctcaggagctgtctgatttcatccttgaaataacctaataagctcagcaggctgc

SEQ ID NO: 377946 - DNA, 399 bp, Homo Sapiens
cgtgaacgcagcctgctgagctgacagaggctgtagagtcaactggaaaggattttcaggggctcccctcatcattcattggcatgtagagcaacatgccattttctccattttcaagcagctaaaaaggaagactaaaggctcacatttgaaaggactacgattttccaactagtttgagcctgcctgcaagtgagctttgtaaactaagaacagtttccagtgcacactttcttccttctccataaggctgggtaataatctcctttctagaagaaagtcacgtaaatctggggctgctatgaattttcaactggtgtcagaccaacatgagagctaaagtgcacaaagcgaaatgcaggcgtggtgtggcctttacaaaacaaaaccagaaagtct

SEQ ID NO: 377947 - DNA, 520 bp, Homo Sapiens
acatctcgagctcgtaccctgtttgccgcctgctgaggtgcggtactcgaagggggcttccgaggaggatttgagtctttcaaggctcctctgttcctctaggcttttcatgccaccccttcccgctctctacctacaccattctctcccgtgtgtcttattttccactctgctcttctcctggcttctccttgtgttgaaaacatcctcaggtttcatccattctaaataaagctccccttgacctcaagcgatcacttctttctttcctgcccactcactcctcagcactgatcaggagctcttctgtcttctcctcttggacacctttcaagacctcctggttactttgatgtccccgcagcctccctgggatggaacccctctccgtgagaatcccatctcaggtctagtgagggtgatggggctctgacctccatactcagcatccacaccctgctgtgatcttgaggtctcctggcggccttattttaaaaatcattttctgtctctttgaata

SEQ ID NO: 377948 - DNA, 241 bp, Homo Sapiens
tgagccactgcgcccggcctaaagtattaggtaacttttttttcaatttcataaaacattgagaggaaaagaaacaccttaaataagatcatacctatctgggcttttcttttcctcttctttctttctccacaacatcctcctctctttcttgacttcttaattgtgaataaagcttctgtaaatatatgtggacaggtttttatgtggacatgttttcaggtccttgaaataaatatca

SEQ ID NO: 377949 - DNA, 458 bp, Homo Sapiens
gggatgcctttgctcccttgacttgtattaccatctttgtgttttaataacccaaaatgaaattaccgttttgttttctaagtcagtacctccaggttctagatgtcccacagagacctccagacatgttcacaactaacttcagcttccccctctccctaaccctaggtgctcgttcctgggctgggctggcctgcccaggcagtgataccaccacccaatacccagataccagggtgtcctctaggctccctgctcctacctgaccagccaccaactccttccattccaactccagttctcatcctcttctctgccagtatcttagtccagactctcctcaatctcacccctacaatttgtcctttatgtggccgaccaagtgcacgttctaaaatataaagcctgatggctcatcccctggacatgttgccattgccctgtggataaagtccaga

SEQ ID NO: 377950 - DNA, 377 bp, Homo Sapiens
tggagaccttactgcaagagggaaagagtgggggcttagggatttgtgaggggggcaggcgcgccctggagggcagaggaaatagtggtaagtaactaggaatgattgatgggtgagcacttcaacagcatctgcagttattaatgcaacaacaacaaacaacggcatccatgctgcaggtgtttccgagtcactgtgctgggaaagcagacactaatcatgaaacagcagcaattacagagttcagcatctcacaggcgacagcacagtgagggtccttgtttttagcatcgtccttttctgaaacaaaattcgagattcaaaaggtcaccggcatgcctgtgcctattagagggaaacaaacaaacaaacaacat

SEQ ID NO: 377951 - DNA, 125 bp, Homo Sapiens
gggggtaaccctcctatcctgctgtgagaatataacatggtatagccaccttggaaaacagcttgtcagtttcttcaaagttcagtgtagcagggcgcgatggctcatgcctgtaatctcaacta

SEQ ID NO: 377952 - DNA, 573 bp, Homo Sapiens
aattcagaccttggtgaagacagacagagagggatttggtgggaatttagggccctgctgagccaaaacccacccgaacccgtctgtccactttctatccatctaccagatctctagcatttcacccctttccccaggcctatgccagcactgtgccacaccaactcaatcttgatttattcaggtaaaatgagcactccctcctgcaaaaacaaacacgtttaagacataaaacatattcaaaggcttccatttcctcaccgttagaattgagacttaatgtcaaagttcacttgggtaggttgaatcattttcccacaactaagggagggtgaaaaatctttgaaaactctgtaagcaaacacctgaaatgccaacgcctcctttgcggagctggggaaggaagagacgggtggccggatggcctccctcactagttggtgggcgtaagatccacgccgccccagtcccgggggccttcactcaaaccttaactggcctcccaggggagagaaaaacggaggagaggggtctgaaaatcggagatgatcactcagcaggctgcgttcacgg

SEQ ID NO: 377953 - DNA, 268 bp, Homo Sapiens
tcccactagaaaacacatttgacaagtaatttttatcaagtcactaaaccttcttgaaatagggcaagatcggtattattaaagaggaagagcttcccagttttgctctacatgtgggagaatgtggtggccaccaacatacttttattcaaacagtacactgggaagcaaaaagtttttgtaacacagacaagaaaatacacaacatcttatttattttagagatgtaatttcagcaaacacactcacagtcgcatcataatcctct

SEQ ID NO: 377954 - DNA, 828 bp, Homo Sapiens
  misc_feature (214)..(231): n is a, c, g, or t
gcatcttagagcaggcctggaagctcccacaaagcttacaaatgtgtttgttttttcgaagacgggccagacttgaggctgaaccaatggggtctccatccaggaatcttctaggctcttccaagaagcacactcagggaggtgttgggttgaggtcattgagtgcagcctgcacaccagggtttcatggtaggtttggaagacccagcccagnnnnnnnnnnnnnnnnnnaaggtttggtttcctttgaaatagaaattttggtaactcagctctacagccttcaatcaaagcaaagtactgacaatattgactgtactatcacccgggtcctcaggggacatcactagggtaggggtggaggtgcttttcaatccccagtgaaaggaggccaacttcagagagtgaacgaggaccccccagcatgccaagtcaacccatacgtggaacaacaacatgtacagagagctcaccccaggctcacaagacaaggacccaacagtacctctgcagggcacagaggtggagtgagtcacaacacccaaccctgcctgggtccctgtggacgtcggctttcattttctcacacagctgggaaggacactgcagcctgaggctataaggggagttcacagctgctgggcacactatttacagactcaggaatcccggagcagggcgtccactcgctgggtcccccactactttctagtcctgtctcatcaccctcttccccactgagttcaaaaggaagtttctctggtggagtaaaggttggggtgaggaaagaaaggagaacccggcatcccgtgggtgaaggccataacc

SEQ ID NO: 377955 - DNA, 360 bp, Homo Sapiens
  misc_feature (53)..(53): n is a, c, g, or t
  misc_feature (59)..(59): n is a, c, g, or t
  misc_feature (66)..(66): n is a, c, g, or t
aaggctgggcaagaaaaaatcatcctgcaaggaaatgttgaatgtttccaaantggaanaggaaantgtgccctctgccctcctcaatgcaaaccctgcacttggaaatgctccctccctgtggggatgcaagtcaccctgaagtgtttccagagaggttgtcctataggtatacccatgccaagctcccatgggaaaagccccacctgtgtctgcagtggtgaatgagcgggaaaagaagtcatcttctccaaggctattcacaagcaccaggactgcctgactgttggggcagagctgcagactttccttgctgagcccagcatggcaactgtatttctcctgaaagaaacttccctc

SEQ ID NO: 377956 - DNA, 419 bp, Homo Sapiens
  misc_feature (341)..(341): n is a, c, g, or t
  misc_feature (361)..(361): n is a, c, g, or t
atgtggatctgcactcaaaacatctatcaagtgtactccaaaatccgggcaacaaacacatggctgtttctaagaagctgtaacggaaatgaaacttctctttgggactgcaagaactggcaatggggtggacttacctgtgatcactatgaagaagccaaaattacctgctcagcccacagagaacccaaactggttggaggggacattccctgttctggacgtgttgaagtgaagcatggtgacacgtggggctccatctgtgattcggacttctctctggaagctgccagcgttctatgcagggaattacagtgtggcacagttgtctctatcctggngggagctcactttggagagngaaatggacagatctgcgctgaagattccagtgtgagggacatgagtcccatctttca

SEQ ID NO: 377957 - DNA, 241 bp, Homo Sapiens
aggggaaatataagaaagagtaattgcgccaacgctgctgttttctgcagcttccctttgatgtgtgacacgtgtgcttccggtagccatgcttcatgctttctgcactagaatatattaaggattcaatacaaatagcaaagaattctatctctccacctacaaacacttcacacttataaatttctgcatttttgtacatctgcttttctttctgtcattccgtcgctgcactccggaa

SEQ ID NO: 377958 - DNA, 439 bp, Homo Sapiens
gcagcagcatcatctctatgtcttcagtaaattgtggaacatttctaaaatactcctggaagcagagacagtgtggtcctttgcatatcagtgactgagaaaaattttaagatcaatgtgtatgtgtctctgtgtgtctgtaaggctcatgaaaaatcaggtacattggaaacatgaaattagtcactgctaattaaactctgggtcagtttgtggctgactgctgtttaggagtaagaatgctgtacagtgctatgcttggtaactctggtggaagatgtggttatggtagaattagaatgaccagattcctctaaaccaaaatctggcagagggccagggactccagctccagacaccgtggtgttcctagccgtcatagaattttcagtgggaatctaataactggattgcagagtggaagcaggtgctagaactc

SEQ ID NO: 377959 - DNA, 477 bp, Homo Sapiens
agagcagcacggaatggagtgcgagacgcaatcgctctcgttggtccctcggtttggcactgactgacacctcgtatcgggagccaggccgcagggcctgcactgagtattgactcaggggaggctgcagccggaaggtggtcctcccaccttccccgcccaccaggccatatttcaaaagaatgaaatcgactttggctcgagggggaatccactccacaaaagccacagtgtccgagacatcgcgaaccaggatctgcgtggggccgtcaatgactgtggaggcgctggccgaggtaggagggctgcgggcctgttctttcagagccaccacattgacaatgtattcctccccaggctttagtcctgtccggataaaggacgtaacatcgctggggacctgagcaatcactcccccttcattgttctttggaatgaagctgatttcccacccatcgaaggaaaatgagaagggct

SEQ ID NO: 377960 - DNA, 492 bp, Homo Sapiens
agctgatttcccacccatcgaaggaaaatgagaagggctcccactgcacctccacggtggtctctgtgatcgtcttaaattgtagcccttgaggagtggagagatgggtggccaccttggcagtgatgggaaggctgaggatgttgctaatgacagcgtagacgctgatgttgtaggtgagacctggctccagctccgtgatggtgacaccactccaatctccaggcacccgctgctggagctggaggccccccagggccgtcggctggtaagagatcacatattccgtcactgccatcggcccgtcccattccagctcaatggacctgtcgctgataccagccactcgcaagtcctctggaggggcaactgctgagcagtcagggccctggtagccctcttcacagacgcagagcccctcctcacattgtcctcgcccactgcaggcattcagacactgccgctggccgcagtcctcaccaacgtagccct

SEQ ID NO: 377961 - DNA, 456 bp, Homo Sapiens
ggtacaaaatgccaccctcagcccaaggactgacttttctaatggtttgtgaaatacctccaaaggcactgcaccagcacgcagccaccaacttccaaatttccacacatctgccttgccagcctttacgtggaggtctcccaaagacaaggggcaaggatgcatggccccaaactcacagtgagccttgggttcaagtccaggcttcccatgtttagtctctgtgcaactatggaaggaggggttgcccttttctgatgcctgccatcctcgcctatggaaagggtatagtaacagcagctacctcagaaggcaggtgtgaatgtaaggtgtataagttagccagacatcagcggaatctatgttctgtgcatccaaatcatcaccttacgagtaaaaacagtagctgccatttattgagcaatcaccatgtgagacacacaaaagctctttcac

SEQ ID NO: 377962 - DNA, 472 bp, Homo Sapiens
cggagagcagtgacggaatagaagctgtgggcgctggggcagctggctatttaaggtttccgtagaagatgaggcttgaccccatgcttgagggatgcactgcgtaaccgaagatccctcccatgagttcttgcactggcagctgtctagagctggcttcagacactttctactcagatgcccacagccacagaggggaggcctgccactccctgtccaccctgcagcctggccctgcccaggccattccttctgtgttctcctcccttctccactcctgggtcacccgatgcttcctgtcctccacatgacacctcatatgtggcctcccccttctccttcccctgtcagagagtagggtaatactgtacctgtgtccccccagtgacactgatttcttcatagtctgatgcagagggctgctactgaagtagctaagagcaccaactctggagctgcacagaccactctg

SEQ ID NO: 377963 - DNA, 419 bp, Homo Sapiens
  misc_feature (219)..(237): n is a, c, g, or t
cggagcgcagtgacggaatcctagctcactgcagcctcgaactcctgtgctcaagtttatcctcctgcctcacctgtgagtagctgggacaacaagcgtataccaccacttctggctaatttctttttttactttttataaagacggggtctccctatgttgcccaaaggctgatgatttgccttttttaggtagaaaacctggactgggccctcaagnnnnnnnnnnnnnnnnnnncttggagatacaaaatgtggggggaagaggtctgttaaagtgaccagccttggggctatttaaagccgaggagggaaatactgtttcctggcaggctttattgtgttttggtatcattaaatctctaaagccagcagtttactttttgtctagttagatgccctggctggtctaaaggaatc

SEQ ID NO: 377964 - DNA, 160 bp, Homo Sapiens
agttagacagtgaatccttgcctgtaacagttaccaaaactcagcggcaggtcttgcttttcctataacccaccctcttgtttcacccaaccctgtactggatttttttgaagcaaatcccagacatcatactatttcatttataaacacttcattatgt

SEQ ID NO: 377965 - DNA, 461 bp, Homo Sapiens
gaggatcgcgcggagagagactggattcactggctttcagcatagcactgcatctttcactgcatggtagataacattcttcacctgtaatttatcttcgtgattggtatgagtctgtgacagatatcggaattcctgagtaagccagaagcagtgtttaacatgctctggagaaacaaaatcttcagccactttgatgcagctatataagttatgaacctgatgtggagctcctgccgggataaacaccacatccccaagaaactgtacaatagcccagccttgaactccatactcttgatgaagacgttttcttaatgatcggtctaaataccagctttgatcatgaataggatcgtggtctgctgggttttcttgaccttgctcttctgatacctttttaagaaattcccttatcttctccgtgtcctttgcagcatatatgtgccacagtgctcctg

SEQ ID NO: 377966 - DNA, 459 bp, Homo Sapiens
  misc_feature (415)..(415): n is a, c, g, or t
ccaaaggacagtgtgagcaagaagaaggtagggtgctgagcataaaaggagggcttactctttgagccagggcttgtggtctgatatctgctttctcttcttgctctagaagtccttaagaccatccaagatggagattctgacgaactcacaataaagcgatttattgaaggaaaagagaagccaggagcactgtggcacatatatgctgcaaaggacacggagaagataagggaatttcttaaaaaggtatcagaagagcaaggtcaagaaaacccagcagaccacgatcctattcatgatcaaagctggtatttagaccgatccattaaggaaaatgtctttcatccaagagtatgggagttccaaggctggggctatttgtacagtttcttgggggatgttggtgtttatncccggcaggagcttccacattcaggttccataacttattttagc

SEQ ID NO: 377967 - DNA, 593 bp, Homo Sapiens
cggccctcctgcagacacagcactgattccaattcaaagagaaagttaggatggtgttctgtgtgaatgctatctacgacaaggacactcaacttccagaaaatgattgttaagtggaaattgggcacattctaattggagattgtctggtttgtcttagaaaggggagcgctgctgtacattggtcaggtacatttaattaaggtaaaaagacagcttttcctcctcatcagtgtaaacaactggacttcttcctgttaagtatcatattaaacacaatctgaaattttacttactataaagaaaataagattttatgcttttttgattaacttttcacaggtgcattctaagtgaagtgaatttgatttattgcaatcggagtattactgctgcaggcacaaagctatccactgcactcaataaaataaagatcacatagaagaaattattagagtccaaacaacccaaagaagtggaaggaaatgctctgaggaaggaaatgcggacactagtttctaaaacggacatgcgtgtttccttaagtgtacatcatcattagaacgcatgattatcctgctgtgtctgctaca

SEQ ID NO: 377968 - DNA, 395 bp, Homo Sapiens
ggggatgcacttctgaaattaggtttcaaaagacttttacctcatactctctcactctctttttacatatttataagaagcaagttgccctaaggagagaagcacatggcaagaaattgagtgtgacttccagtaaggcctttagctcaaaggcccaggagatgactcctgccaacaaccacacaagtgagctcgaacatggattcttccctggaagatgactgcagcacccaccagcaccttgtaaaagttctagaaccagaaaacccaagtaacccacgcccagattcctgacacacagacactggcagataacaaatttaatactaacaaataaatgctgtgtctgctgacgggggatcctcagatcgaccacagcatcaagcgtgcactgc

SEQ ID NO: 377969 - DNA, 577 bp, Homo Sapiens
ctgcagacaacagcagtggaagcattcctgtctggactccttcagagataaggaaattatcttgacaactcaggcgcaggccacagatgctcagataccagtgtctggaaggtctcatccctttgagccacactgtcctaagaagaactggatctggtagtaacatgctggcacctgggtctcttgttgataaaggggaaacctctaaattttgtactacatggaatgtggtccctgattgctggctctgtggtctgcagacctgttgatgtagctcatccaagactgcttagacactctcctgaaggaccagttggaagatttccttatctagggctgctcctaaaaagagatgttacatttcttgtggtcactttaacattggcatcctctatattgggcagctctgtcgggctaagtctgttcagaccattcatttcttcttcgttgctgccaaaagatggtgagcaggtagtcgccattattagttgaaattgccctgtacaggttcttaatttcccgaataacgtaatcctgacatcattttctcattgaaaatctttgatgtgtctgctga

SEQ ID NO: 377970 - DNA, 585 bp, Homo Sapiens
  misc_feature (65)..(127): n is a, c, g, or t
  misc_feature (129)..(252): n is a, c, g, or t
  misc_feature (258)..(349): n is a, c, g, or t
  misc_feature (436)..(506): n is a, c, g, or t
tgttaagacaacagcatctcatacatccacacaatagcattcatccatccacacaccagcacgtnnnnnnnnnnnnnnnnnnnnnnnnnnnnnnnnnnnnnnnnnnnnnnnnnnnnnnnnnnnnnnncnnnnnnnnnnnnnnnnnnnnnnnnnnnnnnnnnnnnnnnnnnnnnnnnnnnnnnnnnnnnnnnnnnnnnnnnnnnnnnnnnnnnnnnnnnnnnnnnnnnnnnnnnnnnnnnnnnnnnnnnnnnnagcacnnnnnnnnnnnnnnnnnnnnnnnnnnnnnnnnnnnnnnnnnnnnnnnnnnnnnnnnnnnnnnnnnnnnnnnnnnnnnnnnnnnnnnnnnnnnctcatctggccacgggagtgaagtgctgatactcgcaacagcaggacacgtcctgacagcaccaagcggaaagaagagcccgtcacnnnnnnnnnnnnnnnnnnnnnnnnnnnnnnnnnnnnnnnnnnnnnnnnnnnnnnnnnnnnnnnnnnnnnnnggaccggggacggtggggtgtctgctaaaaagacggtttttctttctgggggatgaaaacgcaccaactttagatcatg

SEQ ID NO: 377971 - DNA, 331 bp, Homo Sapiens
gtgaggatcatgtcttgtcatggtgagcgtagtttgtgcctgtgagcatagtgtagcatagcattgtcgttgcatgtatcagcatggtgcgttgagtgtgtgcactgagcatatagcatgtttgagcatgagtacatgtgtgagcatatgtgtgcatgttagcatgtgtgcacgagtttgcatgtgtatcactgtaactgtgtgcatgtgtgagcatctgtccatgtatggtgagcatgactgtgagtatgagcgtgtgtgtgtggggccgtccctgcagacaggagagtcctaagccacggtcgatggtccccctaccctccttggtccc

SEQ ID NO: 377972 - DNA, 361 bp, Homo Sapiens
tcccacctctccactctctcaggtctacacgagtggatcccctgggtcctgccctgccctggggatacggaggtgtgagactgcgggcagccacagaggagcccacatctcctgcagatgtgtgtgttgtcaggaagggctcttcaaagactcagaagtgcttcagaggctcacccctcacgggaacagtgctcctacaaaccctgcttggcagcccctcctcaggacgctcattcaaggcagggagaccccagccaagggtgggactgagggttccgtgcagggcaatacctggggcctagcctgctgttgtccacctctgggccgtcctgcgcccccggccttgctcacgacaactgcg

SEQ ID NO: 377973 - DNA, 437 bp, Homo Sapiens
  misc_feature (25)..(25): n is a, c, g, or t
ctgcttgctgtgtgtgagagcagantaaaagaaagcaggaagagagcagtctcaaacagcaggtagaacaatccagtgcttcccagacaggaatcaagcagctcccttctgctagcaccggcatacctactgcttctaccacttcagcttcagtttctacacaagtagaacctgaagaacctgaggcagatcaacatcaacaactacagtaccagcaacccagtatatctgtgttatctgatgggacggttggcagtggtcagggatcctctgtcttcacagaatctcgagtgagcagccaacagacagtttcatatggttcccaacatgaacaggcacattctacaggcacagtcccagggcatataccttctactgtccaagcacagtctcagccccatggggtatatccaccctcaagtgtggcacaggggcag

SEQ ID NO: 377974 - DNA, 467 bp, Homo Sapiens
agttgcgtgagggctcgtggccaccccacccctctctggcacctttgctccccgcgccttctgtcttcacacgggtctgaagctcctcactgcttaggcctcatataggacaggggtctgcagtgccgcagggtcttgccagaggaaatacagggtgagaagccacacatctgattaattgctcacctaataaggacttctgaccacagcatataacagctgtgtggtgccagggctgcttcggccaccccacagtggcaggtccctgggcgcgccggctctgccttgccctgctggtagcaagacggctgcagctgcacctaggcaccatttctagcatgactgtgttcaacactggaagtgagggtaggaacaaaaggaatttcctcgtgtgagtctctgtcttgtccaagcaggaaaattcttttccagagcctccttagcaggtttatcctaacacagcatcg

SEQ ID NO: 377975 - DNA, 474 bp, Homo Sapiens
tccagagactggagagctgatgacacaagagggtgtggctgaataagtgcttgtggatgaataattatagtaggagactgacttggtgaatgaggtggtggaggagacaccactacagactgctgtgctgactgtgactgattaggagacactgttaaaagagagggatgactctgaatcggtgaacaatgctgtgactgggcattactgggagctggaggaaggccatggttctggagtggtatacagtgctgggatgggggtgggtcttgagttgaattctgaagtgtgattggctgaatttgctgttgctgctgttgtaatatcagctgatgatgggaaactttggaaggtggtgaatgaagaggaatctgctgatgttttattagagagtgaggctgaattggagaatatgaagctggtgctattaactggtgaatacttgatgtccgggtgacagctgtgcttcgtgat

SEQ ID NO: 377976 - DNA, 316 bp, Homo Sapiens
gaagcccaggcagccttactttagggcttatggttttatatgttatacttttctaacactcttaatacaaatattaaattggtaatgaaaacaaacttctaattaaaaagcctgatcttatgcaccaggcattacgaaacctaccactgtagaaatgtgatttatgcaaatgaaaagcataagacctctactagaaggaaactcaagtcattgagaatagcacaaggatcaggaagtccagagcccagtcctcaacaagcatcaacatgaacagctggtaaaagatggacgttgaaaagacattctgctgtgtcta

SEQ ID NO: 377977 - DNA, 380 bp, Homo Sapiens
gacacagcaataagtcatcagcaaaattataaaggagaaatgtgcattaaaatgatccacatttatttaagaatgtattccaatatcaaacagcaaatttcaaaaatgcaaaaacgcaattgcttatgcctcttcaggtacatcacattgaccctttctacgttctcacaccacttcacccgctaaaatcggataaatctttctgcaaggaaaaaaatttgaccacattccctataaggcctcttccaatttcaagagctgtgctttaccatgacaaaaagaacctagctcttttcccaattttgcaacgtcagaaaaaggaggaaggggaaatagctgtgtttaaaacattttttaccaaatagtgctgttgtctgctg

SEQ ID NO: 377978 - DNA, 437 bp, Homo Sapiens
gggtgagagtacggaatcaacagggctaaagttattgaactctcagacagttggaccttctcactcagagacttcttcctcctactacccttggcatccgtgtgcctccttggcaaggttagggaggctagtaggcatggtactcttggcactgggccgtctagacttcttgcccattggggtgtgcttcaggctgaggaaagatctgttgggcccacagatgacaggtgagagagcagaagtcaacacggtgcctggagggcttggggtcacattgtattcatccagaaggcgcacaatgtcatggtgcatgcgatcccgagccacatcccggggaagacgatccatatggtctgtgatgtctcgattggcaaaatggtctaacaggatcttggctgcttcatagctcccctcccgggcagcaagaaacagaggtg

SEQ ID NO: 377979 - DNA, 380 bp, Homo Sapiens
agtggagaccatgatgcgggcaacattgtcttactctgcttccagcctggaagaagatgtatgagttcaagggaatgggggaattcaggtacaagagaaggacccctaggtggaaaggaagaggcccgagtgctagggctggctctgacactgacttcctggtgaccttgggcaagtcactgtacctttctgggtttcagtgtcttcatatgcaaaatacagggtaggccctaatgctcggacgcgaagcctctttcctagcccaagcagtaccagatactggttgtacaaccaaagccagggacctacaagtctctgagcttcagggttccatctgtaaaaggggtacattcgaccagttcacctctacagcccgttcc

SEQ ID NO: 377980 - DNA, 627 bp, Homo Sapiens
  misc_feature (401)..(401): n is a, c, g, or t
  misc_feature (512)..(512): n is a, c, g, or t
  misc_feature (543)..(543): n is a, c, g, or t
  misc_feature (571)..(571): n is a, c, g, or t
  misc_feature (613)..(613): n is a, c, g, or t
tgatggaaggccagctcaaccaggacgactccatcctcaaggtggctgtgaagacgatgaagattgccatctgcacgaggtcagagctggaggatttcctgagtgaagcggtctgcatgaaggaatttgaccatcccaacgtcatgaggctcatcggtgtctgtttccagggttctgaacgagagagcttcccagcacctgtggtcatcttacctttcatgaaacatggagacctacacagcttcctcctctattcccggctcggggaccagccagtgtacctgcccactcagatgctagtgaagttcatggcagacatcgccagtggcatggagtatctgagtaccaagagattcatacaccggggacctgggcggccagggaactgcattgctggaatnagaacatgttccgtgtgtgtggccggactttcggggttctccaagaaggttttacaatggggattattaccgccagggaacgttttcgccaagatgccagttcaagttggnttgccttgagatttaggtgacctgtttacancagcaagagcatgttttgtcctcgggtnacattttggagtttgcacaagagggcaaccccttttcgggcntggagaacagcgag

SEQ ID NO: 377981 - DNA, 264 bp, Homo Sapiens
gctcggtacctgatctgggcgtatgtgcatgtgagtgtgcgtttatgggcatttggcatgtgtgactggaaaaggagacagtgagaagccgcaggagtgagcaggatctccaccgcactcccggggctccgggtgctggttaaagggtagtagagaggtgccttcctcttgccctcacaaactgcctcaccatcactcactcatgtagggaggatacagagcacaatgaggtctgccatacgcccagtagcaggtaccgactta

SEQ ID NO: 377982 - DNA, 375 bp, Homo Sapiens
gctcaaagattcctcacctccgcccttgcccaacctgggtcaaggctgcagaaggctggagcaccacaattagaggggaaggggctgctttgttccttatccctccttcttaaaaggtagggttcaaactaggcgggatgggggcccatactggtttgccccaggagtagggtttctgggctagggtctgtaaggctattttcctttgcggtgggaaagggaggtaggggatgaacactgggtatgggaagtgggtgagaaatggctgagagggaaggaggaaggggcctccccgctggagcagtcactggagtcatttagacaagaacactcatgtgcataagatacacagtgcgcaaactcaggccctgccag

SEQ ID NO: 377983 - DNA, 269 bp, Homo Sapiens
tagaggtatcccaaccgactcctttgtgctctgtcctacggtgacacaggcggcgtggggttagacaggtaccggtcagactacggtgacacaggcggcgtgcggttagacaggtaccggtcagattacggtggcacaggcggcgtggggttagacaggtaccggtcagattacggtggcacaggcggtgtggggttagacaggtaccggtcagattacggtggcacaggcggcgtgggattagacaggtaccggtcagattacggtgg

SEQ ID NO: 377984 - DNA, 403 bp, Homo Sapiens
tcttgctcccagaattccattcatgttagaactctcgtgtctaactggatgatgacaacactgtgggtgcacgtcgggcactgcaggagatatacaacatgcacacaccttaaacatctacttgtaactcatgttatgagccatacccatccacatctggtgttacaacggtgccctctgatttcagacactgttccttccatcacttcaaaataacttacaaacgtgcctttcgttttgatacccacttccacaagcaaactgcacatttttttcaaggtcaaaatgctatatctatagtagtatatatgtatttcttaaccattcaacgagtataaaactgttacctttaagaagttaggttactggccgggcttggtggctcatgcctgtagtccctgca

SEQ ID NO: 377985 - DNA, 554 bp, Homo Sapiens
tctctgcccagattcccaatggccaactactcactccccagcttcccatcatcccatccttgctgtccacctctgggccttctgtccataagctctcctcccaccctgttcagctaccatagctctcattttggtgtgtggttatcttatgaacatcagcttccctccccgagattgtggagtccccaaagtcaggcacctggttcctcttggggaagagaggtagactacagtttggggacactctgctccacccctaggccactcaatgagcagatccatgcactgagccagaatcacatccctggggatggagagtgagccattttgtatctatacccttgcctgagtcacttcttgcttgggcatagaagccacccacaggagccagagataggatgaaagagccccctatgacctcagggaagttccaggaatgagaaggggtgaccttagtgacaccagggacccagctcagggaagaataggactatgtctcttagaaaccaacagatcaaggccgggcgcagtggctcacgcctataatcccagca

SEQ ID NO: 377986 - DNA, 386 bp, Homo Sapiens
ttggttttttaaaatactgtttttagatgaaaagaataagtaacctgtaaacaacatacatgaagaaagcataggtctgagaattacaataaccactgaacaagagactgctgctttcacaactaagagcacaactccatgctacttagacattgtttgactcctttttctttgcacttgcttgctgaaatacagattaatgtgaagttctacagtgatgttttacatgtgtcacaatgtccttccacgcttaacaagtattagacaacttccttcccccttgttgaatcaggatggcagctgatacatagggtacagtctacaatatatcaagacaactgtcctctgctacagatctactaaaacagacactgatatgttttcct

SEQ ID NO: 377987 - DNA, 339 bp, Homo Sapiens
tcggcctctctttcccagattcacctttacctgcgataattcacatgagttgtggtagagacacagagctgaatttcattattctgtccctcactccccaaatctcatgtccttctcacattgcaaaatacaatgatgccttccctaaagtcccccaaaatcttatatcattacagcatttatacaaatgttgaaagcttaaagtctcatctgacacaaggctacagttccttaggcccatgagcctctgaaatataaagcaagttaactacttccaaggtacaatgcttgtacaggcattgggtaagcattcccagccaaaaggaagaattttgccag

SEQ ID NO: 377988 - DNA, 426 bp, Homo Sapiens
ctatccagatctgggatacacggtgtatcatgcgctggcagaatgtttgataatttttacagtggacatcaaatttattttcagttaaaaatgctagaaagtaatacatttttacttcatctgtcatagtgaatgttgataatgataaaatcttatttctctaagcactttgccatagctaaataccttagtaaaacatgcgatagacaagggtccggtcactagccacagaaaggctgtcactgttatagcagaatgtaatagggaaggaacattttatgcctcaataagaacagtgtactttgcttgagatagtaataacctctgagaagctgacttaattggtaatcacttaagttacgatgattttatattgtttgatgtcttataatctaaacgtccctgtgctcttttagagtgtctgcc

SEQ ID NO: 377989 - DNA, 676 bp, Homo Sapiens
cctagagtaacacgctctgctccagattccaaagtgttgggcgtcagccaccgtgccgggccaagtatgctttttctccctaggcaagcaaatggttataggactaaactggagtaagaaacagcaggacctgagtagtacaaaccattgattggagacaggagaggatggagtctctcaactcactatcttacacttcacatttgttttgcccactgatcctcaggacaccaggggtcagtgatttatccaaagtcacacaactaaataattagtattgagctaaaacttgaacccaggcattctaactcctgatctaggaactgggtgaggaggagaattaataaagatatttaactgagtgggctgagagagaactcagaagtgttttcagaggcacagctgtgtgtgtgggcgtgtgggtgtgtcagggaagagagttctccggaactgttatccatcactgttttaacaggacaatgtttggaaatttctgagcacaaacgtgaataacaaaacaaagtgcaaggcggctggctggccagtttgttttgagaggtaaatccaggagagccagagtagagaggcaactacctggcttgcctgtaactgcaggcttgaaccaatgaactcaagtatggtactgtcatcctgcccaatcaaatcttaaaggctg

SEQ ID NO: 377990 - DNA, 445 bp, Homo Sapiens
ctgaatgttctccaaaggggtactgtaaaggggacatgagagaagggatgatacagctcgataaccggtttccttcaccttccttcaggcccagcctgcagcctgcaagcaccggatgagtggacgtggctgagcagccatgagaaagatgtggggctctccggtgactgtagacccagcataaatcaacagttcaaggtgctcatccccaaagccatggtgagaccttagctgctgtaataaaagtgtagtgccaaagtaagggcaatgacagtcttgcttggttttatgctggagctcaactctgggccacactcttttgtgggggtgggtggtaattatctttttttaaacaagacactggctatatacagtcaagtgtgcaaggcttaagtatacaactcatgtaattttcccacatttatatacctatgtagacattcaa

SEQ ID NO: 377991 - DNA, 214 bp, Homo Sapiens
  misc_feature (214)..(214): n is a, c, g, or t
agcagggaatcttcaggaaccagtctcagataggaagtcatgccaagccaaccatactttaatattccctaggtttatctaaagatttggcaaatatttagtgaacacttactctgtgccagatactatgagccaaagccaccaaagacaaaaaaacaacacacgtgttcctatcacttcaagatcacaatccaggacaggtgcagtggctcan

SEQ ID NO: 377992 - DNA, 533 bp, Homo Sapiens
tatgccagcagaaacacaatgcagtccacctggggagtggcggagacagagactggcctctgggaggcaaggctagagttttgtctaccatgccaatgaatttaggtttcatcttgctggtgatgaaggaccatctaaaggaaatcgtgtgttacatgaggagaccttcagcaagggagaggtggatgagtgaggccatgcctggagatgctgggccagctagcagacagtttcaacaggcagagtcacatgaggagagcccaaaggcagcaggaagggagtggggccgaaggagtgaacttcagaggctttcaggtcagatattaaactgaggcgtggagagaggtggcatccatagcagtcaagtaaatcagaaagtgctgcctttgctgctgttgaccgttgtgattaccccagtttctgctgcctccttgggagaagagggtactaaagtgttgtgacagtagaccagttcttggattctcaaggggaatctgggcagagaggggatactctaggaacagctatgaccc

SEQ ID NO: 377993 - DNA, 257 bp, Homo Sapiens
catgattgggggcctctgatggggccagggctgccctccacacaggaccctcacggggagagaggtggtggggctgggcgtcaggtgggtacgtggatgtcagcacagttctacacggaccttctctggcccattccctgctctgctcggggacactccaaccagcccagccctgtttctggggagtgaccacagagaagcagtcattgagacctcagagtggcccacccacaccgccgtgtacagactcaacgttg

SEQ ID NO: 377994 - DNA, 322 bp, Homo Sapiens
tcaacctatgcgggggacgggcaggctatcagggatggcaccgggatgagcaactccttatatggacaacaatcaaattagatccctcttcacagtgtgaactcttcctggaacatgccagggtactgaaaaacgaaagctagtatttatgctataatgtgggctggcccgtgctgcccagcagaactctcagctgcctctcagctgtctgtgttgtccagggtggcagcctctggctgctcatggtgctgaatggcacttgaagtgtggctcatgcagccagggagctgctgatttaattgaactgaaatagctaccctgg

SEQ ID NO: 377995 - DNA, 315 bp, Homo Sapiens
atcatgatcaaccaggaaataggagtacggggaccacgtatctgatggggtcatcacgttcttctgccggatagaagctgtgagaggagatatgagccatcaagcggagaggagtcacccagaaaggccaatcccaagagcggaccacctagaattccttctacatgtacacataaggtgtgaatcagggtagagtgtttccattattacgtagtaagtgaaaaattggaaacaaagtttccaggtgggaaaatgatgatacatctgtaccttccaatcttatgaagccttaaaaagaatgaattagaggtcaac

SEQ ID NO: 377996 - DNA, 615 bp, Homo Sapiens
  misc_feature (53)..(53): n is a, c, g, or t
  misc_feature (92)..(92): n is a, c, g, or t
  misc_feature (100)..(100): n is a, c, g, or t
  misc_feature (122)..(122): n is a, c, g, or t
  misc_feature (139)..(139): n is a, c, g, or t
  misc_feature (173)..(173): n is a, c, g, or t
cccttgcttctccatctaagccttaatgaaaattgaagctttgcccaaacccngccacctttctcagccgatggggcacaattacccgcttntttagccnagtactgtgtctgcagaaatgnccaggaaccaggcagcntaatttgggaactggcccagaccaatcagaagcncacctggacaggccagttgtccttggggaacagcccagtgcccagcgtgaggttgccagtattctttgtagaaaatcagtgcttgcaataaaccaactggctgcaactgtagaagggacaaattagtgtcctacagcaatttaatgaactacttagaccatcctctggatcccgggaggtcttgatcacagctggtagaggtggccactcactgttctatgtcttttaggttaacagttctttacataacagtgaagagtcctggtgcctcaggaaaagcaagatcaacctaccaaggaagagttgatggagtcataattttcctacttaacacccactgcaaatttaaatatgtgttctagggctgtttgttaattctattatggtctttactaattgtgattcccagttctgggtgaataaaaagtttttgttttaatgt

SEQ ID NO: 377997 - DNA, 203 bp, Homo Sapiens
tgagacactgtgcccgactatcatggctttgtgtaatgctccacatgttttgaaaaccatgtttatgggatacaaaattctccatatatacttctcaatgaagctcatcgcagagaaaaaaaattctccatatagctttcagatgaatttttctaattgtttggctcctctgcatcttaccaattgtacacacttgagctctg

SEQ ID NO: 377998 - DNA, 429 bp, Homo Sapiens
  misc_feature (346)..(356): n is a, c, g, or t
aggtaaagcaaggtgggatagagtctttggaaggaaaagatgatgcaagggaactgtgatagtggcaggagcatagagaggagtgggaagactgtgagacactgcctaggaagtgtatacaggacttgattattccccagaggtgagaggtaagagagagaggaatggaagctggctcctaatttgtcataatatgaaacttagagcatgttgtagctttagaataatgtaagccccagattaacaagaattaaaaatgggaaactggagtcttttctattttccaaaaatctcccaggaaacaaaattatgcctgtaacttgtgtggtctttagctattgtgcannnnnnnnnnnaaaccactttgagtgatccttataaatacacaaatgccggtgcaaacagggaccatgaaaaccaagtgagagg

SEQ ID NO: 377999 - DNA, 173 bp, Homo Sapiens
caacctaggttgtggctctggcctgggaacatggatattaaaaactctccaggtggttctacgcagtggctaggtttgatgacctctgcctagatgtcccaacgactaagagatgtgcgttggggacaaggcaattctcttagtagaaagaggctttcgggaccccattctta

SEQ ID NO: 378000 - DNA, 503 bp, Homo Sapiens
aaggtacaggaagaaggatcagctatgcaaggtcctaagagaggagcaattctgtgtgtgaggaatttctaggagccaatggatgaagcagagaagagtagggtgagtgactagagagaatagaggagatgaggttaggaaataagaggccagatcatctagggcttacaggcctttataaggacttaggcttttactcttagtgactgtgggggtacctcatagggttttgagtagggaacaatattgactaacttgcatttttaaaggatcactctcgctgctgttttgagaataggctaacctagggcaatgttaaagctgggaggccagtagaagtattatagtcattgtcacagatcaatttggtttgaacagtgtgcataaggggagaggtgacaagtggtccagaatatggcatgtatttaggagcactgaatcaatcagaattttctcatggcagtggatgtgcggacacatgaggcacagcgtcaaggattcat

SEQ ID NO: 378001 - DNA, 512 bp, Homo Sapiens
  misc_feature (58)..(58): n is a, c, g, or t
ctgtggccaggccacaggggaaggatgagctgtaccttcagggaggaaaaggagaagnaagcaccagatgatggcttggaggagagtcacagccaggctccacttcctcccaatctgctggagtagaaagatgcagcacagccgggcaggcacctccatgatgctggggaccacgtgtctgaagtggacctcacgcccagctctctcattctcaggctcaacgtaaaataggtgtaactgatggtaaacctggatgaagccaggaggcaagtgcgcgtgcacacggagccaggaataaagacagaggcagagcagcaaggctcagggtaggaacggaggagagaaataagcacagagacctgtgatctgtgttcttgggctgcctactgtgcagtctgaccattcccatcctgtctctagagtttacagcctgcgcacctgttcgcagtctctgccagcgagctgtggatactcaccacacacagctcatcaccaaggtcaccttgcagagc

SEQ ID NO: 378002 - DNA, 514 bp, Homo Sapiens
ggccgccacagcttctcggccgccacagcttctcggccgccacagcttctccgcagttagcaaggatggcctgggctttcagtctgtcagcagcctccacaccagctgtgagtccatcgacatctccctcagcagtggaggggtccccagccacaattcttccactggcctcatcacctcctccaaggacgactccttgactccctttgtcagaactaacagtgtgaagaccacactgtcagaaagccctctctcttcccctgctgctagccctaagttctgcagaagtactctgcccaggaaacaggacagtgacccgcaccttaataggaacactttgcctaagaaaggactcaggtatactcccacctcccagcttcgcacgcaagaagatgcaaaagaatggttacggtcccattctgcaggaggcctgcaggacaccgctgccaattccaacatttcctctagctccagcgtgacttctccctccgaagcaagattcaacttttcacag

SEQ ID NO: 378003 - DNA, 480 bp, Homo Sapiens
gcgttaaatcggcaagatggccccccgacatacacgcgaccccacacagctctgaggcagcagcgacacctggctggaactaattctgtgagcaaaggcaaaggaaacctaagggcctttgaagggtcgtttaaaataaaaataaataatccgctgagttctgcgggctcctcagctcctcaaggaaagcgtggctaggggacacctggattcgaagcatctgccttctaccccatgctgcttcctggggaggccgtgctggggcggcctcctggagaaggaggcggcaagtccaggttgtggtttatcggctgaggtcctgagcactgccgggtaaggacagtcaactgtgtggtggctctggagacggcggcgtcgtggcaggacaccgccacacactgtcgtagcgcctctagccccgctcagagcatccaagccggtcccaggtctctccactgctctcctggcccctctgctact

SEQ ID NO: 378004 - DNA, 600 bp, Homo Sapiens
tgcccgccgcccggaccagatacattccgtgtacatcacgcccgggcagacttgccagtgcagggcgccctggagcccctagaagaggatggccagccacctggggccaaagcggaggtactcggatcccccaacgtactgcctgccccccgcctcgggccagaccaatggctgagagccacagctgacaaagtctgcatgtccgaggacggcccctgcactggagctgggcgccagagctgcagagctagtgttcggccctcagagaaggatccagaatcaaaagctcaagagtgacgtgaggtgggcaccggccccaagtgcagagtcaaggcagggagaggccggctggagccaggccccctcgcacgcagcccccaaatcatggacgcacctgtggggagcaccacatctccacctgcggcctcacatctccccactcccctttttgtacgtttaactgtttctttgtacgtggtttacgtaactttaaactgtaacagccttaactggaagaccaaatggttttttatatgtgtatgtacaaagttttctattaacggctgcccgtctcccttataaccttggacgtgagctgtc

SEQ ID NO: 378005 - DNA, 472 bp, Homo Sapiens
agacaagagggatacgtcctaggtgcctctcgggtgccagacactgctgcatccaacatacagacatcaactcaactgagtcctcaccacaaggctgccacaaagccctaccagaaccactagtctaaggacagaaagaccaaagcgctgcaccatgaagaagctggccccagctcacactgaagagaccagcacacttgctcctgagtccggcccctcaaacgcagacatggctgtggtgacagccctcttcttcaccatggccccttgaggtgacgcgcacaccgagcaatgtctgcagaacctttacccaacggggctccaggccgcccctgcccctcgagagccacccgagcagcagcaaacacagtcccaaggcctgtcccactgggcgcagcggtggccattggaaagccctgggccagaagtgaggccctgacctccgccatcatgcacactggtgagaccctgc

SEQ ID NO: 378006 - DNA, 367 bp, Homo Sapiens
cctgctctatttcagagcttgtggctttgtgtctcccctgcgggccccaagcagacagcccttcctctgtagaaccagctgcacggcagctgtccaccagagggcagacctgcactctcaattcatgtccagggctgtgacagaccaggccttcccctagccccacaagttgatttggggggtttggacccttactcctgagctgatccaagttttatgctgatttttccaaggatctctccctccttttccctccatcactcagaggtagggaagggggcggcattaggatggtgttactgtattgggattttatgttgttctgaccatcagagtgccccagaatccttcctgcccacagatcctt

SEQ ID NO: 378007 - DNA, 899 bp, Homo Sapiens
  misc_feature (705)..(831): n is a, c, g, or t
aatgtgtggacggtgcatgtgtgactgtgagtgtgcatgtgtgcgctaatgagcatgagcgtgtgagcacatgcatgcgtgtgtgaatgtgtgactgtgtggggggcggtgcacacatgcaggcctgtatgtctaagcatcttctccggggcagtaaaagccaagaagagctggctgtccttgggaagtcaagggaaggaggggaaagcaagaagatgtaaatttccctcagacctcactgaaggcaaggttgtaaaagaaaagggcttatttagcctgtgactgtgacactcaggtacaacagcatgtgccagacttcagagactacagtgggtttgacccatgaatatataagagtgccagcctccacagtgacatggggcccctgttgtccctcacctgtcagaaagtcctgttgaaattcccgccagctctgtgtcatgctgggggagctgggagcctgatctcctcccctagtgctgcctgggagacagctgtgcccatgtggctgtcccagggaaaactcagtggcagaaatctactagataaagaggcagggccagaagaaaccactcacgccagaacaggacagcccagacccagctgcaggggagggaaggagaggagggtgtcctactcagaggcagagggcttctgagcccttcagccacaataatggggacattaaaagtaagagagggctgnnnnnnnnnnnnnnnnnnnnnnnnnnnnnnnnnnnnnnnnnnnnnnnnnnnnnnnnnnnnnnnnnnnnnnnnnnnnnnnnnnnnnnnnnnnnnnnnnnnnnnnnnnnnnnnnnnnnnnnnnnnnnnnttagctgggcgtggtggcacatgcctgtaatcccagctactcaggaggctggggcagtagatatcatt

SEQ ID NO: 378008 - DNA, 981 bp, Homo Sapiens
  misc_feature (53)..(53): n is a, c, g, or t
cccctggtgccgtgaagctggagaaggagaagctggagcaaaacccggagagntcccaggacatcaaagctctgcagaaagaactcgagcaatttgccaagctcctgaagcagaagaggatcaccctgggatatacacaggccgatgtggggctcaccctgggggttctatttgggaaggtattcagccaaacgaccatctgccgctttgaggctctgcagcttagcttcaagaacatgtgtaagctgcggcccttgctgcagaagtgggtggaggaagctgacaacaatgaaaatcttcaggagatatgcaaagcagaaaccctcgtgcaggcccgaaagagaaagcgaaccagtatcgagaaccgagtgagaggcaacctggagaatttgttcctgcagtgcccgaaacccacactgcagcagatcagccacatcgcccagcagcttgggctcgagaaggatgtggtccgagtgtggttctgtaaccggcgccagaagggcaagcgatcaagcagcgactatgcacaacgagaggattttgaggctgctgggtctcctttctcagggggaccagtgtcctttcctctggccccagggccccattttggtaccccaggctatgggagccctcacttcactgcactgtactcctcggtccctttccctgagggggaagcctttccccctgtctctgtcaccactctgggctctcccatgcattcaaactgaggtgcctgcccttctaggaatgggggacagggggaggggaggagctagggaaagaaaacctggagtttgtgccagggtttttgggattaagttcttcattcactaaggaaggaattgggaacacaaagggtgggggcaggggagtttggggcaactggttggagggaaggtgaagttcaatgatgctcttgattttaatcccacatcatgtatcacttttttcttaaataaagaagcttgggacacagta

SEQ ID NO: 378009 - DNA, 435 bp, Homo Sapiens
  misc_feature (32)..(32): n is a, c, g, or t
ccagtgaacccaggccagcatggaggagaagnatgtgtttgactgtagcagtgaaattactgtcgggtaggggggtgattcaggctccttggggatctgcctgaccacaccagggatctggagcatcaaatgttaaatgagtgtggtggcatgagaagcaggcaaactccttctgcaggtgcacctgtctcacatgacccaacacaaccagcacccaggcaaggcgaaagtgccctcaggcacagggatcagcgttgctatgagaacagcaacttgtgcatgggtttggagccagagtaccttgcccacagaaatggaagtctggggacccagttggatttcaacaacctccagcctgagcggcacccttttctctgatccggcaggggaagagaagccatagggttccccagtgtatgcccaccctcgtctggc

SEQ ID NO: 378010 - DNA, 370 bp, Homo Sapiens
  misc_feature (345)..(345): n is a, c, g, or t
  misc_feature (351)..(351): n is a, c, g, or t
aattctatagctttcatcagacccttaatgagtcctatgactcaaaaaatattaaagaaccattgtgcccaagaaaaatagtattcaggatataatttcatatgatatctaccaaaatattaggtattttaaggtaatttttccgtaagtttcttttggctttctgattgtaaaagttttaatagtacctaaatgatattaatcatttctattttttatccaaatctgcctcgatcttggaataataatttttaaaaattattgaagaaaccttgaagaaggccatttaaaataatttgaagttagtaaatttttagaaaggattataatttctttttacaacanaacaanataaaactttaccgtgagg

SEQ ID NO: 378011 - DNA, 386 bp, Homo Sapiens
tcgagcgaggagggagtgtagagaccaagggaagcctggctgggaagaggcacaggaaggagagaggctggcctgggacagccccggccgcttctgccccaccttgaaaaggggagaggcaggcccagctggccaggacagcggggctgcagctggcttccatatggactgttaaacatcaagtgagcagagaatgacagtggagaatctgcctccaacccttctccccgtggcaggccagggcaagtggccaggacggctgcggacagctgtgcaggtttggcactgctcaagggaccctataggctggcaaggctcagagaggtcgagttgccttgaggtggctggcacaggttcagggcaggctcaggctcgggctgaccttg

SEQ ID NO: 378012 - DNA, 398 bp, Homo Sapiens
agctggatgccacaaacataggccttggtaagatgcagaatgcatactgatggaaaggaggtggctcggaggtgggctgcctggcttcacatcccacacactgcccacctagcacgggcagccactggggtcgagcgatgtcgcctcctctgatgaagtgaggataatgacacctgggtcataggtagggaactgaaggtcactatgacatgagtcaagtgcttggacaggtggccgctattttccagttaggggagtgatggtctccttcactctccttccctctcaccctctttgatcaatgacctttttactgttccttgaactctgagctgctgcatttcaggggccatggtgctggttcaccctctgcttagaacctcctcgctcgatcttag

SEQ ID NO: 378013 - DNA, 418 bp, Homo Sapiens
  misc_feature (372)..(372): n is a, c, g, or t
attctgctttggtgtctgaaggacttgacaaaggagacaggcctcctaccaactggacagtatgctgagatactaatagctccctggtgtcagcatctgtattaggaggagataactgtatgaggacagggggggctgggccttccatgggctctatttcttcttcgctatggagctgtggatgaggtggtggagaagatgcttcctttgttagtaaaggtggaggagtctcctcctcgctggcagtttgctctggcagcgctacaagtgaggccttctttcgatcttcagtcagtcgaggaggggaaggagacttcgatttttcctttaagccttgtgaagaatttatttctctttcttcctcctcaaggngagatgttgttttcatttccttttctctgctgctgctggccagatg

SEQ ID NO: 378014 - DNA, 386 bp, Homo Sapiens
atcgagcgaggagagagacttactactggtgtgtgtatagaaactgattgggctaattgcaagttggtatcttctaaactgttagggcaggactgtgtctcctctttctgaggcgagaatcgataaacttctcccccgagagcactgttgttgacacatgcatctttagcggtggttatatccacagggagcacctcacgcctctttttcagtacaggcacttcaactgtctcttcagggtcatattttagtttcaattcatctagtttagctctcagcttcatatcttcactttctgaaagctggaggcatctttcatttgcaaaaagttttcgctcaatatctagagcccgctcgctctcaaataatgctttcattcgctgtat

SEQ ID NO: 378015 - DNA, 733 bp, Homo Sapiens
gttcttcatcatcaactgttgtacaagaaatctctcaacaaacaactgtagtgccagaatctgattcaaatagtcaggttgattggacttacgacccaatatgaacctcgatactgcatttgtaatcaggtatcttatggtgagatggtgggatgtgataaccaagattgccctatagaatggttccattatggctgcgttggattgacagaggcaccaaaaggcaaatggtactgtccacagtgcactgctgcaatgaagagaagaggcagcagacacaaataaaggtggtccttttgtttgatgaagaaataaacttcagcctgaagattttatataggactttaaaaagaagagaagagaaagaagaaacaatgccatttccccggcaacccacctaaaggatttaccatagacaatccctataagatcttgaacttgaattttatgggttgtattttaataatgtaagtaaattatttatgcactccctggtgtgctatgaatattattcccagttagccttggattatttcagtggccaacatatgcagacatttgtactcctcaaccattttctcaaagtaatgggcattctatgatttagacttcaaggaattccaatgatgaagattttaaggaaagtattttatattcaacaggtatattctgctgcatgtactgtactccagagctgttatgtaacactgtatataaatggttgcaaaaaaaa

SEQ ID NO: 378016 - DNA, 526 bp, Homo Sapiens
  misc_feature (452)..(452): n is a, c, g, or t
  misc_feature (475)..(475): n is a, c, g, or t
taagatagagcgaggagatatccaggtgaaaggtgatgatatcttacacgtttatagacagggtcccagtgagctccacttttgagggaggaatagttctgacaccttattttctgtggaaagtaactgggcagatggtgatctcattgaagaggtaagtatggttggggtaaatcaaccaagagtttgattttggatatgtagaaatgtcaagtaggcagttgactattaccagtctggggctcagagaagaggcctgggcttgagatgtaaatttggaaaccttcagcatatcaacagtgactcaaagctgtagaagttgttaaggtcatttagggagagaatatgaaaagagccaggaccagtgcttaggtggctccaacattaaagaggagggattcctaaatgtaaaattatttgagaagagatcatacattcatagactgttttanaagtcaggtgagctaagatccanatccggtcttagcacaaaagctgcctctagaagagggagatgtcatgtgtg

SEQ ID NO: 378017 - DNA, 406 bp, Homo Sapiens
tacgatcgcgcgaggagtatattacttggctaaagcctccataacaaatcaccacagactgggtgacttaaacaatatatgcttatttcccacagtcctggaggctagaaatctgagatcaaggtgtgggcagggctggttcctcctgaggcgtctctcctggggttgtagacactgtcttctccctgtgttctcacagggtcgtccctctgtgtgcgtctgaatcttcatctcctctgcttatgggatgtcttagtccatttcaggctgctagcacagaataccatagacttagtggcttataaacaacagacattgattctcccaagtcatggaggctggaagtcccagatccaggtgagggcagggctggatcctcctgaggcctctctcctgggcttggaga

SEQ ID NO: 378018 - DNA, 371 bp, Homo Sapiens
ctcacctgcacacgtacagcttaagttattgaatagcatggtgtccagggtctttaattctcattctttatttgtgtgggaagaaacgtaccattatgttttggttaatgcttagtttattaaatctaatatgttagatgttgacaatattaaaacttttatttcaaaaggtaatataaatatattatcattcaaaagttacaaaaagatgggtggtgaaattcctcccccacccttgctccggccacctattcagttgtttttttgaaaataattttttattatagaaagtttcaaaaatacataaaagtagcaagaacagaatgaattcccatatcttaccagtgatcattttgtctaatttcatctct

SEQ ID NO: 378019 - DNA, 246 bp, Homo Sapiens
ccagaggcaccaaggaggccagaggcaccaatgagggaagagggaggacaaacaactaccaaagccctacagcatcacctgttggcatcacgcaatttgataaagtccatgataaaccataaaaagatagcagattggatagtaatatagctaagtgtacgcatgcatgtatgtgagcatgttgagatggagtctcattcactctgttgcccagggtgtgcagtgacgcaatcttggctcaatgca

SEQ ID NO: 378020 - DNA, 254 bp, Homo Sapiens
ctctccataggcaccaaggaggcacaggtggtggcaggaagcaaggctgtggtggtggttgggtggaggaatcagagcatagggggtcctctgaccatgaagatgaaggagttttcactgtttatagaatctgcattggctgtcctgcccgcctcttcttcctgaatcttggcactggttatgattttaggagcacggagaagactcctccaagaattagaaacaaacaaattccatttcctctctctttggct

SEQ ID NO: 378021 - DNA, 247 bp, Homo Sapiens
ccagaggtaccaaggaggggttcatcaattctacagaggagatttcacatctttacacaggtacacaaactacacaaagagggacattcaggaggggaagacactggggtcgctagaacccctatgtgacaccatggtctctctagagtgtctgtgcgacaccatgttctctctagagtgtctgcgtgacaccgtgttctctctagagtgtctgtgtgacactgcggaccctccttggtggggtacc

SEQ ID NO: 378022 - DNA, 274 bp, Homo Sapiens
gactaaaccaaccccatggggcaactctgaagctgagcaggaccttcagagatactccaatggggcaagtcagccaggcctcatacttgaccttctaactgactgccgctgagtggaggcagttctgggaaggggtaggcctcaggcaaggtgactctccatggaaagcaagctctggagtggggatgatttgacagtcaccaacactctcagcagctgaggaaagggcgtcttggtcccagagaatctgggtagtgactatggcgtccattac

SEQ ID NO: 378023 - DNA, 291 bp, Homo Sapiens
  misc_feature (99)..(99): n is a, c, g, or t
ccagagcaccaaggagggcctgggattactggcatcacaaaccccactgcctgcaggctgcatgatctcctgggcatggttggcggcacgtgcccccgncatgagcagccagcaggcatgtgtgaatcacggacagtgctgggctcgaagcggttggtgacggtgtgacaccccgtcccctgagtggctgggtcttactgtcaactctcccaagtgctgtgcttcagtggtcgtggcagtctggtgctgcctctgcccaactggcagccgaccattattcctgagtccctg

SEQ ID NO: 378024 - DNA, 454 bp, Homo Sapiens
ccagaggcaccaaggacaagtgggttgcaagaccaggaagaaaggaaaaggaagggcagagtgctggtttctccaggttgggttgggggcactgctgtccccccctccagctaggacccagcccatccccaagatgcctgagcctttgtccaaagtgaggtcactcgagaattcatggacacggcccccagtcagggggcatcttgcaagacctttagtgccacaaataagcatcgagcacctccccattcacacccccattcctcctggctccttatcccccatggtgtttattatttatttccctccccatgcccctggggaccccaaggccccagcttccctctgcacccccagcctatcccagaggccttgcaggtgaccagcagtgtcattgtatttatatacagagcttatgactttaatttttcaataaagaaatctgaacaaggtt

SEQ ID NO: 378025 - DNA, 509 bp, Homo Sapiens
  misc_feature (354)..(354): n is a, c, g, or t
acgacttcatgtgcgactactgcgaggacaccttcagccagacggaggagctggagaagcacgtgctcacccgccacccgcagctgtccgagaaggcggacctgcagtgcattcactgccctgaggtcttcgtcgacgagaacacactgctcgcccatatccaccaagcccacgccaaccagaaacacaagtgccccatgtgccctgagacagttctcctcagtggtaaggtgtctactgccacctggacagccaccggcagcccgactccagcaaccacagtgtcagtcccgaccctgtactgggcagcgtggcctccatgagcagcgccacacccgactccagcgcctactngagcgtggctccaccccggactccaccttgaagccgctgcgggggcagaagaagatgcgggatgacgggcagggctggaccaaggtggtctatagctgcccctattgttccaagcgggactttaacagcctggccgtgctggagatccacctgaa

SEQ ID NO: 378026 - DNA, 996 bp, Homo Sapiens
  misc_feature (922)..(922): n is a, c, g, or t
  misc_feature (951)..(951): n is a, c, g, or t
  misc_feature (962)..(962): n is a, c, g, or t
  misc_feature (974)..(974): n is a, c, g, or t
ggcagaggtgaatgtggtttctaccaaagaagttttgatgaagtagagggtgtttttggtcgagcaggtggcagagaaatgcatagatcgcagagctgggaggaaaggggtgacagacgttttgaaaaaccaggacgaaaagatgtagggagaccaaattttgaggaaggtggaccaacatcagtagggagaaagcatgaatttatacgctcagaaagtgaaaattggcgcatctttagagaggaacaaaatggagaagatgaagatggaggttggcgactagctggatcaaggagggatggagagaggtggcgacctcacagtcctgatggccctcgttctgcaggctggcgggaacacatggaacgacgtcggaggtttgagtttgattttcgagatagagatgatgaacggggttaccgaagggttcgctctggcagtgggagcatagatgatgacagggatagcttgcccgaatggtgcttagaggatgctgaagaagaaatgggtacatttgactcatctggagcattcctttctctaaaaaaagtacagaaagagcctattccagaagagcaggagatggacttccggcctgtggacgaaggggaggagtgctctgactctgagggtagccataatgaagaggccaaagaacccgataagacaaataagaaagaaggagagaaaacagatagagtaggagttgaagctagtgaggaaactccccagacctcatcatcatcctgcctagaccaggtactccttcagaccatcagtctcaggaagcatcacagtttgagaggaaagatgaaccaaaaacttgagcaaaccggaaaaaagcttgaagaggagactccggattggaaaatagtctaccagccaaagttgcccagccagagggggatgaaattggttgctngattgttccagcaggcccctgttcggcangattccttccngatacaggcctnttcctctttctcaaaatttcca

SEQ ID NO: 378027 - DNA, 478 bp, Homo Sapiens
gagagggtgagtagcttggccaggatgacacaattagtaaatgcaacaactggatgtgttatagcccagctctgaccaacccggaaaccctcttttttaaattgatgctgtctccctaaaatgtgcagcgttaagttttataagtggattttcttgttctttacttgggaagaatgtggaaggagaggaagaggaggcctggagttccttcatcttggtatgtgttgcagaggaagcaagataaaggaaaactatttattctagcaacactgaagactaaattttgcctgcttagtagttaatcttagagcttgctctggttgtctatgcatatggcaccttacataagtatcttttgatgtgacattgtctgaagatgatgtgagtaggacgacactgtccagaaggtttaaggatagatctcaatagcattgtgttgaatttaaaagaaagaaaaaccagtgtcgagcaatataga

SEQ ID NO: 378028 - DNA, 505 bp, Homo Sapiens
taggtgacaaatgggcagtaaactgagggtaggaggagtcagggattttctggtttgagagacaatgacacacacccctaagttcaccttctctcgaatagtaggccctgctcttacgggctggggtgccatttactcattggacacagcactctaggtgacagtcagttgctgggcaggcactgggtgcaaacccttaaccctagggattggagcagaagcaaggagtcctagtcctccagaaactggagaagagggcctggctccccatcctggctgagctgcagggtgggggcgggaatgggcagtggaactcactgttctggtggtggtcccgacttgggagatcctgggaggtcctgtggtgggggctggcctcccccctcatacacttggagcttcttcctcagagcggctacctcagcctggagctgttggcagatggtagcatactggctgatgtgacagtccaggctggtcacattgctcttcagcgagagcctga

SEQ ID NO: 378029 - DNA, 372 bp, Homo Sapiens
  misc_feature (307)..(307): n is a, c, g, or t
cacgctcaccctcaccctcatgggcactggcgtggcgtccatgatcacgcgctccattgaaggcagcgacctcaacatgcgctatgtgattgccggagagtctgtgtcctcaggcttcaaggcgaagcacacgtgggccctggtgctggctccagcctcccaggaggggtttccaccaggcagcactcaggccagctgtcaaaagtgacccgtgggtcggagagcccgtgacgacacagctggccccctctacccctcctctacacagctgccgcctctgcacgcactctcctgcagagaacccggngctctgtttctggcgaggctgcagatgacccctagtcctccccacctacctgtcctcctttgcgg

SEQ ID NO: 378030 - DNA, 198 bp, Homo Sapiens
ccagaggcaccaagcaggaggagacgtgagtctgccaaaaacgcacctcctggcaatcctgtcttgctagctgggaatccttgtgaagggagtagactgaccctgtaggccactccccgccccctctacttccacttcccactggggtcgctgacttctgcctcctcagccggcgtaaaggccgtgcctctggggtac

SEQ ID NO: 378031 - DNA, 139 bp, Homo Sapiens
aaggtaacatactaagacaggagagctgggtcatctccattctctgcaaagtaaacaagaaagatcaatgttgatggaccctgaggcaagagggcagggcttagggataagggatcccctaggctgcctctgggggtac

SEQ ID NO: 378032 - DNA, 210 bp, Homo Sapiens
gggaactgaagcacacagaggctaagtcactcatccgagaacacacagctgcgaaatggcagaggagggcttgaccccaagcaggcgaggccagaagactagactctgaaccccctgccacaggggccccagcggcacagagaagtccacacggcccccccacccgccacctgttggtcttccagatgtgtagggtgtcggagtcggaga

SEQ ID NO: 378033 - DNA, 303 bp, Homo Sapiens
ccagaggcaccaaggaggctagaagttaggaaggtagagaaaaaggggagggaagattgtgctgtgtataagatgcctgttgtaaaaattgcaaaaatgactgctagaggcacgagggaactatccgagtaagttgtttattgagtaatagtgaattcagcttgaggaatcttagagatgggtcaattggtaattttatagatggaaccatgagattagtaactcaaggcgttacaccatttaatggcagatatgtgatgaaaatccagtgtctttccctctttgcagcactggtaccgagct

SEQ ID NO: 378034 - DNA, 341 bp, Homo Sapiens
gcgccaaggaggaaggtctttagtcgcctttagtgtcaagaatttccagggagtagagcaggtcatgacaaggttacctgcaggaaatgggcaccagatcccctttggagttggactgtttgtggctctttctggctacaggagcggtcacacacgggtcatttctgccctcctgtgttggccacagcacatcccttcctcccaggcttccagctcttagatttctcagctttcacgatagatgtggatatcctctttttaagaagtagaaagtcctgtacaaacacacgtgtgtagtgattctcccaggccatcactgttggagacccagcttcagtctg

SEQ ID NO: 378035 - DNA, 223 bp, Homo Sapiens
acccccagaggctctgactgctaccgccccttccccactggccgtttctcggcctcctccacagtcagcagctcaaactctgcctccaccttgcccgtgaggatgtacacattgccacccatgtctgtgaactccaggtcttctggccggcccttcctcctccgctgctttcgcttcatcttgccagcctgagcctcctgcgcctcccgctccacgtcctctg

SEQ ID NO: 378036 - DNA, 714 bp, Homo Sapiens
ctgatattaacggataaattggaaccctgagataactgccctccagcaacaagagagctgagggctgcttgtcctaggtggagctgctgccaggccgacacctgtcccagcgacagcattcctggcgagttgaagccttgaagggctgacaggtcagcgctgggcagtgaataatcagtgttgtaggcagtcggcattgctgagtacacaagtccttgcggaggcaagcttggggatgtcacagacacgactggggtagcaagaggttgagtggcttgagaactactgatcctttgggtggttagcggaggcatcatgcccttgcttgaaggggggatgacaactcgaagatctggtttcctactgttcattccaagattaccaccacctggtggagggggagactttgtaggcatgactttgcctaagctatttgcaccagtagctccaatcaaatttggagaagctcttgagtttacaaatccattccccactggactgcttccagctccatttggcactgtgaggtctgtagtgctcaacatcccacctgcattgccagtacttggtggtctctgaggagctccaggagacacatttctatgtaatgtggtttgaggtggagagagcatgcttgaatctgttaacgttgagctggctgccaaagatggggacaccagtgaactccctgggttagtgtaggacaaagcattg

SEQ ID NO: 378037 - DNA, 376 bp, Homo Sapiens
ctgagggactagggtgtccccaatgggggaccgttgtccagaaacaggttagattctctctttggtcctcatgtcaccatctgtcccgcaggtgcctcttcctttctcagccttttatacttctcatctccccgtgtcccttagcttcacactctgcgccccagtctccctcctctttccctccactctctgtttcactccagcccctccttcccttgtccttgcttcttgtccccttgatctgtctgcccagctctcgagcctcctcagttccctgccttcctctcttaggagtttgtttccaacactgtttccttcccgagtccacctcagttccttcatccagttcagcccttttcttcccaaacttcagtct

SEQ ID NO: 378038 - DNA, 291 bp, Homo Sapiens
gaggcaccaaggaggctggggctgaccaggcctcacagactcccttcttcccagtggtgcctcttgccctggtgcccagcctggctctgccgatgaatgccacccaagatgtaaaggacattgggcgccagcagcccaccctcctcgggccctcagatgaggcttcccccggggcctgcgtgagcttctgagaggactcacctgaagcaacctgccagggttcgattctcatgccaccccatcctagctgggtcacttcaaactgtcggtcctccctccttgtgcctctgg

SEQ ID NO: 378039 - DNA, 846 bp, Homo Sapiens
agtccaactctggcggcctgactcccagcaccactccttccttttccccacagcacacctgggcccacactgtgcctccttaggcgtctgaaatgctgggaacagagtggtgtgaggagggtggtcattctcaggccattgtaagcaataactatttcaacagaactagtttaaagaggtttttaagcagggaagtgacctgaagtggaagtatgagtgggaaacttgcatggtcagcactggatttccaatgaagacctggaatccgttaggatactgccagggaccaaggctgcaggctggcctctctgcccacaactctcctgaccttggaagcagggtacggaggcgtgtgtcctaaaataaagcatttgaactgctgctacagaggaacaatcaccagatattgtgaccctttcagatgcccagtagtcctgggaggcaggcagggcaggtgttattatcccttctttataaatgaggacacagaatgaggcagtacaagtgactctaaacacccccttagtgcccacatcagtctcgccacctcccaggactaggtgtcacctgtattgacctcttcccctctgattataaaagtaatatatgttcattgtggaaagtttggaaaatgcagaaaataaaattaataatttaccccaaatcccaccatcctgagatcatcactgttaatgttttagtgtatttccttcctgtattttttctatgcatatataatttattttactacaagattgggatcatgctgtatttacagatttgtatcctgctttctttaacatattgtgagcattttcccatgtcaataaatattcttcaaaaagt

SEQ ID NO: 378040 - DNA, 871 bp, Homo Sapiens
caggtaaaagcgggccgggccccaggtcgaggagaaggaagggggtgcctgcaaaacctcgaggagacggccctggcttgagggtcctccagcctcctccacattgtcttggaccccaggagccgggaggagctgcacccatatctccataggtcatcagggagaaaagaggcggggtcctcctgtttcccaaaatacaaacagcctttccctctgattgggaaagcagtgtataagccatccgtcggtttggtttttcttaaatcttggaatggcacccatgagaaggtggaaagtatcctgatcaatctgcgccgtcactgtggggcggcccctgcagtgtgccctgtgagcacacacactggcgcttgttcagacacaattgggggtaaactccatgccacttcgtttacttcctcctcttgttccataaccatgtacccctcatgggcctcggcatcggtggataccaggtcatgctgttacatagctacaagaatttgaaaatgagttaaacttttctctgtgtttcattataagactgataagttcttattgtttttaacatgtaaacaccagtgacagtcaggagtcccttttcccttcctctccaaccgtgctctcttctgagcctctgccagcccatctgccttcgcacatgtatgtactgaggattaacacagatgcggcgtggcctagcatgtgcctcttccaccaagcagtgggtgtcaaccgccgagtgcacatcggaagctacccagccatctaatcggccaccaggcgtcccggcagatggccacccctggacgtctgctctcaaactctggttggcaggcatccgtcttttctgttgatcagcctggtcaccaac

SEQ ID NO: 378041 - DNA, 426 bp, Homo Sapiens
acgtatgccctcgcaagtctggcatggggtggggtgtgaaagccgttgtcagttatgtggggagtgtatgggtaggaaatagctcctctcctctcagttgagactaccaagcagaaactgtccctgacttggtgcccccccagttgtgagaccctcgagggagtgtcagttctaagacaggtggagtagggtgggctgctgggggtgaggaagagccagggtttggcgtgtagcattcctctctcgggaaaaatgtaacttagcccttgggtacaagccttcctccaggtcccttgcttccactcctggtgccagtgtctgccccctgccctcagggctcaatgttggctgccggccaagcccccagctgttcaattgggtatccagggccattatggcctggtcccaccctcctcttcccttcct

SEQ ID NO: 378042 - DNA, 366 bp, Homo Sapiens
  misc_feature (310)..(310): n is a, c, g, or t
gtctgccgaatatggaagaagtcagggaagagaaggaggagaggcaggatgaggagcagagacaggggcagggcacacagaaggcggctgaggaggacgaccttgactcttcgctggcgtcagtgttcagggtggagtgcccgtccctttcggaggagatcctgcggtgcctcagcctccatgatccccctgatggggccctggacatcgacctcctgccaggggcagcttctccctacctgggcatcccctgggatggaaaggctccctgccagcaggttcttgcccacctggcccagctcaccatccncagcaacttcaccgactcttcttctcatgggctcatgactccacaggatgcatcct

SEQ ID NO: 378043 - DNA, 403 bp, Homo Sapiens
ccagaggcaaggaggggtcatgagggtctcagtaggtcccaaggggcttgaaggggccttggcggagggttcagaggatctcaggggctcatcttgttggggggactctcagggctcagcaggtttggcatggtccggtgggggggcagtggggtcctgcagtcctcatgcgggtcccacgggtcctagagcttttctaggtttcagtgagggctcttaggtctgtggtgcactggcaatatcttgaacggggtcctcagggcatcccaggggcacagtgagtcctcagcatcccggaaaagaactcagtggggtctgaagggaaggctcccagggacctggggggctcagtggcattgtggttgttccctaaggtcccaggggttcagtgggtgcaggtagt

SEQ ID NO: 378044 - DNA, 373 bp, Homo Sapiens
gacatggcatctggcttcctccactgtgaatcatccaagaaattgctgggggaggccgaaatttcacttatgacctaatctcagaggtcacacaccatccctctccaccacattctattctccaagagcaagtcaaaaagtccagcccacactcaaggagaggggaatgaatcattgccttttgaagggaggagtgtcaaagaatgtaatgacatattttaaaaccaccacaaagagtgccagaaggccagaatgatgtgacaagtagatgctgtcaaagtctttggaaagagcctcccagggagaagatctgcaaggacaaaggcctagaggtgggagtgagcttgtcatgtttggaaacaagaaggtgtgg

SEQ ID NO: 378045 - DNA, 224 bp, Homo Sapiens
ccaggctgaggctagtggatggacctgtgcagggattgagggcatcaagaacccctttactgactgcttgtcatgaagcctggtgttaggagggctgcatgcagccaggaggtcacagaactggagctggtggcttgccaagggactgtgccctctctgtgcacactgatatggaagattgctaggtctcttaccattaaaaaacctagcctgcgtctgcgggt

SEQ ID NO: 378046 - DNA, 464 bp, Homo Sapiens
  misc_feature (402)..(402): n is a, c, g, or t
ccgagacgtgttcatgccgatccttgattcgaatttataaagacagcgcgcgccatcttttagtgaataaatttaccagcctttagttggatccccaatccgtgcactgactgaggcctttagcagggtgtaccactgactcctgcaatgcagtgcagtcaggcaaaaaggagaccccatattgcacatacctagggcccaggacatgccctatgtctcaccattgagacagaaaatatcccaaagggtaaaatgtcacctttcaaaccgccatgttggtagcttccactaatgcagtggtgtggtcataactggtttttactgttccttacaatggctgcacccttatttgtgactagagaacaaggcttaccactgaattgccagcatgatacagccagngccatcaaaaacacacctgcactagatcattgtgaactttggaggtgccttacatctgggca

SEQ ID NO: 378047 - DNA, 336 bp, Homo Sapiens
ggacacactgttggggctagtgggcagcagaccagggctcacatttatgggacacccaatgtgggcaggcaccagcaatcaacagccctcaggcctccccaaacaccctctggcctgagttagaaatagatggggaaactgagctcctaaaagaagtgacttgtgtgaggccatgtggtatctggcatgtccgacatcaggatccaagatctctacccagaccttgatgcccagagccctccccaccagggccctgcctatctgatcattcacctccctcgtctcctctcggctgatgttggcaggactcatggctgccacttgcagacagcccag

SEQ ID NO: 378048 - DNA, 406 bp, Homo Sapiens
  misc_feature (344)..(344): n is a, c, g, or t
cccaggctgaggggctggcatcgccttcctgagactagacagtgcacagcccctgggtgagatgagctcagagtcagcaggggcctggtgggcttgccacacctggctggtgggacagggcaggggcatcactcaaattcaaaagaagccacttgagggcagtaaaggaaatgccggcgtgcgctcaggcagggcacacgtggagcttgctagtgggaaccagggccactctctagaagctgagcaggctgggggcggtttccaaggcatccatgcattctgcctctgtgacctttctaagcgggcggtgggtctgtccctacccagggttagccaggcacggngcagggctccagtctccagtgccgttcttgtgcccatcagccaccagggcgcaggaggttgg

SEQ ID NO: 378049 - DNA, 198 bp, Homo Sapiens
cggtacccccgtggtgtgttctgcaatgatttatttattaaaccaaacaaaaagatctgaagcaaacatggcaaagtgataggaattaacaaagctgaattacgggtgcatagggcattgcaatgttgttctctagacttctctaaacttgatatttaatttaaaaaaagaagctctcatgcatgagcgcaccgcggt

SEQ ID NO: 378050 - DNA, 240 bp, Homo Sapiens
  misc_feature (44)..(44): n is a, c, g, or t
gataaagcaaaattccacatgtgattatatctaatagtctgacntatggagttcctgtgggagaacttagaggaagtccagaaatacttggggaggacttacaggggtctgcagggcaggttaggctagagcaggaaactcagttgtaaatgctaatgcatccatcacaccaaaggcccctgtttttatacatcagtcttttatttcttggcatttaggtaatggctggattatttgttg

SEQ ID NO: 378051 - DNA, 439 bp, Homo Sapiens
gcagtgccctggcctggccacccgcgaacccctctgtccaccccatgctgcgtggcacagggcaggcgtggggcctctagctggagccttgagtgggtggatcctcggtggggctttaaggccaacctgtttatgaaaatgcatggggactgactgcagatgcacagacaactcagatgcacagacgcccggacgacgtggacacccagacgatgtggacgcacagacgacatggacgcacagacgatgtggatgcacggacgacgtagacacacggatgactcatccacagatgactcagatgcacggacacccagacgacgcggacgcacagacgacgcggacgcacagatgacgttgtcgcacagatgacgtggacgcacggacgacgtgtatgcatggacgacgtggacgcacagatgacctggacgcactgact

SEQ ID NO: 378052 - DNA, 165 bp, Homo Sapiens
gtttgcctcacagtggagacaaggaattgcaacttttttctattattacccaatctgctcccaacattaaataaaacctacaaaaattaaattccggccctcaaaccccacaataggatttaattaaccttgccttcaaggtgtacaataatagagtagagtcag

SEQ ID NO: 378053 - DNA, 460 bp, Homo Sapiens
ccgtggggagtccatgcagaattgggtctggtcctttcattcctgcctcaacctcagcttcctcctctgtctaagtgcgaggagtcccagagattgtgccagcgcagtgctgagttggcgttttaagccctgggagacttgacaggtaactccactaaaccaaagtgaaggtgaagggtcaggattgtgggttgaacatcaacttcttatcccgaacttttgctcctgcctccaattttggtttttcttattatctggcaaacatgctgagcccacgctctgggcgggaaggctgctgattccacacagcttatctctctggtcacactgctccttgattcttggagtctgcatcaccagttttctttcaggccagaaatccccgcatttggctcgtctgggagtgcctggcgaagtaagggtgaaggtttctgcttcagtctaacattttcaaacttgg

SEQ ID NO: 378054 - DNA, 569 bp, Homo Sapiens
  misc_feature (473)..(473): n is a, c, g, or t
  misc_feature (481)..(481): n is a, c, g, or t
  misc_feature (487)..(487): n is a, c, g, or t
acccaggctgaggcggtgggtggtaggaatacctcattccttgtggggggcgataccggggaaagcctccagaatgtgggtggttagactgaaagccccttgggggaaaatgctggggatgggatgctggggacttccctcccatcacagggcccacaccctgcaggcctggactgatgtggtaatgggcagctgaattcgggtactctaggccaggcatatacagcgggggaaactggctcacagtgcctcccgtcaaaccggggtctgtgctgggcggtgtcgctgcgctctgtcccgtgcatggcatggtttcctgcaacgttctgcctctggggcagagcagcttttcggaaccactgctaccaaggcccttcccctccgatccacaaggagatgcttccccaatgactccgttctcggatagagcgcccctgtctgccaccgtggagaggtctctcacgcacccttgngcggctgngccggngtagctgctatccgagggccagggattcttgcccttcattgctttacagttgtccgcagattcggaggagctgcttttgagc

SEQ ID NO: 378055 - DNA, 386 bp, Homo Sapiens
ccttcctcctccacatctcttggttggccaccttccggcctttctggctgtggctcagctcctccgtcacccctcactgcactgatctcagtggtcttttgattaccctgtcccttggcctctttcatgccagtatgagctcaccactctcctacttaagaaccacttagggccatcctcctttgtgtaacaaattcaggtggctaaagaggggagtcgcaggggagaaggtatgcaagaaggcttcaaatgttactgtttctcaaaatgatttaatggtgaaggtaggggtgtccctcaaagagaaagaggccagagggagcaagacatgacactaggggtaaactgaagaaattgcccctagaactgcccctcagcctgggtct

SEQ ID NO: 378056 - DNA, 243 bp, Homo Sapiens
gaagactccagaggatcccctgaggagccatgcctatgcgctgtgcctgaggagccacacttgtccccccaggctgagggaccacatctgtcccctcagcctgaggaattgcacctgtccccccagactgaggagccgcacctgtctcctgtgcctgaggagccatgcttgtccccccaacctgaggaatcacacctgtccccccaggccggggggacaggcatggctcctcagactgggggg

SEQ ID NO: 378057 - DNA, 342 bp, Homo Sapiens
cccaggctgagcaagaaaagaataatggaaagggaaagcattaaccaggtaccagttatactcccactcccataacacagtccttccagttttccccaaaacattccaggccagagatcttactggctatgcaacaaaaatctaggggtgagtggacagcagcttcatcaatggcagaatctctgaggagaggaaaggagacagggaagggtaaaaggcgaggcaggtaaggaagagcagctgaaaccaggtggggcgaagccaggcacatggaactcaccttcacagatgtcccaggcacaccaggggtgttccgctgaggggccctcagcctggatcttc

SEQ ID NO: 378058 - DNA, 323 bp, Homo Sapiens
  misc_feature (97)..(97): n is a, c, g, or t
acccatgataattctgagagtgggtcattgatgccatctgagccatcctctccctcctctagcctatagatccttgagttttttagccatgaagggnaaaaccactgtaagttgtttctgggtcccattcatagcacagccagcaaccttcctgacatcacttagtctttgcaaagtggtgtccacctacctggcaccaccctgggtctttactaggacagcctatcactcagccacttgcttctagataacagacacatggtgagatcagcaaatcctgttgacagtagccccaaccttatttctttgtgtttctttggtag

SEQ ID NO: 378059 - DNA, 243 bp, Homo Sapiens
caaattcccccatcttttctgctgccggtgtctaatctgtgtaatccctttcagtaaaatttttctttcagatatgtgtatatcattctctaaaagttctgttcacttctttttatatcttctgttcctttcattacgttcatgtttttctttatactcttgagcattctgaatgtatttataatagctgttttcatgtccttgtctgctaattccgtcatcatctatgtcaattctgggcct

SEQ ID NO: 378060 - DNA, 286 bp, Homo Sapiens
gagctgcattagaggacttatagcctgggagagagcaatgaccctccatttaggggcctgtacaaccgggaggtgcctgggcaactcccatggctcatctcaaccacagctcctcggcggcttcgtcctctgcactagcttctcatgccagaacaccctcttatttgtctacctgcattagtgttggcctcttgcaggtagagtggccactccttgaagggcaaggccttcttgtacttgtacgtcatcatatcctacgccgcagcggtgcctgtgcatgaacaaa

SEQ ID NO: 378061 - DNA, 355 bp, Homo Sapiens
cgcgagtatattgcgggtgtgtggctgggatgagggggactagctgggggatgaggctgccgaggtggctgaaaggtatgggatggaattagagcttcagaccttgtgacgtcatcctgggccagcacagtgctgcgaggagccactgtgtgttgacacttgagcaggcctcagggaagagagctctaaaccaatggtcattgtccccactggcctttgagcaattgggactggttcctgagttctcttgatgctgctccgcaggaaacaggtgctatgtgtatgagccaatgtgcccaggcccctcgtctcagtctacgctggctgccatcacaaaacaccaggtggctttaca

SEQ ID NO: 378062 - DNA, 350 bp, Homo Sapiens
ctgtgtcatgatttccacagtgggctataaaatatttcccatcccatgtgctcttcttacaatctaaccctgacattccatcagcggggtgaatctgggcaggcctgtgactatggcagaaatggcctgtgggaatcccaaggctagcttagaaaaaatagcacagtttctgcctggagtgtgctcacactgacacactctggaagccagccctgcaatccagcaaccatgctgtgaggaagcccaagaaggcctacaggagggagacacgcatgcagccaccagcagacctgtgagtgagcgagccttcaggtgactccagccggcagacttcaagccgccttcagtgc

SEQ ID NO: 378063 - DNA, 476 bp, Homo Sapiens
ttgatctgtgtagtgtgtgtgtgtagtattctgatggcatggttttataaacactataccaggagaaaggaggtgtttcatgcccactttgctggtgatgaaacttgctgtgtgaccttggtggttcaatcctctctggtctccatatgtcatccataaaagtaggaacatgatgggcgtggtctctaaattctcttccagttccagcctggctctgctgcatgatactgcctgcctcccaagggatgcgtccatatatggaggacctgccacatcccttcctgggctgccctctttccaaagatgcctgcgcttctcctctgtctaaggaacagacttgtcacaaaggggtaaattacccatacctgctccaaatgtctagacaccttgatgctatgactcaatactctttgccagacctgaaggccttcgcagagaaggaagtacatctaactagcatgggccagccctgccag

SEQ ID NO: 378064 - DNA, 332 bp, Homo Sapiens
gttatattacctaccaaaaagaacatgagacatcgacatctcacataggaacatgatagtgtaactctcagcctacaacagcctggactttccaagcacaggacagagtcatgactaagaccatcagatacatagaaatggcaatgaagtctccttgtacatccagagacccagagggctctgcacgagataggcatcaatgcagccaaaaaccggccctcctgcaggatgggaaccctggacctcccagaattcctgctccccatgacctgactaggaattagatcctaggattaggctctcctgcatgaacacccacgtggatacagagc

SEQ ID NO: 378065 - DNA, 436 bp, Homo Sapiens
gcaccctgcctggacgtatgcggaagaagcacactgagaaggaggtgcagccgacttggcagcactgtgtcgtacggcttcgagagggctacacgtgtccgagaggtcacactggccaaaggagggtcccaacttggaggtaaacgctggtgccgctgtggaaacacaacatgcgcattgagtatgtggctatggaatcctggcccctggaagcctgagggccctcgagtaacacgggtggaagtgacgatggaaggcggctacgacattttgcatgatgtgtcctgtgcactaaggcagccccattcgttcatcgtatcgtacccatgtaatccggcgtatctggaacacgctgcagagcatcaaacagacagaccagatgcttgccaaccttcagtccttctcctcagtgcattgaacacaaccacggggatac

SEQ ID NO: 378066 - DNA, 477 bp, Homo Sapiens
ctagaggatcccggggtgtgtcatgcagcgtcgcatagtctgcttgggacacgtgtgtacatatgtgggcatcagtgtctgtgtttgtcagatgacatgacttgtatatcctgttttctccatatcgcgatctcttccggaggcttcttccccctcaaccctccacattccccatggtctgctcatatctagactccccccagcccttagcccctgtgggtgtccctgctgggggtcctggcacctgtatcctctaggttcccaaacttgtgctcgggggttccactttcttgccagccactgctcctgcttgctgcttccttcctgatgtccctggaaatccactgactcttgtcagttgtgacttcctggtgcctgggacctataaggccctgactagaaatgttctggtctctacttcccttccagccttcttgagcacagagggtagatcattctttccacaagacacctttg

SEQ ID NO: 378067 - DNA, 499 bp, Homo Sapiens
tctagaggactcccgtgtgtgtcatgcacccagcttctgtagcagctggctggggacacagggttcctcaggagcctgtcttgattggaaggcagcaagcagcctctcctagcacaggcaaactcgctttctcattttcgtcggctgtcattcatttccttcctgtgactgttttattgttttccattctctcaaggagcgcctttttgattgcctgtaaattcctctataatcatactcttccccacaaacatgagatcataactggataatttcttttcttgtgctgggtagtgcagtttgaatgtgaaggtcaaaagttgaaacttcaaaagagcaggcatcttacttccataatttaggctgtggttctgctttactgttttgcagatgattaaattgatctgaaggcaaggtgggaaataaaaggagatgctttcataccacctgatagctcagtgccttgggtttcggttaagtacctctggaagcgtcaggg

SEQ ID NO: 378068 - DNA, 205 bp, Homo Sapiens
catgtggtattgttcatgattaccgaaactggaagcaccaacacatcctccagctaagtgaatggataaaaaattatgggacatcaatacaatagagtttctttgtttttttattttctacaacagggcctcactctgtcacccagggtggagtgtagtggtgcgatcataactccctgcatacttgaactcctggactcaagca

SEQ ID NO: 378069 - DNA, 575 bp, Homo Sapiens
ggggcaatctctcatgggaagtacagtaggtgacgccaaacctttcttcaacatcctgccagccacagtgaactgggtcgagtcgttggccgctcctctgcctctcgtcttccaggcctcctctctcacagtgatgagctgcttcctctcctcaatcgtcatttggctctctcgactttctgtgacccgcttcttgatgagggaccgccctggagaacctggacctgggcccccctttcctcgtccagctccaccgtcatcagcgccgacgtgcccttctcactcacggtggagtgccggccttgccagaagaagtagacgcacttctctttgccggctgccctcaccgagtgctctcccttctggcgacttcccactgccgtgctcaccatgaacttccacttgaccacataggcatccccctcatggaactgcccgatgctttgtttggggagcctgctatagtcgaattccaggatgtgccagacatccacggaaacgctggtgatctcatactgcctcctgtcgtgatccttccaccaggccatgccccgggccgaacaggatcgtctaga

SEQ ID NO: 378070 - DNA, 346 bp, Homo Sapiens
gacattggctcattcaacagccaccacatgcccctctccagggatctacttcataaccacccagaaaaggtcattttgctacaggagctaaaaagaagttatttaggcagatagtgagggtaaaggagtccttggcaaggcttgccttttaacaaaaagcaaccccaaataatttcttttctaacaaagagcagcctgtaaaatcgagctgcagacacagataagcaagctggaagcttgcgcaggctgaatgttggcagctgtgccaataggaaaagcctgtcgagtaccagtctctaatgtacagtaaacagcagcaggcaacatgcccggccgaataggatgt

SEQ ID NO: 378071 - DNA, 350 bp, Homo Sapiens
cgacgtggtactaaaacaaaataaaattaaaagagaaacctgggcctggtaagcacttgcttctggtagtggtagaggacagggagatggataaccagcagccccaacccacttattcagaaaatgagttctgtcccctcccaggtcaggggttcctccgtgtggccatgctgtctgtccggtacgacaggcaaagccacctacgttcacaaatacttatttttgttgttctcaaccaagccaggagaagcaacaggctggtgccaccaagagatttgagcttgcaggctcatggctccagacactgctgcagggccccagtcattgtcctgcacacaacctcccccagc

SEQ ID NO: 378072 - DNA, 395 bp, Homo Sapiens
cgggtgactctacaggagcttaattcggccggggcactggggaggctgtctggaatcagagtctttggcctaacctgaggtagcactgccgctccttgcccggccaacctctgcaaggagctgacctgaggacccgtgacaggcactgcagtgatcgttcccaaagccccgtgctgggtcccttgtgcacagatgagaggttctgcccgcgatttgtttgtcgctgagcgcggcgatccgcggctgcctttcgtggagctgcttcttgaggtcgccgttctggtggcgcgcgagttccacggcgagcgcctcgggccggctctgcagctccatcccggcaacttgggcagcactttgcgctcacattgccccgggccggaatgggtaccgagctc

SEQ ID NO: 378073 - DNA, 514 bp, Homo Sapiens
cggggcataacctggcgcagttgtaaaaaacaagatcaaacacggcagtgcactagttaagagtcagcaggagaaaaggccaagaagatgcaggcgcctcccaggttcacagatgaacacatcaaaaccaatgtattgagctggatttctacccaacgagtaaggctccctgaatcgcccgttcccagagctaccaggcagacacggcattcaagggcctggctgatccttgagccctcagtgggctgcagactcccttgtcatcccgtgaaacttacttaccaacttccctccacgaagtccgctccttgcccactcctggcaccttctgtcacacccctcccataattacccagaatgccctgaggccaagggtggggcctcattcaccacccaccccagcacagtagcacccaatggctaaagtgctactttgaagtgactaaaggactcaatagcttttctagctgccaagtacagtagaaagagaagcccattttcctcagaaaccact

SEQ ID NO: 378074 - DNA, 437 bp, Homo Sapiens
  misc_feature (270)..(390): n is a, c, g, or t
ctaggagcccacatctcctgcaaagccacataacttatccatgccccctgtaaacagtgctcacaacacagggccttaaaggaggtagccctagggtacacacggaatccctccgctgggggctggccagtggtagcacccagctggaggtgctttgctgccacctcctgagggtgttgctgggaggatttgaaaccagctgcacggtgcctggtgcattccagcttttagcgaatgggtgccatggctggttattgttattatttatannnnnnnnnnnnnnnnnnnnnnnnnnnnnnnnnnnnnnnnnnnnnnnnnnnnnnnnnnnnnnnnnnnnnnnnnnnnnnnnnnnnnnnnnnnnnnnnnnnnnnnnnnnnnnnnnnnnnnnnnctataacgcgagagccacatgccccggccgaattaagatcctgaaca

SEQ ID NO: 378075 - DNA, 417 bp, Homo Sapiens
ctgatgtgggtgtgcatttcactatggactacagcattaaatcagatgccgttgtgtcaggcagggatgctgtgcctccgttttcctcttctaaagttaccatacgaaggagtggtgaggcagcttttccctgctaacacacccatccctcgtctgcaggctggcactttgagacctctcttctacttcattgctgttttcaatcacgtccccacatttgacctggttatgccgggccatctcccagagatcctatcacatgacctgtggatagctcagcttgcagcagttcccattttatcttgttctgactcaggagctttgcagagaacggagtgtagtttcctaccaggggtcaagctccggcctgtagaggttgtctgcttcctgggatctacattgcccaccaagaacaca

SEQ ID NO: 378076 - DNA, 271 bp, Homo Sapiens
tatgagagggcagggagggaggatacagagggcaggcaggcatgcgcggcactaagggtgccctgatgggggatgacactgcctgtagacatgcaaggcgccccgggacgcactgtgagtcctccgcactgaacggggagcaatccctaaagccgtaccctgctcgcctgcaagcccggcaggctaagtctgggtgtccaggcagaggcttgaaactggcttgacggatgaaagggccccggggccaggtacaagcgcgccgtttccccgg

SEQ ID NO: 378077 - DNA, 482 bp, Homo Sapiens
gggggtggggttgctgcaaccagctctggtcacgccccttctcctgagagctcccaggactgcaggcaacttgctgaagaacttgggtaatttcccggaggccggctcacctgtttccagcccatcagtgatcttgaaacttacaaatactcagactcacactttcctgcctatccgcgcaaggtaatgaagagccaaacacatctcgaaatgcaccgatttttcttcttctaagggggcagaatctcgtggtgtgcccccaccctctctgtcaatgcctctattgtgtaaaaacgtctttagataaatttgtcgggcttggagcctggggtggccatttctttgcactttatctactacaatccaagaccagcaaacatgaggccacgtttttccagtggtttctgcctcccccaccacagtggtgacggaaatacgctccccagcaacagtgagaagacctgggattctgtagctcagag

SEQ ID NO: 378078 - DNA, 297 bp, Homo Sapiens
ggaggagtcacggggttcaaagagaatgagcatttattaggtgtccctgggtaccaggcaccgagtgagactggaagatgctctgagcgcccatcagctttcctacagcagaactgagagactgtggtcactgcgggcttagaacaaagcaggtccgggtgccccagaatcacctagaatctcgcagtcctattcagtaattactggccacgtgacatgggctgtgcacgtatgtctgtgtgccagggtttagaagacttagggtgaaaaagagaatgtaataaccggggatcctct

SEQ ID NO: 378079 - DNA, 183 bp, Homo Sapiens
ctcctaggagggccctgcccagcaaggttgcacccctaggacctcgtgagtcctgccctagctaaatctgagaggagcagaggcaggagcctgagccattgtgaagatggtgccctgttccctttcccaccaggcacctgggcttaagctgcttagaacttgtacccggctcgcataatcgga

SEQ ID NO: 378080 - DNA, 492 bp, Homo Sapiens
  misc_feature (233)..(438): n is a, c, g, or t
ctagagcatcccgtttatgcgagtccgggtacagctcgtgtagtttctacgggcttatgtcatgtctcagtgtggacacccgcaactgaggtgacagtggaatgccctgacctgatctctcattctctcccattgtggacccagtgctgtcctcacctgggacctcctgcctccacccaagtaggcgcccagagctgaaggaacagttgcctgactgggttcaggtgccagtnnnnnnnnnnnnnnnnnnnnnnnnnnnnnnnnnnnnnnnnnnnnnnnnnnnnnnnnnnnnnnnnnnnnnnnnnnnnnnnnnnnnnnnnnnnnnnnnnnnnnnnnnnnnnnnnnnnnnnnnnnnnnnnnnnnnnnnnnnnnnnnnnnnnnnnnnnnnnnnnnnnnnnnnnnnnnnnnnnnnnnnnnnnnnnnnnnnnnnnnnnnnnncgcttgagccactgcgcctggccttacttgggtgttgttccctgccctggaacc

SEQ ID NO: 378081 - DNA, 579 bp, Homo Sapiens
atgattagaggatccctattggcgagtccgggtagaattttctctaatggaggtttctctgacctccgacaatggggacaaagccagattcgcaggccctgtgaaatactgggtaccgccacacaactggtgtggaaagcatccctgcagagttcacattgaatcataggggcagctggggccttctgacataggcagatttttatatccacatcttggagaggcgacagcaatttcccttcattggcgagtctgagagactgcaaggcttccatttcccttaggcgagcttccccaagagttgccatagctgaagcagtctccttgctttcagttaaagctctctccaggtcactcagactctctaatttggtgctttttttctttccatttggcaagggctcctttaactttctctgcttccttttcaatcccaaaaggccaatatcacatcgaggacacagcacctctaagagagaatatggagaattctcagtcaagaatgtattaacagcacattcttttccaagcctgaacctcagctactagggtttccagtcctggcaaagaattcagatg

SEQ ID NO: 378082 - DNA, 276 bp, Homo Sapiens
gcaagagtgtgacaggagcaagtagatggacaggcctgcgtgtgaggacggaatgcaggaggggctcttgtgcggctgggtgtggggacctcccgggaactgtggagaaacggccaggtaactgcgtcatgtgggctagtagattggccagggcttcgaactgaaggacaataacggggagtagcttgtcaggccctgggagtgcctgagtgtaagtggagatgggtttggggtcactgagggatgcgtgggagcaatccctgtataggtacaggt

SEQ ID NO: 378083 - DNA, 419 bp, Homo Sapiens
tataaaggcgagccgggtagaggccgctgtattgtgcaggttctatgcaccaggtgaaacaggagtgaggaggaggcggactggtggctggagccaagcaggaggggagaggagagtggtaggaaatgagtcagaaaggcagagaagggagattattctaggcttgtagccactgagggagatgagaaactctgggggaattttgagcacgagaagttacatgatctgacttatgccttaaaaatccttttgtggtttacggaataagcaggtatgtagggatggggtcaagggtagaagcagagagatcaatttaagatcaattatgggaggttatgataagccctttgtgtatctgtttgtcctattagcacataaaggggactcagtggtcttcaacctttagcctacataagatt

SEQ ID NO: 378084 - DNA, 454 bp, Homo Sapiens
cgagtcgggtgactcgggctacctcggtctgcaggctgctgctggggcacgaggcaaggcgtcgtcaggaggagtgcatgtctgcgtgctcctcgatggacggctgggtggatgtctggaggcgggaaggaagggctggatacctccccagttccaccgaggatggtgtctgcacatcggctgggaggtcaggatccgatgggcatccgatgtaggctgagttgtggacgccgggcggcctcctgtaggtgccatctgctgtctgtggtgatgagccggtccttctcagcgtcggcaggacagccgttgacctggtgttcccggcgaggcttgggagaacggtatatccgtgagctcttcctgggctctatgaacacgggagggccacgctgtgccgtggggtccaggatcttgtcgatctgcatctgtgccctgcggtatacccggactcgcc

SEQ ID NO: 378085 - DNA, 419 bp, Homo Sapiens
gggtaacttcggcctcctggccctggcctctggcctccactgcagcccaacagtggttctctgccctcaggcaggcgaaattggtcaagcatcgggcaaggttagcctcactggcacaacgtccagtggctaatgcagggggaagcaaacctctcaccttccaaatccagggcaacaagctgactttgactggtgcccaggtgcgccagcttgctgtggggcagccccgcccgctgcaaatgccaccaaccatggtgaataatacaggcgtggtgaagattgtagtgagacaagcccctcgggaatggactgactcctgttcctccattggccccagaaccccggcctccgagctctgggcttccagctgtgttgaatccacgccccacgttagccactggccgcctatcatatccctc

SEQ ID NO: 378086 - DNA, 272 bp, Homo Sapiens
taatgcggatgctcgggtaccaaatggagataattgagccttcaaaaagtgcttgagtgcacaaatggctaccagaggattctgttcttagatggcatcatgctggtaaactcagttacttaaaggataatgttaagctgtatgctcagttgcaatgtgggtcagttaaatttagagatgctccttggtccacaaatcatggttacattgtaaatcatgtgcagttagggtaacattattatttgtgtaagtatatgtctttctgagaaaga

SEQ ID NO: 378087 - DNA, 872 bp, Homo Sapiens
  misc_feature (739)..(739): n is a, c, g, or t
acgctaggtactctgaggatcgtttcggcgagtcgggtaggcatctgagcgtttagaggtcgcccttgtccctcctaggggcccaggacatgggaagtgagacctgggctgtgccccccacacctccaggtgacctgctctcagtctgcacaagcctctccaaatcttctttcccctcactccctcctccctcattgtgcctccaccacgctgcctccgtaatctctgcccggatagccaccattttgccccaggatgggaatctcaagcctggagagggaacttaagggtggcagagccgtggagcacatcacacatccatgcccctgctccctccaccccagttctgcccccagaattaagacaattaattaaacactgatcctgctccctaagtctgcaaggggagagctgggttgttccagtaggagaaccttggtcttggtccatccttcacgaagggtcctggaaagagtggcggtactgacagtttaggagaaagctctctggggcggctctgctagaccaccaacccttaggctggcctccagccaggcagccttgctcacaccctgggctcaccttgccctgcacctgagaggacctttcctaaaccagtcaacgaagagaagacgctttagggcctctgtagaatgaaccttccttgacctgagaagagggggccctcagggccattgctttcccggtgtagtgtttcgctcagttcttttctcagcangggagtgggaacgtgggctagccaggccttgagccccacgtttacctttctcctttcccgggtccctgttcccttcccagcgaaaccccaaagagtcaggtagggaccctgttcttcctgagacgcaaccggc

SEQ ID NO: 378088 - DNA, 553 bp, Homo Sapiens
cttagggagctgggtgcctcgatgaaaagacagattaacgtgctgcaaaatgggatcaagagttctgctcttggagcgagggggaggacaaggcgcagagagaaggggctggctaggagtctagaaagcatggtggcggagggaggcccctaaggccactctttcacaaagctgcatggtccctggctcctggctcctcggccatggtgggacagcagaccgctcctctccctccactaggcagacgctgccaacacaggggcccgggcaagtcctcatttccgtccctcttgctgcaggagagcctcccatgcctcctgggtttcaggcctcgcctcccacatgggtgtcttacatcctgctgagttcgagggtgtcaagggtgctgtttctgtggccaggcagccagaggggtgtgcgctagaccaccaagctgctgccctgcacaggtggtcccggcgaggctgcccctccatcttttgcacacatggggctgcccgccctcctcctgctcccagcttctccctactcactgtacccggactcccttaaa

SEQ ID NO: 378089 - DNA, 125 bp, Homo Sapiens
cagcgtcatgattatctgtagctctgtgcaacctgaaactcctgggcacaagcaagctttttgcctcagcctcccagctgggaccgctggtgcacatcaccatgcctggctaattgctctttttc

SEQ ID NO: 378090 - DNA, 272 bp, Homo Sapiens
gactaaaatgtcatgacatagtgcaggacgacggactgccaacgctctcaagggatttcttggagaaaccattcaggatgaagtaaatcaaaaaagggaaagtggatccaggaaatgaagaccagcacctaagagaggtgcagatcagatgactccaggaaaatgggtattggcaaaataacaacacatctgaataccttgagaggtttagacaatagatgaaagttcacagctgaggccgtgcacagtggcttatacctgtaatcccagca

SEQ ID NO: 378091 - DNA, 137 bp, Homo Sapiens
aagactagtcgaccaggtaaggaggggagctaagagatagagagaaggggacagaggcaagaaaagatagtagatcaagaaagatagagaaccaggcgtagagggctagaaggagaatacgaagataaaataccagt

SEQ ID NO: 378092 - DNA, 380 bp, Homo Sapiens
  misc_feature (109)..(230): n is a, c, g, or t
ggcggcagtggcgtaatcacggttcactgtggccttacctgccaggctcaggtgatcctcccacctcagcctcctgagtagctaggcctacagaaacatgccaccacgnnnnnnnnnnnnnnnnnnnnnnnnnnnnnnnnnnnnnnnnnnnnnnnnnnnnnnnnnnnnnnnnnnnnnnnnnnnnnnnnnnnnnnnnnnnnnnnnnnnnnnnnnnnnnnnnnnnnnnnnnnatgagctgccatacctgaccagaccaagagagttaaaaactactggaggtaagaaagaattcaaagaattgacaattagatcacaaataatatcttatcaacattggatgccagaaaacaacagaagaatgtcttagagaagctccttgt

SEQ ID NO: 378093 - DNA, 542 bp, Homo Sapiens
  misc_feature (317)..(447): n is a, c, g, or t
aggctggagcagagcacaggagcattatcctctgcctggagggttgggagagccttctagggaggaggtaatagcctaagccctgtcttgagggatcgagtaagaattcactaaagcaagcaaggtgggatgggttgtagccaaagcaacagcatgagcaatggatggagtatttaggaggactacatgcagttgggggttggctggatggaacagtgtgaagtaggaattcctaggaaatgagcctagagagcctggtgagtgtgaacttgctggtgggccttgtgtaccttgctgaagaattcagggttatgggnnnnnnnnnnnnnnnnnnnnnnnnnnnnnnnnnnnnnnnnnnnnnnnnnnnnnnnnnnnnnnnnnnnnnnnnnnnnnnnnnnnnnnnnnnnnnnnnnnnnnnnnnnnnnnnnnnnnnnnnnnnnnnnnnnntaatatgggcatggtggcgggcggctccagtcccagctagtgaggaggctaaggtgggaggattgcttgagcctgggaggattgcttgagccagc

SEQ ID NO: 378094 - DNA, 403 bp, Homo Sapiens
  misc_feature (183)..(295): n is a, c, g, or t
cccagggagggtgaaccggcccaggttgcgaatagagcagatgaaacatctctcctatgctgatcagtagtgggattgcacctgtaaaaagccactgcactccaacctggacaacacagtgaaacccgtctcttgaaaataaaaaattaaaagaattttttaggctgggcacagtggcttatnnnnnnnnnnnnnnnnnnnnnnnnnnnnnnnnnnnnnnnnnnnnnnnnnnnnnnnnnnnnnnnnnnnnnnnnnnnnnnnnnnnnnnnnnnnnnnnnnnnnnnnnnnnnnnnnnggcgtgttggctcgcacctgcagtcctagctattcgggaggctgagacagagttgcctgaacctggagggggaagttgcagtgaatcagagatcgcgccactgtactc

SEQ ID NO: 378095 - DNA, 146 bp, Homo Sapiens
  misc_feature (56)..(66): n is a, c, g, or t
tggaatggtggcttcaggccaggagttcaagaccagcctaggcaacacagggagannnnnnnnnnnaactctactaaacattttaaaaattagccgggcatggttgcacacacctgtggtcccagctactcaggaggctagggcag

SEQ ID NO: 378096 - DNA, 136 bp, Homo Sapiens
aactgtcgacaggttgtacattagatctctgggcatatcttacatatctgcaactttataccctttgacctataatctccctattttccccccaacctgtaatcaccattttattatgtttctatgtatttggctt

SEQ ID NO: 378097 - DNA, 373 bp, Homo Sapiens
caatatggaaaaggagccaacctgaggggtgacgagactgagctgaggacactggttttcttgcctttccccgagagagactcagtgagggtgggctgggagccctggaagccccctcaaatgggtgggaaggtgccagccatccttgagaagggcaaccctctccatgtgagcacaggcaccagagaggggcaggcgcctggagggtaccggggcacccccagctgcccatggctggacttgccctttgacaaggggccctcccagtgtcatttgtatctgtcagtactcttggttgcaagggacagaaacccttaagtagttcaagcaaaaaaggattggctcatgtaactcaaaagtataagtgatttca

SEQ ID NO: 378098 - DNA, 327 bp, Homo Sapiens
gcagagggtggaggccctgaatactcaaaatctcggtaatcctcatcttcttggaaagaagtatctgggtagaacttttcctgtgaagagtccatcagggaagatggtctctccattccatcagaaggcgtgcttatagggagattcactgcccagaccaaagggtcgatatgtagatacagaattggagagctctcgggggtagctttcatctctcccaggtgggtggtgatcttgtactgctgggtgttgaggaaccagggctaatgatcttagaaagcaggacagtagtatctacactgctggatgtgggcttgtccatcatct

SEQ ID NO: 378099 - DNA, 388 bp, Homo Sapiens
gctccgagagaaatgccggaacccagccgagctgcggctggtccacatcctggtccggagcagcgatccatctcacctggtctacatcgataacgctggcaatcttcagcaccctgaggacaagctgaactttcggctgctggagggcatagatgggtttcctgagtctgccgtgaaggttctcgcatcagggtgtctgcagaacatgctgctgaagtcgctgcagatggacccagtgttctgggaaagccaaggcggagcccaggggctgaagcaggtcctccagaccctgtgagcagcgaggacaggtgctgctgggacacatccaaaagcacaacctcacactcttcagacgaggacccataagccgcacacagcctgagtcaat

SEQ ID NO: 378100 - DNA, 600 bp, Homo Sapiens
gttgtctctgtccacttccagcgctcctggatgcatgcggctgttggcacaggcaaactcgcctggctggcactggggtggaggcacgtacgatgggttcgccaagcaagtgacgccgtctgcgtctacactggtgctctgccagggcgctgtgggtccccgggtggcaagcacaggctgtgcagccgccattgttcacccggcatttgttggtgccaacttgctgctgctgggcatcatacattcggatctcaaagatggggggccgctcactgcgcagaagggtcacagtggggggtgcgcctcctacaccccgttccaagcggtagacactgccactccgatactcaatccagaacaggtagttgccatggtgacacaggccaaaggcgtggttcagctcaggaccttcatacacaatcttccggtctgtgccattgagcagtatcgtctcgatgcggtcgtacaaggcatccacccagtagaggcgcccagccgggatgtccaggcttagcccattgggccatagcactgtcgtggaggtgacaaatatgtaacggtccgagccatccatccacgccctctccagccgcccacgcc

SEQ ID NO: 378101 - DNA, 407 bp, Homo Sapiens
attgcgaccaggttgtagaaaactttaagcctagaaaaatgaagcaaagacttacatcaagctaaggcaaagaatgcaattttagttaatgccactgcccaaaagtgcaagcgtatattagtgcttacaaaacttaagctcttaaaagaaaagctgatactaattaccacacacaccatgattcacatgtatagatgaacatgctatatgaataaagggaaaatcaattagagaaccagcaataattcaaaactaaaggataaatctgtagtatttcaaatactgtgttgagtttatgtgtttttcctagcacttcaaaatatacattccagttataggaaattaactatagcaatcctcagtccttcaataactaactgatcaaaaccaaatataatttatatgaa

SEQ ID NO: 378102 - DNA, 288 bp, Homo Sapiens
ctcgtatatagtttttctagtactggactgatcctccgaaatgcaccttcctccacgatccaaagttaaggtgtcgctggagaacctgaatccaactagatttgggaaaaaatgaattccaaaggtttgtaatggattgtatcagttataaggaaaggggaaagtagactgttttgatcagctacaaaatatgaaaagtaacttgcggggagctgttcagggattcagaagcagctcctagcttcctctctttgctgttttgttgattctccacgccctgtcttcaac

SEQ ID NO: 378103 - DNA, 391 bp, Homo Sapiens
acacctggagggtccttcgcacacctgcagagcccgtcacacacctggagggcccgtcacacacctggaggactcatcacacacctggaggacttgtcacacctggaggatccatcacacacctggaggactgtgtcacacacctggagggcccatctacacacctggaggacttctcacacctggtaggatccatcacacacctggaggacttgtcacacacctggagggcccatcacacacctggaggacttgtctacacacctggagtggcccatcacacacctggagaacattgtcacacacctggagggcccatcacacacctggagacttgtcacacacctggaggcccataacacacctggagacttgtcaacctgtttaagtc

SEQ ID NO: 378104 - DNA, 461 bp, Homo Sapiens
cacctggaagtcccaagacattctaatggaagagattcccgtcctaccacaggcattctaatgatagagatacctgggccaccccaggcattctaatgggagagactcctggctgacaacagacagtctaatgatagagaaacttgggcgaacccagtattctgattggagagattctaggcagtctgatagtgacaactgggcaactacaggcattctaatgggagaggctaatggctgaccacaggcattttaattggagagaatcctgactgacccaaggaaatttaaggatagagacacccgggtgatcccagacattctaacaggagagactcctgaccgaccaccagacagtctaattacagagacacttgggctatcccaggcattctactgaaagtgactcccgttgactccaggcagtctaatgatagaaatacctggtcaagtctggtcca

SEQ ID NO: 378105 - DNA, 435 bp, Homo Sapiens
  misc_feature (17)..(17): n is a, c, g, or t
gttcagtttactctcangcttctgctgcttttagacgtttctgttgcacatatctgtcagtagttttccacatgtgaataatattcaatgatgctagtcaatgatttccaagggaagaaaatcttgccgtatgtcattgaagtctttgccatatttttccagtgcctcttcaaataagctagcttcagaggctgaccattcctccatttcatctctgcataaaacaggtcctccgagtggtactaagacactaatggcactgctcaaatcatagctgtgtctatacaatgtatccatagcgtgaaacataggtgatgtctcgggaagctgcagcagcactcatatgcaaactaggctgcctcacagaactgtctgcaatccaggctactgcgaatgtcccaacagcacgtgctactactaaaactgtcactgcta

SEQ ID NO: 378106 - DNA, 546 bp, Homo Sapiens
ggaccagactttcgacaggttgggaagagccccatcatcttaggcctacgtgctgaagtctgcttgggcgcggatctgccgcctgtccgcggtcccggagtcagggaggaatgatgtcatcgctgctggcgcggagggaatggaagggggagggcaactcgggtgcaccgaggctaggcctaagggagaccatgcttgctggccaccgcccagggggctcccggacctcgctagtctgtcaggcaaccgggtgggagacgtggaggcctagccagctcgtatagtgaggggggaagagagggaatgtctaggcagtcttcgctttatccccctggagcctgagctggaactggaaggaggcaaggtgggctacaaatccgaaagtgtggatgccccatttctctgagctgtgctggctggagcagagctgagttactccaagttctgaagttctgcttctgctgcttaggacagcggtggccaagaagacaggtctacccgtatgggcctatagccacctggctgacagatgtgcttgtagcaacg

SEQ ID NO: 378107 - DNA, 590 bp, Homo Sapiens
  misc_feature (577)..(577): n is a, c, g, or t
aagaaccggagtctgagccgagtccgagtcctcgggctgaaggcacactgtgaaaacttcaacctgctgctcccgagctgcgtggaggactctgtgacccccattaccttgcgtctgaacttcacgctggtgggcaagcccctccttgccttctgaaacctgcggcctatgctggccgccgatgctcagagatacttcacggcctccctaccctttgagaagaactgtggagccgaccatatctgccaggacaatctcggcatctccttcagcttcccaggcttgaagtccctgctggtggggagtaacctcggagctgaaagcagaactgatggtgtggaatgacggggaagactcctacggaaccaccatcaccttctcccagccccgcaggaatgtccaacacgctacgtaggacagaagggcacagaaacaagggcaaatgcagctccctgcacctgacatgcgacagcgcaccagtagggagccagggcaccgggagcaccagctgcagaatcaaccacctcatcttccgtggcggcgcccagatcaccttcttggctacctttgacgtctnccccaaggctgtc

SEQ ID NO: 378108 - DNA, 348 bp, Homo Sapiens
actgccaagcgaaagtattgggagaggagagacattcgaactacaataaagaaacaaagtgtgcaaagcatggggtctgtgaaaccagagttcccgtatcacagcagtactcaaatgtgctggagtaaagagaggaaaaaggagggagggaatgcaggggccaggcattctatgccatggaaaggactttctattcactgtaagaccaccagggaactgtggaagaattgtatgagagacaggagttccgcaatcaatctgatcatattgcaatagggtgtactagcatcattctgtccccattagagttgcattgttcaaactctagatggggaaacactggcgaca

SEQ ID NO: 378109 - DNA, 282 bp, Homo Sapiens
ccccggctttcgccaactgtttccccaaggaagtactaggaactgattcttcccttcaaagaagcctggaggctggagaaggacactcaggtggggactggttttgtgcacataactacttttgcggtagctctaactcagaaagcatgaaaccattcataacttcccagatgacagagacgcaacacagtgtggtggaaagagcgtgggcctgatcccagacatacctagatgtgaggcttcgcgcttgctaggctgggaccttgaggggtaccgagctcc

SEQ ID NO: 378110 - DNA, 167 bp, Homo Sapiens
cagcaagtaataataagctaagaatgatcttctgtcttcatcacgtaaggaacaatttggagcacataattgtgcaacgggaatccaaagagtgaacacacaaaaaatcagggaggaaacacaggaggtagaagggatgggggagagaggatgggaacatgtagaaa

SEQ ID NO: 378111 - DNA, 172 bp, Homo Sapiens
tccccggctttctgccatgtccccccgagacagagtctcgcttcagtcccaggctgtagtgcagcggcccaatctcaatagctcactgaaacctccgtctccacacggttcaatgcaactactcctacctcagcctcctgagtagctgggactacaggtgtgcaccacaaag

SEQ ID NO: 378112 - DNA, 340 bp, Homo Sapiens
cgcctccaaagtgctgggattacatggcatgagccaccgcacctggtccaggtacacttctttatatgacctgtcctagttccccttggacattcaggtttggagccctgacacttggctacataggggaagagataaagctgcaaatgtgctgaggggaggtatttcttcatcctggtacctgataaggactttgccgagcttttgagccagcacttgtggaaggagtaggattccaacattgataaggaagaggggctttcaggtgaaggtcagaagatgtgaggcagctggaaggtcaggcagggacagtggaattgttgaaacctcccatggaatt

SEQ ID NO: 378113 - DNA, 416 bp, Homo Sapiens
tccctagcagttaactgctttctgcagttgcgatctctatgaaactttcaggctcatatcaccctttcgtttagcaagttaatgactttatacttggttaacaatttatattaacttctctctgtccaaataacttaaatattgtatgcatcggggttcccatatgagtgtatggatgaagaaaagagaggttttaagatacaatgctataaatacatttattttcttaaaaatcaccatttcaaaatgccataataccttgtcactttgctccactgaaaaggtatctagcaggaatagagatattgcttgaagaaacaggagatagtggctatactcccacatcatcataaatgtgtaagttgaagcactcatcaacaagtagcaaaacctctagggaaacattggcgtacccg

SEQ ID NO: 378114 - DNA, 476 bp, Homo Sapiens
tgtttcccaccctgtcatcactcaatacacaaaacttaaagaattagtctctaatctcccctaatccttcagtcctaaaatcttctattggtcaacctgattagattacacggacctgcaaacacagatgtcagacacagcacaccaaatacacaattaaacccttcttcaggaatatgtggacaagacctcctaagtaatctcagtggcaggagtggtagcatctttatctgaccacatctttcccattagctcctacaggcatgccttcactttcctaaaaatatcccattatgagcaaactcttcccctgacacctttataattttttccccataaactcaataaagtagtatcaccctactttaagtggaaaaagtccaaaggtcaccaaacttttctttaggcagtgaggacagcaacaagcatcaacaagacttgtgaagacacaaaagattttgcactctggtgtagag

SEQ ID NO: 378115 - DNA, 641 bp, Homo Sapiens
  misc_feature (239)..(239): n is a, c, g, or t
  misc_feature (594)..(594): n is a, c, g, or t
  misc_feature (596)..(596): n is a, c, g, or t
atggaaggaggcatggagcccgagtaggagcagtgtggcagcagttcgtgaacgtctgtgaggaggtatgcatggagaagagagggcacagctgtgcctcgtcatcatgaacctgtcctatctgtgtagttctttaatatgtcagcactcactgaataaatatacagtcacagaaaaagggcaatgaatggttatccggtccctcctttattacccgggtgatggagttgtgacatggntaatgttaaaccccactctgtgccagacttcccatgactttttatgccagacttttgttacttcccatggatttcttccaacactgcctgttacctgtggcacaaaatcaagaagcaaatagttcctgacctctaaggagtaagaggaacaggcagcattagtataaatgactcattgtcattaagctttggaggaggcccttgttttcctgtgcttactgcatcctagccatggaactgtggctaaaggagtgattatgttagccagatactgttaatggtacaacttgagagagaatagtatcttcttttttatttagtcacatgatgttccacatacatgtgttgagttccnangccatgatatcctactagatactccagaataaataaaagaagtaa

SEQ ID NO: 378116 - DNA, 481 bp, Homo Sapiens
cagatgtgggatctggggatcgactggtctgagcatggggggtgttcgagcaggctgaactccactaatgctgaaggactccgaccttgggggcaggttggggtcagatatcctgttggcaaccttgtgaggcatggcaggggaactttgccggttgagccttgaccgttcttctacctccttggcccatgctggcttctcactaggactcattccttctttgtaatggtacagtggcttcttctccacaggcctctgctcctgccgctgatgctgaagggaaactaagtagtctctttcttgctttagctgcctctgcagtctttctgcttgtctctgttcttccaattgtttgcgcttatattccagaagtagagcttgttcatgcagtagctgctgctgcaagatctctaactgtctctgctcctcctctaactgtcgcctgatgtcgtcaggttcatgccacgcacgacacccaaaa

SEQ ID NO: 378117 - DNA, 305 bp, Homo Sapiens
tacagtggtggggggacgggccggggtctttccccctcttggcgacagtgaccatggcattgggctcagcagaccccctcccacatacaccaggccccgcaaatccctgtgaccagtttcactgccaccatcttggtgagcgtgtggtgtctgacctccagaaatgcacatcgacccccagccagcccggtgactttgtcacctgtgttcaagtgatggctccccttcccttcacacccacacccacctgacctggggacacctggggccagtgtgactctaggcctgctcccgccgcgccccag

SEQ ID NO: 378118 - DNA, 205 bp, Homo Sapiens
gacaatcaagattgaggaaatgcaggcaagagaggcagagatgaagaggtgcagatggaaggctgagaacaatgcaaaaagagagaaagtaaatacacagagagggacagaacaaaaaggtgagaacaagccagtcccgggattcaaagaaacagaaaccgcctgcagtaacccctagcactaccacccaccactgcttagtgca

SEQ ID NO: 378119 - DNA, 251 bp, Homo Sapiens
agggtcccaaatgaaaccccacgttcaagcaaagatcagcctgaaggctaaaagaccagattgctggtcctggatgaaacccaccacgcagagtgggaacttctgttcctgtttgcccaccctttcccaattgttctttctgaataacgccttaaccaatcgaatgttgccttttccagtaatacctacagcctgccccataccccacacactcatcagcctgaagttagcacctgagtcccaccactgcc

SEQ ID NO: 378120 - DNA, 269 bp, Homo Sapiens
tgcattctgcaggtaactctaaggatcccgttttgggctgtcgtgcgggatgaatcaactggagaaattacgtttacatgaagggagcagatgttgtcattgctggcattgtgcagtacaatgactggttggaggaagagtgtggcaacatggcccgagaagggctgcgggtgctcgtggtggcaaagaagtctcttgcagaggagcagtatcaggactttgaagcccgctacgtccaggccaagctgagtgtgcacgaaagcccaaaa

SEQ ID NO: 378121 - DNA, 488 bp, Homo Sapiens
caccgtttgggctgtcgtgcccagcgaccctgaattcgtgtagggggagaactctcggtaacctctctgagaattggccaaattctggttctgcaagatatgagactttgaaagatgctttgctgttctgatctctacttacctcatttataaaatgtaaatgatgatagtgcctgcttctacagcaatagtgaggattcatcgagatggcctgtcatctggcagaaggactggcccactataagcacttactgaacattaacagtgcttgttaatgtgaagactgaagctgggtctcgaatgaaggctacagatgacaatctagtcatttccccaccccaccccaggccctcaaaaggggaatctggaagggctgtttgccttggcactgatgagctccctctccctctttgctctccttcccattctctctctctaggggacactacacagaaaatgagaactgctcactatcctaccccagccga

SEQ ID NO: 378122 - DNA, 388 bp, Homo Sapiens
ccctgtctgaccgggccatgttgtatgttccttgctgtacacgtggttgacaaagaaaagggaagatggagctgcgatgttggacatgcctggcccccagcacatacatgccctgccgagcaaataatgaacgtaactcacaaacttcctgcttatcatcaaacgcacgcatccacttatcatcaaacacctcgggtgacagaagaatgcaggtcagctccctgctgccttggcattatcaatcagcccaggaaccatcctataaaatctccagcaagcctttgtttccttgcagtcagctcctcttccactgattctgcctgttgctccctgataacatactttgatactgtctttaataaatctgcctttcttcacccaaaaaaaa

SEQ ID NO: 378123 - DNA, 406 bp, Homo Sapiens
tgctgcagcacaagtgaaagaccctctccggcctcccttcagactcggattttacatgtgacaatttcacacacggcatttgcctctgcatctgcactcgccatagctcgagacctgcagcgcttccgtggggatcatgtgtcgaaatctgaaggggtcccagtcctcataaatggaaagcctgtgagatcctacaagtttcttcttctgtttggaaccatctttatacacaaggaccacagcagttttgaagacgaatgctgccaactctggttcctttttccacttgcccagcgaggccggcgggttcagccagatcacggtagtgtgcaaaagcaggtctcccatgctcagatctgcaacctcttttttctcaccagtctgttcagcaatcagctggtcaaac

SEQ ID NO: 378124 - DNA, 485 bp, Homo Sapiens
gggtgaggtacagctacgggtgaggcagctttgttttagactggctggaaagtcatgctgagcagcaagaggacagatctcttttagaggagacagccccacctggctgcaccctccaaggaggccacagggcatatcatccaggtgggtcaggtggcactggggctcacagtcaagccatcatcaggttactgcctctgtttcatcactgtgaaagttaagccatgatccaggtctctgggtcttcctgagcaagtcaatgcagagccaaagcctgtgcacaaatgaataacctcacaaggatgagagctgtgtgtgattgatggctctacacaaaccatctcagcaaaggagttcagtaagagccttgtgagcatatgacactctccagctctactaaagtgatagatgggttcacacggaagctactaaatgggcctcattgcaaaggcatggcttcaaccatagctgtacctcacccgggt

SEQ ID NO: 378125 - DNA, 180 bp, Homo Sapiens
ataagctgcttcatgtcatgacagtgagatgggaacagagcaggggtggtcccaggcagtggtcagtgggacactgcctcgcccatgagaggccatctcctgctctcctgtggggaggttccggattcttgaggtataatttaccagcagtgaaacacacccgtagctgtactcacccgt

SEQ ID NO: 378126 - DNA, 492 bp, Homo Sapiens
ccgctcctatcagtgcttactcgacgtgtcccgtctaactctccgtcgtcgtagttcccattacctcatgtattcctaggtctagagtctcccctctctatgtccattacctcatgtttccaagtcttcatcagttcctggatgtgtctggttccaccctcttttccagccctttggtttgaatctggacacgtctaattgccaccagtctccttgctcccttttcaatcatcccacaaaccgccaacttcgtaaggtgtaaactccttgtctgctttagtcttcatccacgtatgaaggtgaaagtcagctatgtggtctgggcctgctcaaaatgactctcaggctaaccctcccaccacatttctctctcacatagaaactccaaccaaaccgcatgactcgctgcatcccacacactggaagtacctgttgctggggctccttcttaaacaactccacctgcatgataggaggtggggggtaccgagc

SEQ ID NO: 378127 - DNA, 505 bp, Homo Sapiens
cccccctctatcatgcaaacaaaattaagatgcccctcctcaactcaattcggtgggatacctttttttatcttggtgttatttgggtattctgcactaattctggggcaccaggtaagtttctatcgaggggtagaagctgacttctgtccccgtcccccaagaccaaagaggaagcctcttctgccaccactgaaatactatctttagaggaaggcatgctattagctcatcaagcacaaaacacattcgagctaaacattacagtcaaatgtcacagccacttcaaaatagaggtacccaaaaaggcagtcagtcttctcagcagggctttgaaaccactgccaactgagaacttgatctcaagtcttccaacaccaaaacacctggtggaataggtacaactaacgggcagacagcctcaaactccattcagctccacagcgcctctccatgaccactgcagctcaacctctgtgctgggaagtgcatgataggagggggg

SEQ ID NO: 378128 - DNA, 434 bp, Homo Sapiens
cccccctcctatcatgcacaggtactgaacaagtaaaatggctgtagccaccatgtttttgggtaacttttctttaaaacctacccaccaacagcctctgctgaagaggttggttaggtaaccatgtttatactctgtgatggttctccaggacacagcttattggaccagggctggacacccgatctaacgtttgccaatccattgctggtgagaaaacaatcagattcaaacttcgaattctgaactcagagaaccagaggtcaaactcagttgtcgggagagatctcaactgaaaagtcatgcaagtctggtcctgagaaaccaacgccactcaaacaagctgctgtcatggtcggatgagaggagaaggcaggctggtctacagttagaagagcatagctgtgctttaaatctgcatgataggagggggg

SEQ ID NO: 378129 - DNA, 104 bp, Homo Sapiens
gtaccaaaaataggagactgtgaaaatgaatctggaggtgacccaagcattgaattcaacaatccaggctgggtgcggtggctcacactgggaggctgaggtgg

SEQ ID NO: 378130 - DNA, 551 bp, Homo Sapiens
cccccctctatcatgcaaagcccttcgctgataccactatccttgtccatttcagagatggggacactgagggttaagcaaggaatgtcattagcctgaggtcatatagtgagttagtgatagggctgggccacaaatccactttttgggttcccaggtcaatgctcagcccaggctgaaagccatcgatggtctctgagcagaggcatgactgagtcaggtctgagatatagggaaaaaaatcctggaagatatttgaagagaaaggtaaagacaggaatgggagagaaacaagagctgttcaaacgaagacttaacatagcaggcctggaattgttatccttagaaaaggcctgcttgtaaggtcagcctgtggctggtgtctgggaacttagctgggaaacagttccctgcactgttataaatctttccctaactgataagagtaggctcgctatgcctggactgtttgcgacaaacaagtctggtttatgctgaacatctgcatttccttctggaagtgatgaaattctggtgcatgataggagggg

SEQ ID NO: 378131 - DNA, 319 bp, Homo Sapiens
cccccctcctatcatgcagtgtctggatgtctgagtgtaaccctgaaatacaaatagggattaacttggtgtgtagctgggagaggaggaagggagagattccaagcagagagactaacatgagcaaacattgagggggtaaaatacctgaggaccaccatccaagtagttttctgtgtaaaccatgtgtggaagacatatagaaggtatcagaaatggagaaaatgaaagatgagggtcagattttggagttcctcgttcgtcaggcctgaagaatgaagactttatccaaggtgatcacagggaggatttaaacagg

SEQ ID NO: 378132 - DNA, 490 bp, Homo Sapiens
ccccccctatcatgcacaaagttctggtggagcatagtgaaaagactttctacccacctcgtgtcttccggggaactctggggtaaggcctctatagagtgaggttgcttttggattagagctcgaaggatgaataaatactgccaagtagataagttgagaaaagagtgttctagacaaagggaacacgtttagtacaaaaaccgtagagggaggagaaaacatggcatgatgggagagctagaaaggattcagtttggctattgtacaaatctgaatgtggtagatttcctatgaagctactacagccgaagcttgggggaccctcacttcacgttgcacaggcaccttccaaagcccctatctaactttatatctttataattttattcttagatttttttcttaggagggtcccctttactaatgttcaagttccacaaaagctggatctgcttgtgatggatcaggttgcatgataggagggggg

SEQ ID NO: 378133 - DNA, 210 bp, Homo Sapiens
gtgtgagcccatcgcgtccggcaagccaagctattattatttggcaggacattttaggtgctaatacagttttgtataaatattgtaagtatcagggtatgtgtttgttttacaaaacttaaggaaaacaaccctgtctcttagaactgtgtgtgttttcaagagtataatatttcttgccagtagataagatgcatgataggagggggg

SEQ ID NO: 378134 - DNA, 435 bp, Homo Sapiens
agtggagagagaacgagggaacattagctagaaagaatgagacccattccaacccttgcaaagggggaagaaatgagacccaatatgaacgtcaatgagatgaaactacatttaaattaactgcctctaggagcaggaagagaacacctaccctagaaaactgagatgccagttcttaaatggaagaaatctctcagaggaatttcaggccagcagctctcaactgggctgggggaggagttcgtgtgcatcttactacccaagggttttttccttcccccagttctcactttcccttcccaagcccatcagaatggtggcttggaggcaaggctgccagggcaattccctaaaacacaactcccttcccaattccaagcatgagcatccaaacccagaaagttatgtagacaaccctggccttctctctccact

SEQ ID NO: 378135 - DNA, 295 bp, Homo Sapiens
agtggagagagaaggtgagagtgaccaggacaagctctggggctcaaatggggctgtggaatttcaactgcagctacagtgtgtggaaggactttcctggctgtccaagccccagtccctctgcctctggcagcggtctgggaccccctgggcatggcaggggctgaggagccccacagcctccaggcatgcatctgagatggttccagtagcccaggagacaaggactgacccttggctttctcataagcatcctggtaacactggacttcattgggctcatcacagggaaatg

SEQ ID NO: 378136 - DNA, 508 bp, Homo Sapiens
ctgctccgccctctctgcaatggaagttgtgaatgtttgcaacgaatccagctcacttgctaaataagaatctatgacattaaatgtagtagatgctattagcgcttgtcagagaggtggttttcttcaatcagtacaaagtactgagacaatggttagggttgttttcttaattcttttcctggtagggcaacaagaaccatttccaatctagaggaaagctccccagcattgcttgctcctgggcaaacattgctcttgagttaagtgacctaattcccctgggagacatacgcatcaactgtggaggtccgaggggatgagaagggatacccaccacctttcaaggggtcacaagctcactctctgacaagtcagaatagggacactgcttctatccctccaatggagagattctggcaacctttgaacagcccagagcttgcaacctagcctcacccaagaagactgcacacacacatctctctcagcctccccccgccgcgtg

SEQ ID NO: 378137 - DNA, 521 bp, Homo Sapiens
gtagaggttggattgaaaacaaataagagagtcagaaaaccagaattgagtgatagtatgggatcagctgaagcacccctcttgccttgacagatctcactgagcctggccctgtggaattactggtgagtgaggatgggaaggaggtcgttgcctttagcacttgagaactctaggtggctggtcccaaaacaggacggggctgtttaaatttagcagttcctgaatagggaccaatggaggtctgaaaaaataagtcaaaaatataaataccaaagagataatgaatgaagagtcatatatttatcacccactctcaactgaccctaaactttagtgaacaataaaatggacattagatctgttcacctgtgaacttgatttcaggatatcaccattaccaattatggaggatgaccattttctgcgagaaacgagacaagatcaccaaggtacctctagctatcaattgcctgacatggggaagacaactggagggaggcaactgctgcacatgacaa

SEQ ID NO: 378138 - DNA, 523 bp, Homo Sapiens
atagtaagtcaagttcagaagttcactattaaatccagaccctcccaaatccagaccctccctggccccctgcactgtggaaaaaagtgataaactgcattggtatttaaataaaaatctgatctctgccactcgaagatgtaatcatcactggggattactttcatgcatctttaaaattctttcagattaaaagatctgtcagagtgtcaataccaatactattaagcccaacttgccttgacttaaagttttaggtcaagacctcaaaccaaaagcaaaaacactgccaggcccaaacactgctgcattgagatgaatgaacaactactctgctgtccacagtttaatctgactgtcccttttttgcatttggaaagtgaacttgagtcagatctaagtaaaaattatttgctcctggaatgacagctcatcgtggctttaaaatccttttttagaatgaggggcataaatacataaatatataaaagtaacccccatcaaaaaaatgtaaccagctagg

SEQ ID NO: 378139 - DNA, 151 bp, Homo Sapiens
ctgctccgcccctctctgcaaggcccaggacagctgtgtgtctgcggctgggtgagagaaggcagtgcctcatcccagagtccatcagccagccgtgcctagggcagtcctcccaacttgtcaacacgccatatgcaagggcatgatggag

SEQ ID NO: 378140 - DNA, 527 bp, Homo Sapiens
agatccccctttccatcctgacatgtcaacattgtttgcttagatcactgtctaattaggtttaaaatctacacacccctcaggaggaataaggttctagatcagaggttggcaaactatggtccatggcctgttgtctgtttttataattcaagtttgattggaacacagccatgctcattcgcttatgcactgtctatgactgctttcaaggtgcaatggcagagttaagtactactcatgacagagactgaatgcttacaaagtctaaaatttttactttccagaatgaccattttagatgagcaacaaatccaacccactataaatttagattccagcccaagaccatggcctagtctaatctagatcacctcctgctgtggttctagacagtgctgcccgccaggatctaaaaccagagcctaacattggttccctggtgcttgggttccaaatcctactctgatctcggcagatgggccccaggactcctctctgggatggaaagggggatgggtaccgag

SEQ ID NO: 378141 - DNA, 391 bp, Homo Sapiens
tcggtacccagatccccctttccatcccaaaacagcactggcctaaggcacacagaagtccataacttcccctttatgtttacagacaactctcagttaccttaaattgaaacattacttttagcagccatagatgaataggagttgactctttgcaacaggagggccaaaggtacctggcatggaagatatcctgtgcacaaccataaatgtgtagatgttggcaacattgcagatgatagacaggtgaaagatagatgaatgaatggatgaataaacacaacgatagctagatggatagcgagatggatgaacagacagaaagacagatgaacaggaagaaagagaggaggatggaaagatggacagaaagataaatggatggaaaggg

SEQ ID NO: 378142 - DNA, 404 bp, Homo Sapiens
acattagcagaggggagaattctccccaagtaggacccctggtcttggcactgtgagaccccagtaggctggggcagactcagggtggaaaaggcaggttatgccgggtttgggtcctgggagaccttcccggtttcctttgtccattccaggcattcagtgatagttctagggaggggagacacagatacctaaaccgctagagcttggggaggttgcagacaacctgttgcccactccgtgcgactacctctgagagtcaccttgtgcaagagagagggctccatcctggtagagaccaataaagcttttaatatttaaaagttcgggcacttaattctggtgatctgggttcacggttacactccgtctctctgacagctggcagattgcaggtccgctgg

SEQ ID NO: 378143 - DNA, 466 bp, Homo Sapiens
cctgagccatggaagaaaggtttccctatggagggaaaaatatgcaaacaaatccataaacaggattgtattacagtttacggtgaacaaccacttcacgatgccatcttgacccatcagcaagaaaatttttgtcccattgattacggggctatgacattggaccaactcttcactattcctccacttcagtttcctcatctaccaaatgagaaagcagaagagaatgttttcagttcctccaaactgaaggctctggctctttgcttctgtttttgtgagggaagagggatgagagaccatagaaggagaaggccaggaggtgagtaagtgtgttgataaccagaacaggacgtggctagggagagaggagagagaaccataaaagcttgcagaggaggggacagtctttgactgcaccttctatcaaccccgtggattgaagtgagatgctgttaggatgcct

SEQ ID NO: 378144 - DNA, 453 bp, Homo Sapiens
  misc_feature (382)..(382): n is a, c, g, or t
  misc_feature (426)..(426): n is a, c, g, or t
ggctgatgtggcggcctcagcccggggctggcgttcctggcatacccagaggcggtgacccagctgcctatctccccactctgggccatcctcttcttctccatgctgttgatgctgggcattgacagccagttctgcactgtggagggcttcatcacagccctggtggatgagtaccccaggctcctccgcaaccgcagagagctcttcattgctgctgtctgcatcatctcctacctgatcggtctctctaacatcactcaggggggggtatttatgtcttcaaactctttgactactactctgccagtggcatggagcctgctgttcctcgtgttctttgaatgtgtctctatttcctgggttttaacggtgttcaacnatttctatggacaatatccaaggagatggttgggatccaggccngcatctggtgggaaatctgctggtctt

SEQ ID NO: 378145 - DNA, 532 bp, Homo Sapiens
cgagagcatcctaaccagctttctaaaatcacggagaacggtccctttctctcagtaagtcttttcttattccaattccactttactctccaccagcttcatcttccagcaagcaatgggtctggggctttgatccataagtcaatcatcggagaagtttagcctagaagaacgaagagcagtaggctctgcagtgtgcaaaattgttggcttgcaaaatacttatgttttcacatcattacagaatcaattcccgccctcataaaaagacctgaacaagagaccaaaaaatccctgcacgggacaacagatccacagccaaaaaggccaagataaaacacagttgggtccagactgtgcacaacactctgccctctactttaaaaggccaaagggggattgtcaaaccttcaaggtcgcccaaaatacagacactgagaataaggataaatatggcctacataggaatgcacagattccactgaagtaagactaaataaggaagaaccaccaccattttttttctgcgtgg

SEQ ID NO: 378146 - DNA, 328 bp, Homo Sapiens
gaggatccgacgcatccctaaccagagagagaatgctaatgggaagataaggagaagattgggcagggttttagtatgtatgagggcaggaaaataaaggaatagaattacagagaatctttacttcggggttctggtgtacaaaagtaatgggtagatagagattgccttatgtttttctcccaagtgggcattatagctctagggctggtattaaattacatgtttggtttggtaggtagagacagagtctcacactggtcatgcaggcccgagtacaggggtacgatctcactgcaacctccgcctcccgggttagggatgcggt

SEQ ID NO: 378147 - DNA, 274 bp, Homo Sapiens
gctaacagccataatgaggaatccctattacttgagtgtcagctacatgacattttccacaattcacctgcatatctggtgttgtaaaaaatcataaagagtgtctccatgattcatttaggtattctgaagtagtccagaaacttgggtcctacatttagaatcaggtttatagcacagaaatcccaaatcctcactttcccagcatagggttgacctgctgatgggctcgaagtttgcctatgggtcttatcaaaggaccgccatcccctcc

SEQ ID NO: 378148 - DNA, 401 bp, Homo Sapiens
gtatgtaatgtaacaagctccacactttggctcctgcctcgcacatgtatgtaatgtcacaagctccacactttggctcctgcctcacacacatatgtagtgtcacaagctccacactttggcccctgcctcgcacacgtatgtagtgtcacaagctccacactttcgctcctgcgtcgcacacgtatgtaatgtcacaagctctgcactttggctcctgccttaaaaacaaacttggaggacagaaaccaggaaaagctcaagcatcttacacccaggaccttccaccaaagttaaatgtttttaatgacgaccaaatatcaccagagagcttcctcgtaaaattaaccaattcatgcatctttccaaggctacagctctggcaagcaagggaatgacag

SEQ ID NO: 378149 - DNA, 313 bp, Homo Sapiens
aatcttgagccgcacacctgctgcagagtagaaagttcacacgtggtggtggtgctgggtggtaacagtgatggtggtgatgaggtggcagcggcggtgatggtgatgaaatcatgatatgatggtggtggcagtggcagtatcacagctaacctttcagtgagtgtctgcagtgacacaattatgtgaattaacacatgcaattctttgggaggaagctctcccaccttcaggcacaggggtggtcacctggctccagagccggctcgtaccagagctgtcatggataggaattgtgaaggatgtgtggtgt

SEQ ID NO: 378150 - DNA, 500 bp, Homo Sapiens
tcacggtcttgactccacagccttcactcctgactggacctcctctgaacagaggcttcctgtgctatggaatgcgattcctgctggctgaggagaagtggctttcaggccgctgggcaggggcgcctcttacttcactgagtgtggctgccaccacttcagcagcttctcctcctctcctgctaccccgaacacctcaaccccagcctgagtcccgctgcctctatttcctgttacctcagagggctcagctgccaaccaagacgcctgcgggtggcctcagctcctgagtgctggacaccctgtgacttaaaccccctaatacctcagcaccaaacatgcacggagcgctttggctgtccagggaaagcagggcagaagccggggagcacagattttggagccacacagggtcaaatactcagtctgccccgtcctagctgagtcactgaaagcaaggagaccaacctgtctgaacctcagtgtgcggcggcgagagt

SEQ ID NO: 378151 - DNA, 183 bp, Homo Sapiens
cactgagaatcatgagaaggcagctgcggccgaagcctgacctacgcgcttaggtttagggggaacagctcagaagtgtgagaggccagccagatgcctgcgaaaggcaggcagcaacttcccggggtgcacatgggtgcaactccagtgggtaccacgtgcccggagaatgagccgtccttg

SEQ ID NO: 378152 - DNA, 447 bp, Homo Sapiens
agtggatctaagcttatgtttgttttccttataattgattcaaaattatagtatttaagtgtgacctataagaaaaagtaaaatgagaactaaaatccccagactcttacgtaacaataaatataacctttaaaaatatactgtgccaacaaaatgcagttagtccacaaagattactaggatgtgaagcagctgtgccctgcagttttgatcagggttaaagaaacagaaagatatgtttccagctagttttgtgggcctgagagtattagcaatgggtacctcatttgatccagaggctaaaatttcttttctttctacatcccttgcttcagtcatcatctttcaaaatttatcagctttgattgccttgtaggtgatctttctgaaaaccgacacaatctggaatatggtttccagatttcttcataattaaaacagcatgtg

SEQ ID NO: 378153 - DNA, 240 bp, Homo Sapiens
cgtaagattgtgcgctgagttgcttagctttcatttgtcttctaactggtgcctgataaggtgtatttcgtagtttagactgtcttacagcagctgctgccccaccgtatgttgtttttccaggataaaaaggagaatctccaagctgactggttttaaggattgaagaattcccaagtgaaggggaaagtgttccaaaggcagacaagttgaatgctggtttttttgagctgggggcac

SEQ ID NO: 378154 - DNA, 312 bp, Homo Sapiens
ataacaccagagcttcattgattcaaaggcaaagcaggtggcattttactgaacaattaaatgtttgaagtaaccttttatagagtgagaaagatgtctgtctagttttaagtctttctgaagagaaatgggctggaatgtttggttggttgcagctattcttgtgttctttttaaaatatctgaaattatacttagatatggggcaggctttattcctacccaagtagcagcgatcagcgatgctggtgctaacccctggtccttgtctgtttccctaatgctcaccacaggcaccacactgtaactcgag

SEQ ID NO: 378155 - DNA, 312 bp, Homo Sapiens
tacagattgggaacctggaaggatctttttggccaaataaaacataaattgaggggaaccacatgaaattgacaatattcaccagtgagccacggcgcctagaccatttcccatgattttttatgaaactttccaatgcacagcaaagccgaaagaattttacggtaaatacctatatacccactactagcctctaccattaacatgattaccacatgtgctttatcacaacctgtttttgatgcatttcaaagttaactgtacacaacaaaaaccaaccccccaaaatatttcaacctgcatgaaagtaag

SEQ ID NO: 378156 - DNA, 127 bp, Homo Sapiens
cacccctcttcatgtcaccgacgcttcctcagtatccacaggtgacaccacccctcttcctgtcaccagcccttcctcagcatcctcaggtcacaccacccctcttcatgtcaccagcccttcctca

SEQ ID NO: 378157 - DNA, 317 bp, Homo Sapiens
tcggtacccatggtgatgctgggagtgggaacatcagagtgagaatttattagtgaatcaaatccacatcataagtgtttattcagctttttatggtctaaggtaccatgatctcaagattatatagtggccacctatggtatgtaagtgtttttatgcagcagcctttaacatctaatataatgtagatgtaacccaaagagaccctagactttcctacaaatcactgaagggtattattaatagatgataaggttatttctgatctttgtgtttaccattgcaatgggaacatttttgtcaatggtatgattgtg

SEQ ID NO: 378158 - DNA, 259 bp, Homo Sapiens
ccggctggtgaggattaaatgaatatggtaggtggagtagggcttttttcccagtaagcgcttgataaacatgagcgggccattattgttctctggggagaatcctctgcccccaggtgtgggttcccatcctgtctgtggcttcagagtccagacctaatgccaccgacctccttgcccttcctgcacccctaccatggatcaccattggaggagtggggttgggggcttatcaccccaggaagattagataaattgg

SEQ ID NO: 378159 - DNA, 316 bp, Homo Sapiens
ttgcgccggtgaggcgggagagcgccggggccgacacgcgccgtgagtatgtgcgggcagcgctcttctctgaactatcggcggggccccttagatgcctgtccttgccctaggatgcccttccctacgtcctcctggcaaatcttggagatctgacttgcagtggtcttcaccctgcatgcagaatcgagccctccctgtgcccttaggcctgttatggccctgattgttccttgtccatttcaatcatcccctttttgtctgattaaactgtcagctctttgaaagcaagcaatataacctttaggcctcagag

SEQ ID NO: 378160 - DNA, 529 bp, Homo Sapiens
  misc_feature (308)..(333): n is a, c, g, or t
cacgctagacactagaagacaatacacttgctggctgtatctaagaggcttcaccttagtgaaaggtaacactctcctaatcaaactcttgtattttagcgtggaggcttctgttctctcactttaatttcatttgctcgctgatccctagcccccaaattaaccctgctgtgctgcttctggcattgctgagcttctgaactggccttatggtattgatactgcactgaaccctctctaacctttgtcaatttaatttactaagttgaattaacctttgattctgtgttttctatagttgacctaannnnnnnnnnnnnnnnnnnnnnnnnnctctgtttctgtctctaccttccctttccttctgtccccctccccttcctgtgtctgtcgtcacacttgtcaccttggacgtcactgggacatccccactgccacatttgtttttaaacaaccacattatctctggggacccattgcttgacacctgcagcaaccttgggaggcaaatctgcatcctactgtgggt

SEQ ID NO: 378161 - DNA, 386 bp, Homo Sapiens
gattaggaaaaaggaaaaatagctgctttaaaatcctttctggaactaggaatactatacagaagcaaatatgtataaactccttcaattttacccattgtatcaaagagtgaaattgctttctttgggaatctttaatatactcactaatgaccttggtcacttttgatatcacaagttgctgatgaccatggactagctctatatcctttatagagacaaacgctccagtagtaaagagcattgcagaaagagtgtaaaaaacatatctttatctggtcttacctgtaagaagtacagatgctccttgactatcaggttgtgtcctaataaacccatcataaatttaaaatattgtacgtgaaaaagcctttaacacatactaa

SEQ ID NO: 378162 - DNA, 534 bp, Homo Sapiens
  misc_feature (423)..(443): n is a, c, g, or t
aggagaacaaatacccaagtatcattcaggaactttgaattattagcaaaatatgcatgttgatttctcttacattggctagttagttgtggcttccttactcaagcatccttaggagttaacagtaggcaaaggcataaccatgtttttcacatgttcttgttactgtgttctgcaaatgactgccttttaacatttcttcctatattctatcgcagtgtcctaatgcactctaaacgtgtgttccattgatcctggaatgcgtacttttgtggcttagtgcttttctcattaatatatcttaagcagccagcagtagacttgtgtttgtatatttgtgtacatgcatcccaaatttaaagaaaattattcctattgaatttacagtctagtacaatcagcattatgttatccattgacatnnnnnnnnnnnnnnnnnnnnnttaagaatttatttaagaatttatttcagattttgcctcttcttgaaataactatgtgagggtcatcaagaaatgtgtggcctcatccttc

SEQ ID NO: 378163 - DNA, 406 bp, Homo Sapiens
gggacacatctacacagatgttacactgagggctccaggaggggccacatctgcagagatggtacactgagggctccagaaggggccacatctgcagcgatgttacactgagagccccaggaaaggacactatctgcagagttgttacactgagggctccagaaggggacacatctgcagagatgtcacactgagggctccaggaaaggacacatctgcagagttgttacactgaggactataggaggggaatgtgtctgcacagatgttacactgagggctccaagacggggatgcatgtgcatgaatattacactgagggctacagcagggggacacatctacacagatgttacactgagggctccagaggggtatgcaactacacagacattacactgatgct

SEQ ID NO: 378164 - DNA, 270 bp, Homo Sapiens
acggaaggtcttcagaggaatctgcagcagtaggtgctgctgaagttgaagcacgtgacaggcaagctgaaatgcagggtgagaggtctctgtttagacaatctccacagcaccccgcacagatgtgagtgaagtcggttccagctctgttgtgctggcttctgtaaatacgcctctgcagtgttttccagcaaagccctctcctaaagatcatgaggtcgttcaagagatcagtgaccgcacaccaccttttggaacctggccaaagtg

SEQ ID NO: 378165 - DNA, 331 bp, Homo Sapiens
cgcaggacttgtggagagtgcaaagagattcggaggtgaagtatagggtgaggaagccctctgccttgacaggcactctcgctgtgcacaaatacagctaataccctcctgaagggtggctggaaggtgggtatttaggctatgttagtacagtcccttagtgaattaaggagcacagtatatggagggggaaagacacgtgcagcaataaatgattggcggtgagaatgcaaagggtagaaacataattctaagagagaaactaaaagtgaaccaagggaaatggaaagttaatcaatacagcataaaactcggtgaccacagaatcctt

SEQ ID NO: 378166 - DNA, 403 bp, Homo Sapiens
tggcaaagaagagcagaaggtcctaggtgtcccctgggatgactctggacacctgcccacaaggcctgcctggaatcactagccagtgatacagaccctccagtatccaaatcccttctttaactggtacgtacacgtgcaaatacctaaacatgcagatacaaatacgcaacacgtgctcaaagcagtgacccaactctgaatcctgacaagagagaagctgccaagtcccccccaaaagccatgaggttcatgcggctacagtctgattccagggtatcttggctattagaattccctttccaaagctagggtgcaaacaccgagactctagtggtggaacccagtggtgaatcttaggaagccaaagaagaccagaggtcacaagcccacagatccttcg

SEQ ID NO: 378167 - DNA, 452 bp, Homo Sapiens
aaggatctgtgggcatgatcagagcagctcatctgctgtgaggatggatgtgggattcttggtatgctagttctgctgatagagagagacttaagggaagggaaagaatgactgatggaatattttttctctctgtagaacttcctgcagggactgctcaccaaagacccacggcagcgactgtcctggccagacctcttatatcaccccgtttattgcatggtcatgtcaccagtgagtcatcagggttcccagggctcttggacttcccagtacttcctctaaactacttccctttcacttccccgacaatctagatataacatgtcgtctttcctccagcagcttgaactttcttcctagcccttcacttaacctgtgccacttcaccttacaacccactctctctctgtcactttgttcaaaatgatcttcagcccacaggatccttg

SEQ ID NO: 378168 - DNA, 192 bp, Homo Sapiens
cagaggtagcaaatgaggtgaattgaaagagaggcagaaggctggcttgggctgagaactgcttgctgttatagctctgtgggctgccgccccgcacactctgttccttacccatgtctatcttctctcaagcttagtacctaccctcaacttccagtccccatctggtcttcagccattctcaacctccga

SEQ ID NO: 378169 - DNA, 564 bp, Homo Sapiens
tacggaggatctgtgggcaaaggagaatttgaaatccccacaggtctgggaaacaatggaagtcacagggtggggcccttgcatgagaatacattcttttgattttgttttgtctttctgattggctgccagtttcttaatgcaatatgagagcaagagggagctaattctcttcagagcctaaaatccctcgagccgagctggcacttgaacgaagacaaagcttattgagattgggcagggaagttgtcactgtgtgatttgggagtctttcatttggccaatataactccattagattttggaagtgaacccaggtagcagggagggttctggaagtaacattctccaaccagctggtaattaaaatggaaccctttgaagaactggtcctctctcaattgctccagcctctctctgtcagattgaatgccaggaagccgctgccttaagctttggctagttttctgccaaggcgtttaactctcagttttgtgttgcttgtcaaagtgtccttagagagcataagacactcactttatatttggtgcccacagtatcctt

SEQ ID NO: 378170 - DNA, 571 bp, Homo Sapiens
aaggatctgtgggcacagtcatatggtgagggcctcttggagttcattcaaactttaagggagccccacagcaccggcatgatgggtaagtccaggcctaaggttaggaagcaaatcctggagcatgaggaaattgtaggctacagtgagctaccagtggtgtgcaaactggagacccccaagacagtgagagaggccacagcatctgagggaatggagctctttcttggcctgaggttcagaagaacctgcaccaaagaaaggcatccctatcaatgtcactgttcctgaaatgatgggagaaccacatccctgcttcagggaagcagtccctgtcgtctggggcgctgagccctttggcctgagatgaaggatgatggtgtgatgtatcatggcagtgtgactgagactggattgggggatggggacaggggaacataggcaaaaatacacatgtgccactggatcctgagctgcccattgtaccctgggaggactggcgtttgctctgggaagttagggaggtgggaagaggaagggtctcattttcgcagcccacagagtccttgcg

SEQ ID NO: 378171 - DNA, 155 bp, Homo Sapiens
cgtgggcggaccatataacgtttactccactaagttaataggtgaatatgactagacctataaattttagaaatagcctctaaatgtttttagttatcaacaaaaaacaatttatctcttttaataattagcttgaatgccacattcagggcttg

SEQ ID NO: 378172 - DNA, 401 bp, Homo Sapiens
cgaaggactcctgtgggctttgttgttaaagagaagtatggaataaaagaacttatacataaggtaaagagaagccaggtacaaaacaatgatttttaaatgaaggattcaaaggactatggctcatcacaaataatggaatgaattggtaaggtagtgaagttacattcaggataacatgcttcttctaaaagtgactataaattactcctacaattaaaatttttcacttattcgtgcactcttgtcaacatttatgtaaggaccttcttgatactctggcaaaggacataaacattaagcctttgatgtatgtagtacagtcaacaggacgtaaaaaaatagatatttcaggcagacatccctgtgcaaaatagaatattctggccccgaacctccgt

SEQ ID NO: 378173 - DNA, 131 bp, Homo Sapiens
ctctttctaaaggattacttcaaaaagaaatggtctcaagcatttgagaaaaaaacttagaactaaaatcctgttttttaaagctccctgataagagattcttcaaaatcaaaaataaatttgcccacaga

SEQ ID NO: 378174 - DNA, 376 bp, Homo Sapiens
tgattgggtttgtggtgtgtgttatctcactgtctgacaattgccccacactgtccctgccaccagtttggatgttcttgggcacgggggccctgactgcgccatctccattgcatttctgcagtgccagccccaagcgagaaatggggagacagtgaatgaagaaccctcatcagcagagaaggaaggggcaggtagacagagtggaatcactgctgctgataactgggaccccagaaatgcacagcacccttaactgggagtgaccagaagctcagtcctgcagcaaatgcctccaggggattcaaaatgattgagagctgggccaggagccatgtttagcctgccagtgtgggcccacagatccttccggacg

SEQ ID NO: 378175 - DNA, 422 bp, Homo Sapiens
  misc_feature (331)..(331): n is a, c, g, or t
agagttcagagagatcatagaggcagaaacaacaggatcctatcactaggaaagtttggagacactgggagagggattggagcaggacagcccagggttatgatgtaggtgtctgattaaatggtacttctattcatcaaagtgcagaacacaggaggaaaaacaggtttaggggtggggtggggtgacgatgattaatttatttgcagaccagttgaatttgagacacttgaggtgtccaagagacaactgaatgatctagaactcaaaatagagatctaggccagagatagaaagagagcatacggggataactgaatccatggggttnggatgaaggtagccatgaagactgcataggaagggcagagccctaacaatcatatttaggcaatagagtatgagctgcccacgatcctccg

SEQ ID NO: 378176 - DNA, 483 bp, Homo Sapiens
  misc_feature (73)..(148): n is a, c, g, or t
ggccggaagtatctgtgggcacagaaaactttatggtttaatagacatatgtatacatgatctggtgatgatnnnnnnnnnnnnnnnnnnnnnnnnnnnnnnnnnnnnnnnnnnnnnnnnnnnnnnnnnnnnnnnnnnnnnnnnnnnngtactgttaacatacaaaacttctagttgctagccagaaactgatttctgaacccactaacaagctgcaaccttcagtttgataaacacttgtccacgagatctgcaaaaatgggaaaatcaggccatatgactaacttatatatcctccaagccttgcagaattcttctgagtacaattttagagaaacttctagagataaataaaaatgtcaaatatttactgaatttcaaatatgacagtaatttcaaatactactgataaattactacgtattaggcactgaaaaggcagagtagatatggcagtcaacaaagtcctgcccacagatcctt

SEQ ID NO: 378177 - DNA, 287 bp, Homo Sapiens
aaggactctgtggcgccatgggttaaagggcagaagaggaactggaagagcccaaagcctgtgtaaagttggattctaggtaatgctggatatagagtagaatcacaatcaccttggatcttataagaaataattcaaagactttatagaatcagtctctagtcccagaattttatgtttgtaccatgttcgtggctcatgctttcgtgattcctggcatcctgtctgatttctgagtttgggctagctagagtcttgtttgtctatcttcttgattccccataaga

SEQ ID NO: 378178 - DNA, 208 bp, Homo Sapiens
accggaagtatctggggcatgtagtacagatgaactatcatggcgaaaatagcctcaggctagcagttgatattctcagcactggttatccagaccttttcacctgggaacatatgcatgaactccactagatacccaacactagcccactgtgatattctgcaccctcctcccattctccctgattaactcagcccacagatccttg

SEQ ID NO: 378179 - DNA, 437 bp, Homo Sapiens
ggagtgtctgtgggcgattagactaggggatcctttatttgtagttcctaatcatgagatatgccacatctacaaagttttacaaagaaatgaaaattaaaataaatgttacttagactatcttggttagcatgaattacaagctaaaacatccagtgataagactacattaataaatgtattctttaaatggtagataggagcaaaagtacatgctggggtggactagcaagtgatatggcagattaacattctataaagggtcaatgctttgtcccagaaagcatgcttttgttgaacactcctgtggtgccactaaatttattggaaattaattcagaaagttgaaatagaattgtcagatttcagtcttgtgtttttcatttttttaatttctttcttgttacttgtctgcttaatgcccacagagtccttcg

SEQ ID NO: 378180 - DNA, 335 bp, Homo Sapiens
ctctcgaggatccccggcaaggatctgtgggcgcgagtagattatttttacttcctgagaagtgctttccttctgctactgtattggcaatattacaatgttcacttttagggtatggaagatagtaacctaaatcctgttcctctcttctgttgagcactgtatacacagaagcttcccaaggaaaagctataaactctacactttggaggaggttgagccagtgggggtgagaggtacgagtctttcctaagctgactttactgttttttgcctgatctcctgcatacctgatgtccccatgttttcctctaagtgcccacagaatccttacc

SEQ ID NO: 378181 - DNA, 204 bp, Homo Sapiens
ggaaggatgtatcatcatctctttaacaggtgaagaaaccaaggctcagagagttaagcagcaaacgctcctgatttagctagtgggtagctgagctaacatctcagtctctgtcaacatccagcccaggttctccactaaactgcctgtgaaggggagcacgggcccagctaagacagccttcaaagcccacagaatccttcg

SEQ ID NO: 378182 - DNA, 471 bp, Homo Sapiens
gaccggaaggatctttctcacaacagaaaccccctgggatgaccccccagcctggccgggggtatgtaccagtgtgctctccggaggacacaggaaatggaacactaaatgatgccccctatgctagtctttcgaaagacaaaaataaatggataatctgcccacccggcctgttatcctcagctcccctataatgtggcagcagataagtagcctccctagcatacagtgctgctacttcatgtctctgaatcctgcaggattgagtggatatgagctttcatagcattctggcatacctgatttccctcagctcaatctttggcactccacgagaagtcagaaaaacccagttaaattccctgcccaagcatctccacgttgccagagcagacatggaaggtgaaactggccacgttcgctgaattattcattcagatggcaggacaccatacggcccacagatccttg

SEQ ID NO: 378183 - DNA, 156 bp, Homo Sapiens
aaggaattcagtgggcataagttagctcaggtagtgttctgctcctatgataggtgaacagcaatgtgcacaagggaataatagaggttagtatcttctttgaaccttaggcttgctggccatgatggggtctgagtacatgccttaaacagtgct

SEQ ID NO: 378184 - DNA, 426 bp, Homo Sapiens
atccccggcaaggatcctgtaggctaataaaatattattcaaaaaaggaagtgaaagcataatgcattgcttggcttggcactggacataaatgcaaagctataataacaaacactgaatacccaattttgaaaaaatacataatttacttatactggagtaatggaggaaagaaaatggagaggctgtatggtcatcattagggctgttcaccaatattccagagcatcttttcccaggcacatggtagggttgtacttccaggcctcttttcagattaagtatagtcatgtagcttgctttgacccataaaatgtgagttcaatttatttttttcataccagggaagaagacagtgggtgtagccatttatacatgccatgttagacccagctctagcatacgtgaagccttcctctacttttc

SEQ ID NO: 378185 - DNA, 346 bp, Homo Sapiens
cattgagccctggacagagtggggaggaaaggggagggaaggaactcaccttggattcttgtaattgaggctaagatgcaatctcattgacagcatggagggtgggacatgaccaggttgaatccgtactgcaagggaaaggacagaaggaggggaccttgatggtggggaagggggagcccagccaatctccttgaccgtaggcccatccagcacacctgtcttttataagctgatgcctgctcctagctctcctggttttgcagataaggcagaagaagtagagcacctatagctagtgcttcccccttacctgatagttcatgatggctctgagacaaaggat

SEQ ID NO: 378186 - DNA, 522 bp, Homo Sapiens
gccgaccatgcggctgcacagacttcgtgcgcggctgagcgcggtggcctgtgggcttctgctgcttcttgtccggggccagggccaggactcagccagtcccatccggaccacacacacggggcaggtgctggggagtcttgtccatgtgaaagggcgccaatgccggggtccaaaccttcctgggaattccatttgccaagccacctctaggtccgctgcgatttgcaccccctgtagccccctgaatcttggagtggtgtgagggatggaaccacccatccggccatgtgtctacaggacctcaccgcagtggagtcagagtttcttagccagttcaacatgaccttcccttccgactccatgtctgaggactgcctgtacctcagcatctacacgccggcccatagccatgaaagctctaacctgccggtgatggtgtgattccaccgggtgcgcttgtttttggcctggctttcttgtatgatggtccctgctggctgcctggcaaacgtggtggtg

SEQ ID NO: 378187 - DNA, 463 bp, Homo Sapiens
  misc_feature (29)..(29): n is a, c, g, or t
  misc_feature (34)..(34): n is a, c, g, or t
  misc_feature (48)..(48): n is a, c, g, or t
  misc_feature (130)..(130): n is a, c, g, or t
cctctgggtgaaaaagcaagtgtccgccnggcancgaaaccgaaaccnacggaaccaacaagcggctgcaaaaatacttcgttgcccggctgaaacgcggtggcctgtgggcttctgctgcttcttgtcncggggccagggcccaggactcagccagtcccatccggaccacacacacggggcaggtgctggggagtcttgtccatgtgaagggcgccaatgccggggtccaaaccttcctgggaattccatttgccaagccacctctaggtccgctgcgatttgcaccccctgagccccctcctcccttcctcacctccaccttctccctgccttctctcttctctcgtctgagcccccaggccttttccactttgagggaggtgcttcgaagaatgttgcccacacctaagtgttagaagcctatgtccgttcatccctgagaggtctgaaagaataaaaa

SEQ ID NO: 378188 - DNA, 478 bp, Homo Sapiens
attgtgcctggatgcgagctaaagaccacaggagtcgttggatacacaaactgaaacgagactacagtgaaatagtaaaaccttcaaagttgttatagtaaatgaagactttaaaccatctgtgatgtgaaaaataaattaatgaagtataaagagatctaacaccgtaagataaacatttgaaagaagatggtaaatgcctaatggctacatagataatacagtaagatgtactattattagtattaattatttgttaaatagaagtatcctcaacattatacagaacagtcaataacagagcacctagactaaggccactcgatctgacttggttgaaaaacaattcaaacatgaaagaagccaaagtgattatattctagacatgtgagcttcatagagttcattgcaattaagggaatataagcgtgatgccatagtacagtgaatagaaatagagcatcaaggggctcaaatg

SEQ ID NO: 378189 - DNA, 191 bp, Homo Sapiens
gtcgatctcttgaggatcccccatttgatgccccttgatgctgcagaggagtgaaggaaaatgggggctgacaggaaataacggtctcattcagtgactcggaaacaacagcagtgacttcagcagagggcaattgccaaagagaaaggtgagagaggaagctatattacgaactgctgtagaagcatatg

SEQ ID NO: 378190 - DNA, 505 bp, Homo Sapiens
cttatgtctgctctgcgggctctccggattcactgccttatcccaaacatgagatctccctgtgccctgctccatcgtggtgacgctcacacctgggagctgcccaacacggatccaaacatgagctctccctgtgccctgctccatcgtggtgatgctcacacctggagctgcccaacacggatctagcaccatttggggtttgtgcaggttctggcgcctctgctctggactggggtcagtcccgtgtgtgtttttccatgggggagcactggacaagaggctcagccacaccactgctgggatgtggtctggagttgtattcacttcggtcccatctgcccaagcacagccactgctgagctcagaatccccggtgtggggaagtgttcctctgtcataggcagagcaaggcagtgtggaactggctacgtggtaatgcggtccacccctccatctcctcttaatcttatctttcaggtagaaaatgtcagagactttaagt

SEQ ID NO: 378191 - DNA, 406 bp, Homo Sapiens
cattgagcccctggatgctggaaaaagtccttttgctgccagtgctagcactgtccgagtggatgaagttgccgctgtggatgttcagtgaatagttggttaagtgcgataaagatgcggtgcaggtttttgggggtgggcctcctgatatggtctcggtacaaaatcctaaagagtccgtctttggctatataaatctctaaggggtctaaggacttgagtaagacatacagacgaatatcaaacttgagcttgtcgataaggagaggtttgcagatgtactcctggaccaccgctggcctgctctggagggtccctgccaggcggatgtcactggggtctttaatgaggtagattccatcacctgacaccaccatcaggtttcgcgataaaagtggcatccagg

SEQ ID NO: 378192 - DNA, 384 bp, Homo Sapiens
attgcctagttcagagtaatttctagttcagtgaaccctaatgtttctgaacaggtagtagtatttatggaccctgtaaatagtactataggcttttgaatcaactatggcaggggctatagcagttacgcttctgtgtgggaaaatcgtctgtacatatctcgtcagactactaagactaagttgattatgctgtacatacatagtgaactgtggctacatcacgtcaaatacctaatcatactcagcatgcaagcttaggataccacaagttgttccattacagagtgtgttatcccaagagtcatcattagaaagccttcctcagtgatcctattcccacatcacaagggtgtctaatgtatcctccagaaccccatgatg

SEQ ID NO: 378193 - DNA, 356 bp, Homo Sapiens
caggtgcaatctgaatgtagctgccagtatagggtggccctatgagtgaacatcatctttatcatgttccccagtgatgtatccagtggtcttgggctttttaagacatgcatctagagagtttccaggtcttctctggggtagagtccttctgttccaagttctgttctcaggcactatgtggggcaggcatgcaggaaggcacaagggaagtgggaggaggcgagattgggcacaagggaggaagccccttttttagagccctgttcctgagccccatcacatgtagagcataaattatctgagataggcctcaatcaatttcgtttattttgcctacgtatagaatgtggttg

SEQ ID NO: 378194 - DNA, 350 bp, Homo Sapiens
  misc_feature (208)..(208): n is a, c, g, or t
  misc_feature (248)..(248): n is a, c, g, or t
  misc_feature (259)..(259): n is a, c, g, or t
  misc_feature (302)..(302): n is a, c, g, or t
atcatgtggtctggagtcacctgagcccccagagtactcccgggcagatggcccagtgtcccaggagctccagatgtgttttgttgcaactgctgtctgtgcacagaggagtgtcaaggacagagggccaggaaatgactttggctgcaccttaattagctaaggatggcaaaggatgttcttggtagaaggaagcagcaagtgccanaaggtgggcatttgagaaaggacaccaggataggaaccgngcctgtgcacntgtgctgggagaggtgacgcgattgcggagcggcatccttggntgtcttgtgtggccttgagcccaggcaaggcggtgggagccgctagag

SEQ ID NO: 378195 - DNA, 1232 bp, Homo Sapiens
  misc_feature (548)..(612): n is a, c, g, or t
ggacatcatggaatataggttaagaacacttacatagaaagaatagaaatattaatattttagacttgcatatcaatatgtagttttcaaaaccctctcacatcttattatctcagcatacattttaaataggcaaagtagatatgattatccctattttagaaatgatgacagaccttaggaagtagagacacagatacatcctttgtagtattactttatgtacttgaaaaggaattaattggtttctcttggccttgatcctctttaggataaatagatcttctgtcctccccatgagtcctgtttttcttaatatattacctgtctcttcttaagagccttaagttacggaaagcagaattagacccagttttctttagaccctgttttgggtgtaaagaaagatcacctcagctgggcatgagccacagtgcccagcacccatgaagtcagtttaaaggggttgatgactaagtcctggtatgtcctacagggacctcctgaatccatcaaaaccacagggatccgagcacctcaaaaatgannnnnnnnnnnnnnnnnnnnnnnnnnnnnnnnnnnnnnnnnnnnnnnnnnnnnnnnnnnnnnnnnccaccaagccaatcactgcacacacaacctttgtagtcaaatgctctacccctgagctatacctgcccccaccacagtctttggcaaatgcacctggtatgttcatcttcaaggatgtcaggatgatttgggggagggtgcagtccctcctgcccctgcccctacattactggctttcctcttgcacctgaagctttttccagatcaaaatggatgtgaccacgggggagcgggacctgcttgatggactcggaggatgctggaacaggagagtcgggtgaccgggccacagaaaaggaggtcatctgcccctgggagagcctgtaaggaaagaggcaggctgagctgggggctctggaccaggaagatgctctgacagatgccatggtatgggccacaggacacacttgctcgagaaccaaagtgcatttgggtgacatttgaagattggggagacaagatggggtagattgtggcaaagaatgctctggctggttaccaggggccaactccttctcctcttcctgaccctccctcccctgggcagaagaaacgcatgtggaccagaagactttccctgctgccttaaaaccaataaaaggttaactttaagtttcttg

SEQ ID NO: 378196 - DNA, 388 bp, Homo Sapiens
actcagggtctggatagaaatgcgataatcttctccttaatttcaataattgattaacatgacaaaaacatgtcacctatagtcagactctagcacccacaatattctctagaactgatgttttgatgttgccaaatactgcctgaaagaaaagcatctgatttccaggttaactctagatgttcccctgggcaaattccacaggttacacagaaacactaagagaaggggtttcatacctggctgcctatgatcttccttttaaaaagcaaatacagtgttttcaaaatctacaggtgatcttccatgagaaagttttgctgtttcctcaaactccatgaagattcctctcataaactggtgccccttcccagttatcctatttctg

SEQ ID NO: 378197 - DNA, 704 bp, Homo Sapiens
gcgaagagcataagccataattattccagaggatgctgattccagtggttctgcttcaatgcttccactgcaaaacactaaagatccaagaaggccttcatggcggcatcaggccggatcggtactgtatcaagtcatggcaggtacagtaggataagccactctgtcccttcctgggcaaagaagaaacggaggggatggaattcttccttagacttacttttgtaaaaatgtccccacggtacttactccccactgatggaccagtggtttccagtcatgagcgttagactgacttgtttgtcttccattccattgttttgaaactcagtatgctgcccctgtcttgctgtcatgaaatcagcaagagaggatgacacatcaaataataactcggattccagcccacattggattcatcagcatttggaccaatagcccacagctgagaatgtggaatacctaaggatagcaccgcttttgttctcgcaaaaacgtatctcctaatttgaggctcagatgaaatgcatcaggtcctttggggcatagatcagaagactacaaaaatgaagctgctctgaaatctcctttagccatcaccccaaccccccaaaattagtttgtgttacttatggaagatagttttctccttttacttcacttcaaaagctttttactcaaagagtatatgttccctccagtct

SEQ ID NO: 378198 - DNA, 222 bp, Homo Sapiens
tagaaccccgggttgagaaacaatgctgcagaatatctttcagctcttgtccttcatcactctatttactgaatcaatttggcctagaggatatctggtgccagggttgataaaagctgtcttgggatttttacagctgtctggtcagaagacatgcttatgccataacagctccagcctcattctccacactctcatctctctactactctacaccacaca

SEQ ID NO: 378199 - DNA, 411 bp, Homo Sapiens
gggatgagcagggtcgagggaagacctcgttcctgagtcccgggagagcagaaaggggacaggggaggagcattcacggatgtgggaatggcacagggcgggagatcatggcgagtgcaggggccaccaaggagcacggcggctgagacaccaagcacatgggcagtgggggtggcatggtggggagaaggggcagagaggagggcgctgctcctacagccacactgaccatggggaaccacaggctgtgttaaggtgagtgacttgatcaggctggccctttgccggcactctcagagtgaggagggagggcatccgcgcaggggatggtggcttggactggggagtcagagcccaactaggaagagaggaatttagacaggtgggagattgacgacatccagaacccat

SEQ ID NO: 378200 - DNA, 322 bp, Homo Sapiens
ttctggaggaagcactctgctgttatccttaaacacccttaggagatgggcacttactggaaggaaaacaaacctctccgggtgtcaggcgcgacaccccaggtggaagttcttgctctctgggggttatctgagaatctggtgaaaacttagaccctcttctgaaaaacatatcccacaccacacaaaaccttaaagaaagttctgtgggggtggggacgacacgctgtggcggccgggccgacgagggctggattctccggccgccaaagcttctcaggaccgaatgacccatgtttcacctgctgttcacatggaaccc

SEQ ID NO: 378201 - DNA, 142 bp, Homo Sapiens
cgccacagcttctccctgtgacagaataagttagataaaacgactggaacctctttcttctgccaccattccccaactctcctcagaacccccagaatctactccttgcctagttttatcaataatgacatagtgaagaagg

SEQ ID NO: 378202 - DNA, 307 bp, Homo Sapiens
cgtgccgccacagtcattgggaaccagatcctgcccgtgatcaacacccaaggcatcacgctgtcacccatcaagcccggccagcagatcctcaaacggcagcgggtgaggtggatggggttaatctggaggagatccgagaatttgccaaagcttttaaaatccggcgcctgtcccttggcctgacccagactcaggtgggacaggctctcagtgctacagagggccccgcgtacagccagtcggccatctgcagacacaccatcctgagaagccactttttcctaccacaggacccaagagaact

SEQ ID NO: 378203 - DNA, 368 bp, Homo Sapiens
tgccgccacagctctcaaagttgctaggattacaggcacgagtccaccacacccagctaaatgggatccctctttcattcctcatgcattcaaaacctctcaggcaggaattttgtctgcttcacttttgtggtattttcagaacgtggaccatgcctggcccctggcatttagttgggaagtaatgaggcccagtgcagagaaggacaagcagctcatggttacgccctgcatgtgcctgcaactctgtcacaggggagaccacgagccagggggctagcagaaaacagagctcagcagtgactgagtaggccctgtgcatgggagatgcctttgccctgggccctgcggaggtttcagaccgatga

SEQ ID NO: 378204 - DNA, 411 bp, Homo Sapiens
gaccctgagaacttacctgagatttcgtcacaggtactttgagcaaatggtgtggggttataactggggttcaatccagaggcatttcaaaccactgaagattgagaagaattattttcctttaccatttattaccacgtgtttacctctctctcgttttggactggtcggataatacttggggaaagagaggcgtagtctttgcttcattctttttgaagaccagccatggccagttccggttttacttctgactgtgcagtgttgaataagacagacctgtttcctctcaagaggccacagctggtaggagaggctggtgagaagccaggcacagatgggcagaggcagatggcacatggtgtacatcctatgtggaaaagagcaggcgctggtggagaagctgtgcgc

SEQ ID NO: 378205 - DNA, 320 bp, Homo Sapiens
cggccgccacagcgtctcgggaggccccagagctcactgcctttggccctgtgtgcattcctcactccagcactggagcccggttctggggccagatcctattcacagtgctcagagcacacaaagattcatgagctcgccttctgatggggcagagacaaaacacagcacagcaaacgattaggtcactgtaaggaagaggaagaaactaaaatcctgttatccgggttggaaacctgtttctaggggagggtgacatttggacagagctcaggatgagatgagctgagggaaggtgcttcagagcagagggaagagca

SEQ ID NO: 378206 - DNA, 380 bp, Homo Sapiens
ggctgcacagcttctcgttccagtactggggcagttatggtaaaagccctgtgtggatgtggtaatgctacctcgctggtcctcggctgtgatcacaaacaggtacacaaggtcctgtgcatcttgcagttcccaggggacaggtaccagccgctcacggtgagcactttcaggggcttttagtcaccgttctggggttgcaggggacacagtggctgttccagggtccctagcaggatgtacttgggtggtgtgcagtcggtggggtccatctccaagtctttctgctcctgccgtctctcaggccactgtcagtaaagacgctcaggaaggacaaggagctgcatcagctgggtccaggctcctgagcagtctcaaat

SEQ ID NO: 378207 - DNA, 385 bp, Homo Sapiens
cctactcgtgcacgggcgcacagcttctctgaacagaagaaagacataaggcaagagccaagccacactcgggtctgtctggcacacacttctcatcagcgcctggctgctgtgttatcaggtgccctcagagccatgagctgctaaacactatcagaaaacaagtttagacccagccctgcggaattatatgattgttcccctccaggaacgccacttactcattttcaagacacttaatgaaaaacagcaagctggacttttaaaccatctcttacccaacacatcatctctctgtaattcttcacagcttctgcaaatgctaactagagtgaacaaatttaaaagggaaccccgtgtgtgtactaagtagcaaagtctgatg

SEQ ID NO: 378208 - DNA, 370 bp, Homo Sapiens
gttgcacagcttctcaaactaaacaggtactgacagtggatactgtattatttaaataaaggcattcaccctgcatttatttgttacgtgtacatatgacgcttaaaattctccactacaataatgcatcataatctcacttaagatcctaatcatttcttaaaactgatgaagttactgatgttcttggtagacaaatttatttctctttaggatatgttatttttatgatacgcgggttttatgtaatcacacttcaccagtctgaaaagccacaaaccaaaaccaaaagaaagaaaagtcctgttggatgaaataatttcttgctgagcacaatcccttagtctagaactctgagtatatttttcag

SEQ ID NO: 378209 - DNA, 356 bp, Homo Sapiens
tagaattgtggtgtgtgtgtaagcccttacctaaaggcacaaaattatcatgctgaatttgtaaacgtgaatgttcattttccttgcatcaggtatgagagaacagatctatctctggagttttaagcgtatactgtcagaactccataaattcaattttaataactgcacagaatatggtaatagttcacaaatatgtttgctcatttccacattacatacctgggttgtcatacaagcaagaatccagtgtgtccaattaatcccgcgtatttacagtaagacatcataattaaatatggcttgatattagacttaagaaggcataatgctgtatcccagcacttgagacttac

SEQ ID NO: 378210 - DNA, 159 bp, Homo Sapiens
aactgcacgctgcagtgagctgatgtctcactgcattccattctgggcaacagagtgagatcctgcctataaaaaataaaagacttccacaagataggacatagacaaggtaggcaggaacaatccaagtagtaatggcggccgagaagctgtggcggg

SEQ ID NO: 378211 - DNA, 124 bp, Homo Sapiens
cagtctctaatagatcactgtaatctttatcaaatcgtagctagcttttttgcagaaactgagaagctcatcctaaaatacataaggaaatgccaggcatccagaatagccaaactatcttgac

SEQ ID NO: 378212 - DNA, 245 bp, Homo Sapiens
  misc_feature (187)..(198): n is a, c, g, or t
ggccggcgcacagcttctcataaatacatctggttccccctctctctctatctgataaaagtattctgaaaggcagagtccggagtgcagaggttagaggatctagaaggggaggtgagatggaggtggcaggggaaatgaggatggcagctttagtcgtaggctcctgctgctccctgctgtttcnnnnnnnnnnnnccttttgggggatgggaatctggctctggtcgccagggctgggagaa

SEQ ID NO: 378213 - DNA, 378 bp, Homo Sapiens
gagtaggtgctgtccccctctcccctccttcgcccaccgattggagggacactctggaaaactcagctgaagaaagcggagagtctgcgtgtacacagtgcaatgatgtcagttaatgcactagtgagggcatgtgttgttcacggtacacagaagaaggaaccaccagcccttgggacacttaggcattggtgtagacaagggaacatttgagtcctggacgatggataggtccacggagcggagggaggagaaaaggattccagtcttagcgatcagcatcagcaaaggctccgacgtgccagaggcatagtgagttctccgatccctggctggtggagagaagctgggaagggcctggctgtccagggtggtggg

SEQ ID NO: 378214 - DNA, 324 bp, Homo Sapiens
ggcgcacagctctcctaacatccaatgctaagtgttacacgaagttatgtttatggacataccttttctctggggacttttctgtggctttcaaagttgaagctgtgtgattagccagaggaaagaatgagaagtaaaatgctgtagcactaagaaaatgagtggaagggtagagctggaggggtccaaaggctaagcctttgtagtgcaggtggggaagacccaggcaaggcacaggactctccccagctcccggggaagtgtgtggtgggtgaggtttagtgtgggctggaattttctgagccttttcctgagaagctgtgg

SEQ ID NO: 378215 - DNA, 438 bp, Homo Sapiens
tggtgcaagttctccggcgcacagttctcaggctcttactttttctatggcccaggtgaggggcggggagactggcctcatgtgaaggtcatggtcgtggtgtaccagagcagtcttgtgtactacatgaagcaggcgcaggctggacgtgtgaagacagagctgctgaaggtggcacatcaccaggtggccaagatctgtccctgaagagtcccaaatcgtggtccttcatcttgtcaaagcggggtatgtcgacatggccattaggaatacaagagcaaggtatggaatgaactgctctttataggaaacactggttctttggggattaacccagctgaaggtggggcacagaaaactctcatctcagtaagtactgaaatgtctaacaccacacagatcagcgtggtagagaagctgtggcggaccggggatcct

SEQ ID NO: 378216 - DNA, 354 bp, Homo Sapiens
tacccgcctagcttctctaatccccattggcccattctggctcattcactgtaactgatatttattttgcacttagcacttgtgagctgtgcgcacagtaagaactacagaggcgaagacttggtctcgcggagcccatgtgctggtagagaggctgcatgggcaaagccaatggtattggcgtcagggacgctgccgtagggggaaataaggttgggtgagaagaaggggccaagtgttgccacacagcggccaggtggcttcctgcactgagcgatgttttaaacgcggtggagccttgcacacctccagggacagcaagagtctcaggggctgtggttgggggagaagctg

SEQ ID NO: 378217 - DNA, 368 bp, Homo Sapiens
tcagagagagaattctctcttaacaatcttcccggtcctctctctctcgtggcttctgatttgcccggagagccttctcacccaactccaggaaaagccagcccaacttcacacacccaggtagcacccctgctcatggtgcatggcaggcctagccctgggccctccaacctgcccaacttcccggagggggttgaaatgttccatccagcagcagagctgagggctgcagcctctgcctgaggaggagctgggacggggccggaaaagcccagcagagacagggtcccatgcccgtgtgctcacaagacaacccaagactgaaactattttccctaaagaagtcagtgggccgggcgcggtcgtca

SEQ ID NO: 378218 - DNA, 465 bp, Homo Sapiens
  misc_feature (344)..(393): n is a, c, g, or t
taacacgctgtagagccttcaggccaggggtacagaaaagtgtaaaggaaggagctatgttaaaacaaaatgtatatgggccaattttcagtacttatctcagccttgcagccctactgcttgcctgtctcagggtcatacaaggatttagagttcagggggtagagtggtctcatggcatttaactctttggatattcctctcatcatttattgggtatcattcgagtttggtggagcccaatgtctggatttctaccaggtcatgcatctgcaggaagagctattcttccacttgagttttcaccacatcctgctaatttgacccgtttagcagataccaannnnnnnnnnnnnnnnnnnnnnnnnnnnnnnnnnnnnnnnnnnnnnnnnncccaaacaaggtgtttctcccccgggcgaaaaaggggggaaaaatttttcgctagcccggccccttggctcg

SEQ ID NO: 378219 - DNA, 283 bp, Homo Sapiens
tgcgcacattggctgtagccttggaacagcaaacatgtctctggagcagcaacctcagggtaatttgagaaggagctctaggccatcacatgtggaaaaggaatcacggggaagacacatgtggaataagaatctccatgagaaagatgctgggctttctgtaaatggctttaataacatagaaataccagcagcagatgcttccagaatgccagcataatatactctaaggtgaccattagaattatgattctatccgccgcattttcgcggggatccttct

SEQ ID NO: 378220 - DNA, 457 bp, Homo Sapiens
aggaccggacaagggctgtagctctaatatataaattggccttcttccactggcgggcacccagggcggctcaattgccttaatggagcacctggcttcgatgtagtgattaatggctgcatcaagctgcttctgctgcaccaggtggtccccccatgcctcctctagtttcaccacctccactgggaaggccaatcgagccagctctaccgctttcatgaatgcgttgcctttacggtagcactccagggccttctgtggattgtgaatcttctcaaagagatcacctgccctttcgtagagttcccccttgataagggctgcagtgatgtgttctaccagctctgtgttggctagcagttcctctcgggtcagcaccagccgagcagctttggcagggagcccagctttgaggtagaggctgatggctgctagcccatccccttggctctcctgt

SEQ ID NO: 378221 - DNA, 470 bp, Homo Sapiens
acttgggctgtagcaggagcctgtagctccatctccatttgtgctgttattccaggtagcaccacagatatctggtgcttctctttcaaactctgcttatttcaggtcattctcccttctttgggttgttatcttcgcccgtcccagcagggatttccagggacagctctgtgaagcagacgttgataagcagaccccactcaggacacgtttccctggaccagaccgctggttggtggggcagctggctggtgaggaagctgcagggtgtgaaacaggagcagctgggctccgttaagtgtgcagagggagctgctcgagagaaggaagatgatgaacagaaagaagcaagagggagggatgagaaatgcctcatctcattctcgaaggcctcccgccagcaggaaaagccacatgagccaatagactggtcctgtcgtctgagctatccaaagtctggtgtctgtagt

SEQ ID NO: 378222 - DNA, 462 bp, Homo Sapiens
  misc_feature (48)..(48): n is a, c, g, or t
tccggccggacatgggctgtagcctgtcgactcccacatagctctagntagtgaaaacataaagagtctcagccacagccccggtgtggtgaaggagcgtgctaaagaaatcgagtctcgagtggttttccaggcagggctcaccaaaccatcccaaatgaggcgctcagcttctctcgccaaattaggttacttggacctctgtaaagactgcttaccagagagggagcctgcctcctgtgaatcccctcatctcaaactgcttcagcctttcctcagaacagactcaggcatgcacgcgatggaggaccaagagtccctagaaaacccaggtgccccccacaacccagagcccaccaagtcttttgtagaacaactcacaacaacagagtgtattgtgcagagcaagccagtggagaggccccttgtgcagtatgccaaagaatttggttctagtcagca

SEQ ID NO: 378223 - DNA, 197 bp, Homo Sapiens
gggacatgggctgtagctagtccttgttccgacccttccctccctggacttacacagcctgtggcaaaggtcataaccaaagcagcctgtactgaggaaaagctctgtgctgagtgcttgtgtgtgcctgattcaatgttaaacactcagcaacccataggagggaggtactattatactgtggccatgggtgggga

SEQ ID NO: 378224 - DNA, 340 bp, Homo Sapiens
gggggtgggaagagcattaggataaacagctaatgtatgcagggccaaataccaaggtgaagaggtaataggtacagcaaaccaccatggcacagattaaaggaacacgcctgcacatcctagaaaatgtatccaggaacttaaaaataaaataaattctaaagataaatacataaataatctggacgtgctggcaggtgacatgtaaactggcctctctgtaggtaggctgaggcacaagaactatttaaaacatgtggaggtggagagctacagtgagctgagctacacagcagctgcatttcaacctcaacaacagaggctacaggcccaacgtcgc

SEQ ID NO: 378225 - DNA, 410 bp, Homo Sapiens
  misc_feature (106)..(144): n is a, c, g, or t
tggcttggacccatggcctcaaagcccaaccctaccactgcttctgagagtggagctttagaaaaagaaaaaatataaataaatttaaagaaggacctcaatctannnnnnnnnnnnnnnnnnnnnnnnnnnnnnnnnnnnnnncaaaacagggcttcccaaggccctagtaacagagaagagtctgaaatcaaggcttcatcatttgctttccaacccctctaccacttcagaaccccctcaccatcaagatgccctttatgctaggtactctcaagcctccccgactgtaccatttgaaaactccagggcactgctctcaactctgtcatacattttgtgacatctgtagcggcacgtcttctttacttgcgtgtcctgttcgggggatcctctatagactcgccctg

SEQ ID NO: 378226 - DNA, 621 bp, Homo Sapiens
cgacacagacacaggcaagtcgcgtcccgggtctgccgcgacgggcgctcaccgcaggggtctccttcctcttctggcagcgagagcgacctcttttatcctagcaggccaccaccttcgcggcaacaaacatcatttcctatgcagttgcaaagcatgctcccttgcaatcagcgatcaatactggcaaagtggctccaggataggaaaggtcgcacgtgtgttggtaaatggaaaggtttatgaggcgcaggtggtcgtgctccgcggagattgtggtattagcatgtcaaagacaaaacggaaccaaggtatacaggcacagagtctcttcctggggctccgggaaagcttggcacgaccctcttgagccttcagtttaaaatgaaacgctggcgccagatgtggccaccacattgctgataagtccagtaccttccgttcgtgcaaagctttgtgatttaaggttaagtagtgtttgcttacttctctcatttgagccttataaagacagtgtgaagtctgtagtgagtaaaagccctattttaacagaaaaggaaccaagggaccaagttggaccttgaatctggggtctactgatgttccattcactacactgct

SEQ ID NO: 378227 - DNA, 572 bp, Homo Sapiens
  misc_feature (408)..(487): n is a, c, g, or t
aacaggacaagcaaggtgggtgtttgaaagctgagggaaattgccccacaatggcctctattttcccaatcaagtaggaagctaagttccagcatggaggagactggggagggggacactgagggaggtagatgctgaggacactggaaggagctggcaagacaaagaaccaataagctccagatgaggttggaaattttgagtttgtagtggtgtctacttggatgtgattttcttcggcaatgatcaagctcaacggaaaaggtaaaattttagtactgatccatgctggggttttgctgggaagataagcaggaagaaatggaagggaatctaaaacattagcttaaaatgataatgataaagtaacgaaatcaacaaaaagaaacctggctacaacagttagtnnnnnnnnnnnnnnnnnnnnnnnnnnnnnnnnnnnnnnnnnnnnnnnnnnnnnnnnnnnnnnnnnnnnnnnnnnnnnnnngaccaaataggaccctgcccactgcccctttgatctgctttgggcaccctgtactcacagcacttaggatgctgccctgtcactg

SEQ ID NO: 378228 - DNA, 241 bp, Homo Sapiens
cgaacaggacaggcaagaacttgaccctgagctgaccagccgtgagcatgttctggaaggggtctgtagagacactcacggcggtgcttgatagaaacgccaagcacttctttttctcgctgtcctttctagagcactgccaccagtaggttatttagcttgggaaaggtggtgtttctgtaagaaacctactgcccaggcactgcaaaccgccacctccctatactgcttgtcctgttcg

SEQ ID NO: 378229 - DNA, 475 bp, Homo Sapiens
  misc_feature (357)..(371): n is a, c, g, or t
  misc_feature (426)..(426): n is a, c, g, or t
  misc_feature (442)..(442): n is a, c, g, or t
taaatatgtaagtacctgtcattagtaaattataagcttcctgtttggaaatcttcccatgtaaccatcttaaaaagagaataaattagatatataaataaagtcctttttgctgttatcatatgatcaaaattaaacaaccaatatagtaaatttaattcaaagtgataaaataaatgcaattaatcaaatcatctcattcttattacattttaatacattttatatacatattatacttaatttcaactaaagatagtaaaactagaaactatcaaatataaactacaattttcattaccaatacaaaaatggcaacaatttttaatcctgataataacagactgttataggtcnnnnnnnnnnnnnnngtggggtaaggggaaggaggagtagtacagatagagcctactccagaacttcccnttgaaaaataattaanatcatttctgaattttcctataacatctgataa

SEQ ID NO: 378230 - DNA, 519 bp, Homo Sapiens
  misc_feature (499)..(499): n is a, c, g, or t
atctaactagtttgagaagcttaccaagaaagcaagaatgtgtgagaacattcctacatacagagtttctcaactatagcgtgtatcctgcccagcctcctcccttaacagaaccaggactccatttgcaattctgaaagagagttagctctggactgctaaactccagaaattgcctatgcctacaatatgcttttctatacctcctgtgctatacttagagacagaagaatttattactactattagaaggccttcttctgacaagggaagatagcttcaagtcaaaatataccttttatccccatcactttacagtcactagtcaatgactgttgttacactaaaatcaaaaggcctttggtgagctcagtgacagtgacctctgggacaatcacagaaatgacttcactggctgctctgaatgacaattcttaagtggctaggacaaagcaaaagcgagtataccttttgaaaagctgtctaagtggtatttccntttccttctgaggacgtatt

SEQ ID NO: 378231 - DNA, 614 bp, Homo Sapiens
  misc_feature (382)..(416): n is a, c, g, or t
  misc_feature (430)..(430): n is a, c, g, or t
cttagggttgcatttataatttacagattgccttccttgggaacaagtatttttttgtatgatctgtctaaaaacctctcacctgaattttgtggtagaaattctgtatttgttgttgtgagcgtgttaaattgataacaaaccaaactacttgatagctaaagcagattgttttcgggtggggagaaaaagccctaaatccagaatgtttatatttgcctaaagatgtccttaataatacaatatgctttagatcttgcttatttagtgattgtatacccaggaaaacaattagactcaaatcagtgatgttcttgttcttggtgttcatgaacatatatcaaagattaaaattgtcctgtgtttcttgtttcaaggtacnnnnnnnnnnnnnnnnnnnnnnnnnnnnnnnnnnnaagtcttaaatgtnttattagtctacagctaatcgagtttattgtaatattgtatgtacagtgagattaatgtcttgcgttttcatcctttgtgaattaaaaattctcacttgttttgtaataacaaagctagtaatattttcctgtcttgacagcttggttttatagtagaaaatatattaaaagctgaaataaatt

SEQ ID NO: 378232 - DNA, 363 bp, Homo Sapiens
aggacttgtgccacagctactgatgttgaatttaacccttggtgttgggggtgagcagatgaggggaagaacaaaaaaaggataaaaccttggtttccaaaagacctttttgacatccagatatggtaacagtgacctctgtctctgcaggtatgtgtggaggttcctggacttcccaggactctctgtggcagacaatcctgacaaattgccctagtggtagacaatcagctgtctggttcgttctgtgagggcttgtgctttttctgtggccctctcaaagatgctactacctaaggaggtagaaatatccgggtataaaatgagccaggcctggctagagtatagatccaggttcctgca

SEQ ID NO: 378233 - DNA, 401 bp, Homo Sapiens
  misc_feature (39)..(39): n is a, c, g, or t
  misc_feature (72)..(72): n is a, c, g, or t
tcagtgtgtgctactggggtgcagtcaggcacagtggtntcaagggagcacagcaaggaacccaagaaggcnccgcatgtctgcagttggctgactattgcccgggactccagagcatccatggagggccccacagggaaaggcaggagcaggacgggtctagggaggtgaaggccgacctgacctgctaagagacgagaagagagggaggggaaagtcttgttcctgccaggacattgttaatgagaggagtgagaaggcagcaggtgaagagagtgtggcatggaaggcagaaatcagagcgtttttgggtttcgtgctgacctgctattgggaatgaaaatcaagactcaggtgcattctggtccctttctcagggttagccgaacaccacccgcatc

SEQ ID NO: 378234 - DNA, 494 bp, Homo Sapiens
  misc_feature (482)..(482): n is a, c, g, or t
tatgtaatcacacatctcttcaattcacagctctgagcatcataaccaggattgggaaccagcccttgtgttgcagggacatggcttccacactgcccttgtcattctttttggtactgtcccttacagcatgctgtagtttgatccagggctgagcattcctacaggtgctccccagcgttcctcatttcaggcctagtcaggacctctagagcccatctgctgtgagcaaaagagggtgctaaatagtgaaatacagcttgaagcaagccaaaacctgtttcacataaaatctcacatggatgtcctgtatatatagaaacctggtgaaagcacagggcatgctgtcatggagccctcccatttctccccactccagttcaaggcagctttcaggagatggagaggaaaaagcttaatcataagaagaactgggtagaccctgagttctctttcggattctaccagtactatatggcctngcttgtcctgtt

SEQ ID NO: 378235 - DNA, 470 bp, Homo Sapiens
  misc_feature (16)..(16): n is a, c, g, or t
  misc_feature (24)..(24): n is a, c, g, or t
agacaagcagacctgnaagtcatnttgtctttccctctctgtcatgttccatatctaacttaacatcaagctctgtccattttacttcctgacttcctctgtaacccatttcttaccgtgttaaccatcacctggtctcagctacccctgtctccctcctgactggcctcccacttccactcttgcccctccactcaattcttctctgttctgcagcccaagtgaccctctcaaaatgtaaatctgatcatgtcactctcctccttagtgctccctagtgactctccagagcttttggaatgaaaagcaaaattcctgtcatggtccacaaagccctgcctagtctggctcctgccaacctatttccccacaatccagccacgttggctctctcctcctgtgtttcctgccaccacgtggcctttgcacttgcggtttcctcttactgcaatttcctcccgccctcactg

SEQ ID NO: 378236 - DNA, 329 bp, Homo Sapiens
  misc_feature (318)..(318): n is a, c, g, or t
ggcgcatctgggcacagctgccaccggggtgctcggcaggcaggtccacacacacgccggccaagtcgctcatctcaaatgcgcgagtaccgtgatcttggaaagtggtgcacaggcccctgggctggggcttcttctgcctccacccccatcactggacattcggaggtcagtggaaggccacgggagtgcacgtgaaggtcatgtcaccatgatggccccgaggggctgctccttcatcgctccaccctaccccatgggccagccactggcacacaggtgtccttatatggtgcttacctcttgcgtgtcctgttncggggctcctg

SEQ ID NO: 378237 - DNA, 467 bp, Homo Sapiens
cgaacaggacaagcacggaaatgcaaagcaaacatctacaaatatttgaatccacctgtcacctcacctaccaacttccccctctactactcataaagtggtaggactcctaatgccccgcttccttccacctgagaaccaaccagcaccctgatatttcaaagccagacctaaagaaccatggttgccaataacctcaatgccaaaccaaacaatcctaatcacatttttacttttcaaatccagtctcagagcagagctgtagattaagggacaaaaagtcattgtggaatcttttcaaatagctcttgtaaaagcatcagttgggaaagagtttatgagttcctctttgtcctctcctctggagaaaagacagaacatgcaagaacactagatacaccaagctatgggtgttgaaatagactagctggtgacctggatttgcaaataccctagggacatgaaaa

SEQ ID NO: 378238 - DNA, 602 bp, Homo Sapiens
  misc_feature (42)..(42): n is a, c, g, or t
agccgcccacgggacacggaggcagacactggagggaggcgnccacgggacacggaggcagagactggagggaggcggccacgggacacggggccagagactggagggaggcggccatgggacacggaggcagcgactggagggaggtggccactggccagggaatgccatcagcacccagacgctggaggcagcaaggaatgctctccccctaggccctagagggaggcggccccgccaacaccgatggctggatgatggccaatcgacgcggattccagatctgatagactaagtctctgctgctttaagccaccaggtttgtgagcctgggttacagcagccccgggagacagacctaagggagggcggcagccgggctgggacacacaccctccgccgtccacagagagggagcgtggctgagcggaagcagccacagtcccattccgccaccaacagtggtgtcacgggaagtcgtactgaactcagcgtggggaggaaagtaaggagtgacgctggagacgtcacccagccgctcctggcttcagtatttcaattcgtaaaaaagcaaacaaagcccaacagctgtccagtctctg

SEQ ID NO: 378239 - DNA, 723 bp, Homo Sapiens
actggaggaaccttctcaccttctcctaacacatggggaccattcccagtgagacctgtgaatcctggcaacacaaatagctctccaaagcataataacacaagccgtctacctaaccagaacgggactgttttaccctcagagtctgctggactagctactgccagttgtcctatcactgtctcttctgtagttgctgccagtcagcaactgtgtgtcactaatacccggactccttcatcagtcagaaagcagttgtttgcctgtgtgcctaagacaagtcctccagcaacagtgatttcttctgtgacaagcacttgtagttccctgccttctgtctcctctgcacctatcactagcgggcaagctcccaccacatttctacctgcaagtacttcctcaagcacagctttcttcacaaaagatggagtctttctctgctgtgccacccaccaaagagaaagtgtccacacaggaccagcccatggcaaacctatgtaccccatcgttcaactgcaaacagttgcagtagctctgccagcaacaccccgggagctccagaaactcacccatccagtagtcccactcctacttccagtaacacacaagaggagcacagccatccagtgtgtctgatttaagtcctatgtcaatgccttttgcatctaactcagaacctgctccattgactttgacatcacccagaaatggttgctgctggat

SEQ ID NO: 378240 - DNA, 231 bp, Homo Sapiens
agctggacccctccgcaaccctcttacccactgggctggagcctgctcacaaaaagccctttcagaatcttcctactgacacaacacactcaagaggcagattccagggtccacagtccaaagtgatctgcatgcgatttgttccaacaaatgcctgacaagctatgtaatatctgaggaatagattaggacccagggacatggaatgtaaatattctaaatataaatact

SEQ ID NO: 378241 - DNA, 405 bp, Homo Sapiens
aatccacgttccacataacctatgcaggtccctgagggaactgagtaaatgcttcacagaccaagaatgtcgaccttgccatctgcctgcaacctgctaataagcgtcaggtatgtgtatggccaagcctctcctctcatgctgtccagtagaagtccctgtttctggaccctgtcactcatcacagcagcaagctaatgtgctctcgtggggcctgtgttggacttttccttgtgccctctgtagccactgttttttgaatgcccacagtatgccaggcacaatgccaggttcctaagcttatttgccgggcgctgtgctgagcctttacttgcgttatttcattcagctttcatgccctctaatggcagtgcccttagtatctccatcctgcatctgagaaca

SEQ ID NO: 378242 - DNA, 430 bp, Homo Sapiens
tggtgtgtggacttgccagcaatgcttacaaagagagaacggtgtcctcatttcacagatggggaaataataagggctcaggaaggtgacatacttctaataaaactgaaatctgagctgagcttggtctgacttttacaagtgcattggactttttccactctaggaaaacttcctcagctctaacttccaggtagactcgggttaataaatgtcatgtcacagaaagttctagcaaagcccatggcttcacaaagcagatggtttgatatgaacttaatgtttttgtctagaattatccttcataaatgtaggaaaggcaaagacagcccttcaccttctggtaaaacacaggcctcaatttctcatgctccctccatcttaacctcttcattgaggaaaaaataatgctaagtgactcttgtccaac

SEQ ID NO: 378243 - DNA, 530 bp, Homo Sapiens
gactttgtgccccatgagcctgtgtacccagtgagcctatgccccctgagtctgtgccctgtgagcctgtgtgctctgtgaatctgtgccccgtgagcctgtgtgccccatgagcctgtgtgctctgtgagtatctgacctatcaccctgtgtgcgcctgtgactctgtgccctgtgagcctgtgtgccccatgactctgtgccccgtgagcctgtgtgccctgtgagtctatgccccatgagcctgtgtgccccatgactctgtgccccataagcctgtgtgccccgtgtcctgtgccccgtgagcctgtgtgctctgtgagtctgtgccctgtgagtctctgtgccccgtgagcctgtgtgccctgtgactgtgccccgtaagcctgtgccccatgagcatctgtgatctgtgagtctgtgccccgtgactctgtgccccataagcctgtttgccccgtgtcctgtgccccgtgagcctgtgtgctctgtgagtctgtgccctgtgagtttctgggccccgtgagcct

SEQ ID NO: 378244 - DNA, 451 bp, Homo Sapiens
ccctggtctccacgctcttgcccatggccccctccaggctattcccaggtttctcagccttggcactattgactgtttgggccaggtaattctttgttgtgggcagccatcctgtgcattggaggatgtgtgtgtctagcatttctggctttaacctgctagatgccataatcgtcaaccccctccccagctgacataaccaaaaatgtctccagacgttaccaaatgtcccctggggaaacatcaccctggcttgagaaccagtggtctagtctcaacacagtcaccagagaaatcttattaacattgaagtctgcctgtgtcccttacagccctcccatcctacgccagtaaacaccaaagctctccaatgggccgcaggccctcgtgagccccctaactcatctcacgccatccatgctgtagccagcgactgtgccatcctatctca

SEQ ID NO: 378245 - DNA, 578 bp, Homo Sapiens
ggctggaatgcgcctgccacccccaggctagacgagggggcagagggtcagggtgggcattcgttgtgccgcttttgagctttgtgggccagagctgggtgtagggctggacaatgagcctcctcttccttgaaagaaggaattttggctgagacaatagggccctgtctgttctggcatggggggtggtggctgactcaattctgttccccctaagccctaacaaatgtcatgaagagaggggggcagttttccccttggtgccctgggctgcccccctgcccctttgtgacgacttgcccttctagctttcctcagctgatcttgctttttctcccataacctgaactgctttgttccctgcagctggttctctccctgccccctaactctcccctagtctgttttgggttcaagggggtactggtggtgttacagagctcatagcttctgatctggggagtccagaaataggggcctcagagggttggaaagatacttctagggagccctttgctgggatggggatgagggtagtgggacttgaccctactgagctgaccctgctggagctaagg

SEQ ID NO: 378246 - DNA, 647 bp, Homo Sapiens
aaatgcacctgaaaattcataggacatgtctcccaacctctaaagttcatgtgtgatatcaagacctccactatgctaaccacttttgcttacccagccaaattggcatgatgtcattgatagatcattgtgaaaatctttagaatactcaaataatccagatctctttggactgcacttgatagagggcagaagaaataacataggcctggagcaagattgtaattgtgtactattgtcctcttcatgtgaatgtgaattgattttgatcctcttataggaaaagaattcatttgccaaatcaatggctacataccacatagcaagcaaagatacatctgatatgaaggttgctattggagatactacttagttaagtttgtggtagtttattgtcatcctacaggatttatctggtttttggaggaaacagaccaatgaattaagtgatgacacaatggagactatatccattagatacctaaagatggcattaatttttgccatgcctcaggatataatatcagttttgatatactatctttccaggattgggagaattccctgttatgatagttcttacaatacagcaaggaccaatgcgaggttgtgtcttaagaatgtttaccccaattatatatttggag

SEQ ID NO: 378247 - DNA, 202 bp, Homo Sapiens
  misc_feature (89)..(149): n is a, c, g, or t
ccattagcctagcatggtggtgtggtggcacatgcctatagtcccagccactcagggtggggagcactgaggtgggaggatcacccaannnnnnnnnnnnnnnnnnnnnnnnnnnnnnnnnnnnnnnnnnnnnnnnnnnnnnnnnnnnngatatttttaaaaggatcttctctgttaaagataatcaaataaacaggtggcc

SEQ ID NO: 378248 - DNA, 435 bp, Homo Sapiens
  misc_feature (311)..(371): n is a, c, g, or t
cacctgagaaaatcatatgcacaggatgcacccacctcacctttctctgcctcatcatgtcagaaaaagtacccctccttttgtcacaaggcaaacctgagataaaagatttagatggcctgtaattccagcactaagggaggccaatgcatgcagattatttgagtctaaaaaagaagcctaagcaacttagggaaactgcatctctcaaacaaatacaaaccattagcctagcatggtggtgtggtggcacatgcctatagtcccagctactcagggtggggagcactgaggtgggaggatcacctaannnnnnnnnnnnnnnnnnnnnnnnnnnnnnnnnnnnnnnnnnnnnnnnnnnnnnnnnnnnngatatttttaaaaggatcttctctgttaaaaataatcaaataaacaggtggccatgaggctagt

SEQ ID NO: 378249 - DNA, 684 bp, Homo Sapiens
tcattcattcattcattccttacatctgctgagagctcatttaaaaagcaggtgctatagcaggcagtggggaggaacccctggataaaaggaatttctgtccttagggttcagtctaccaggatggacagacacaacaggggagcggcaggtgggggcaaggctgtaggtgggcttggggctggccccgtgaatgtctgaccaccgctgtcaccgccatagcagcagggcagcttctccggaacttgtataaatgaagcgtgtcctccttgccccagacctgcttgatcaaagtctgtatttcagcaagatcccccaagtcttgcacacactagggaagttagggatgaccatgacctgtagctcgtgaggcctcggtacaagaaatcctcctccaggctggcttggggagacaggcagggcccagcaatgccttctccagccacagaaccatttcccactagaacctttcctcctcacctctttcaggcctaacagggtgggctgctggctgtgtgcaagggtgggatgagggctctgctagagccaacaccagccctgccagctcacttgtcccttgtgcaaacactcatcttgggctcaccaggccctacctgacatgaaccaagctgttaacatcccccgccctcctggggcctggcccacagacatggcccagcatgg

SEQ ID NO: 378250 - DNA, 137 bp, Homo Sapiens
cgagagagatccttagtgatagtattctgattggtcagtaatagcttcaagggaggctcagcctctgtagcacctatggttcaaaaaaatcatgaggctgtctgttaggctgttcttacattgctgtaaagaaatat

SEQ ID NO: 378251 - DNA, 177 bp, Homo Sapiens
gcaaaccacacaggctggattaacctcttcctgcaaagcccctgccctgagcttgggaggaatgagggagggacttaatcagcagaaggcatcttaataggggggacagtccgtgtctaacatctcagctaatcaccttttctcattttaacatgaggctgtaaaacacaagccata

SEQ ID NO: 378252 - DNA, 419 bp, Homo Sapiens
cctggtccaaagtggacgagaatcccattgttaagacatgtctcattaagacttctctaagatggagccagcaaacagcccagtagcatcgaggctgctgcctgggaaagagtcccctcctctcccctgttcattaatgattatgggaggttttattccccccaacaaaagtgttaattagacatcatcggaacagggatattacacaaatgaattaaactcaaaccaatcaacaagctggctctgtgcttcaggtcccccgaacgaaaagggaattgaaggctgtaatgggaaacaaacggtaagatgtctttcctaatatcaaataataactaggaaggctgcctttgcttctagagcttgtcttcttattcttttctttctcccctccactacacagcacacacatgctcacagcc

SEQ ID NO: 378253 - DNA, 444 bp, Homo Sapiens
ggcaggaggggtgctggggggtgccgtgtagagttcacagcggctacccgagaatggtggggcacactggcaggagtaataaggaggctggcgctgagggtggcagctgcccccgtgctggcaggggctactggcacagcctgactcgcagtcccggggactggggcagaagcagcggggtccagaggcggtgtgcacacactgctcccccttcctacatttcacttgtccacagctgctctggcaccttgccccggaaaatcccgggggacaacggcaaatgaaaccatcaggcatgttactggccacagcacaagtccctccattcaggcagggcatctggggacacacatcgacgaaggtttcacagtgccggccagtaaaggcactacggcaaacacacaggtagtcattggtgagctgtatacagtccaggctgccctc

SEQ ID NO: 378254 - DNA, 211 bp, Homo Sapiens
gagagattaaaactgagggcacagtggcagctgtgagggagacagaacgatgctcatgctttggattggcaggaaagaggggctatggcggaaacaaaaggagatgagggcaggggcacttttaggaaggactgaggctgctggcagtgtcacatgactgttgagaagaagggaatttgttagcaagtggttacatttagtaggaaaagtg

SEQ ID NO: 378255 - DNA, 737 bp, Homo Sapiens
cgagctcggcaccccagctagcactaatgtcatggatagaagaactttacattgatttgcttaaaacatttcactttaacaatatcttcattagcgccttcagagtctgccaatggacaattttccagcactcaaagataaagacaatcttgaaattaagcttatacatccaggtcaggagttttgttctcacatgatttcagaagggtgaattcttaaattatcgattctaactcttcatcattgaattaatgggcttaatctaaaatgtagctccaaactaggaaatattttaattcaggctggattcaaaattccctggtcacaaagatgattcagtgcattaggatctggtgcatttatgccccaatttgcaatggataatattattttaatgaactttttatgcacacagatttttttaaaatagcctgaacaaatagaatttacagaaggacctccttgcaaaattctcatttggcacttattatagactggcttgtttcattagttatcttatttccatactcaattgtaaacaactgaagacaggatttacttacaagtcttcttatggcctgcagagctaggaactgaactgtgccttgctgcaggaacataaatatttaatgacagattggctgataataggacactaacaggacgccttcaaaaggagataccatataaaatgaaaggattgtctcctttataatagatgagaacagataaggttt

SEQ ID NO: 378256 - DNA, 233 bp, Homo Sapiens
gtgtgagccaccgcatgcggccttaggtgccaggcttatagatgatcacttaattcttgaaacaatcagcaagataggtatgattatgctgcttttaaagaactgaggctcagagatgtgaccacactcttccgtagctgttgcggccacatgtagctattgaacacctgaaatgtggctcatgtgtctgagaaatttttcattttttgttggaattaaaatgtactgtcccc

SEQ ID NO: 378257 - DNA, 878 bp, Homo Sapiens
catctgtaaagtattgattctcaccttgacaaggtggaggtcatgcgtgtattctcccaggcagaggtctttatcagtacttagccgtcagaatgatctgtaaggtgagtacagccactgatatcttcaactgctcagtaccatctccaaggtcatggccagggcatggtgggtttggatctggaccatctggatctcacacggttcagcccaaatgatttctgtggtgtctgtaatcgtggtgtcttgtgaggactgatgaccccagacgtgcagggccacccttatcccttcccctccccttctcctgtcttctcagcacccccagggttacatggcggtcaggctgagaggcaggggtgacaggatggggtgggagagctccagaagggtcggagacctcactctggtaactgtcattctctagggtctgggaattggtcttggaggtgctgactcatcagaattggagatgcccaggctctctgatgacagatggctctggaggagcacaggaggggtgcacccatcagatgttgatgtctctttccagccgcccttcttcaagggggtactgccaggagcctctggctgaggcacctgcgtcctggtttcaaggcatccagggggtcacttgatgatctgggctgttgcctgctgagcgtgggattcgagattagaggaggtggctctagtctctgagtgtcagcgtcttcctcctggatggagctgactgcacactgccctggtttgctcttggaatctggggcgagtgtgagggtgtgtgtgtgcatgtgtgcccaggtgtttgagcatgtggatgggtgcacgtgtggggtatgtgcataaggctaatggcgctggggtaccgagctcca

SEQ ID NO: 378258 - DNA, 519 bp, Homo Sapiens
ggttctgcaggctgtacaagcacgcaacagctctgctcggcttctggtgtggcctcaggaagcttctactcatggtggaaggtgaagggggagcaggcgtgtcacatggcaagagaaagagcgagagaggaggaggtgccaggctcctttaaccaaccagctcttctgtgaactcatagagtaagaactcaactcactactgcaagaacagcacccagccgttcatgagggatctacccccttgacccaaacatctcccaccaggcctccctccaacactggggatcacatttcaacatgacatttggaggggacaaacatccaaactacaccagctttaaactaacaaacttgatcaatggtactgctttgcctcccacctccccaccccctaaatcctgttgtggttctatgtaaaatttcaaaatttgtgtagacacaaacaaaatgcttcaaagtaagaaaggtacaagtaatttccactaaaaagaaacccccgaggctgggcgcggtggctca

SEQ ID NO: 378259 - DNA, 354 bp, Homo Sapiens
gtgtgagccactgcgcccagccctaagcctccagtttttgacctcaacatggtgaggaagtagtagaagtatgtattttgggtgaagaggagagtaaaagcatgctcccatttatatgctaacgctgtgctttttaaaaatgtggttacttcaacttatgtaatcttttcattgaaaacatttggttattatgctaacctttgactattctatttaaaaatgtccgacattcattccatattttaaagctttctaataaacctgagttcccacttgttttttttccttccagcttttattttaggttcaggggttacatgcacagatttgttaacatgggcacattgcgtgtcg

SEQ ID NO: 378260 - DNA, 125 bp, Homo Sapiens
caggaattgagtcagtcgtcgaactaaatagcttttaaggcccatctaaatcctgatatttgatttttctttcattttaattttagagttatataggctagggcgctgggtaccgagctgaatgt

SEQ ID NO: 378261 - DNA, 192 bp, Homo Sapiens
gcactgttaaaaattaaacagtttgaacacatggtgatttatgaatgagaatcacccagtcgtggtttgtggtttgttatcgaaaaatttagaagaattgcattttagttgcgtttcgattccttaggtagaaccttagtgcactacaaacactttggtccaattgctgctcttaatttcttcacactgcct

SEQ ID NO: 378262 - DNA, 323 bp, Homo Sapiens
ggttggaggtacagaacttgagacactcctcgatgaacaggttgagatagcgctggcggatgacggtggggactttgcccccaaactctttggggataatgggtatctttaaactctagagggaaggcaaaagctgccatgggtgagggcctccacaaggcctccaacggggaacgcagacgcgatgaggccgtgcccatggctggaggcaagagtgaggtgcgctgggacagatcagcctggctgcaatagggacagacacgccaaggcaagacaggagcagcaggggaaactgagggcagcggatgaggctgtggcgcggc

SEQ ID NO: 378263 - DNA, 462 bp, Homo Sapiens
cactagcctcatcccactagcctcattctatgctggtgagatcatgaagataagagctcgggtgctggggtcagatggccccaggccccagccgagctctgcacccttgagccagccactaacctctctgggcctcggctcctcatctgaggaatggggataatcactgacctgcctcacaggattgctgaggtcaaatggaatcgtgtggtgcgcggagccgggcacacagcaggtgcaccataaacaagcacaattgggtggtggtttttgctacctctgggcattcactgactctcagtaaacactctctgagcacctaccgcctccaaactctgtctagaaaagccactgaccctggcgtgccggtgtcacagtctccagggaactcgatacatgaatggtgtgctcagagccatgacagaggacacgcatgaggctagtgggtggcgagctcgaatt

SEQ ID NO: 378264 - DNA, 371 bp, Homo Sapiens
  misc_feature (56)..(79): n is a, c, g, or t
  misc_feature (81)..(114): n is a, c, g, or t
ggggcaattgaaatagaaattaatatccagtagaatgaaaacttcagttcctcacnnnnnnnnnnnnnnnnnnnnnnnnannnnnnnnnnnnnnnnnnnnnnnnnnnnnnnnnncacgcagaccatacgtacaaagggaatgctcacattccacatccagtgttcatgtcactagacgtcgcacaatggccaaaaatcaatccccaggcaaacgtgtagctgagatatctaaagaggtgaatgggtcaattaaggggcctcttcggagtgctgggtgtgttcctacttgtggttgaggatttttcccccgatttaaaataattgagtatatttctgtacataggaaacaactgcttaaaaagtaggctgag

SEQ ID NO: 378265 - DNA, 426 bp, Homo Sapiens
gaaaagagtggttctggaagtccctggtgtaactttggtgtagcacatgggctgtgggctctgtgtgcacactcgagacccagcgcaagtcaccactgccatggagtcacctgtggacccaggggctgggctagtcagagcagtagatgggatgaggatctgggggccttgagtggaggggcagctctcagtgagaagagggtgcctttggctgcatctgcccctggaagggagccaggaaccaacccctctacagtggagatgctgatgggtggcctcgtcccggagaaggggccaggatggaaaggacggacctccaggaacagccagcgccctggcttcctgacaggcagctcccaggtggggagaagggcttgtttgacacaggtgtgaggtttgcagatacagggtgatgaggctagtggg

SEQ ID NO: 378266 - DNA, 138 bp, Homo Sapiens
tgctgggattacagcttgagccaccacacccggcctaggtattcttcttttcaaaagttttaatttcagactgtcatcacagtaaatagggattaattcaggattgtgaacaaaggttaataaattttagcttgtggt

SEQ ID NO: 378267 - DNA, 403 bp, Homo Sapiens
aattgtgttgtagtataagcaatctgttaataaaaatggaaaattctgaactaattaatttgaaaaggaatgcccataatctcagtcagagaaacatttattttggcacggcacaattctattctcttgtgactatgtcagtatggtaagtgtggcacatttgattccaattaaatcttaaatgactatagagcttaattccagttaaataccctagtgaagctgtagttttgtgagctgtagctatagaaaggggcttctgtgaattattttccttttactttgacatgattaggataattttgcacattagctagaaactgtttgcataaaataaggatataaactccaacctgattttataaataacattcagagcagagtttatgaggctagtgggctg

SEQ ID NO: 378268 - DNA, 288 bp, Homo Sapiens
ccttggcaagaagttgcacctgcccagagagaaaaccttttgaaactggcacaaaggcactggagagactggcagggccccctacttgacgatctggctcatccatctgcacactgaccacgctaagagctgtctgcagtgatggaaaccttctctagctgtgctgtcctctatagtggcaccagctgcctgtggctactgagcacttcaactgtggcggcacagactatgttaaagtgtatttaatcataattaatttaattgtcaacgtctgcatgaggctagtga

SEQ ID NO: 378269 - DNA, 426 bp, Homo Sapiens
tcactttaaaaggttccccaagccccataaccttaaccatgtattgctacttgactcacaccaatgacaccgcctttctacagtgggtaccaccctccctgtgctgctctgcagacccacccatccctcagacctctcagggctggggatgggcagcacgcctgggctgaggtgttgtctgcttcactccagggaaaacattgaaacactagccttggaattggacttttggaccaagaacaggactgtctctgtgagcttggagggaaagaactacctcatgaatcgctattatgtcccttatgggggacccaggtgaggaactgggcagcccacccctcaatctcttacctgctcactctggttagagcatcacaatgccccgggcaggaggaggagtgacttagcctggcctctcagatggtg

SEQ ID NO: 378270 - DNA, 425 bp, Homo Sapiens
ggagggagggcaaaggggtgtcgggcagggtccccttccccagggtgctgggctcaaacctactgtggagcagcccccaccccatcccccagaaacaaatgctttgggcaggctgctgggtcacgggcccctgctggctgggcctgacagccaggcctggaatgaggggcagagaccccggagcagcccaatgaggtgcaagcaggcctgcaagacagactgaacccgaggctgggggcgaggaggtggcgaccacagagaatacaatgtttacaaaaataattacacagataaacagggctgggcagcacagcctgacaagtaacactgggcagtcccccagcccttcatcctgcccctagggaggaatagccaaatgtgcctggcagaggctggggtcggctctgagggcaggagcactagtc

SEQ ID NO: 378271 - DNA, 145 bp, Homo Sapiens
gagcactgaggagcagtagtggctttgctggtggtggagatggtgatagtgattgtgaccatgaagacaaaaagatgacaacgatgatgatggtaccgatggtgattgtagtggtgataatggtgatggttgtgatgatgaaaac

SEQ ID NO: 378272 - DNA, 261 bp, Homo Sapiens
cagcccactagcctcatatcctcatctctatcatgagtgatttgatgaagacaattcccaagtgcacgcccagtcttgacattatgaaagtctcaaattcctgcagtatgtcccacagggatcctatcttctgcgagctcatagcctgaaacgatcacttgacaattaaccacatatcaccccatggcatccgtcttgttgtcatgtgttatttaactttacagaagagcagtctcacatccaaagcatgtcggcaggaca

SEQ ID NO: 378273 - DNA, 379 bp, Homo Sapiens
tgacaaattggagtgcatatgcccctgggagagaaataaggacaccttgtttggaagtttgaggagataatgtttctctctccctatctctgaatggagaactgagagttaggagtcagggacgggagcccaaggagaaggcctgtctcattctacatgtgaaacctacaggaataggaggcagtgacttgcttgttgtctccgaggccatgtggggacagtaagccaggctggcaacccatgccttggaggcctctttgctttcagaaggtgtcttttgatttgccgggagggtgggaaagccctctgggaaattttatttagaaacaagacctattgacctcttgatttttaatacctccccttcgcttgaaaagat

SEQ ID NO: 378274 - DNA, 405 bp, Homo Sapiens
caagttcgcagacccctgaactctgtctacaggcctggacaccaggttgagactccattttaaggctgtgcttattgggccctgaacagagcccagttatgacccacgatggcattctctcatgaggcttagactcaggtgctcctggactgtgaatgcccttcatctgagtctgagcaagtaaccccatcccatcagccccagtactacaaatgcctatggggatgtgtggtttatcccactaagaagtgcatggaagggagcaggctgagataaaagaggccatgggagaaaataaagcccaggacctgaagacagaaagggaaaggaaagaagagtgtaactggagtctttggagttagctaagggtccatatgaggctagggcgctgggtacgagtgaagt

SEQ ID NO: 378275 - DNA, 413 bp, Homo Sapiens
  misc_feature (52)..(178): n is a, c, g, or t
ttggctcgccccagcgccctagcctatagtagctgggactacaggcgcccannnnnnnnnnnnnnnnnnnnnnnnnnnnnnnnnnnnnnnnnnnnnnnnnnnnnnnnnnnnnnnnnnnnnnnnnnnnnnnnnnnnnnnnnnnnnnnnnnnnnnnnnnnnnnnnnnnnnnnnnnnnnnngcgtcagccactgcgcccggccaggtttcctgcatttctaatgaagaaataggctggtcctcaattttgcagaagttgtatcatcataggtcatacctaacattcgtttgtcaagagcaaaaaaacccccttgggttctctggatctcacacagcccacaaaccttcagaatgtggttccttcccgcaggctttgtcacacttaagatccaagaacaaatcagcctggctttaac

SEQ ID NO: 378276 - DNA, 366 bp, Homo Sapiens
gagtctgtgtgccccataagtctgtgtgccccgcgagtctgtgtgccctgtgagcctgtgtgccctgtgagccatgtgccccatgactctgtgccccataagcctgtgtgctctgtgagtctgtgcctcgtgagcctgtgccccttgagcctgtgtgccctgagagcctgtgcgccctgagagtctgcgcccccgagcctctgggacccatgagcctgtgtgccctgggatcctgacacccatgagcctgtgtgccctgtgactctgtgacccgcgagcctgtgacccatgagcctgtgtaccccgggactctgagccccatgagcctgtgagacccgtgaacctgtctagcccatgaggctagtg

SEQ ID NO: 378277 - DNA, 414 bp, Homo Sapiens
gttacaaatgaagaatctgaggcccagagagaaggattgagttttccaagaccatgaagcaagttagagacaaagctggccctggagtccaggtattgctttccataatctcaccatgataaggagggggacatcttcaaaagtccaggaatatccttgttgaccttgcatgtgtcatgttgcccaggctggtctttgcattcaggaaaagccatgctgcatgattaacgccttcttccttctggcttgaacatctcagaagagattctaatctctaagaatttagctgtactccctaatgctgtgtcccaaacttatgcaaagttaagaaaagatcctccttggggaaagccaccactggaggggaccagaggtgggctaagaaaaccactgccagccgggtacagtggctca

SEQ ID NO: 378278 - DNA, 281 bp, Homo Sapiens
gatgggaaatgtgtccttctcatgtccacagccacagactgtccctgtgacttttctgagctccaggagttatctggctctgccaggcaactctggggaggacaaagtgtctgtcacttttcaatttcgaacgtggaacagagcaggacatttgcttttcggcgaacttcaacgtggttcagggagtttcgtcctctttcttaaggatggcaagctcaaactgagtctcttccaggcgggacagtcaccaaggaatgtcacagcaggtgctggattaaacg

SEQ ID NO: 378279 - DNA, 398 bp, Homo Sapiens
atgagccaccgcgcctggccagctgtttttaactatacaattcattggcatacatcacaatgttggccaaacatcactactgttcatctctagaacttttttcatttccctcaactgaaacttgatacccattaaacaataactccttattcccctctaccccagcccttagtaaccgccaatctactttctattttatggattgcctattctagatgtttcatatgaatagaatcatgcagtatttgtccttttgtgcctggagggcctgaaaacactcacttaacttagtgttttcagggttcatctaagtcatagtgtatcagaacttcacggatttatagctgaataatattccattgtatgcgtataccacattttatccatccttattggca

SEQ ID NO: 378280 - DNA, 264 bp, Homo Sapiens
cgccactagtctcatcagcgccactaccctcatcccatcccagtggcatgaatctgaccctttccaagcacatctcttcctcggcactcttctcaatttgctctggccacagggaccaccaacctgttcctcaaatgtgcaagcccctcctactgcagtgcccttgcactgactgttttctgtaccccaaacactcttctctgcgttatttggctctctcctcatcctttgcggcattaaagaccccttctctgatcatcctat

SEQ ID NO: 378281 - DNA, 284 bp, Homo Sapiens
acatcagaacaatcttcctaggaaatctagttttgcaacataaacaagaagttattaaaattggccccgaaagggtgataaacacaggaggacaaatactacgtttcttaggtctttttgttacaatccttgcctggaaaattctattttcaaaatgttctttactgttttcccacctcacagggatcctcacctaccctgtcctcaccaaggcctgcccctcacagagtaaggacatggtgttcaacacgcagttccaggagcgcacaggggggtaccgagct

SEQ ID NO: 378282 - DNA, 212 bp, Homo Sapiens
cctccagggacaccctcccagcagtgtgcttggctcccacatcagaccttccctcttcctggggcgcctgcccatggctgctcccaccctgagcatagcctcctggacccacctctgcccccatttatagcacgacttcaccgaccccctctcttttctccccattgcccttgatccgtctattgcatgaggcttctgcggctggcactgac

SEQ ID NO: 378283 - DNA, 247 bp, Homo Sapiens
cctattgacagaagcactattaacactaggagataggctagtggtgcctcccaaagtgctgggattacaggtgtgaaccaccacacctggcctaagagcaccatagttctttgaactgttacgaggattaaaagataatatacatatgtgatccactctgcagagttcctagttcatagaaggctctcagtagatagctgctccattgtgaacagccccacctatccatgaggctagagtcgctaga

SEQ ID NO: 378284 - DNA, 293 bp, Homo Sapiens
tagttagtgtgtttttcgcacacatttatccttgagtttaaaaggacacacatacatgctcacacacaatcctcctaagtgcgtatacttgctgtaatctaaataaaatacagctctaagaatgcaactatcattttttaaaaatcgactcttccacagtgatgatttaaaatttcattaaaagacataactgtctcaagttacccaaataaaatgaagctacatttttcatatcattttcaattgcccaattagacaaaacactctaaatgtcactagacaagtaaaatggc

SEQ ID NO: 378285 - DNA, 258 bp, Homo Sapiens
agtaacagtgcctggtatacagtaagtactcaaataactgttgtatattgcaaaataaaagacaatccataatagaggaaagaaatgtgtgtatagataaccataatatcagtagctttaataaagtcccatgatacaacagataaggaaattattttctcttggtaagatctagaaaggcttcaagagatttaacgataccaaagttaaatcttgaaggacaaataaaatgtcaacagacatgaggctgtggcgctg

SEQ ID NO: 378286 - DNA, 166 bp, Homo Sapiens
  misc_feature (108)..(119): n is a, c, g, or t
taagtgaaaaaagcaagttacaaaagtccacatgttacatgattccatttatctgaaacatccagaatagacaaatccatagagatagaaagcaaattagtggttgcnnnnnnnnnnnngaaggggccaaggagagttaatgggaaatggctgctaatggatatgg

SEQ ID NO: 378287 - DNA, 367 bp, Homo Sapiens
gatctcagttgcaaagatgacacacagatgatgaagtcatcatatctgttctcaaaagctcacagctgagcagaggaggcagacatgtaacttaccaattgcacaagctctgtgcgaggtagacgtaaataatttaaaagcctggatccaaatcctgtctcctcttttatgagctacatcaccttggctaaatagcttaacctctccatgcctctgtttcctcacctgcaagatggagaatcatagtacctgcttaatagggcaactggagaattatatggataaggtacataaagtactctgcaggtgcctggctctataaactttagctatcagcaaatgttatatacacatcaactccacaggg

SEQ ID NO: 378288 - DNA, 381 bp, Homo Sapiens
ccattcacacgtggggacctcagcatttcagcagacacactttgtcaatcccaggtcaagccatcctcaaggcagggctgtctgcacccactgagacatccagcagcatccccccatcccccctccaccttgtgcccttcgtccataaagaccaggaacctgggggccacatgtatgcagttcagctcagccaacatgtactgagcacctttactgtccactctatggatcctgaggggaacaagggagacaagtctcccctgtcggagcagccagggttgcggggcaaatggattggaaggtcctctgagggaagcaggcacagggtgccttgggaaccccaaagagggagcacttggggctattcatctctggtgctcc

SEQ ID NO: 378289 - DNA, 418 bp, Homo Sapiens
tatgagcagttccctggcctctccaacactgtagcattacctattctacctacttgctacctatttttccaggtacaggggccttccatccgatccccaaacccactgagacccattcttcctcagttagtgcctttgcctaaaatgttgtgttcgcctagctacccagtcctaaaagctagtcctaaatctctgacaggctatgtcctacatcctcctttaaggtccactaatggtacttccccagtgaggtttcttctgacactcccaccaccatctaaattaggtccccctcattctctctaggaccctattcttttccactaaaaatctgttacaataaacacaaatatattgtcttctccccaccttaggaacaaacttcaagggtagatttttagaaaactgttaggctcct

SEQ ID NO: 378290 - DNA, 218 bp, Homo Sapiens
acaggatgctcttctgaccagggtggatggagggtacgagagcagctcagcctggggcccaaggccctgatgtgctacttcccctccctcgatagcttatgtcccctgccacccaagaccagccggaaagctgcttagctggggtgtgggctggggatgtggggtggagagcctaaaggatactagcccgagaaggtggaagcaggtctgtgtgaggc

SEQ ID NO: 378291 - DNA, 444 bp, Homo Sapiens
gggtgatctgtctctttaatcttgctcaatagataacatttgggaaaagctcccttgactcctagagacactattttctgttataagctatgaggacgtcccctctggtcatcaaatttaatgggatgattattaaagggaatttgctaatattaatgcccactttcaacttgagggcctgagctacaaatttctccctgctttggctggtggggaacaggccaaggacaaaatctgaataaagttaaagaggtatctgctgctgttcaattatttaatatatcatgtaaggcaaaggtagtgatgcactatccacccaaagatatgattacactcaaagccatacgaacttttactatgcaaaggccactttgtaatgggggtggggagacacagtatatacaaagttctaaagtactagtaatcaatagccttaaaaataat

SEQ ID NO: 378292 - DNA, 318 bp, Homo Sapiens
tctgctcggtaccccactagcctcatgttgacgagttccggaatgtcccaagacaagggcaagacgccaagctggttctgagaagacaaggagtcctgcttgaccgggatgccttccgggttctcaatgttgaccatgaccgtccggcccacgggtagcagcttgtggttgacggtgaagatccgatagagaactgtggagccaggggtgtagatggtcttgtctgtttggatgaagaggtacccgctctgcaggctgaccagcaccaccttctccaccacttgggtcccgaaggtggcctgcacggtcacgaacttg

SEQ ID NO: 378293 - DNA, 166 bp, Homo Sapiens
ctcattctgctctgccctgggtccaactgggccctagacactgacagcctgagttcgaattctggttctgtcaccttccaactgaggctatgagcaagttacttaatgcctctgagtctatgtttcctcatttgtaaaactggatggtacactaactgcacttagc

SEQ ID NO: 378294 - DNA, 103 bp, Homo Sapiens
gcacagatactatttacgatggcccactccacaaggaaactgaggcacagagaagcagtcacttgcctgaggtccacaattggggttggagcccgggcaggct

SEQ ID NO: 378295 - DNA, 339 bp, Homo Sapiens
agtctgctgaatgagaagatctcgatcccgatcaacctctagtgacaaatctcttgactgctggtttctcagtttttccatttctctgcggaattttgattcttttacctcaaaaccacccaattcagttaggattgatccaggttctgctccaacatcttccatgaataccctgccgaacagttctaaagaaaggcgccaacgtcctagcagcatatcatgggaaataaccattcccataaagctacactgtggcctgaaagatgtgagaggtggcccttcactttcagtaagtcctatttctgctagtaagatactttctaattgtgcagcaagatc

SEQ ID NO: 378296 - DNA, 523 bp, Homo Sapiens
  misc_feature (87)..(95): n is a, c, g, or t
attgaaatccctgagcaagaggaagccattggcccagtttggatcaggtgggtgggcaggtcccatgataggcagtcccctccacgnnnnnnnnnacagaagtaggaggaacgagggagaaacagttgtccccaggaaaagtgggctgctgtcaccagaagttggggcagagactccaggctccaggcaggtccagagcgcccgtgtcctccatgctcagtaactggactcaacaaatgttggttacttccctgctttgtgccatggcctccgctgagcacagaagacacagaagggacagtgatttgcacggtctcctcctcacaggtcctgtagtccagaaattgagggtcctggttaaaactaaatgcctagaacagtgcctggcctttaggaggtccttcgtaaatgtttcctcaatgaataaacacacagggaagtgcaagagttttatggaacacacaacaaaagcatcccactagttattttaaagaaatccatgtttgtacctttagtctccagg

SEQ ID NO: 378297 - DNA, 468 bp, Homo Sapiens
ggggtacttgagggatgatatgactatttctctgcatagcatatctccattagagcactagtccactgtgtaacaataaccttgcatacatgcctgccacttctaactagtgagtccttcctgggcatgaagcacgtatcattcctctgtgtactgcatagttgtagacactgtgcttgacacatagattttagtaaatgtttatgggtggaactaatgagagaactagaagagggagtgaattgaatgttcttgagttaatgggaaggagttaatgaaggcctcacagaggggcaaatgagctggatcttgtaggatctgtaggagtttaccacgtagagaagagtgactccaccagcaaggtgtttgggatttctatagttaattgttaagaatttattcctgttccccagatccttatgactaatgccaacactaaacataaaacaggatgttactccttctaca

SEQ ID NO: 378298 - DNA, 460 bp, Homo Sapiens
  misc_feature (200)..(208): n is a, c, g, or t
ctaggaaatgcatataagggctgatcacccggtgtttggagccctctcagaggtcatagacctctagagagagaaactgagatacataacagggcggaaacaactcactggtgacacactgtggagtcctgtctacaagcagcacacatcaatccaccacacaaaaaccctaggctacagctcagttccttctcttaagnnnnnnnnngtgtgaaacaaataacctaagaatgaggagaaaacaagaagaatgaccctcttgcgagcactctgtaggttttatggcacctctacttgccagagttaatgtaaaatggaagtaatatcgtcttcgtgcacatttacgttaaagaaaaagagccctaaagtagacctgcaaactatagagttcctaagttcccctttttctctattttattttctgcctgctttaaatctgctgttatttttctattatgat

SEQ ID NO: 378299 - DNA, 170 bp, Homo Sapiens
ggttgtagttattaaattagagaagataagactttgagcacagagactggcatataggaaagtctttaaaaatgactgttcacattcccttttacaaaataatctactctaaattgaaaaatgaagactgccacttgaaaagaccaactatttttaatggggtaccaagt

SEQ ID NO: 378300 - DNA, 156 bp, Homo Sapiens
aacccaaccaaccagccggtcaccgcaagacgagaagcaatctgcgggccgatgggttcggcggaaaccattgaggtgccaaggtcaccccgaactagggaactaatccagtcccagtaacgctggggccagggaagatcgagtccaagccgagag

SEQ ID NO: 378301 - DNA, 443 bp, Homo Sapiens
ggcacatgtggggaaactgaggcacgggatggttggctaatctgcccaaggtcacagagccagtgagtggcggggccgagattcaaacccaggcagtgtgaagttcatgaagggaaaagctgaacttgctggaaccccttcagactccacgctcctggcctggctgaaggaccctgctgactctctcccccagctcacccctccgggggctgccgtcctggctgtgacctgggcctggtgtgccttcacagctcactcctgctgttgaactccccctcttccctcaggctcagcacagtcggggtgcttcctaggggtgggagtgcaccctcgcagcacacctgcctccctcttggcagtcgctgtgagcatagtgaagccggccattgcacctttgcccattccccgggtgaaacgccagctccagcagggcagggactgag

SEQ ID NO: 378302 - DNA, 160 bp, Homo Sapiens
accccccctactctttatcctaacctgatatttctaaatggtcttggaaactagaacttgcgtagttttctactgatacgagctttttccttgatcagcaaaatcacaaaacttgtgttaaaaagtataattttcattctcacatgctgaaagagaaaca

SEQ ID NO: 378303 - DNA, 371 bp, Homo Sapiens
ctcggcacccctggaaaattgctttgtaaaccataaggcactctgcatacaaaagagattactatgaatttttcctaagtgattaactcatgactcctttccatactcctcagcagtggcaacattgggaggctggattttggtgggatggaagataatgaggggactctggtttctggccagctccaggactggatgtgatggttaacgatacttaacatcaccacacagctcattccctagctggctcagtaactatggatctctaagcaatgtcttaacatttacgcttacatctgctaagctaagtatgtactgttccttgatttacatgccacattgatttttttaaggggtttcaactgtggatc

SEQ ID NO: 378304 - DNA, 322 bp, Homo Sapiens
ttgtctcagcctcccaggtagttgagactatccataggcacgtgctgcaatgcccagggtatcactttgttgcccaggctgcctacctcccttttagatttgaagtcctttcaggagagaaactgagtttccttcctgaacttgaatgttgggtcctcccgaggatggccccctactgctctctgcttctatccttgggttccatgagcaaaaactaggcctggcccagctgtcccgctaggcgggattcctaaagacctaccaggaaacagagaaggcaaaggcagaagaagacataagaagtgggacaactctactcctt

SEQ ID NO: 378305 - DNA, 471 bp, Homo Sapiens
  misc_feature (14)..(14): n is a, c, g, or t
  misc_feature (39)..(39): n is a, c, g, or t
  misc_feature (46)..(46): n is a, c, g, or t
cccacctagggtcnaaggagctatcgtcaaaacgggaancccgggntcaaaccccaatctcccacctccctactggctgtgtgacccttggtcaagttaccttaaccctcctctgagtatcagtcaccccattaggtaaatggaggggcctagactgtaaacattaaatgtggggatgtatgaaaaagcctcagcagtgccctacaatgactattctcattcatccattcactcgaaccattatattcacccagctcctaatctgcaaagctaaacggtattatagctgaggatagggtgaaggtgaggtagaaaggacagcaaagagctatcacaacaacagggtcatggtagtgagcaactaccggaaatggaaggaaaacagtatcccttctccatactctcaaccacgactttagttgccggacagcagcccatgctgggcactgtgcaactaaacccatttgttgc

SEQ ID NO: 378306 - DNA, 116 bp, Homo Sapiens
tcatcagcagcccataaaggactctactgactttttgtcctaggttaactgcaacctgtgtcccagaaactgcagagaggctcccttcagggttcccacgctcatccacatacaca

SEQ ID NO: 378307 - DNA, 625 bp, Homo Sapiens
gaaagtgacttagaaatcagcctggagtccctagagcaggtctaacaatgaggctaggctgcgtgattggtctttatccatgagccttgggtctctctgcacgactagaacgctaatcagagaaataacaacaacgtatttcaggagatggggtgagagggaaggtggataaaaataggcagcccagtttcacaaaggcttggttttgctttacaaatctgacagtgttttgagaaaggaacacagaacattgccagaaggagcctatgattgaggtgaacctcacgaatgtctttgaaaacctgactctaaccaaaaagtatgagggagggagagttctggctgccgtagacgacactacctcatgaaagtgacttagaaatcagcctggagtccctagagcaggtctaacaatgagggaggcaagattaaaatggagaaagaagcctgctaggggttgcatgagctggttgagttcaccaagccagattttccaacgcaacattttatgtgtgtgtgcttgtattcgtttatctggggagagaatgaataactttccatcagattttcagaggaacctgtgaacccttcccctgcctactccctgctcccaattaaaaactac

SEQ ID NO: 378308 - DNA, 153 bp, Homo Sapiens
gtgggattgtgggatgtacgcccatgttcacagcagcattactcactgtagccagaaggtagctgctgtggtcacaatgtgtccccagaattcctatgctgaagctgatggtcactgtgatggtattaagaggtggggtaggccgggtgcagt

SEQ ID NO: 378309 - DNA, 317 bp, Homo Sapiens
ccaggtgcgctaactgctcgcagagtgctgcgagggtggggtgcacctaccgattggctctgcagccccctaacctgcctctggccccagttcgtttcctctgcccactaatccctgcgcaggacttcccaggaccccttttgtctctgggaccagacttgttggtgctaccccttactcccctctgcaacccccattttgggagttgaccccagcaatgaccttggtggcacgctcactccctcattctctcgtttcccctttagctccctttcaccatttattcagctacatcatccctctattaaccccacccc

SEQ ID NO: 378310 - DNA, 478 bp, Homo Sapiens
tatgatggccgtttccagttggcccccacggaagcctcttactactgggtgtactgggttccaactcaatatgtggatgcaatcaaagacactgtgctggggaaatggcagtatttttgaaagcactttcacctctggcccaggagactgacccaaagtgaaggacattgccgggagaggcctgcagcatccctggatttcagagttctggaactttgttcataaaaaatctatattcaatctgaggtgatgtggtgactgaagccagaggtgatgtactttcaccattagcttaattttaacttaaaattaccagttccctttcttgcagtcagcttcataccatttttaaagtcaatacgatggaaatcaataaatctgaattccgaacatgttgtgtggaatactcttaagtgtgtttgagagtagatctgccaattatgttgacaagggaatgatcaaaagctttggttttttt

SEQ ID NO: 378311 - DNA, 555 bp, Homo Sapiens
tgcgtggttgtctgcagtggagccgattccaaaaaagtctaatatcacaacccaggtttgcagtgtgatcagcacatccaagcaattaaaatcaacatcaatgctccggttaactcgattgtaactggaagagaattctggatgtttcttatctaccaagaatatgttgatgtggactaaggaatcatcaaatttactctttccaacaagtatcttgggctcatccactgttggagaaggaggtggggtcaagggatagtccttgtcttggacttccttttgctttttccgggacgcagaggtgggcctttgatacaactggaagacattaggagcttcttccatgtgggaagggagagaccgaggcatatcaggatattccacattggacactgaggggcaagactgagaaaggtattctttttgtgctaaactagatggcttaggggctcctcgagacaccatcaggttcttatatttagaatctggattcttctccaataagtcctccatcagcagagaatgcagggcaatctgaatagataaagtctgggg

SEQ ID NO: 378312 - DNA, 256 bp, Homo Sapiens
tcagcacccagggggtcttggccaggcgcttcaactgcatacgcgccttggggatctgcttcaggaacacgtaggcttgtgccaaggccagcagggcagggacgctgtccttgcagcagtttctcggcggtgctcacaccctgctgctccaactccttcttctccatgtagttgctctcagctccctggttctcaaaagcctctccgcccacaacctcgttgtctggattcagacagatctgcaccatgaggctag

SEQ ID NO: 378313 - DNA, 318 bp, Homo Sapiens
cgcagcccacggtccacatcaaccacccttaagccttttcttctattgcaaccccacatccactgccctaactgtcctgctggctgctcacagaaccctctgtctgcctccaaacttttgcccatcaggactctccacttggaactccttgactactatgtggccttcatgacccagctcaagacaccatgtattcccaagaaccttttctgttgtatccagttggaagcgtagcctctctggtctctgggccccagtggacaaatctctgcaggagaggaggactgcactctcattaatagattgttggcgggcacg

SEQ ID NO: 378314 - DNA, 648 bp, Homo Sapiens
  misc_feature (539)..(539): n is a, c, g, or t
tagtatagcactgatgcatactatatgctcagtaaggatctgcagaattaattaatgctattaatatatttcttttaaatgaagatgttcattaataagttagatgtgtcatattttaaaaataccttaaattgtgttttgcttaacaagttagctgtcgcatactttcaaaataccttaaatacctttatttattttagacttcacactagttgtatactatgtgtttccaggaaataaaacattttcaaacaagagaaatctgaatggtaagagaactgtatcatcgactcagggactgcattccctttcttcacctccagaggaggcatgcccatgtgccagatgcctcaaggaaggggttcaggtggtaatggtgacgtggtccttggaggacagagtaattggctcacacagaatgtgaacaagagcacagaataccctatctactaaatgtttgagtttacaaccttagaatcattaaccgtatctgtgctaaaatataaccactttgctttgaatgagtcagtcttgtcttncttaattagactgtgtacttctttaggaccatgaccatgaattctttttctagctaaatatgaggctggctgcaagtaacaggtatacgagaaaactgtatggctggta

SEQ ID NO: 378315 - DNA, 429 bp, Homo Sapiens
ttctgggattacaggcatgagccatcacgcctggcccagactatttttcacgtacttctcacaccagccttgtaaggcagcgctgtcattatccccattttacagatgaagagaccgaggttcagagaggttaagtaatgcccagtgtcatatagctctgtctgactcccctcttctggcctgcctcccactgaggcctttcagcctgatgggagagtgaactgtgtacccgtattcatgtgggtactgggcactgaactattaaatatgcacagggctcggaaatccactcccaccccacctgctcattttgcctttccctcctgtgatccagtgcctaccgtcatctttagagaaggtaggttaagatgccactgccctgctagacactcggaggggacatggctggggtctaggggacatggctgg

SEQ ID NO: 378316 - DNA, 454 bp, Homo Sapiens
  misc_feature (394)..(394): n is a, c, g, or t
tgagccaccgcacctggcctgcctgttttaccttttaagatgtgacttagacgcaagaggaaagttttaccttcttcctgtcccttaggaatggcttttgttaaaggatgataaggttaagagttttttaagagatggcctcaaccatttcctaccccttacctacctgcttcagtggatttcatatttttctttttgacatggggcccttttcaaaggaaatcatatgcagaaccatataaactgtataaaagcagattgttaagttgcctagaagtggtgtgtggtagttcacaagccaccacaaggtgaccatgctgtgatattcaagatatggtttatataaggaactaaatacccacctcaccccactagtgtatgaggcaagtgtccnaagtggaatggggtatgtagtgtttcaaatgacccatctttatgccaaggagcgaaagaa

SEQ ID NO: 378317 - DNA, 160 bp, Homo Sapiens
gcctcatgttacactgactgcatcaggctgtcatttagaaattataataatggctaccacttgttggatattttttatgtgctaggcattgtgctagggacttaacagggtgattttcattcttatacagaagtaagtgtggccgggcacgttggctcgt

SEQ ID NO: 378318 - DNA, 313 bp, Homo Sapiens
cgaagagaccgaggcgctgatgcgcgttcatcgccgcctgtggaaccagacctttaagcgtaacggctgggaaacgctcgccctgcgctacggttcggtcgtcggccgcttaaaggacgttcaggacgagcttcagcaatatcttgcaaatgagattaagaccatcccagagctggacgagacgccgctgcccagttcccgcatgggcaatatgcagttctaccagacctatgtttctcccggatacggcagcctttgacgaaggagtacccattatgaaagccggtatggaaaattgaaagggtacgagccg

SEQ ID NO: 378319 - DNA, 578 bp, Homo Sapiens
  misc_feature (563)..(563): n is a, c, g, or t
ctttcactagacctcattcaggcaggagggtgtatctggttcctcttgctccttgtcaggaagcagaagtctcaagctttgcatattcaaggaagaaaaataaagaagggtactgtggacagagtatagtgaggagggcttgggtaagggaccaggctatgaaccctttaggtcatggtaaggagtttggattttattcagataatgatcagaagcctcagagggttttgagcaaaggtctgacaggacccgacatccgttttaaggtattttctctggctcctgtgtggacaatagattgtcacctcttccagcgggagaggtggagatgatgggcatagtctggggtgatagtggtagatttgctcttgttcctagtgtaatccttgaaattagtggtgaaactggctgtggatggctcttgcgttggaaggcctggaagtgtgaattacatacatgagaactccaggcatgacattcttcgggtgggaactgttgtcgcctgctctatcttgccagcttctctgtaccaaagttcttttggaaactgtgagcctctctgnaccttttgaccctta

SEQ ID NO: 378320 - DNA, 277 bp, Homo Sapiens
cgtatgatactcacaaagaaaaatctgtagtatagataacacaaaagataaagaaaaaggaatcaaagcataccactacaaaaaaccaacaaatcacagagtgaagagagcaagagaggaagtaacaaaaggactataaaacagtcagaaaacattaacaaaatggctaacagtaaatccttacctatcaatacccagtaaaatgatatagagtggctgaatgaatagaaaaccaagaaccaactctatgttgcccacaagaaaatcactttagctt

SEQ ID NO: 378321 - DNA, 430 bp, Homo Sapiens
  misc_feature (26)..(26): n is a, c, g, or t
agtataccagcatgaattattatatnggttcacatgtcagaagtcctgatttgtggccttatgtgttacttttttattttctacctgtctactctacttggcataaaacaaaattaattatacaatttaacaaaaataatgcatttctttaaacaagcatcctgaaagatgaaggtcatactataaacagttctagtagcctaacaccaaatgtactggcaggattcagcaggctcccctgtacaccagaataaatggcatttttactaaggtacatttctgagttgtagtatgataccttgtataacaaccattaaagcccacattaatccaattataagtaacagaggccatattttgaattggataagattaaatatatactttagacatttttagataagggaaaaatatttaaacaataaattaa

SEQ ID NO: 378322 - DNA, 418 bp, Homo Sapiens
gggcagcgtgcagtatacagccggtgcattcacaaaagtatggaaaacctagggagattggtagatggtaggtggagaagacttaatcatttttaaatattgcattatagaatgtatagctataaagagcatcatgataatgcccaatccctttgtttcatgtagaagaaaatccagtgggagtaagtaacttgcctgtaatcactcagtaagttagtgaaatagccagttctggaaatctgatgccctattttccctaaacagtgtttcattcataagatgggctgtcttatgatgagtttatagaagtagaataattgtgtggtgctgtgcagtgatcagttggaaatacagatgtggcacttttgtaaaagatcggggacaatgatttgggaggcatctaaatgaaaataacatt

SEQ ID NO: 378323 - DNA, 392 bp, Homo Sapiens
  misc_feature (368)..(368): n is a, c, g, or t
tcaggttgatatattaacatcacaagtccttgtcaacttgaaccccttgtcaacttgaacccatacacatctcctgaaatcatatttaatctccaaataaaggaaataataaggtcataattacacctaacgtaatacagctatccttcatacaaccagaagcacactaatccttaacctaaatgctattacataaagttaacaacatttaaatgctgatataaaatcaataaatcttatgtcacatgataatggaaaaagaaaggaaattaatgaagatgttttcttagtacaagtgtaacatgcacaaacatttttaacaaaataaggaggaaatagtcgtgacaattacaatcctgtttctgcanttggtcacgtggctgtagctgtat

SEQ ID NO: 378324 - DNA, 269 bp, Homo Sapiens
tttcccaatagcagtcttcagcagctccaggccttctttattctccagggtgtagagtaaactaactttgagaagaattgagttgatagtttaattttgaaacaaaaatgatagcccctccctgaaacaaagccttccttgcttggggaccagattgtctttgtaaagccaacaaattagccacaagattagaaatcatggctcaggaatcatgcacccaaagacctcaagattcctaacctccccattccatgtatggataacaacac

SEQ ID NO: 378325 - DNA, 380 bp, Homo Sapiens
gttccttccagtggctcatactaaatccaggaaaatcagaaattcacagatgatgaggactggagaagacccagagctctttctaaactgggctccgagccagagctctccagagcccttaaaaactgatagctcctggacaatggacagcccacagacaaaccttgtttggcctatacaatattaaataattttgagccaatatataaaaatttggaaactttacctaaaaaatctagatttgtaatgttatgctaccgggtattcatgaagtctcaatagctagagagcacagaagggattctggttgtaagacacacaaagcatgatatacagaaagagagccaaaccatcacctcaacagctctaacagatgtgac

SEQ ID NO: 378326 - DNA, 310 bp, Homo Sapiens
tgtacttagctactctagaagtacggctgactcagcagaacctgaaagtatgttccactggctgagtaatcaagtggtagatggcaagaaaacatgccttacaagctttcagctcttcaaaagaaggcctttctcagtcagtggcctgagatctaagttgaatgaaagtggtaataggggtagagggggttacaggtctcatacgtagtaaagcccaaacacaggaaataagatagctgctcctagccgttcccaagaagaatcccgtgataagagttacaggttagctggacatagtggctcctgcctc

SEQ ID NO: 378327 - DNA, 443 bp, Homo Sapiens
gccatcatgccgcgtccacaggggaagtggcagggaggcgcaactgcggtgccgcattcaaatgggaagtcggggtgcagccatcatgccacaaccacagaagtggggggtgcagccgtggtgctgcattcatgcaggaagggaggtagggcacagccatggagccatgtccatgcaggaagtggggtggagtggacgtcctgccacgttcacacggcaagaggggaggcagccgtggtgcagatttgactgtcctgagctccaagacacagagacatcagcagggccccgcctcctcagacagagcaggaaatggaagtttccagagatgctgccacacatcagcgctggagctgggttctgccccagcaccttccaagtgccgtgggcaggagctccccctccacaccgtgtcctctcggtgcagacgggaaatggttaca

SEQ ID NO: 378328 - DNA, 141 bp, Homo Sapiens
tgagccaccgcgctcagcccagtagctggctctttattcacactctgtgaagccaaacataagacctccgaccagccctccttcctcaggcttatcacacgccctgattccaaacaaactgcgacccgagctgtgtgagga

SEQ ID NO: 378329 - DNA, 256 bp, Homo Sapiens
tgagagaaaccgcttatccgtcgcgaaagccgtacactcgcggctcagcaagtgggaacacttgctcctccagcattccaccatgagacaaaggaaaaagtcgcttctgtgtgtccaccagcacacgactcccatgtactcctgcacgtcacgtggacgagctaaagaagactcctctgctccacagccaccatcacactttcttgtaaaagttatattttgagacggagtcggagtctcgctctgcgacccgggg

SEQ ID NO: 378330 - DNA, 438 bp, Homo Sapiens
acagcccgggtcgcatcgtggcatattgtggctttggggagaaagaaaagcagatagtgcaatggaacgagcgtggacttgagagtcagactggccttcaactcctagctctaccactttaccacctaggtgacctcaagccactttctcagcctttctgagactctgtatcctcatgtgtatcctagagtttgtctgatagggctatagtgagaattaattgaattaagtgtagtgagaattaagccaggtctggagaggcctggctactggtgagtgaggtaactgagatcaggtatggagaggactggctcctgatgagtgagttaattgagatgaggtatggagggacctgtctcctggtgactaagttaacttgaaatgaggtgtggagcgacctggctcctggtgagtgagttaagttgagatcctatgggg

SEQ ID NO: 378331 - DNA, 537 bp, Homo Sapiens
  misc_feature (22)..(22): n is a, c, g, or t
  misc_feature (38)..(38): n is a, c, g, or t
  misc_feature (115)..(115): n is a, c, g, or t
  misc_feature (420)..(431): n is a, c, g, or t
aaacatggtaaaattagaatcnggccacaaaacaaaancctgaaaccgggttgtgaaactttcaccaaccggccgcaactctttgaataaaacctcaagtgcatacctattaccnattgtaaaaataaagcctgccccctatgccttagaatgggagcaaggggtcatatggtcaagtctaaggggaagtgggcagtaaatacaggttttaaataaactagagttgttctggtttctatccgtagccccatcccaaccttcatcactatgcgaccctgccttgaggaacttagcataggttttgaatagttatggccatcttaataaattgacggtgacttagttgaaaagagagaaaaagaaaagaagcatacagtaggcccagagcaaatactttatggcaattatttttaaaaagannnnnnnnnnnngcaggcctaatgttttacaggagaaatacagagggaagaactgtaatgttgatttaatagttggcataataaaaacccataaaaaattcccaggttagttcagaaa

SEQ ID NO: 378332 - DNA, 113 bp, Homo Sapiens
gtgcagtgcagatcttggaaaggacagtgctgacaagaagcctttcctagaacaaagaaagtcaaacagatgctagaccccgtaggaacagccaccttatgagtggtagaggg

SEQ ID NO: 378333 - DNA, 327 bp, Homo Sapiens
tggtcgatctagagcatccccagtcgagcgcacggtatgggtcaccaaggtaggaagacttggaagaagtctcctgcttatcaggctttttgagggagggcgtggaggatggtagacactgcctaataagtgttaggtgagtcataagatggaattgctgtacctacaaagcataatggtacacaacagtgaccagcaagtagaaggtacttaatacatggtttaacaaataaatgacttatggacatggaaagttgcccacaatatattaggtggatagagggggcaaataaaacagattacatacaaaaaaatatgtagagtgtg

SEQ ID NO: 378334 - DNA, 189 bp, Homo Sapiens
agtagggagatggaactatgtggtaagggaaataagaatagaatagaaactagatatcactgtttcactgctagttagttagttagttttcatttatcttagacaagtcttttgaactcctggtttactatctgtaaaacagaggtaataatggcactcttgaacatttacaataccgtgcggctcgct

SEQ ID NO: 378335 - DNA, 370 bp, Homo Sapiens
ttgctgctgttggtcgatctagagtttccccagcgatgccgccacggtattgctgtggctgtggaggcggagctcacacggtaatgctgtgactggaggcggagctcacacggtaatgctgtgacgggaggcggagctcacacggtaatgctgtgacgggaggcggagctcacacggtaatgctctgacgggaggcggagctcacacggtaatgctctggcgggaggcggagctcacacggtaatgctctgacgggaggcggagctcacacggtaatgctctgacgggaggcggagctcacacggtaatgctcgtgaccgggaggcggaggctacacacggtaatgcatcatggcgaaaaggcgagagct

SEQ ID NO: 378336 - DNA, 138 bp, Homo Sapiens
cctttgtatgttgagacagtcatgacagcattcaagattatgaaagtgttacaatgccgcttcaagtctgcgaaaacctcaaacgtagccgacttgacaaatatttaagtgttacggcagatttaaaatccatctggc

SEQ ID NO: 378337 - DNA, 155 bp, Homo Sapiens
gtctctagaggttccccagcgagcgcacggtatgtgtccatagaccctcgcgccgccgcaggccaccctctgccttcaacacgctgcttgtggagggtgtggagataatccaccccaagtcctcagaggatgggcaatttgtctccctttcagag

SEQ ID NO: 378338 - DNA, 177 bp, Homo Sapiens
agcgagccgcacggtatcacaaaagactactttttcccttaaaactcctaggtgcacttttgtatgtatttttttattagctatctgacagcctggggaaagacacaaaaaggcgataggtgcccatgacaactggtgatcaaaaagcccaacaaaagctgggcgtggcggctcgct

SEQ ID NO: 378339 - DNA, 168 bp, Homo Sapiens
actctagagtgatccccatgcgatgccgcacggtatcaccccttaccacaagacctcccttcagcttaatctctcccactctatgttcccacgccgcccctaatcctgcttgaagcagccctgagaaacatcgccccattctctctccattccgtgccggctcgccac

SEQ ID NO: 378340 - DNA, 400 bp, Homo Sapiens
agcgagccgcacggtatactgtaaacatctttgcatgtcaatcaatatgcctctacaacatatttattgaatcacttaatatttttcccatgttaacagtggggatatagtgtagtaaacctttattgcatattctcataacatacaatatacacattcttttgcaaaaatgggaacacagtattgagacttgccttttcctcttaacacttatcttttcaatttagtattatatagatctgtcacatgctttttatctaataactttatagaaatataattgccatacattaagctgcatgttgaaagtatacagtgtgatcagttttggaatgtatatacacacaaaaccataaccacaatcaaaattgtaaatacattcatcacccaccaaagctac

SEQ ID NO: 378341 - DNA, 221 bp, Homo Sapiens
acttaaggggatgggggctaaaaataaggtaaatactttaaacttgttctgcattaaagaattatagttgatctaagtagactactatatttcttcctactatagttagctggtatactgaagacaggtagacatgctttattcgtaacacattccttaaagatgaaccaatcaaaattattttcttgacactaaaaaaatccactggataccgtggcggc

SEQ ID NO: 378342 - DNA, 537 bp, Homo Sapiens
gacatccgggtggacaacctgtatttgaaggtctgcaccgacggagaacaaggggcagcttgtgcactctgcaaactggatgagctgacattggcagcatgaccaaccagcgtttctcaggaagctgtaccaacaagatgcaaaagggagaggtggagcagaggagggcagttcatgagctgattgtgctaagccctgtcaaataatcctctagaaacccgatggtaatcaatgccacccaagggcaccacatgtgccaataaaaacctcttgcatttaggctaaatgtggctcgagattagcattgggtgagaatatctgtagttggcaggcactccagactgctgaattccaaagtgaactcttgtgatattgataaataatgtggcacacgatacctcccccatcccaatagaaattgtgcaaatccttaattatgagggcactttctccagggcacattagaatatcaggctaaattgagttgtatcttcgcctttgccagggcagtgtgcagtggtgcagtagtcggtcgat

SEQ ID NO: 378343 - DNA, 334 bp, Homo Sapiens
gaaagaaagtgacatttgaactgaatcttaaaggatggtagaagttggaccagaaaactaggtgggaaaaagccaaggaattgggctaaggcatgaagatgtgggaagacaagaacagtgtgttcgaagactggggaaaatgtctggctgaaccataggcttttgcgggcgaggggtaggcgttacaagatgtgaagttcagatcatggagggtctcgctaaggagtttagattttattctgtgtgcacgaaaaaccatcaagattttagaggagagacatctgagtgatgttggggcaagtcttaaccttatatatgcttatgtatgttcaag

SEQ ID NO: 378344 - DNA, 399 bp, Homo Sapiens
cgagagataaaccaggtcttgctctgtaagtgtcacgagagaccctttggatccttcataattcctgtgaccagacctctgcctccccagtacctgtcccctccaccccatgaagaatctcgctgtctcgggaaactccagaatggagctgggccagtgggagctggatgagatgacctggctcctccctgagtcacacccaatccttgagcaatcaggtcccaattccacagacagttcttatggtccatcccatgcttaagagagagttatggcaatcctcctctttctgctatgtgggtaggggtctactttgttcttaaagagccctccatattctttattatccaaaagttattacatagtttaggcccctcctgctgcagaaaaggaccgtct

SEQ ID NO: 378345 - DNA, 244 bp, Homo Sapiens
taggtcctcttgctttaaaaagtttttttcttctctcatcaaaccttatttttgaaatgtagtaaaaactgcagttacttggagtggaagtaaatgggaaatattcactgaattctctaactacctggaaagttaatatctacaattctacattttaagattattctcttggtgggtctgtatgttaatgtgatttgtattctgattaaattcatcaggtttgcatatttaaaattacgctgtg

SEQ ID NO: 378346 - DNA, 362 bp, Homo Sapiens
  misc_feature (181)..(200): n is a, c, g, or t
actctgcaccactggctgggaacaaatacatgctaacaaattcacacacaaaatcctgaatcataaggaaaattctagcttagcctggaacacaggaagatatgcctttataccaacacgacctataaataactgacccaaagtgaatgtaccacaaagtaaaaggttttaattaattatnnnnnnnnnnnnnnnnnnnngtagtttcaaacacagaccaacgtctttcatatcaacaaatattaagccaggaaattgacattgcttcaatccacggagcctattcagagttcatcagtttcatatgaattcctttgagtgggttttatatttctgtgcaattttatcgcctgtggctttgt

SEQ ID NO: 378347 - DNA, 199 bp, Homo Sapiens
tagctgggtaccacaaactgcaccactgcagttcttcctgttccctctgcttcagtcttgctggtttcctcccagtttctggagcccatcaactctaatcataccttggcctttgcacagtgcttctatctggaacactcttcacccagatatcggcatggccgtcctcctccacctccttcaggtctttgctcaaaag

SEQ ID NO: 378348 - DNA, 489 bp, Homo Sapiens
  misc_feature (478)..(478): n is a, c, g, or t
cggacaaatggacagtggtgacctcgatgagctcgaatcgcagtgctgctggggttacagtctttgagggcaggatatatgtgtcaggcggccatgatggtttgcagatcttcagcagtgtggaacactacaaccaccacacagccacctggcaccctgcagctggcatgctcaacaagcgctgccggcacggagccgcctccctggggagcaagatgtttgtctgcgggggctacgatggctctggcttcctcagcattgccgagatgtacagctctgtgggcagaccagtggtgcctgattgtccccatggcacacgcgcaggagccgggtctccctgggtggccagctgtggggcgcctctaacgctgtttggggggttacgacgggacagtcaaacctaaagctcagtgggagatgtattgaccccagagacagactgctgggacatttcatgggcccccattgcgttgccatnagggaggggtt

SEQ ID NO: 378349 - DNA, 691 bp, Homo Sapiens
tgaccactgctggggcttgcagcttccagactcgccatggcctctggtcccactttctctttcaaactgtctttttctcattcctttgactctgctggacttcgtcacccccatgacctggtgttgggtctgatcaccccaacaaaagaaaacaggaagggggcacctggatttgaatcagggacctcttgatttgcagtcaaatgctctacccctgagctatacgccctgcttgtcataagtgtctaataaccacttttcatgttggtaatcgcacccaggagtcctacagcacattgaaagttcctgcttacttttagagagtaagaccagcaactgattttaccacaaactcaccccagaaaagtccatccccagttgccaaaccctggcccctgctcacatgcctgcaccatctccccgctttccctcagtccgtggtgacaggagcagctgagaggagtgtttccgtttactgctggaacagcctttaggtctccatgtttgatgtcttcttgtttacactacaaaatagcagtttggagacacaaattgagacacatgcagtactgacatatatagatatctctcagtctgggatctttgcattaaatccagttcatgaaagacttggtgaagttgggggagttcctaggccctgacatggatcagagagtagtcctgggaagca

SEQ ID NO: 378350 - DNA, 581 bp, Homo Sapiens
gggcttggaggttctatacattttaattagttccatagcctgaccctggtcagtgagcatcagatttggagactgtgccatttatgaaacaggcaggtattggagagactccaaaaagctcgtctcatgtgtgcttccctgcaaaaacagccagttccagctagaaactttatcttcatgaaaggaaacctctaggcagagagaagttctatttggttttacaactgtccccaattgtatatgaagatggcaaaatgttgggcttaaggcctgccctgggttcatggagctagctttcttaatggcctcaatcatacttttaatcagaaaaaagttagagcagtaatcttcagtgcttgttcttgccatttccagccactcgacactgtttcataaacaaagtaacagtttgagtgaatgtggtttttaattaagctgccttcacgtggaacaactttctgggggcatatgtaaggagcagaacttagaagcacaagctgagactgacttcgcaatagcgtcatctccaggcagagtttgagaacaaaggaaaccaggcaagtgcaactaaccagcacctt

SEQ ID NO: 378351 - DNA, 288 bp, Homo Sapiens
ggtgtagaatttgtcatgagtagcaatcagggaagcctgatgcctgatgccttcaacaagacaggcattgcatctcaactttggatttgtttctttgctgtcccgcctatcttccacctggggagtgctttacctggggcttatttcctttgtcatgttccagccggggaagtgatgggagttttctgacttcataacctggggcgtcttttgtttgagaacacagttgtaggctctagcccactttaggagctgagatttaaatgcagtggtgcagattgtcggtca

SEQ ID NO: 378352 - DNA, 341 bp, Homo Sapiens
gaagctggccttgctcgggctcaagccatcctctcacctcagcctcctaagtagctgggactacaggcacataacaccacgccctactatttttgtatttttggtagagacagggtttcaccttgtttgcccaggctcacactggttttaaactcagatgaatggggtaggtaagtggcaaaaatggtaacctgcaagctcttcttatacatatgattcctcaatagttgcatttatcttagaaatacttcaataaatcatgatttgagtctttcaccgatacaggtatattctgtatgctgtaaggtaggctaactgctgtaacaaacatttccaaacct

SEQ ID NO: 378353 - DNA, 863 bp, Homo Sapiens
ttcccaagcagaccccacagcgtgctgagcataatgaaacctactggccaacatcagtcatgtaaatcagttctccccactgctcaggtctacctaatccacaaccacgctgggaaagcctgagggataaggcccatggaccgtaacaaaggcacagtcccacaggtcctctctgtctcattccccacccactggttagcacccggctgtctcctgagttgctgtcaggacctcaagggcaaccctcttctcgcggatctgtaaggaataaaatgcttctgctacttgatgtgttttgttgtgttgccttttctgtacctaacccacccaacacaccagaacacctctcctcttggtcgggacagagctagaatttacagccactctccagagacagaagcctcaggacctaattagaggaacatactaaaaaggggacatgggatggacactgcaaaagggagcgttgcctgctgaatacaattgcgacacggtggtcagcagtgtgggtgtgagagcattggagggtgctctgtccacgccatatgcccattacacagtccttaggataccacataaccctggcccaagtcaccaccaccctggggccctcctaatatggacgccacatgctcaaaggactcccactagcagaggcacacctctgcacatgtgccgactggcttgatggcttgtgtccctcatgacacagacaatgcgcatgccaggatgcatgctgctgcatgacctgtacctccaagcttgatccccaaaggcctccgtacgtgtacactgacgtcccaggcctcgcacacaaagtggcatacattttcctgtgtaaaaccgccagagggtttcactag

SEQ ID NO: 378354 - DNA, 299 bp, Homo Sapiens
tttgaaatactatagaaaaatggtgtagagagaaaatctcctttaaatattgagcgtggtgcataaactggggaacacccctctaggcccattagtggtttttaactatgggcaattttgccactggggcacatttggcagtgtctggagacatattttgttgttgtcacaccctgggaagaggttgctattagcgtctcatgggtagaagccaagcatgctgcccaacatcctaccaggcacaagacagcccccacttaacaagaagtgctccagccccagtggtgcatatctcgggc

SEQ ID NO: 378355 - DNA, 160 bp, Homo Sapiens
cgtgaaatctacagctgatccagaccccatgttaccagcctcccagaaagcacagttcaaaaagcagagttatcacctgctcctgcttgaaacactttcttcatttggtttccagaatactaaactcttcattattttctttcttctatttttttggaaa

SEQ ID NO: 378356 - DNA, 854 bp, Homo Sapiens
  misc_feature (508)..(508): n is a, c, g, or t
  misc_feature (660)..(660): n is a, c, g, or t
taggaactaagtgtaggaaggtgtacagtggggtggtgtgggggtggaattgtggcagccagatggtgttggcctaaggcctcttggcccttgttaggacttggtttaccatggcgcaacacatccatgagattggcaaaaattaaaaagtctgacaacagaaaatctggtaatctggtgaggatgtggagcagtgggaattctccaatactgccagggagcatgggcatcaatcccaccacactggaatgcaaaggggcattctgagtagaactgaagatgtgcccatccttgaccccacagttccagccatgggcatgcgcatgaatgtgcacacgtgttgactgcggcatttgtttgtaattatgaaaacatctaagtttccatctatgggagaggggataatgtgggagtgcccaaaagtggagttctagagagcagtaaaaataaatgggactagagctgcacacgtcaaaatggatgaaaggataaaagaccattaaggatngggagaagaccaccctggcccacaggaagtatatgtcccaatatgatgctggtgtatccagagtgttcaaacaaacaacacaacactactcattgtttccaacgtgagtatgaaagtatggagcagtgcggagggccaggagtgctgaatcnacatggttacttctccaggcgggggccgaggaccagggctggaggtttactccaggagcttcagtggtgcatgctgaatgtgctgtttcttgggctgggggacagagatgtgcatgctgttatacactctatattgaaatgattgtataacaatatactaatttatcatgtaataaatttgaccagaaagaaac

SEQ ID NO: 378357 - DNA, 653 bp, Homo Sapiens
cccaactgactaccccttcagagcagcctcaagctagattattttaaattatttaggaaatatattatgtcatgttacatttaaaaatagctgtcaacagctgagcctaaaaatgagccctaaaaggaaagccataattttaaagatgtgaaatcagtttagtcaaagagtcaagacagtacaggaagacagctatggactcaaaaactacaataaaactaaaagtctgattcaagtgtaaaagagaagactgagtcagtggaacaaaatggaaagtctgtttgaccagggttcgaatctcagtcttactactaacttgctgtgtaacggggccagtggcttggttttctccctataaaatggaggaagagaagattagaatgtcttggaggtccctttcacttccagcacttcatagcaacatgaaaggacaactatgaccctccaggtcctttccaggtcttgaattttatcaaaaaaaggtaatgacggatgacaattgagaagagcttctgagataacctgtttacagagagcagacacattacaactgaggtgaagctagtggggccgtaagtttagaaatcctaaattttcaaaagtgagtctgataaccaatcagtaatagaaaaaggttgggtgcagtggtgcat

SEQ ID NO: 378358 - DNA, 799 bp, Homo Sapiens
  misc_feature (215)..(215): n is a, c, g, or t
aaaaggcatcttgcatcagcctgtggatgtatgcctaccaccgggctccttcaccagcaaagtggaaaaagaagcgtttcacaacaaattcttctttttgggttggggaaacgcagtggattatagctctgttttcttctttccaaaactgtgcacccctggatgaaacctccatcaagggagacctacaagttgcctggggttcagtgctctanaaagtttccaaggtttgtggcttgaattattctaaagaagctgaaataattgaagagaagcagaggccagctatttttgaggatcctgctccacagagaatgctctgcacccgttgatactccagttccaacaccatcttctgagatgatcctgattcccagaatgctcttggtgctgttcctgctgctgcctatcttgagttctgcaaaagctcaggttaatccagctatatgccgctatcctctgggcatgtcaggaggccagattccagatgaggacatcacagcttccagtcagtggtcagaatccacagctgccaaatatggaaggctggactcagaagaaagggatggagcctggtgccctgagattccagtggaacctgatgacctgaaggaatttctgcagattgacttgcacaccctccattttatcactctggtggggaccaaggggcgccatgcaggaagtcatggcatccaatttgcccccatgtacaagatcaattacagtcgggatggcactcgctggatctcttggcggaaccgtcatgggaaacaggtgctggatggaaatagtaacc

SEQ ID NO: 378359 - DNA, 503 bp, Homo Sapiens
gctgggagctaaacttgagaggatgcctctttcttgatagttactgtgctaggtgagttatgagcacactaatcctttaatcctcacacctctgagaacagtgagggtgaagctggaggtcattctggattgtttcagtggctgtcacacaaattcaaattgaggggtagaggaactaggaagcgtgggtgtggagttaaaactaggtcctctggatggcttttgtgagaagaaccaaggaatattcttaaatccctgggcttttctcctaatctttctgctgctttctaagtagattgttaacattgtgtgtgttatcattcagcattctgagaactagctttccagcaataaatagctttcaaggtgtcctttgccttaactttttcattttactaaatggtgcagccttgtccacattctgtccgggtcttcaccatctggttgttttcccggctcctgggtatgcgtgtgcgtcagtggtgcagtatgtcggcccagta

SEQ ID NO: 378360 - DNA, 665 bp, Homo Sapiens
gcgtgggcctgtccaccgtcttcggtttggctgctgttgttgagtctattcatgcatttcgcagctctatggatggtgccgtgcgaaggaacaggtgccagggcgtgtgactccacccagcgctgcttcccgggaccttccaattggacaggagctgggggaagagctggttcacagccctttgtgggggatgggactttgggaaccccaaacttctgctgggaccacaaggagaagagggcagcagagtcacagctgcaggtgagtaataaaggctcatctgcccctctgcctgggtccagaccatacgtgcacaaagctagcggccaggagcacaggctgcatgacacatggaggtggtctccttacttttcatgatgtgacgtcactgggccttgcatgctggccagtaagtgaccgctgttgactctgaaaggcaaggaacccctgtgtggcggagatggtggcctgccctccgtgctggccctgccataaactctccttggcacaggtcatagcaggtttcaggcgcgtcgaattttacgaaatgatgataaaattgtgactagtccaggatgggtagcctggagagacaggctaccaatgctatttttttataataagctaacaacgtagtgttctctggatggaaggatataggcttt

SEQ ID NO: 378361 - DNA, 527 bp, Homo Sapiens
tgtgattcaccagaaagggtagatatcacctacaagactctgcaacatcacacaaccacataaaactgccaccatgaaatactgcgctgcatgattctgttactgcttcttttattcttgcagcaatggacacacaacttcagaggatgaattcgccacttcaaggctcgtgcccagcgccggatagaaacaatgaaaacagtcttgggaacaggagcccctagggatgtgggtactgccatccaatctgacagcaaatacacctttgaattaataattttcgtacttcccacactctgaattttttttcctgagataagaatattcctctattcctagaaaggagcccaaccctgaaattgaatccaatgctacaaaaccattgaatcgtttcatcagatattcacatactaaaactaaaactaaaaccttagcttcaagattggaggtacaggttttcaaaacagctattagacattgtcagggatctttaaccaaggatcagagctctacaaaccctataaaaa

SEQ ID NO: 378362 - DNA, 542 bp, Homo Sapiens
gtgttgcatcccctctactggtccatgataactgatgctcaaaaacatgccaaatggatatcaaatcattacagttcaacggtatcactgactagatacacagataaatatacccaaataaagagatcaatggagcttcagaaacatccaatgacttgtgaggatcatgaaccacgagagtattgagcgaagattagatttctcccaactcgggggcctttgttcaccagtgtgaccctacattctctgcatattctgctatgcccaatactgcccacatggaggattgacctcttcttccatctccttttcactccccattggcaccaatgttgccatgttcactgctcccctcctagaggcaaggtcaacgtcatctcctagacatgcccattgctatggagcttccatcttgtttcctgaaatcagtctgtcctcacacagggaatggcactgacatgtggatagaagatgtaagaccaagtggatgtttattagaacattgttcataactgtcacccttctattccgtgagagaggaa

SEQ ID NO: 378363 - DNA, 489 bp, Homo Sapiens
ggcagtgagcacacatggtgcccagatcttggtttctaaataccattgcccactaaaaggaacccagtctcattgaagaaataacctgattctggggctgaggcagggaaagtataagatgaacctgaaatatcttttctgccaaaaagtaaggaattgctaaaaacatgatcatgatgggaacatgtcagaaggacacaaaagcagtaagagtgctccctctagtcatatctggaacaattagagcatcaaaacaaattaggatagtaaaggattatgtcacactgaataaaacaggaaactatggacccatggtaaaataaataagtaaatgaatacattgaaagtttaaggaatgggatatttacacaaagtgtgaactccacaaaatggttatttactgcaaagagaaagaataatgttactgtagagatatcaagtgaattaatcaattgatgaaagcaaacatcgtgagagagtaaggatgtc

SEQ ID NO: 378364 - DNA, 350 bp, Homo Sapiens
ctcttcttctctcacgggtatacaaggtaagtatcacaagtatttgtttcctctgtttttaagactgtatagtattccattgtgtatatatgccacattcattcattcaactggctaatgaacactaaggttgatttcatatcttgactatcatgaataatgctgcaatgactatgggagtgcagatacctcttcaacatgttaatttcagttcccaatagggatatcactttgaatcctagacaatcaaggctcagcactaagacattctgcaaaacttcttcctttctttcagtttagtatattctatccagatgcctaatttattgggtgcgtgagagagggaggat

SEQ ID NO: 378365 - DNA, 690 bp, Homo Sapiens
ccaggctcttgtgaaaagatacactgacatttttgcagggaatgcacacaaggtaatttattcctattgaagctcactgagcatcaatctggctgcgatatgaattattcatgtacccccccaccccgccgccgctgacacgccagcctcatgttcaaggctgatgtcagtgcaggacccatagctcctctttctaggccctttcccgggcagctgtgcacagatcaacaccccgtcctagagccagctctcattctctctgtggtgagggctcacctacacggacccaaaggctgcgatcgacacctgatgggccactacaattcaattttcttgtccatctgctagaagacagatgaattcatccaacagccagcccaacactccagaggaaacaacttaagataatttatgaattgatttatgccacttctctttccacaaagaatgtatggtgactgcataatatgccttttgttgaacttaccaaatcgttctctcatttcatgttgtgaacgtcataatagggagtgataaaagcatatgcctataaggcccatacagttatgtatgatggggagcaaggagcaaccgacagggagtggtggaatctgtgtccaacggaagagcacctgaccaacctgcaggggcagccgctgcccatccgatgtggtcgtagcatgtcatcat

SEQ ID NO: 378366 - DNA, 613 bp, Homo Sapiens
tggaaccgacgaccgtctcaataacaatacatacattctacaaactcgagagactcggcaccttgcagagagaagcaaaacatgaccctgaggtctggagtccaggaagccaaggacagcaaaagcatccacagaaacaggaaaacggcaggtgtgggagggaaggagaaaggttcatcagactccacagcccctggcagcgcctcctggatctttgaaatcctgtgcaccccaggagactccgggaggcccatctgagctcaccggagacaggtctgccgtctctcctctcatcactggggacagaaagcctgaacatgaggcctggactacggggctcagaccaaaatatttccagacttaagggcagtaatgtggagcccaggaaggaatattgaggacagaaggcacattacttaactcaaggggtgctgggttcttattttctactttcaagaaatgtttgctatagtcactctaaccaccacaaaacagtgaataataccatgagccaaatgtatgtttcacaatttgtatggctgattctacgcacatttaaatgtgtttatgacaattgtagatttcggttttcctctggttaaaccaatgtgga

SEQ ID NO: 378367 - DNA, 501 bp, Homo Sapiens
ccatgctttccacctccacgcttccatctgggattatttcctggaatttcccgcccgttccatgctttccacctccacgcttccatctgggattatttcctttaatttcccgcccgttccatgctttccacctccacgcttccatctgggattatttcctttaatttcccgcccgttccatgctttccacctccacgcttccatctgggattatttcctttaatttcccgcccgttccatgctttccacctccacgcttacatctgggattatttcctttaatttcccgcccgttccatgctttccacctccacgcttccatctgggattatttcctttaatttcccgcccgttccatgctctccacctccacgcttccatctgggattatttcctttaatttcccgaccgttccatgctttccacctccacgcttacatctgggattatttcctttaatttcccgcccgttccatgctttccacctccacgctttcatct

SEQ ID NO: 378368 - DNA, 321 bp, Homo Sapiens
ataaacttatgtcttaatcactttcctatcccactgcctagaagaacatggtacacagtaggtgctcagaagatgtgatttgatgctgaccgcaggaaagaatgaggaagtagagtgagccactgctcagtttctgctattggtaagctacataatctccccacctggcagcaactgttgaggttgccaagaatagcaggctaagggacacagggacaggtagctggtgaccaggaggaccctctacaaatgcagagctcagggtgtcactgaggaaggaaggaggctggaatccaaatactctccactgtctcccatgcc

SEQ ID NO: 378369 - DNA, 352 bp, Homo Sapiens
gtgtgagccactccatctggcctgggatgcccatatgttctaatcttaccttgaagatttcttgacccagacctagagtcttcatttctcttaggagacttggttctttgtattacaaaattgtatttagagaccataatctgagtcatatggggttctcattgatactgtattggacatcagtcttggttttttccatggctagtttagctcttctcttactcagaaacttggaaaatacagagaagcaaacagcttgctggattatgtagcaccacttcagctgatgagtaccaaaatgccagtttcctaatttggaataggagctctacctgatacttgggccagtcag

SEQ ID NO: 378370 - DNA, 436 bp, Homo Sapiens
caaggaaccaagacccacagcctccattctcccaaggcctggcctctgcataccctctgtaaacattcatccatgaagctcagtccaaacacgcaagttccagaaccatgcagccaacacacacgtggctttgcagaaaacatatgttcccaaacacacggaaaagccatcagaacgggctacagttaagctaaaaggagttatctcggcagcagggcagaagagggtataattactatcttcttgatataagcccgttatttataacgatcttctttcactgagagtcactctttgggtaatacagctgtatttgaaaatgtgcttaacaacaaaggaagcctgcattcagttatccatggaccccttcatcccaccaactaaaagtatggtgcacccaatcttgtgctggaaacactctcaagataagagaggt

SEQ ID NO: 378371 - DNA, 514 bp, Homo Sapiens
tggagcagacacacaagaggtgccccactgtgagaacggtgtccgtccctggcaaacctctcgacccctccccgctctctcttcccttttgttcaatgcagtaatggattacaaagtgctttcaaaagacaaagtgccatacaaactcaagaaactattattagctacggagcttccccattctgtgtgccctgtggacggcccagaggctgttaacttcctgttgccacaatttggagctcctgagaacaaaggtttagaaagagaccaccgtcaagtgagcctctgaattcaatcagcaggaagctgcagtcctagcccgtccgagacaggatggtgccaagaggtcagagaggccattccttcgtcttccacgggcaggacagggactgaagtaaccagccaggagcggggtgggcagtggctgagctggggctagaacccccaggctccggctgccccctggaaacttcccactccacccttgttgccgctcctgggatcttttggtttg

SEQ ID NO: 378372 - DNA, 398 bp, Homo Sapiens
accgcattcaggtgatattctgctcatcttcccaagagggctccccgctccctctcaagctgggctgagctgcagtccatctgcccaggccctgtcacctgggggatggggcttgtttgcagagcaaggtatttctgtttgcctacgtttttatgggtggagacagggaagccatttgaaaaatctgcacagatgagcgtggactcactcagcatgctctggatctgagctcttcacactcaggcagttaaagagaagccactgggaatgatgagaggttaaaatgccataaggagagtaaacaagcctcaaacaggtgcagaacaggtgctgactggctctgagcccaggcaaacctgcccttctcggcgcctgggggagatcaccacctcacccca

SEQ ID NO: 378373 - DNA, 520 bp, Homo Sapiens
tcccttatggaactccccgaccgtcatcccgtgtgtatacagtagtccccccttatcctcatctggtgcgtatacagtagtccccccttatcctcatccggtgtgtatacagtagtccccccttatcctcatctggtgtgtatacagtagtccccccttatcctcatctggtgtgtatacaatagtccccccttatcctcatccaatgtgtatacagtagtccccccttatcctcatcccgtgtgtgtatacagtagtccccccttatcctcatctggtgtgtatacagtagtccccccttatcctcatgtggtgtgtatacaatagtccctcatcctcatcccgtgtgtatacagtagtctccccttatcctcatctggtgtgtatacagtagtccccccttatctggtgtgtatacagtagtccccccttatccggtgtgtctacagtagtccccccttatcctcatccggtgtgtatacagtagtccccgcccgacggtcggggggttccataaggg

SEQ ID NO: 378374 - DNA, 392 bp, Homo Sapiens
atgtgagctttccagcaagaagctttggctagagcaaaggccataaggtgggggtgtgcctggtgtgttcgagagatggcaagggagcaccatgtggctgagcaggattaagagccagtgaggggaagaggtgatggagagccagagcagtcagttgagggctagagtcccagagtaactggaggcctaagtaactggaaggatggagttatccttggataagatgcaaaaggctggttggcagagaagatcaggagtttggtttgggttacctaaattgggaatctaatattgaattacatattaagattcaaaaattctgaaaacagactggtggcacatgggtaatatttaaagcatggccatcagctgacagtcggaataaaagaagg

SEQ ID NO: 378375 - DNA, 538 bp, Homo Sapiens
attcacaacaactgcacatcagggcagagcagaagtgctctaacagcaccagctccaggtcacccaaggatgaccaggaaggctccaggcagatcaagcattcgagctgggcttggaggaatatccttgattctggaggtggagttgggaagcagccatcccagcaaagaacatggcagcagagaagctgaagacaccaggatgaggagtggaccagtcggaatccttactcctggatgtgctgggggacagatggactcctccaaagagctgaatgctgggctgaacagttttagtccttaggagctactgactgttgtcaacagaaggtgacagcgcctaccctggcaactgcccatggggagtgatgagccggggaggaagatcctcaagacagtgaggacagaatgcaatatccctggcgtgttctaggggaaggcagtgaaggctaaaacttgggcaccggcagggagaataggtgggacaggagagccgtgaaagacaggatgaagccagaaggagagctggagaaggacct

SEQ ID NO: 378376 - DNA, 473 bp, Homo Sapiens
gggcagtcaaggcgtgggcaaacgcctaacgtccgctgcagaaacacagtggcattgaacgctgttgtcaagacagagaaaacagaaggaacacactacctcaagctgctacctccctgaccccttctggactctttgacccctatgcacttccatttgggattttccacaacatattttatttccctgtctctttttcttcctagaggtctctctgtaactaactaactctctctctcgcacaccaccttcagccccaacactcacccacttctactggagcccgcttcctctcttgctctgtctctatgtgattgggcttctttgactctccgggaattcccatcaatgtgggcctttaaaacgataagagatgcaactgaacgtgtgagacatcgtgcacataggctgagaagcggcaagagaaatgcccaagatatcaagaccccagctaccccctctgcttttaccac

SEQ ID NO: 378377 - DNA, 216 bp, Homo Sapiens
ttgaattacatgcccataatgtcaaaaatgagagacaagattgaaggcatttaagggttacaaatctaaaaaattatcacttcttcatacattctctcaggaaaatactaaaggaagtacaccatcaaactgagggggtaaaccacaaaatgaggaatatgtgaactcaggaaacaagagatctgatccaagaaaaaggataagggaatctaggat

SEQ ID NO: 378378 - DNA, 748 bp, Homo Sapiens
ggctgccccaggactacacccatgaggtcagagatgctcagatgagaggacgctaggcctgtaggtgcctgtggggacaatgtcacctactcagcacctctgacttgtgcagtgttccctgtcatcttcaaatggaatgtgtctatgctaagaaccaacaatgctgaccacacttcctacaccactcagttctcacactaattgcactaattgcccatcccaactggccattagctgaatgaatcaaattatcttcatatttgacttgaagtctttccaagccaaccctgtctccacctcaacccctgccagtatggcaagagcaagctccaggctggacccagcccactctcgggttaaatgcacagtcacccaacttgccagtaaaagtcagtgggccggggacagggtggtacaagccagttacctgggagggtccacccttggcctgatgcttggtccccagcccttggctttatggacacaatcccagctctgttccccctacctccccagagccttggataaaaggctttcctctcccaccctccatcagctccaaaccaaagtcagcgtctgcacaggtgcctgctggggtgaatgtggggcttctaggcttgagtcttcttcggctgccagcacttggggaatgctgacaaatttgtcctccaaaggctacatcttttgatcgatgccttcacttttctcgtcttatagccagtgtttcagttctctctcctgtaagatc

SEQ ID NO: 378379 - DNA, 479 bp, Homo Sapiens
agagagaactgcacagcaaacagtttcacggaggctcctttaaaaaccactgacgccagaagagaggaagagggaggacaggggcgggtatgtctgtccttgtgcatctgtgtgggtcagtgcccaacttccaggccgggggccacttaccacgtgctatgtgctggatgtaacatgtacaggtagcactcagtgccttggaaaacactgctccaatccaggcaacaggctcccagcctcacacctgaactacaccctcatatctgcatagtccctacactcacacgcactcatacaccttcccacatgcatgcctgccactgcacgctcacacatgcagtttgccccatgcccttaaaccttcatatatgtacccccatcacacataccccacccaagcctcatcgcctcttagctatacatatccattgccaccttaccctcacccctaccacagggccatccttcatgacacagaa

SEQ ID NO: 378380 - DNA, 303 bp, Homo Sapiens
agactggacaactgaaacaggttcagaaaggtttggtactgcttagacaacactctgagtaagtagatttgaacttgggctggaagcccttttgccggatttatgcaggccaggttcctgtggcaaagataagctcatgggaaggaggtggaggccgaggaggacagttcagtgtggttgctaaaaaggaggctttgagggtaagagatccctggagtgaaggtgagaatgagatttctggttttgctcttttctccgtaatacaattttgtgagacagcgtctcgctctgtcgcccacggct

SEQ ID NO: 378381 - DNA, 511 bp, Homo Sapiens
gctgcacccactgtccactgttgacttggtcttaaagcagtgactgaagcccttgggagctgtttggttgctttgtttaagttgtccgactagtcctgagttgggtttctgtctctccgatatcagaatcttgacgattaatgtgctttttggagttatatgagttgccttaggctttcaaagagacataatattttaggtttcagtattaggagtagatatagagtcaggaatgaatcacatgattgttcatgggacaatgactttgtaaaaaattcatgagaacagaggggtcttctttgagaccatattaaagaggttactggagccagatggtaacctctgctaaaccatttctctagccctgctattcctcctggtgtttaggtattcatttttcctacaccagtgtgcttgagactcaatggaattaggttccaaacggccggaacccctcctctccaaatctaatattcttttattgacctatttggctcctttgtttttttag

SEQ ID NO: 378382 - DNA, 335 bp, Homo Sapiens
agagagaactgggctgtacacgaggaatacagtaacctggtctactcctgagagtgacctagacaccttgggccaggatctgcatagaatgaaaacataaaagagctggagagtacaatcataggcactctctttgtgttaacctaggcaggggacaagtgtatctggggacatcagtgttctcagtgcccattgagaggtggactccagagaggagcggcacccaattccagctccaacaaaatgacactcctcctcttcgcactgtccaagtccctctgctcggactgcaggctcatcagtgacctgctgtctccccacactctctccctgca

SEQ ID NO: 378383 - DNA, 714 bp, Homo Sapiens
atggtagacgagaactggggagtctgagctgtaacagcgatcaacatgtgcgtgcaaccaccccgagctggctagcagcacctctccccatccaagctaaatattaaaaatcccattacgtccgatagcatcgcagcaatcatgctcactgcggaactgcctccagatccctcgcagatgcgggttggccactgggagagaacagagcaaggtccccaaagaaggctaggttgggggttcctgctgggcaggcagaagtgggactgaggtgggtaaggagagaccaaggagaacagggatctggagacaggcaggcttggagaaactggggcaggggaacattcacaatcacacctatcatactctagaaagagtcagagaaacagacttgggtgcgggcagctgctgcaaagaaggcattccagggacaccttctgccactcccagcagacctgctggcaggaagccccagcggggactggggttggggaggaaacaggcctcttctaaaggaagtcccaggaatcctcacctggcagctgtatgcccagtgtagaccccgattaggcatgcgataaaaaatgaacaggtgaataaataggggaaaattgtgtcctaatccctatacactgcaaagccctttctacccatcaaatatgccttgtactgtcacaccttggagcccttttattcgtacagttctctctccctgca

SEQ ID NO: 378384 - DNA, 468 bp, Homo Sapiens
ggaactgggccgggggtagcaggaagagataaaggaaacctgaaaataagaaaaataagttccagaaaagaaaaagaggaaccatacttttctagtactttctttatatttgataaactttgaaatagtgcctactttcattaaaaactatagtgtacaatatgtgaatctttcagtcccaggaaagtatggctctcttgctactgaaactgggccacgccaaatagaatatctcacttgtacatgtattgcgtattaataattgcacaagtttattgcttttatcagtagaaatagacaagtttctgcaaagtctcagaaaagccaatgggctccacttctgtgaaacaggattgttctgggggagtgggtcagccctatcccaggagagacacctgtcagctacagggcagcactcagatatcgcaggagaggccctttgctctctcagacgaggtgataaaaatg

SEQ ID NO: 378385 - DNA, 742 bp, Homo Sapiens
actgagcagtcctgtcagcctggatgcagcctgctgagagctcaaatgtctacagggatcccagtgctaagagatcagctgggttggttccttcctggcgtcatatcccaaagtcgcacagcagtagcatcctggaggtagactccacagcatccatgggtggctggacaaagagtcagcctttctctggtgaggagatatcttctaaaagtgaactggatgaattgcaggaagaggggcccaggagggcgcaggaacaggaacgtcgaagaaaacgggagaaggagttagagccagcgaaagggtttaaccctcatcctagccgcttcatggacttggatgaactgcagaatcaggggaggagtgacggctttgagaggtccctgcaagaggcagagtcagtgtttgaaaagtcactacatctggaacagaaaggagactgtgctgcagctttggctctctgtaatgaagctatctctaaactaagacttgccctgcatggtgccagctgtagcacgcacagcagagccctagtcgataagaagttgcaaatcagtattcgaaaagcacggagcctgcaggatcgcatgcagcagcagcaatcaccacaagcagccgtcgcagccctcagcctgcctcccaacacaggcggggactctctctcagccaacaagtgaacagcctatcccgctccaagtattgttaaccaagaggcccaactggatccgcatgatatagagtt

SEQ ID NO: 378386 - DNA, 371 bp, Homo Sapiens
ctggcccaactctgtatcatgccggatcaggtggctcttggattacaatacttggagcgggataggctgttcacttgttggctgagagagagtccccgcctgtgttgggaggcaggctgagggctgcgacggctgctgtggtgattgctgctgctgcatgcgatcctgcaggctccgtgcttttcgaatactgatttgcaacttcttatcgactagggctctgctgtgcgtgctacagctggcaccatgcagggcaagtcttagtttagcctgattctgcagttcatccaagtccatgaagcggctaggatgagggttaaaccctttcgctgcctctaactccttctcccgttttcttcgaagtccctgca

SEQ ID NO: 378387 - DNA, 568 bp, Homo Sapiens
  misc_feature (57)..(57): n is a, c, g, or t
gagagaactggaaggaggttgatgcagcccatgtacaggagtccgtgacgttcaggnatgtggccgtgttcttcagccaggacgagtggttgcacctggactctgccagagagcttgtaccgggaggtgatgctggagaaactacagcatcctggtctcactggggattctcttttccaagccaaaggtcatctcccagttagagcaaggagaagaaccctggatggtggagagtggagttccccaaggcgcacatctcggatgggaaagcttgtttggaaccatagtttctaaagaagaaaatcaggaagtcatgaaaaaactcataattgatggcacatttgacttcaagttggagaagacctacataaatgaagataagttagagaagcaacaaggcaaaaagaacagacttttcagtaaagtgttagttaccatcaaaaaagtctacatgaaggagaggagctttaaaggtgttgaatttgggaaaaatcttggtctaaaatcatcgcttattagaaaaccgagaatagtttccagaggaaggagaccccgtttcacagcagta

SEQ ID NO: 378388 - DNA, 624 bp, Homo Sapiens
tccggtgttagataacagagtcccactgggatttggcctgtggttcaacaagttaaacaactgcttgttctgtgggcagactatccccattgacagaggacttgctgtgtttgtccagcctgagaactttttcaatgactgtttttctttctaggccaaattgagggtgggggccggatagatgcttctgtctggctgctcaactgcctcagccttgcctgacagatgcagaggtcctcaggatggctttaagtatttaaggcggccaatggcttggtaactttagtcacaaagtgaatctgatgagtaatgtgtatatcttacgggaggtgttatttctacccttctctaactatgaaatatggatgatttgaaccaaacgattaaaattatacctttgtaacctgacaaattttatatgaactttaaaaagtcaaccggtgaggaatcccaaaggggtctggggtatggaaaatgtgaggctaaggaattctgcaccaccacagccagaaccaggatgtgaaaaccggccaaagaaattcctctcctcgtggttccaacagttataaatcaattttagctgctatactctcaggttcagttctctctcctgataagctcggt

SEQ ID NO: 378389 - DNA, 657 bp, Homo Sapiens
  misc_feature (66)..(66): n is a, c, g, or t
  misc_feature (74)..(126): n is a, c, g, or t
tctctgcgggagagagaactgcacgagagtgattgtgtgaatgtgcgagtgagaaagtgtggacgnatcattannnnnnnnnnnnnnnnnnnnnnnnnnnnnnnnnnnnnnnnnnnnnnnnnnnnnagcaagagtgtgtgttgtaagtacttgtgtatggaggagcatgcaggagtgagtgcggctgcgcagaggcatgagaacaggagagtgagcagctgactgcgtgtgtgggcaagggacttgtgagccccggtgtgagtgtgtgatgatgtgctcacatgcttgagttgtaggtgtgagtgagactgaaagagagcgtggatggctagggacagtagggtgagagtgcctgagagctcacggatataaaggaagaaaacatcccaaaatatttcattgatatcactgatctctggctggtagaaatatagtgaaattttaatgttcaatatttttctgaatttctataattatctataattaggattatcacttctctggtaaaacagatgtagatgaagcaatttcatggcttcatttcgggttccccggcagcagccccctccacaggctcctcctccatgctccaaaggcccagctccctttggacacaggcatcttctgtctccaagctcgtgccctcagttctctctg

SEQ ID NO: 378390 - DNA, 783 bp, Homo Sapiens
tggccggctgcagagctgatggtagacagaggaagagggaccagcagggctggagcccagagccttggctggggaaactgctgtggacagccctcctcttcattcagcgatagcacctgttgggaagccaggaggctcccagaggcaaagggggcctgctctgttcatgctcacttaaccccactccttgagggcctgggctgaggtgctgatgcctgagtttcatgcccgggaactgtgatggtgaggggagggcatgaaaggtggctccttcagctactgacccatggccctacagcctgcccaggagtactctgcagccgccagctacctgcagctgctctcctcctccagggaggttaaagcccaattctaggtcaggcccttaggcagggagagtccagcatttcctctttcacagccccgggacttcctcaccacgctcaagcaaggcccctctgaagccgagcatctcctgcgtgctcccaagccagggaactctcactagggaaggactcggggtgttggtgggggacaggccctcagcacttcccctcttagagagacaagccaacagcacagctggacgccccactctcaactttactcaggcctgccccgagggcccctcatggccatccactgcattcactccaaaccttcggctgccaggccccagaggaggtgcggctgcaggcccagcacaggctgagtctggctctcgaggccactgtcagtggccacatgtcactctcctcaatgccgagatcctctaggtacctc

SEQ ID NO: 378391 - DNA, 365 bp, Homo Sapiens
ctccgatgatttccatgggcagtgcagagctagcatacttgccggccgttgcagggacttatttggggaccccagcagggcatgtggaggggggtctttcaaggtcttcccatcagtaaaagatgccagtcccacagcccctgtttctagtccaagctgagttgctctgccaggccctgcccctgacctgggctcattcagctatggtcagcccaggtctaggttcttgccctacctctctgtttatctgcagtggccagcacagctcctggcccagagagcgtgctcagtaaatgttggtgaattgaacaagtccagctcaccacgccgtggcgtcttctccctgccacgtacctacttgaact

SEQ ID NO: 378392 - DNA, 222 bp, Homo Sapiens
gacttgcctatgatacatggaagagaccaaagtggcaaagccccgagtcctggaacagcttggctgcaagagagaaccagaaagggagccggtggcttaagaggacagatcccacagacctgcagctggaggaccagagagttttgaaaggtttaggtgtgtctgccatttggacggggccacaggcccacttgactgtctggaagactctatacctgagtg

SEQ ID NO: 378393 - DNA, 269 bp, Homo Sapiens
ggcctctttaggcccagctcatttctcacaacggccaccttaggcccagcttttcccttttggtggcctctccaaggccgagaaattcctcaagtcggcctcccccaccgcagttgctgcctcccggcctcttctccagtcccagtcctctctcgcagctgtgtctacaggcccagctcctgcctccaaagagcctcttttactcggctcctacacagctcctggcagccttggtagcctgaaatctcttccagttctctctacataag

SEQ ID NO: 378394 - DNA, 392 bp, Homo Sapiens
gctcggtatatctggcatttcgacaattggaccatgagcaatggggtccagtcctcattacccagtgcctcctttgcttcaggccaggctgaataggtacttaggacattcctaagaaggactgtgcaggaggaggctagcccagctgcctggctagcctcagcacacacattccctggaacagcagcctcgcttactgccagaccccacaggggtttctgcaggggctggacaaacgggcacatggggatgaaaagggtagagtccccagagtcagtcaatgtcagtgaattggcagccgctgctcacagagctgtctggattctttgcagcccagagagcacctttcaccacccagatggggaggccttgccaaccctgagcccctcagg

SEQ ID NO: 378395 - DNA, 627 bp, Homo Sapiens
atgctatataggagagagaactgaggggagacgcgtaaatcagaactgtgggtcagagggagagaacaggactcaggcacaggaggtggaggtgtctgggagtggctactatggatggagaaggtcatcagaaagaaagaagggcagggctcagcgagaagcggttgcccaaggccagacatcctcgaatgggactggggatggaagaggcaagagctgaaggtaggagagtggggacagctctgagtcctgcaccctgtgtcctgggagagaggcaaagccaactggcagaataagaaagtgatggtggcttctgagtcctccatggctctcttcagtgagggtgctgaggaaggcgtctaaacatgagaagccgattatgacaaggatgtggcccccgtatcaagaagggcaatgaaagcatcattacactatcccagagtaaggactgaaagagtcatctgggttactgttaactgtgatcaattttactgtgctctcctgccatacattgagctgtagaatcaatcaatccactgaaactcatgacagtacacaaagttcctcttcttctttaccagggcctaccaatgaaaattcatcctgtttaaaatcaatccatcccac

SEQ ID NO: 378396 - DNA, 573 bp, Homo Sapiens
  misc_feature (35)..(35): n is a, c, g, or t
ggtggtgctaggtcataatgtgaaggcttcaggtngacaaatcccatgggtgaccccgctgcagtatggcagcattgctgagaactgtaaaactgtagcctttcctcctctcagtgagaaaatggaaagtggtggttgtgatggctgattcacctcagcctcaggcaaagtcattctgaaatccctcattgtcagctgtgggaaacctgctgactcaaccctggggggcaggtggagccttggctccccaggctgggctcccctagaccaggggcctgcctcctgcccagaaagctaggctggagtcccccgagcagagatgccccaatgcctccatgcctgagtgacttcagctctgcctactggccccctaatgtcttaggcaagtcaccccagccctctgccctgggttcccttgtctgtcaaaggggcactattatcacactgggatcctcctgaataaactagtttatgtctggtcctctagcaaagctggtgggatcttaagcgcctgtaggagttctaggatgcagtaactgctgatatgcctgccatatcacgctaggcactcac

SEQ ID NO: 378397 - DNA, 493 bp, Homo Sapiens
aaattgatgttaccctcctgaaggttaggaagtgatgcctgacccagctctctctcagtgtagctttgaaacacccccgaactctgggattgtaaaatgatatacatggagattttaatgcattggattttctttcccctccagtaagttcggtgtaaaaatcaacctactcacaaggaaaggaagaagtgctagcacgcacggggtattgaaaacataccacgtgctataggggtggctttcagtttgtcaccttcttccgtcctcaaaacggctctgagagttgggaagtggagcggtggaagtaacttcttcatgaccacccagtgggcaggggagctgaaaccctgccgccagctgtcctggcttgaaggaaagcctcttcaagagctcctggtcacctgagattgaccaccgcctgaccccagtgtggcatgcaaggccttttctgacccttttcttgtcatcctgtcccccaacacacgcattcaca

SEQ ID NO: 378398 - DNA, 342 bp, Homo Sapiens
  misc_feature (224)..(224): n is a, c, g, or t
cgtgaacagagaacgcttagagcaggaacagaagtacgagcgacagcctaccaacatccttcaagcatgggggcaggggaggcatgtgttaaataacagagtcttcaagatagtgaaaactatgcatcatttctagggtcctctcttgtgtagctcctgtctccccctagtcccaggtgtctctccccagagggctggaggcccaggccaggctcgcagacaangtgggtacatgtacccccttcactcccagttccctcctctctgcccagacctgctctccgcagccctgaggcgggcagctggtccacccttctcccctgcagttttctctccctggca

SEQ ID NO: 378399 - DNA, 645 bp, Homo Sapiens
  misc_feature (593)..(593): n is a, c, g, or t
ccttgcaggagagagaactggccaccactgttctaaagacaagcaggcatgacaagatgggcgttaggcctgttgccgccaggttttgccgactgccgtccttcccaaggctttcccttctccatccatcctcccccggtccctcgacacagcactagagtgagaacaccctggatgtgactaggggactcctcctcggtgtgcttgcgtggagagcggagaggtgcgtcgtttgtgccccgagtttgccatgaccggggtggtcctggcacgccgggtatctagacagcttttcatcagtcgctcatcagcatgctaattcccgtaggacctaattatgccctgaattccagttgattttctttaatgagacagctgggttaattatgtaatcgtatgattacattagcctaggagtgccctgcccaaaagtagcgtctcccacattgtgatgtcatccccgggaccggtgctcacaaggggaacattcatccctccagcctcgtgccaggggacagcccccatcccccgcagagcgcactgtgcaaacatgagcctcatgtctattaagatttggttttcaggcctcaaanctacaagaaaagcagttcacaccagcagtctctctcctgcagggtacgagct

SEQ ID NO: 378400 - DNA, 198 bp, Homo Sapiens
caggagcttagcaggatgggatctgggctcgttacgtaattaatccttggctcagggctgctgcacaacccacacagacgctggtcgaagtgatgcctatggggaaagcaagcatcaaagaccacgtccccagggtcctctgagaccaggagcggccgagacttcgagatcaaagctgtagggttaatgagttcactg

SEQ ID NO: 378401 - DNA, 416 bp, Homo Sapiens
ggatcttgcaggagagagaactggggttgggatcagttccgaaaggaccctctacaagattcatatatctcaggggtatcctgtgcagggagcagcaggtgggtacccaaaacatttgaatgttctttatggaaaagtgtcattccttctacttgctgcagagaaatccattgagaggacaggccctcgctgctggccatgtacccttttctgggtgcatgggcagagcctacctccctgggagcctgggtgcgccgggtggtgcagcttgggggaggagaggaggagggcttagcgtgctttcgtcttttcagcccctccaacctgtttgatcattttcctctgtggctatgatcgctttaagtagtgttacttgtagattatttggaaaatacaagagagtgtaaagaagaccg

SEQ ID NO: 378402 - DNA, 287 bp, Homo Sapiens
gcctggctataaagattctaatatatgtgaatgttaatgtataagtatagtagatacataattagacataagtatttgtgtttctgactgcaagaaatactttagtcacctaaaacatttaattttatagaaataatattttgtttttcaggtgaaacttccaccgatgatggaaatcataactgctgagcagctgatggaatatttaggttagtgttgaaaagtggattttatatctctttcaaaacaaaagttttcaaagctagttgattacccagttctctctc

SEQ ID NO: 378403 - DNA, 490 bp, Homo Sapiens
atgcttacagggagagagactgaggtgacacagctcagcttgctggccaaggcctggtgtgcagcaggagctcagggccgtgtccttcctagtgcccctttctgaacaggggaacatctgatgagacaggccccatcttctaagggagcatgagtctaaatttaaattttagtgggaaaaggaatttttcctgtgacattttgtttggatttgtccccccttctcttgggtatctgacttattaggaggcttggggcgagagaccaccatagatgtaatgaatgtaactatctgagggctcatcctcaagccagaaaatgaggcgttcccatgggacagtcccatccattcaggaaaacctgggacagagattctctagctgagtcactggggcatttccctggtacaggctggaaataatgtgagggtaggatttgagagcatcttttttcgttgttgggttcatgtcaaatgggcgctggcccagaag

SEQ ID NO: 378404 - DNA, 588 bp, Homo Sapiens
gaacaatcatcggattcatgcctgcctctatatctactcctaattctgttttcctgatatattatgtctctgtgaaagcctaaggcaactcatataactccataaaagcaattaattgttaagattctgattttggagagacagaaacccaactcaaactagcttgattttttaaaaaagcaaccaaacagctcccaagggcttttgtcactgctttaagacaaagtcatacagtggacagtgggtccagctgcagtgatttcccttccacccttggaacgcacagcaatgagctctaggatgcttcctaaaccaagattctgggacatcaatgtgcgatgcatcctcctgagacacggcctccattatgtcatgccactgctccagagtgaacaatggcctttctagttgagcaccagatcgaggcatctggacacgagccaagaccctcccagttttgcatatctccctcttcttttcaaaaggaattctctgttccagccatgttggtcgtcttacctggacgcacttatatcatgttctgtccttcctctatgtgtgattctcagttctctctcctgcaaagac

SEQ ID NO: 378405 - DNA, 453 bp, Homo Sapiens
  misc_feature (364)..(364): n is a, c, g, or t
actgaggagccaccaggggcctttcctgtctgatggcagttctttaaaatccaggggtctcccccttaggacatgtgaggaaacagacttccctattagaacagatcccataggctcaggtttaaagtgggaaggggtagcccaccaagtggtcccaacatatacgagccaagtcacgtgagctcgccccttcttggaattgttctctgcctggtcctgtctttaccacctcactggcccaggcattgtccctggcaccgcatggacaaaggtgctttccttgattgctctcagctccgcagagctttgtgcaggtttcgctcattcagtggaacacaataggaaatccagaaaatttgctgcntcagaagcagtctagcacctccagcacagcttcccagcctgcctcgccaacacagccggctcaccgccaccctgcagagatcctctaga

SEQ ID NO: 378406 - DNA, 783 bp, Homo Sapiens
tctagaggatctctgcaggagagagaactgagaaaaacaaatatgacactgagtgtaggatggatttggcgtacgacggaatgaggaggtgggaagaccactgggcagatgaaccatggcaggtcaaagaagtgtggcaggttccaggagagaaccctcagcagttgggctggcggcggggaggggaacagtgggaaactgaaatcctggggtggagaaaaggttgaagaaactctcactgggaggccttaattcttctccatagagttggaggcaagggcttctgcaggatgagactgagggattgagaacaaagtggtataaaactgtggtagcatcaaaaaactgaaaatagggaaaaatggtggtgaggaggcaggactaacttgcagctcccactcagaaggacagaacagcatgtagaaactcacatcgtgaactttagctccaaaaaccaccacaggaacacagcaggaaagccacaagatttcacagaatctttgaaggaagtggcttgccactgcaaactccatgagacagccaaaaaacaaaaactctgaattcagacaaaagacataatctcttaggagctctatggcactgcctatggcctgagaaacccaaatacttatccaggcgaccttaggttgtatcagctgatgctctcttgaaagcatcacctccttgctggagtccaaccaatcgggagcacaagcagcatttgtgaaaaccagcggactatacaaaatacaaccaagacagagtcagtctctctcctgaggg

SEQ ID NO: 378407 - DNA, 359 bp, Homo Sapiens
  misc_feature (80)..(80): n is a, c, g, or t
ggagagagaacgtactggctgtaacatctgctacgatgctgttataaaaaatgtatacacatcctgccctcactgctggnccttccagggaacctgcgtccacagagactcacccacgcaggacgtgacacctcagggccgcgtttcctgctcatgtgggacttgatgctgttctctgaattgctgcatttgctccaatcttcttgtctgctgagatctttcaagaagctgtatctatcatccaacatgttcactattgttcccagcttcacgttatctctgaacacagtgaaatggtagtgaacaattgctgaatgtgtacaagatctcaagtactgggccaagcattctcccctgca

SEQ ID NO: 378408 - DNA, 556 bp, Homo Sapiens
gagtaaggacaggacaagggcagactctagaaatctcagcatcagtcaggggactcctggggacaccctgagggagatagcttacaggcaggccagcacctcccctggcctcaggccaatgagaagacatcaaatggcaaacagaggcacagatcctgaatagcagctagacctggacctgttgttcattgattgattcattctttcactcgcttattccttcattcactcacttattcattcagtagctgttaagcagctgctccctgccagacaccacacgagttactgaaggtgtagcaaatatagttcctgctaagtactcatgactgagattagagcttctaggaaggagggtggtgagaaagaattccttgtcccagggagatgatgctgtttgcaatgctgtcatgatcactgtaggccacagcatttcatagcatttagatcactatccatctgaatgtctagaataggtgattttgggatctcttccaagcactggtctcatggctggcgcagatgcccgactctgcctgcagcagttctctctccc

SEQ ID NO: 378409 - DNA, 431 bp, Homo Sapiens
gaggacccttcaggagagagaactggggttgacactgtgcagcacatgtgatatttatttttgctgggtgtttttaaacagctgttgtcatcagtaactggggatggagaaacttgtcctggtttgggtaaagtggttgaggtgagtctggtatctttgtactgggtacaaagaaaagggtatctttgtactgggcgggagattggtgaaaatgatctttaatgttgctgtggtttgaagatcctgtcagcctcgcccagctcaagactggtgaggggttagctgtattgttcttctcacccagagactctggacatggcagaggcccagctacaacacccacactgaattttacacatggacatcccactgtggacaggaggcaggcaccagacaggcatgcatgttctcagaaaagaccattccctgca

SEQ ID NO: 378410 - DNA, 500 bp, Homo Sapiens
  misc_feature (48)..(48): n is a, c, g, or t
ctgatctgaggatcctcgctgaaggcatctcagaggagtgcctgtggnccacagaggcgagagagaggacaacttcacattatttcagtggtgaggctaggagttcagggaaaattgtcctatttcatctctgacccaaagatctacggaagagagctctgggtcagatggtggtgcaagagcctacatatggggtagacatggaacccgttgaagtcttacttcccaggttgacctgggccaagtcaaagtgagttctgagactagaaccttaattgtcatctaactacaggatctccaccaaaaaaataaacaaaggatgtgggagcaactagggaaggccattggtcctaactgtaggaccggtcaagaagaactccagcttgggggctggctctatggatcatggatcctgcctcctctccacaggaaccacctatcagcccagggatataaaaagcccagctgtgaagttccagttctctcttcctggagggtta

SEQ ID NO: 378411 - DNA, 282 bp, Homo Sapiens
aaaatatattcaaaataaccacagaaagggaaatgaagatacataagacaaacacacaaaaaagatcaggatgaattcaggcatcagatggggtgaacacaaggccagctatatctggcacaaggtcccaacacttgcaggtggaactgagacagaccaaatggtagaaattcccagaagcagagaggggagtgaaagacagcttcagtcactaattacttccaatataggaagttctctcactctagatctcttacctgaaggcagaaaacaaatttgtgc

SEQ ID NO: 378412 - DNA, 392 bp, Homo Sapiens
ctaattacaattcgttctcaagtgcatccatgccccagattcctgttgcttcagtcactcctacagcatcactatcaggagctggtacatacactacctcttctttgagcacaaaatctacaaccacatcggaccctccaaatatttgtaaagtgaaacctcagcagttacagacaagcagcctgccttctgcaagtcatttttcacagttaagctgtatgccttcccttattgcccagcagcaacagaatccgcaagtttatgtgtctcagtctgcagcagctcaaatcccagccttctatatggacacaagtcatttattcaatacccaacatgcacgattggctccgccatcccttggctcaaccacaggtttccaaccagtcctctct

SEQ ID NO: 378413 - DNA, 617 bp, Homo Sapiens
ctacaaggagagagaactgaggcagagattggaccatgctgaggcgataggcaagaactccaagatgaactcagacaggaacgggaagcaagacagaagttagagatgatgataaaagagctaaagctgcaaattctgaaatcatcaaagactgctaaagaatagaaactgttaaagagattcatctgtgtattactgacaaggttttttttgtttgttgcttgcttaggtaattgaatactgaagaatttatctgcatgacgataactaggcatactatccatttgtagatcagagaaagtgaagagattatatattagtacttaaatttttacattttccaaatgaatgaaaatgtatgtttctttgtacttttttaaaaaaatcagcttagtaacaatactatatggtttcaactagtaggtaatctgcttatatttctaatgcaaacttaacaattgtgtactttttaaaagctgcaatatgtgttggaaaatagctgtggtcaatttcgttatccatatttcagactcaattttagatacaatggtggctttatatttaagtatatagagctctcaggattgaatctccctttctcattaccaatttctaat

SEQ ID NO: 378414 - DNA, 486 bp, Homo Sapiens
ggaggactatcgagaacaattaggggattgtgggcagaggcctcgaagacagaagagggtccctgcaggtcgacatgcctaggcagagggcggtactggccgcactataggaagtgagctggaaagaggtggcggccagaggatgaggcttggacaggagagagcaaaaattgtgtgtccgtcatgaaaatgaggttcaggatgtgccaagggtgtgtgcaactgaggtggagttgcggtgaggggctgggcagtcagagccctggaggcatgacgcttgcgtgcatggctggctcctaggatggcgccaggagcaggagcagagggaacgcagcatggaagtcttcaggaaacttctctccccctggaatgtcggctcccggagaacaggaccaaggctgtcctgaacacggctgtgtcccccagcgcctggcactgagtaggcacgcagcaaactctcatcaaggattatgcctgatacgtcat

SEQ ID NO: 378415 - DNA, 582 bp, Homo Sapiens
gtcatttggtgcctgcactaaaaacaagaagagattaaagtctcaagggaagaactgcaaaaaactagccaagaatctccttaaggagccagaaaactgcaacaacttttgcctgtggaagcagtatgcacatctggagtggttgcttggcaacacggaggatgccagaaaagtttttgacacagcacttggcatggcaggaagcagagaactgaaagactctgacctctgtgagctcagtctgctctatgctgagctggaggtggagctgtcgccagaagtgagaagggctgccacagcttcgagctgtttcacatattaaccaagctgacttgaggagcagcccctatgggcccttacactgggacaggtgttggctgttcacattttgaaagcgcgaaaggcttatgagcacgcactgcaggactgtttgggtgacagctgtgtctccaatccagctcccaccgattcctgtacccgcctaattagcctggctaaatgcttcatgctcttccagtatttgaccatagggattgatgctgttgcagatatacgaacaggtgttgcaaaactgaacagttc

SEQ ID NO: 378416 - DNA, 468 bp, Homo Sapiens
atatgggtccagttcccggcggcgtgctgggtcagcaccacacgcacctggttttattattcactgcctctttaaatagcatggaggtgaggctggctgcttctgtagtgttgcatgaggcttttgagataaatgatttttcacatcaacagaatcaatagcagctgtgctcagtacctcgcgcttgtgtacgggtttgcgactgaaaagctcacagcctgtgggtgcttgttgctgcttttccaccagtttgatttgtgatatgtatcttagaagacacacagacaaggggaagcgtctcagtgctctcattattgcggttcatcaccaaaacaaactccctctaggactcccatatctgagaatggcagcactgtccagccagttgcccagctcaaacaccagagcctcactgttggcttcaccccgttcttatggctcacatctcatcattcacaaagctgtttc

SEQ ID NO: 378417 - DNA, 199 bp, Homo Sapiens
taaagataacttttcataccctttctaagtatttttctgagacacttcgagaaatctgtgtcatcaggaaactataacaagactgcattcgttgtttctctgtccatggtccacctattgccagttattaaagtgcttgtggctcattctcaacacactcctatcagcagcaacttctgcaaatgtgtgtctgttctgc

SEQ ID NO: 378418 - DNA, 950 bp, Homo Sapiens
  misc_feature (803)..(803): n is a, c, g, or t
  misc_feature (827)..(827): n is a, c, g, or t
agatctttgcgggagcgagactgggcatgaacaggagggtgagaccatgagatttgtggacacaggactactgaggggagggcaagggctctggatgtccaagagaggcacggtggaaaacaaggttgagatctgatggtgaagccctttggacgccaagaggagagatttgaacttcattcctcaggccacatttcttagataatattccaaaatggggtattaaataatgatatcatggaacaaaagaaggtgcatgggggtgtggcataattaaatttggcaaactgagaaggaagggacaaaggaagccacgtttcccaaactatttgaccatgaagccctttcatcacagagatcctcgtgggactgccattctggttaacacactctaggaaaagggttttgaaaaagccaggaacatcatggcattatcgctttaggacgttggtctaaagggctgctggaggtcgtggcagctgcagtgcagggcaaggtgagacggggaggagaggtgcaggcagtgggccagacctggaggtggaacaatggcaggcccaggacaggcagagggacctggaagagtccgaagagccacagtgacgctacatgggaccatgtgccttttccaagcctcagtttcccctcctgtggaatgggatggcctcttttcacaagacagttgggaggacccttgagtctgtgtgagtggaaaagtctggaaagctggaaagagtccggagcttcttctatcaacattcagaggaatggaggctggcgatggagtggtcggattaggaganaaagaccaacgatggattcaggangagagcaagcagcatgagctggaagcccccagtacctcgatttcccttctgctgcctcatatttgcattgtttcttcctctccagcccctctgacccttcctccaacaatgcagagcctcaga

SEQ ID NO: 378419 - DNA, 350 bp, Homo Sapiens
gctgcatgacacagggagtatgtagggttctcactaggcagttttgctcccaactccgaactgggcccttgttggtgggtctgcaatatacacgcaagccattcttgagtctgatgctcagcgctccagcgtggacttatgtcctatagggagatggcagagcatgtacatgtccctatcgctcatgtgagcttcaggcaaatctggagggcaagtaggaagcccggtgaggaaagaccaactctctatgcgatgaggaaactgaggcctgagatggggaggaacttgctcaagatacaagttgagtgacggcagagctgagaccagggctgtgccattgattttctgtc

SEQ ID NO: 378420 - DNA, 500 bp, Homo Sapiens
tggtcgggtggtgaggctgcaggtctatgatcctgtgactacgctccagcccagggacagagtgagtctgtttctaaagaaaaaaagaaagaaaggcccttcattctacctatgacaataaatctattacctccggctcctgtgtgagttgcctgtgaatatccagaactcccaggtacagggaacctctgttggtctggaagcgtcagcggcagaaattcagtcttccttttcccaatcagattcaagccagcttgaaatgatagttttgaatgtctcagaattggatacaagaagcgtttcccctcaggttgttcagacagccaggaatgcgttagcctgactaagttggttgttctgaggttgggtttctgtggtgccaaaatctagaaaaaggccctgagtggtgtgtatctgaaatgagaaaagccttgtgcttgagcctcagtgattgagtctctgctgctcttcagcggggtcctgtgccttcctgggcaggg

SEQ ID NO: 378421 - DNA, 434 bp, Homo Sapiens
ctgaggatcgctcagctactcaggaggctgactataaatagtgtctgctgtacagcaggcacatggcaacaggctgtaccaagggtgggtggggcttgtgtatggtggtggctttctgtctggggagtttagcgcctagtattttctcttactgcctcactccagcacactaggcccaagccccgggggctggccatttcagagacgctgccttcacggcttgcacagaaaagctccctctggccctgccggtagaagctggggatctggggttccagggaaaatgagaaaagggagagcctggccttggaggcctggtcacttgagcctctttcttcctcgtcaccccatgtctgtgaggaatggggctgtaggcagccgtccattcatccagacctctgcgagcctcctgagtagctggggggtaccgagct

SEQ ID NO: 378422 - DNA, 551 bp, Homo Sapiens
gcaccagcactctgcagagttgctatcaaatatggtaaccaaattaacgacctcgcgacttggtccctgactctgcaagagtcttagtccaaaagccatacccttaggtagcctcatagaagtttggcttcttacgtccagccgggatagctgcctgtggcaggaagcacaggcagaggccgtgtctacattaacaactacttaaaccaccttaggccacagggctacgtactcgcaatgcttggaactcaggggcccgtcaccctggagactttctgatctgcgttgatgtttatatgaaagaaaaggggatgttacagaagaacccgaggccaggacaggggagcaggggccccagggggcccgctgtgctggctctccagaatgcacttgtggaaaggatgaggctcagaaccgcacatgcactgcaggcccgtttatgctgggagtcattctcacccaccagccacatggttctgtaaggttctctaagtgcaggcagacataatgaaaatcaatgtggagaagtaagctgcctcctgagtagctgg

SEQ ID NO: 378423 - DNA, 452 bp, Homo Sapiens
caggaggctatgtccagctattaaaactattatgtctatgcggtagaagcaaaaatttttaaaaacttactttaaatagtagcattttagaagacagtacagaaatatccaagtagtgttaatatctctgccataaagacattcacaaattcaaaaacaaatttctactgaccatcttagtgtacagagtactgttctaggctctggggttatagcaataaacaatatatccagtccaaattcttaagaaatctacacttagctagggtggggtagaaggaaaaaatgataaaacacaataaagtcagatcatgataaattctcatgaaaaacaaaccataaaactcggtaagagattaccagataggaagtagtatggcgagaggtgcatatttagagagagtggacaggcaagacctttctgagaaaatggcatgcgggtattacataaa

SEQ ID NO: 378424 - DNA, 334 bp, Homo Sapiens
  misc_feature (166)..(166): n is a, c, g, or t
gacatatgttaagttgtacaaaaagaggaggtgctacactagtttcctcaaagcacacagaggtaggattgctggtgtgctcaaaaggcaatgtaatttcctaacttaagctgtctattccatgtagttactaattaggaagagctatagcatctagaattttctntagtgtcatttacaggagaatcaagaaatattgtcagtgggtacggaagccttaatggagacacttaataagctagggatattttagaaggaaatgaacaaagtctttatgagtccattttttcttttctatttatagttccttaatagtttttcatggtagctggaa

SEQ ID NO: 378425 - DNA, 553 bp, Homo Sapiens
  misc_feature (421)..(443): n is a, c, g, or t
ctctacaggagtatgattgggagaggttgagaagctgtcatagtgtccctgatgtgggagggcacaagcaaaggcccaggggcaaggaactgcccagtagattccagaagagagctaccattgcatacagcagagtgtacaataacagggtagtcagtacactgcatcaaggggctgaaggcaactgccttttggtttgagcatagtctgaaagcagtggagccactgaatcccacaaaagctggtaacctggacagctcaaaagtcacagccatcaggactttgcctggaatattctggcattattggcaaacatctatcttcccctaacaggttggctgctgtatactgagacccagtcggagatcagaaggcaggttcagtagaaacacgtaggactctactcatgtattaggaatcnnnnnnnnnnnnnnnnnnnnnnnactattaattagatagtagactttattcagatttctgtgtttcctttttttaaatagtcgagtttaccgaagttcttagaaactggatgattgcctcctgagtagctggg

SEQ ID NO: 378426 - DNA, 468 bp, Homo Sapiens
cagctactcaggaggcgggcaggttagcaaagagaagcctggtcccacgtagaaccaggcacctctagcactcgcttgcttcatatctcgcggctctcacagaagacttcatttgaagagaggattgattctagtaagtagaagagaagaaaagtttggaggccatgggcctaaggtctgtgctctacatttatctaggaaagggacctgatgtctagggggttggggagggtagggaacggctctgcagagacctcattgtcagtgacagatagccaccactaccagacctgttgttcccatttcgctttttgttttttacttcaaaaaagatacttattctgggtggcataccactgtttgtttgattgattgatttagagatagggtcttgctatgttgcccaggcccagtcgcaaactcttgggctcaagctatcctcccgtctcagcctcctgagtagctggg

SEQ ID NO: 378427 - DNA, 207 bp, Homo Sapiens
caggaagggaggaggagggtcaaaggatattggggtgggaggatgtaataacagcacttattatttcactcattgttagtaacattttcatagcaattcaatgtcaataaacatacaatagcgctttggtaagataataaactaataggtactaaattaaatataaaaaaaactaaacgtaaacgttatcaattaatgttgacgatg

SEQ ID NO: 378428 - DNA, 726 bp, Homo Sapiens
  misc_feature (65)..(65): n is a, c, g, or t
ccaatggaagatatatcatcctccctcactggtgacattgcccaaatatgccctgttgtgtaacntaatttcttgacatattctaaatatccaattaggatttcatgatagactgcagtcctcaagcatttaggacggaagaaatgaacactatcgaggtaagatatgtatactctcctctggttgggtggagggcagtcagagccatactcttgaacatgcatgccaaagaagcacaggtcaacaccatcaatttcttcaaaggcaaagagggctttggttcggtatggaaaggattctgccatctctccactgtccacaaaccttgctttcatgcctggttttacttccacggttttgtcagaagcatgaactactctaacagtgacctctcctgactcagagatgattctgtcgcctcagaaagtcattcacacgattctctagaaaggtgccaagtctggtagatggcaaccttttagcagaaaacttattttctttcctagctcgtgcacttttctttaaacagccatcacagacgaatccagcaggccagatgatctcatggtgaaggacacagatctgatgcatctttcttccgcactctgtacattcaacaaacagttcaggatccagtgtgtcattttttctcttggaaaattgttctttatttattgtagtttgaggctgggaagggtcatcccccaaagaaacgctctccccttg

SEQ ID NO: 378429 - DNA, 198 bp, Homo Sapiens
  misc_feature (151)..(151): n is a, c, g, or t
acttattgaaatagcagacatttcgctagacactccaattaacctgatatgaggcgctaatcaataaaaaaagttaaacatttgcatgactctactatgggaataaattacctgtttaatacctcgactttttatagaaaaataatgatgnccaaggtaaaccaggtaacccaggcctgtgaactatatgcctggaac

SEQ ID NO: 378430 - DNA, 249 bp, Homo Sapiens
  misc_feature (186)..(186): n is a, c, g, or t
  misc_feature (188)..(188): n is a, c, g, or t
actgcacccaccccaaggccatggcagggtatggagatgtcatttatcataagatgaacagataagctggaccaataatttacagattccagcagagggtgaggacacccagatgcgccaggactgtaggaaatcacaatgatggcaacgtcttgccttcctggggacagggagccctattcaaananagtcacatctgaggagccgggggttataacatcaagtctgtccttgacctcacaaagccag

SEQ ID NO: 378431 - DNA, 307 bp, Homo Sapiens
  misc_feature (16)..(16): n is a, c, g, or t
catgatgcagcagctnatttcaaacctaccactgcatgacagttttagtttgcctttttgcctctggtgggcatgaagactgagcaaagctgggaatcctgcagatgagagtgtgaggagccagggaaaggcagaaccacctccatgctgtagcaagcaatttctagatactagaagcataatagaaacatttttctgtacaggtattaaactactggtctgtttgacagactttggtaacaatccaaagaccctgagggtctgagcagctagaagtcctagacaaagaacttgtggatgacttttg

SEQ ID NO: 378432 - DNA, 196 bp, Homo Sapiens
  misc_feature (27)..(27): n is a, c, g, or t
  misc_feature (29)..(29): n is a, c, g, or t
  misc_feature (52)..(54): n is a, c, g, or t
  misc_feature (57)..(58): n is a, c, g, or t
  misc_feature (68)..(68): n is a, c, g, or t
  misc_feature (85)..(85): n is a, c, g, or t
cacttctagataggacgggctgacatncncagatgctccatcttaaaacctnnnagnnaatccagagncatgatagctaatgacntcatattacataaaaccttacagaattctacagattcagatttgaaaacatttacagtttagtagtgtgccaggtactgtgtcgtctgctttcactactttgttagtattc

SEQ ID NO: 378433 - DNA, 165 bp, Homo Sapiens
actacacttagtgtttacaattcaagaaagaataagtggtgtgagtgaatattaatatagtggagtaatttgttcgacgtcctgtttgtcctacgtattccccagctgctgctatctaggctgagcaataaagaagtgtgaagttcttctctcttgcgcccccct

SEQ ID NO: 378434 - DNA, 142 bp, Homo Sapiens
  misc_feature (78)..(78): n is a, c, g, or t
  misc_feature (110)..(110): n is a, c, g, or t
cctttgggagcagtatttctcacatagttgtctgtacttgctattgccaagttctctcctctagtactctgttaagcncactttagtgaggtctttgtctgcaccactcncacagaggcgttctctagtcttcagtagtccc

SEQ ID NO: 378435 - DNA, 231 bp, Homo Sapiens
  misc_feature (43)..(44): n is a, c, g, or t
  misc_feature (57)..(57): n is a, c, g, or t
  misc_feature (65)..(65): n is a, c, g, or t
  misc_feature (170)..(170): n is a, c, g, or t
  misc_feature (172)..(173): n is a, c, g, or t
  misc_feature (181)..(181): n is a, c, g, or t
  misc_feature (192)..(192): n is a, c, g, or t
  misc_feature (194)..(194): n is a, c, g, or t
tgcgcgggctcgccgtttgcatacaatggcttactcagtgctnncaggctgtgagtnaatagagngtgtatgacttaataagcattttatcagcgtacctttttcgccatgcgctacctgctattgatgaaggcggcttagggcatcgaaaaacctaaaagtcgagcttngnngtgccggnaacggctctanantacttctcattgtaactagagtaccatattcggccgt

SEQ ID NO: 378436 - DNA, 239 bp, Homo Sapiens
  misc_feature (56)..(56): n is a, c, g, or t
  misc_feature (65)..(65): n is a, c, g, or t
  misc_feature (129)..(130): n is a, c, g, or t
  misc_feature (132)..(132): n is a, c, g, or t
  misc_feature (202)..(202): n is a, c, g, or t
  misc_feature (217)..(217): n is a, c, g, or t
gagagtggggttagctctgcctagcgctacacaagaaaacctccctccagtaaatnggtgtgggnggtccgcttttggccatcatcgcacccccccggtcactgggcgttgttgccgggcacttgtttnncnggctgggtgtgtaccgtaaccgtgggtcctctgacaagtgcctaactcggcccaccccttagggtgtgtntcatcgaagtgtagngaatggtggaacgtttgtttgt

SEQ ID NO: 378437 - DNA, 591 bp, Homo Sapiens
  misc_feature (551)..(551): n is a, c, g, or t
ttcagactttatgcagccatataaactgttctctaggcatgctgtgacattttaataaaaagcaaaaggagcatttataattatctcatttgttaaggctgagaaggttgtttttataataggtaattatattgaatgcattttcactgaatatggtatgtatgctaaattatatgaacctttccccaagaagggccctagaaattgatgtggctttcctcttaaatattaattattagtcctgaaagaaagataacatatgtgatttttgtggttaggagagttgctgtcatgattgttttttccttcagccctcctctggacttttcttttggggcttcagattttatgattacatcttgtccccctagaacatcccccttcctcccatactgcttttaaacagatgcccaagaaggcaagcaggaatgcctcttgtgggggagggcagggagaaataactagttcaaaccaactatctatctatgctttgcaaaggactaaggcgtattatagggaaggaggggctaggaaacctaactggattcttncttcagttttcttcatttttaaaacaggcccagtatttcc

SEQ ID NO: 378438 - DNA, 158 bp, Homo Sapiens
  misc_feature (21)..(21): n is a, c, g, or t
  misc_feature (31)..(31): n is a, c, g, or t
  misc_feature (43)..(43): n is a, c, g, or t
  misc_feature (47)..(47): n is a, c, g, or t
  misc_feature (52)..(52): n is a, c, g, or t
  misc_feature (127)..(127): n is a, c, g, or t
caggattatctctaccgatcnactgacaacnaactacgacatngccnagccngtttagaaaatttggtggctggaggggcttgattcgtgtgctcctgcttgctaatccgcatctgttcgaaggtgnacaggaggccaggatggagcccgtggttctc

SEQ ID NO: 378439 - DNA, 514 bp, Homo Sapiens
  misc_feature (139)..(139): n is a, c, g, or t
aatgcttagaaccaaaattcagatcttaatgagacttattaaaaagttctctgccccataatgaggcacccctttaaaaatatggtctgagtagagacataaaagatatacatttaaactgtgatggtaaaataaccanaaaaagaaaagttatagttcaaaaaaaggaacaattctttgaaaaaacatacatagaaacagtcaaactatgaacacctttacacattcacaacatctgcactaatgcatagaagttcaaaacctagaaggcattttctcccccatcccttctctgaaactgattcagaggtcactgtgtgaagaacttacttcagtcctgattgtaaatgtcatgaaattattttctacacagatagcaaatttagttttatataggactgcaagcatacatcatctagggattacccagtaaaccacaaatattttatccattcccctaagatacaggtaacatatggttgtggtacatcccaggcagatgtcatttaaagcc

SEQ ID NO: 378440 - DNA, 407 bp, Homo Sapiens
tattattacgtacttcagtgttcattattaaaactaccgcaatactatatcataaaaatctgggatggatgttccagccatcataaggtccaaaagaaaagagaaagtgttattttcctgttagtgacatgtagtccctttgttctagtaggaaaaaaggtgcctagaggtagtatatagagtaaatattgttcctttagcctacttcctgcagcttccaatttatccaaggaaatgtctacaacaattttgttcaaaagtctgttctagtcaatagcaggagaagtccacgttattgggctgattttgcttacatcagcaagagaaatgtcacgtgatactcaggccgcgctttctcttccatcacaccatcttcaaggaatgtcaataaactcactttggtatgg

SEQ ID NO: 378441 - DNA, 719 bp, Homo Sapiens
  misc_feature (609)..(625): n is a, c, g, or t
aaaatgtaaagcacaccagccttggtccccccttgaataaaagtatgaaggcagaatttagttgaactcaaacctttatcagtttcccctagtgaaaaagtccttaatgccatggctgaaaatagacgagttactgaaatttgtcatgcgaagtatttacataaagtgaggtcagtaacccgacagaataaaaaaggtagttgttaaattattgtataaccttttacaacttgaataactttgtgggtaagtgcacactgacgttcaaactcctcaaacatacattaacaagaaactatttactgcgtgaagaggcacacatcatgtaaaacatacacgtcatgggagggattctgcatagcaggaaagtcgctaccactacataacaaatgctatgccaacagtcaaagctgccacgaaagggtacaacattagaattcccctaaaatctcaaggagtgtttgcaatagcacagatagatgcctttcggagagtaagtacatgttttgttcagaagggtatttttcactggaaaatctgaacatcatgtaaataaatcaatgttctaactggataagatttaaggcaatgctactcagacctgagggnnnnnnnnnnnnnnnnngtttgtttttcttctgaatcatgaacaggtcaaaatcaacatcaaaaagcattcttccaagcattcaatgcatctttaggtattatcagcatta

SEQ ID NO: 378442 - DNA, 592 bp, Homo Sapiens
  misc_feature (177)..(177): n is a, c, g, or t
aaaaaatgaaaaagcagggacaacaggaggaaatgaaggcagagaaatatagtttcctttcctaggattgagacaattctatttttcatatactcgtggctcattaaatagtaaagggttgatttgctgcaagagtagctgagaattcaaaaacatcctggcacaatgattcaaaangacaaaagccaggctcaacttatagaatgttttggaaactggaagtaatgatacatttcacttcagaagcacttgtaggtctttactagtgctaagtattatggtgagctatcattaaagtgtgccatcttggataaaggccttttgcctactctcttctgcaattttgacacctcaatattcacacccataaacattactaagccccagttctatcgttggaaggagttgttattcttttgttgttcccttatgcaatttttaattctatgaatgttaagtttttttgagctaatgatagatagaaatgcccactcaaagaaaaataaacagagacaaatgttaaaattgccatacagactgtttttccccctgttgtttcactttaaaataaaaagaaatccttgattaatca

SEQ ID NO: 378443 - DNA, 452 bp, Homo Sapiens
  misc_feature (32)..(32): n is a, c, g, or t
ttaaaaacgaactaaaccccccgtgaaatccnacgtaatgtaccatggagaaacccaggatgatggtgtggacactgggcaagtagagacgcatctgagtaagggatgagtgatctcctccccctgctttccgcccacatccaggcagtccctggtgaagctgtttcttgatgagttattaggaagccaaacttcctccacctcctcatactgttgcccttgatttttctgagacacggacgatactgtgtatggcacttggtcttcggatgcagtttggcttgtgttcatgctctcaaaatgtgagcagtgaatcaggttaacggaggatgcttcgggatccagtttattttcaaatcgctctgtgtaaagaatcctgggcagcggctccagatcatcacagttgcagaaacacctgcaaatctttcctccttgtagattggtgtcacttg

SEQ ID NO: 378444 - DNA, 389 bp, Homo Sapiens
gtagagaaaggcttcagcaaatccagatgttctggcaaagatgggaaccaggttcctcggactcagaagactgttggtctccacaaggcaagagtgccctctggtggccagagtcagtaccggcggtcgagaggagctcagagccccggcctaggctgggtgcagagcccacagccgactctgaggtgaaggggtgatgcccaccttggaatcctctgagaggaggaagagagttgcagaataaaagcattttgtgagaaccttcccatttcaaacccccttagcaaatcatggactatccaccaaaggcgtacaggtctaaacgtagcaacacactcttgcagcctgtttgtttcttggtgcaaccaggttgacagcacatcctctgg

SEQ ID NO: 378445 - DNA, 121 bp, Homo Sapiens
ctacaatagttctacagtcacaaagaggcttgtggaaaagggagctgcccgattgaattttttataaagaaacaaacaaaaccaaacacaaccgaaaaccaacagaaactgatttcacggc

SEQ ID NO: 378446 - DNA, 767 bp, Homo Sapiens
ctcagaacacagcatcagatatttctacgtagcatttaatacaacttcaccaacattcaaggtaaatatctcctttattaaatatgaggaggtggggagtgacataaatgttgtcttaaaagtctactattaatcataatgaatgcctagcaaaaatagatttaaaggacttacagataaacaaaatgtagagaaatattgatgacttctaactagctggtaggaaaaggtggtcaagtttgaaatgcatccactattttgagctgtactgcaagagagattctgacagtaagagaactcttagtagtaactgatagggaatgaccttgaaagtcaaagaaaccacttccaatcagctgaatttcaagactccggcagatcaacagggcaaaagcaaccaaaattacagcagatgtcattgagagtggcagaacctctggcacttcagataatcccaaactgagcgagctcatgcaattccaggtggctgaatgcctcccatggacaaatcactgtgatatctgttcctagcccctccattcctggaatgtcatctccaaatcctttcacacctttctttggaggtttactcttgaattggcgagtctgcctctgcttgaacttgggagggcctttgcgtggggtggtaggaccctggtttgaagctggagcaggcagagtagtgttgtcactcattttaactccccccgggcggctgatgtttccctttcagcctcggagctgaatgttgttcctatcagctgccc

SEQ ID NO: 378447 - DNA, 414 bp, Homo Sapiens
agttgctgcccttcgatttctctatgctctctcccacccctgtggctcttcgcccttggggattccttgccaccaccgctaccaccaccacctcaccccgtgtatcttctgaaagagaagtaggtctttcctcctgcctcaggcacaagccctcctggttcagggtcagaagctcagcaccttgccttctccatgatcccaaagcacaattggtgagtgggggagaggaccccctctccctgactccccaccctctagatcaggcagaatggctggcctgtgctgcgtctgcacacaggaagtcaccttcctttaatatattggcttgaggcctgcctgccctccccatacccagaaaatctggatctcccttgagcagttttctataaagtctgcaataatctcagatactct

SEQ ID NO: 378448 - DNA, 649 bp, Homo Sapiens
  misc_feature (30)..(30): n is a, c, g, or t
  misc_feature (63)..(63): n is a, c, g, or t
  misc_feature (65)..(65): n is a, c, g, or t
  misc_feature (106)..(106): n is a, c, g, or t
  misc_feature (108)..(108): n is a, c, g, or t
  misc_feature (132)..(132): n is a, c, g, or t
  misc_feature (227)..(227): n is a, c, g, or t
  misc_feature (278)..(278): n is a, c, g, or t
  misc_feature (384)..(384): n is a, c, g, or t
  misc_feature (542)..(542): n is a, c, g, or t
  misc_feature (610)..(610): n is a, c, g, or t
aactcttgaaaaatggttactgtgggttgnctcttgcaagttggctctgtggaatgactgttncnggttggctctgtgggtggctctgcagggaaggctgcgtggnancctggctcagcatgttccggcagngcagccgctcctcctcctgcttctccgccatgcggttctccagcagcctcagctccctgcgcaccgccttctgcatggacggctccagctccagnactttctggaggtccgccttggcctcggcctcattccacacctctgcgtgnagcccgggcacgcacgtagtaggccttcacgatgcctgggtggtgccggaaaatatcactggtgtgctccagcacctcatagtactcctccttcttcagcaggcantggcagtagttgaggatcagagtattgatcatcttctccagcttcagccactgcacctcccatggcttctccttggtctgcaggttccttaggcagatgatggcctcctggtacttggaagaggcctcctcgtagcggcccagcttgaagagccgatntccctctccgtggaggacggcaccgccttcatcttctcatgattgctcaggttccaggtctccctctngtaatcactcggggcatcaacctgcagcagctcgatcac

SEQ ID NO: 378449 - DNA, 1026 bp, Homo Sapiens
  misc_feature (133)..(133): n is a, c, g, or t
cgagaggtggggtggggggattacaaacctctaacagcaccacaggctgcccggggaacatctgctactacagccttgcagcccggagtcccggattttactggttcccgtgcctgcggacaggcccccaggntagcggctttgtggagggaacactgggtatcctctccacagtccaggtgctgggaggccctccttggcttaggaggacacttccaaagctggggcgccccaaggaggcaccagtggccagaatgtccacgcagagcacccaccccctgaaacctgaggccccacgtctgccacctgggatccccgaagtccccgagctgtcagcggcgccacacactccctgccagtaagtttcgctgcctcaccccggaggacgctgtcaggcctttaagatcgagcgtgaagccttcatctccgtcttgggcgtctgccccctgtacctggatgagatccggcacttcctgaccctatgtccagagctgtccctgggctggttcgaggagggctgccttgtggccttcatcatcggctcgctctgggacaaggagagactcatgcaggagtcactgacgctgcacaggtctgggggccacatagcccacctgcatgtgctggccgtgcaccgccgttccggcagtcaggcaggggcaccatcctgctgtggcgctacctgcaccacctgggcacccaagcggccgtgcgccgggccgcgctcatgtgcgaggacgcgctggtacccttctatgagaggttcagcttcccacgccgtgggcccctgcgccatcaccgtgggctccctcaccttcatggagctccactgtctcctgcggggccaccccttcctgcgcaggaacagcggctgctgaactgggctgcccacctggctgccaacatgatccccgtctctgccctgggctcctcttagctcagctgagcatggagacagcagtttccagagagtggagagagcagggctaaataaagaggagataaggtggcttctcacggaaaaaa

SEQ ID NO: 378450 - DNA, 216 bp, Homo Sapiens
gattacatgtctatcttcaattagtttgagtaaaatactcgtagtaatttgtgtattttgtcagttttcaaatgaattgttcataatatcctcacattttcaaatttcaactgcgtttataaaattttcatttttccattctctatttgtgtcttcttgctcgatcttaccaaaatattttgttttagtgctttttcaataaacaagttctggctt

SEQ ID NO: 378451 - DNA, 942 bp, Homo Sapiens
  misc_feature (152)..(152): n is a, c, g, or t
  misc_feature (341)..(341): n is a, c, g, or t
  misc_feature (458)..(458): n is a, c, g, or t
  misc_feature (492)..(492): n is a, c, g, or t
  misc_feature (521)..(521): n is a, c, g, or t
  misc_feature (614)..(663): n is a, c, g, or t
tgaacaccaagttctcggaggaggagctgtgctctgggtaccagtccttcctgaaggactgtcccactggccgcatcacccagcagcagttccagagcatctacgccaagttcttccccgacaccgaccccaaggcctacgcccagcatgtnttccgcagcttcgattccaacctcgacggcaccctggacttcaaggagtacgtcatcgccctgcacatgaccaccgcgggcaagaccaaccagaagctggagtgggccttctccctctacgacgtggacggtaacgggaccatcagcaagaatgaagtgctggagatcgtcatggctattttcaaaatnatcactcccgaggacgtgaagctccttccagacgatgaaaacacgccggaaaagcgagccgagaagatctggaagtactttggaaagaatgatgatgataaacttacagagaaaganttcattgaggggacactggccaataaggaaattntgcgactgatccagtttgagcctcaaaanaagtggaaggaaaagatgaagaacgcctgatgccaactgttcagctgtcctccctccacctaccactcacatgacacccgtgagcgcctgtgnnnnnnnnnnnnnnnnnnnnnnnnnnnnnnnnnnnnnnnnnnnnnnnnnntccaccccagggccaagagaaaggcctgcacacaagcccacagcacagctccctgccaaactgaagcatctgtagtgacccactggttccttcttcctgggtcttcagcattccctcccatcatgcccggtcccacccctccctctgtccaccagcccatggccctgtgctaatcccaggattaggccataggagtcctaagtgtcaccccgctgtaagctcctttgtggagtgctgggtaagcagtttccaataaacgcaagctgagctgggaaaaaa

SEQ ID NO: 378452 - DNA, 519 bp, Homo Sapiens
  misc_feature (62)..(62): n is a, c, g, or t
  misc_feature (69)..(69): n is a, c, g, or t
  misc_feature (89)..(89): n is a, c, g, or t
  misc_feature (94)..(94): n is a, c, g, or t
  misc_feature (123)..(123): n is a, c, g, or t
  misc_feature (139)..(139): n is a, c, g, or t
tctcctacctgtgtaaggattattaacaaatcaattaagaaaacaagcaactattataactnaacaagnctatgacatcacagtgcatngctgngtagtaaacagcatttccccttaacatgnaagcattttgtcaganctcctgtatctttaggctagcattgttttagcagcagctagtcttcaggacaagatcaaaaatttcaagcgaaaagacaacgagttactctgagaaaacatcaatccacattactaataaaagaagcaaactgctggtttcaccttaacataaaattgggtgtgttccctttcacatgtgatttaattcatttatgtgatgacagcaaagctttggatttctgtggtacatcaatgagatggactaatttgttgagaaagctcttatttgttttaatatttaaattgtagcaatacaataactagaaaaaggtcagtgcctctgtagctttaaaccccatcaattttcatttgtttttcaaaataaagatgcaattaaat

SEQ ID NO: 378453 - DNA, 411 bp, Homo Sapiens
taagttaaactgaaaactgggaaaacagcccaggttggcggaaacagggaccctaaccccagtctgcaacccttttgtgtgaaaaaaccacagccgttattcttgcaacttcagaagtgaaaaggcgtgtgggttacaagacagctaaaagcagcagggcgtttccctcgggcaccagaagaggaaaggtctggcagttaaaattattccaacatattcttagcatatagcacaagctcacctgcacatagcgccgtccagcacaaccttagaaaacttccctccagccctttatctttgcagacagccccttctctgctgtgctgcatgttgcattcttgcaatgtattttcatagtttctgtaataaatttgcctttctttactcacggttgtcttggtaaataccttt

SEQ ID NO: 378454 - DNA, 478 bp, Homo Sapiens
  misc_feature (13)..(13): n is a, c, g, or t
agtgtgcccttanaaaggtacacctgtggtttttaaacctgtgcctagacttcaaaaactgtgaaccccctgttattggtaatgccaaccttgaaactcccaccctcctgccaggggttccttcctgtgattaaataggttataattataagcaaaattacagagtcaactgagtacctgatctaaaaagattacctttggctggaggtgagctgcactgaaactttacgacaaaatgtctctggacaaagagagtcagagaagagaagcaaaaggacactaattcatctgtaatttactgttggtaagcctagcagtaaagagacattggtcaattgctctgaccctgatgaattattaaactgagatcattgtcgtttatgcttgcagatgttaaatggaaaagttatatatgcataaaccttttcttcctggatttggcagatatgtataattatattaaaatggttctagacac

SEQ ID NO: 378455 - DNA, 461 bp, Homo Sapiens
  misc_feature (108)..(108): n is a, c, g, or t
  misc_feature (125)..(125): n is a, c, g, or t
  misc_feature (372)..(372): n is a, c, g, or t
tgaaaactacgtaaactctggaaagtattctataagaaaaagctggacctaggatttagggctgcagttgctgtctgcttctgaatcactgggggtgtctcctaaganctgtgcctcgggttttncaataggaaaataaggagagactcttacatggagaagtctggcttagtaagggaatattttggagcatatttgttattgttgggtagaaggggaaacctttgaaatagtcttaatggatagtttataatcaggcattcatctaaataaaattctttcttttttttgatcaaactgctaaagaaaaagcaaacttttttgctgcaggatagaattagggttgtatttttatgcttctatcagtgtctngcatttcctgagcatattaatcaagaccatgttattgttatgttaactatgttaatatcctttttttcttagttttcaggatgaatgcc

SEQ ID NO: 378456 - DNA, 610 bp, Homo Sapiens
  misc_feature (29)..(29): n is a, c, g, or t
  misc_feature (227)..(227): n is a, c, g, or t
  misc_feature (500)..(500): n is a, c, g, or t
ccacaaacctcaaaaaccttaggtgtttncctggttgggttgcctccccttttcctggaaccctacctaactggccctcctcccctttcccagaagccccggagaccacatcctgggacccagaggaaacaaaagcacccaagaggttgaactagagcctgacccagtgatttacaaatatttccatattcccaatgccttcgtctgcctcaattattccaaaaggnccatcccctgtaaaggcagaaaagcctccctcttagatctggccactcagcaaataagtgggtatttggttttatgaagaataatgctgaggactagagatatagtatatcagagataatatatagtatacaggttgatctaaatattctggtttggattaggcaattaaaatttttttggcaacaggacatatgtttccatgtgttgctaagattcaaaaactttgccctgaagttttattttaatcgtcattgagaaagagggctcctgtnctgacctcaaaaacagcaaagctgtttgtaaaagaagagagctgcttatacggaaaacccacattccaagacttggtataaggtattcctgaggccttgatttcaggttt

SEQ ID NO: 378457 - DNA, 382 bp, Homo Sapiens
  misc_feature (44)..(44): n is a, c, g, or t
  misc_feature (98)..(98): n is a, c, g, or t
gaacctactccccaaatggtccataagaaataagctctgggtancctgcctgaggcacccagagggacaaacccactggagaacaaggcaaaggcccnttcctacttcctcttgtgccttaaagaaatgtaccctcaaaaggtggcgatctgaaactgccttcaacaattggcagtggaggcttggctactgagtcttgcatatgcaaatgctgtctgcagagcccattttaaagccctgaaggtgcaaaacagttgctaatagcaactgtcctggcatgaagtattcagataactggttcagttttccactttcctttgtcatggacggatcttccttcttaggcttaagcatctgttttctgctagaaatacacaaagaa

SEQ ID NO: 378458 - DNA, 450 bp, Homo Sapiens
  misc_feature (391)..(391): n is a, c, g, or t
  misc_feature (398)..(398): n is a, c, g, or t
  misc_feature (421)..(421): n is a, c, g, or t
atcgctttgcaaaaacagaaaaggggacatgctgggaacaggccctaagcctgtcataaacaggccttaaactgaccatgaacaggatttctgcacgaatgtgacgtgctcctgatggctatgacgcccactgctagaagttgttagtttactggagcagggtagggaacacctggcccacctggagcggaaaactgctcaaaccacaaacaacagcatgagtggcctgagccttaacaacatgtttttgctgcagataatcggccagagactgtttctctactcctctctaagtatgctttgtttttcgtaaggaatgcttttagctgaatctgtaacctatagaaacaatgcttatcactggcttgctgtcaattaaacatgtggggtncaaactnctgtttgtgggctctcagctctncaagggctgtttttccccctggattccca

SEQ ID NO: 378459 - DNA, 308 bp, Homo Sapiens
ggaaaggcctccacctgtatctacactctgagggccctggactgggcctgagcttgccacagaggctccgtctgactgtgggctgggaggagggaggcaggggagagccggtcacggtggctggtctttactgcagggcagcactgtggccagctgtctgtctttacactgcatgcagaagtttaaacactgaagtgccgaagtggcccgtgccgccgcacagagaccccgactttagtttgggctgttccacgcttggctcaccattgccgcctgggacttaacctgctcaggcgggccttcgccca

SEQ ID NO: 378460 - DNA, 468 bp, Homo Sapiens
aaaatccaaaattcagtgtactttaccatattaatactgaggaaaaatctgttggagacataggtctaggatgtgtgaagtttggaaaaatatgcctatttaattataatgttcccctagactgctgtaaacagaagtgaatccagacttttctccagctacctttcaaaataataaattatttgtctcaaatataccttgatggaggacttttttattcttatggaaatagtgaattccaacaactatgatgaactatgttctttgctatttcttcactatattttttaaggttttattaaaaagccttagaaagttacatattggtttagaggctaaaattgtgttgatgctgtttactcacctaattacatagttttaatcatttgtacataattttaaaaacttactttgtattgattttgaatacagtgaaaatcttattgcaataaactattttagtaaaat

SEQ ID NO: 378461 - DNA, 704 bp, Homo Sapiens
  misc_feature (386)..(386): n is a, c, g, or t
caaatttaagccatatttatttgcatttttaagactacagagatatactttaaatcaaatacaatgttagtgctggtagcaggtttgttttataccaaagaatgaaaagatattttaagcaattgggtttatatcaaatctgttatttgccttttgatctctaaaacagaaataatttatatcacagttttcaaagacagatgccgcctaagcaaacatgaatttatatatggcctaaaacagacctttgactttcaacagaaaaagatattgagtaattttataaaattacctaaaaagatactgagtaatttcataaatacataaagcattttaaactctagttaaaagtctagtaaagttttgggagcaatgcaatgaagatngaaaagatacccattttcacctagtttcctaaaactgcacaatcctcaaccctgtggtaagtctttcctttggtgtacttttccccttctttttagttttcatttttgaattatttccttaaataggcaaaaaatgaagctttagtgaagggggcattgcaataaaatacattttagttatctttagtatttgtttgtgaatcccctcaacctgcctgccagtctcccttcatagagattgggtaactttccttcaaaacaaagtaaaaaaaacccaattcatatgaaaaataataattaagacattaaactctacat

SEQ ID NO: 378462 - DNA, 523 bp, Homo Sapiens
  misc_feature (23)..(23): n is a, c, g, or t
  misc_feature (87)..(87): n is a, c, g, or t
  misc_feature (140)..(213): n is a, c, g, or t
aaaaaccctctggtaaagtcacntaaaaatggttttttcctatgtagtaaaaagtaatcacccattggagactggtgaaatttgaantttattcctaaccacatacatggtttatatattaactttattatatccttctnnnnnnnnnnnnnnnnnnnnnnnnnnnnnnnnnnnnnnnnnnnnnnnnnnnnnnnnnnnnnnnnnnnnnnnnnncatacatgggttctcaaattggaagattcaacctggttaccttaatatatggggctggctgtcaatacctgaaagccagtcccagcaagtctgtggaaaaaaatgatgtgattgaaaactaatccatttatccttagtgcttcagtttctccatctgcactgagaagtaaccttcccttagaaaagggttgtaaataaatacaaaatgttaaagcttagcatacttctgtgcctcaaaaagcattcacgtacatgcttttaaaagggcaatttctttgttcttgacataaattgaatactatctggcttt

SEQ ID NO: 378463 - DNA, 369 bp, Homo Sapiens
ctgacctatatgcttattctaattccaatagcaaattgtcttcattactgtaactttatagtaagtcttaaagtgaagaaacaagtctcccaactttgttcttttgttacaaagttatttggctatcctatgtccttttaataagtgattacatcagtttagttttttcatttatacttttgctttcaatcaggttaactgatgtaatttacatatgctaaatttcaaacaacattacaaaagtttatccagcatgttcacaaaaagaaatattttaaatggtatcaggcttacaggttatcttcaaacttggttttcatgtatattattaagtacggcagaaaaccaggatccttggaagaaaggaat

SEQ ID NO: 378464 - DNA, 443 bp, Homo Sapiens
  misc_feature (165)..(232): n is a, c, g, or t
  misc_feature (238)..(252): n is a, c, g, or t
  misc_feature (337)..(382): n is a, c, g, or t
ggagaaaatgttgtagtttattatgatttctcatcatcatacatttactgtgtccacaaggaaataatactctgatagtccctacaaaagtttcttttagttatttgtgattcctccctcaaggtatttataacctatttagagaaaacacagacaaatctatgnnnnnnnnnnnnnnnnnnnnnnnnnnnnnnnnnnnnnnnnnnnnnnnnnnnnnnnnnnnnnnnnnnnnacattnnnnnnnnnnnnnnntcagccaggcatggtggcacgtgcctgtggtcccagctacttgggaggcttggggcaggaagatcacttgagcccaagaattcannnnnnnnnnnnnnnnnnnnnnnnnnnnnnnnnnnnnnnnnnnnnnagaaggcaacacctcatttctgaaaaataaatagaacatttttaaaacaattgaatgtttc

SEQ ID NO: 378465 - DNA, 750 bp, Homo Sapiens
caacaacaaaaataacccaggagtggctcaagagtccagtgtgggatgaaaatataaacagaggaagacaacatatgtcactggggaggctgggggagctagacaaaattcacacgggaggggcagggatgagacaatattgtgccctgggtctgtgcaaacgttgggaccagaatccactataagtttcattcttcggagacacggaagctctgcactggaggccgggactcaggcgtggaagagaatcttctccttattcaccggggaggctgtgtcttgtgcaaacaagtcatagaaacttgatgggagttggggagggactgaaggatgcatgcaaggttctgggaaggagtgagaagtagtgaaggccaaggggcccccatcacaggccgatggggtaagacttcgagagagcctgatcctggggtcttctgagactccaccaggagccggagagggcagggagccaaatccagctaggaggttacagattgcttttcctgggctgggctcctgagtgttggttcttccagctgtgcacaggggatttcaaacgttctacgtcctaaagccaggaagagtgacaaggcaggtggggacagaaggaagaagccaggagcctccctgagaaggtgtcaccttatctgtcctcctcttccccacacactggcctctgggtcccccttctctgtccacccacagagtgaaaccaattaaaatgttggatctcatttaaaaaaccaaaaa

SEQ ID NO: 378466 - DNA, 254 bp, Homo Sapiens
  misc_feature (224)..(224): n is a, c, g, or t
ctgggactagctagaatgcacattcctacttcctttaccaaacgtttgcatgcttcctgcaaagcacttaccaagtgatttctcttgaaccatcggatataattttgtatgtacatgtttgaggaaaaaaatgtaaagcaaaaccttttactgaacagtgttctatagaattatgacactaaaacaaaattgtttgtggaagccctgaaagctttatagtcctnggacatcaaaaattttatttgaggatgatg

SEQ ID NO: 378467 - DNA, 242 bp, Homo Sapiens
ggatacctggtgaaggatatggtccactattgaagaataatgattgtgtaaagtgagggaaactatattgaccttgaaatacggcaaccaatggcaaggtttgaggtgagggcctagagcttctgcaaagtgtatatattttagggagtcatatttggaacaatacatgctggacagtagagatataggagaagttacatgctatgtcttctcattgataatatccataaatctgcatacat

SEQ ID NO: 378468 - DNA, 332 bp, Homo Sapiens
ttgggtctggaaaacattaatctgggcaaacggagctggagctatgaggatctgagtcctagggggccctcattcactagcagtaagaatttaagtggtgcatggcacatagcactgtactagattctgcaggggcacaaacatagagccaaacactctccctcttggagaatttcagacccagaaaaggccacgcagttctaacttttgtcatcggttccttttgctaaaaggcaaagggtatgttccttgcctattgtccaacataccccttccaagattgtgagaagatgggtagctgggcatcaataaatattgaattcaattgacct

SEQ ID NO: 378469 - DNA, 217 bp, Homo Sapiens
atgagctcagagctaccccacaccttcggactgcctcggcccccacagctcccaggtgctactgggcgtggaccgccaccccctgagaggctcccttccccagtcctgccagaagaccccgggggcggggagggggcagcatgcagggtccccactccctctctggggtcgatgaagaggtgaagtgaccaaatgaaagaaagctgcattctcagtg

SEQ ID NO: 378470 - DNA, 378 bp, Homo Sapiens
  misc_feature (336)..(336): n is a, c, g, or t
tcagaaccggctagaacatccagtgcaacgtggatcagaaccggctagaacatccagtgcaacgtggaacagaaccggctagaacatccagtgcaactttgaacagaagtgttgaaagcagacacccttgcttgtttcctattataggggaaaaacactcagtctttcaccattctgtaggatgttagctagggtttttaaaaaatgcccattatcaagttgaggaaattcccttttattcctagattgttgagagtttttgccatgaatagacgttggttttgctaaatgccttttgctgcatctattgaaatagtcacatagtttttgtttttnattatactgattttcagtgttgaaccaatctttcattcttgg

SEQ ID NO: 378471 - DNA, 424 bp, Homo Sapiens
  misc_feature (21)..(21): n is a, c, g, or t
tacccaaattagacagtcaancccattaaaataagaagtgagaaaaacaatgttgggcattgaggtgtaaattttgccccagatgtataccccagtgtgaaatatcttcctaataaaaatatatttggctcttatccctgcacatgtagaggcataaaaattggtaaacatgtcccgctgtgtagaactttaaaaaaaaggcatttttgaaagtgttgagtggcactgataactggtgaagcctacagccatccgcccaaaagtctgttctgatggcactgagttttcattgttctggatgtataagtctgtgtgtcaggtacagctgggcccagccagcttgagtcactcttgtacaagcttgtttttttctgtcttgtgaatgcacttgataatttaaaaataaaaatatctgtttctctgc

SEQ ID NO: 378472 - DNA, 332 bp, Homo Sapiens
actgggccaagggatctgggtgggcattttaaactttggaggccttcccatctgtcggtaggccatctgcattgtccttactgttgatgtttcctgcccaaaggacacatttgggcagtgtccacccactccttgggcccctaggatgacccaactacccccataactttctgcttcccacaggttttcagcattctatcgtcctgttgtgctcagccccaacatcccagacccgttacccgctacccttctctcccccagctcatcatcagtcgctgtctcttttctgtgatttctgtaaaagttgccataaaactttgaaattctgcctg

SEQ ID NO: 378473 - DNA, 453 bp, Homo Sapiens
  misc_feature (380)..(380): n is a, c, g, or t
  misc_feature (429)..(429): n is a, c, g, or t
cttttccatctcaaatctcatggaatgctctgattggcccagctcgagtcacatgcttattcctgtgggccacactggcaaggaactagggtcccgtgacttgacattccctgcagaagccgcagcaggattggggagggccattcccccaatggacaagagaagctggaccacagaaccagcaggtatccatggtggcatctgctacggccggctctcctcccatgtggaggtctcggggacccacgtggaagaattatcaaggtcattcttcttgccttcgggaggactggaatttaaaaataatccaaggaagggattgccaagcttttggctttttgaatttcccctgagccacaaaggctgggaagtgccttggnttggggttctttgcattcattagtttcattaatccttgtggaccagggncagaaggcaacccacaaggcaggc

SEQ ID NO: 378474 - DNA, 422 bp, Homo Sapiens
  misc_feature (43)..(43): n is a, c, g, or t
  misc_feature (242)..(242): n is a, c, g, or t
tgcaccaatgcagaaaagacggggactacaaggaaggaaaatnttgcatcaggaagggctgctggcacatctttgttccccctccccaaaacctcatccccaagcagggcctaggggatgccaaattccagggtccagaaagagcttgggataaaatgaaacttcaaggggacggctttgacctggggctgagtctgtctgtggccatccaactggagtctcaagtcctgaggcaggacgtnccagatgccccagtgcagggccctcctgatcaacacctgctcccctgtactcattagcaacctcacctaccctactctcaaagcacacttggctctcgtatccaggactctgcatctatagattcggcaacagcagatggaaaatattcagaaaataaattggatggttatgtatctatt

SEQ ID NO: 378475 - DNA, 502 bp, Homo Sapiens
  misc_feature (440)..(440): n is a, c, g, or t
  misc_feature (446)..(446): n is a, c, g, or t
  misc_feature (454)..(454): n is a, c, g, or t
  misc_feature (471)..(471): n is a, c, g, or t
  misc_feature (482)..(482): n is a, c, g, or t
tctgtgttactgggtggcatgactgattgaggtgaagctcacggggccaggctgaccgtcttgaccgttccacttgagataggttggtcatcgtgcagaaggccccaggacctcagcacacacagcctcctcttggtctgagtaggcatcatgtgggggccacatctgcctgctgtttccatgggttacatttactgtgctgtatctcagatgttggcgtctggaagtttattcttaagagactgctacccagctggtctgtattattggaagttgcagttcgtgctttggttggccttctggtctaaagctgtgtcctgaatattaggggatcacaattcacttgaaatacagcagtgtgtgggagggtgatgggccagttaaatctggctggaactggtttttgactaattgacaaacctcttttttaaaggtgggtnagaatnggaaggtnatagttcaccaaaagtnaaagtttcccnttttttatggattgactttc

SEQ ID NO: 378476 - DNA, 715 bp, Homo Sapiens
agattaacaaagaagcaggtggtgacaggaacatatttggtgcttgttcagggccttgttttaagaacccatgatgcttgtgcccagtggagcaacccatcagtccaattgttgggagaaaagctgaggcaagacttgctagtctgacataatatgaaaagagccttggaacatgtcctgggtccagagtttaaaacttcttgtggcctatggaacaccaggttctgtgcttaagggtggaaggctgccccgccgcactacaacctaagcctagggcataaaacccctcatggcttggatggaatccaggactcaggacataaaacccctcgtggcctctggaatgtgtccagacttgctggctccttgcttcttgctctcccaggatcataaactgattgtaccttgaggtagaaggaaatgttcattatctcgagtagcagaacatgttccatatgcttcaaagaaaatgctagaccgacacagctataaactaaacacttgatgtgactgcttccttttgaccagcacgtcctcaccacctgcttctttgtttaatctccaataaatggtgtgggctcccagagttcagggccttcacagcctctatactagcattggccccctggacccactttgtgtactattagcttgtctcattcctttcgactctgccggactttgtagcccccatggcctggtgttgggtttgatc

SEQ ID NO: 378477 - DNA, 638 bp, Homo Sapiens
  misc_feature (12)..(12): n is a, c, g, or t
  misc_feature (90)..(90): n is a, c, g, or t
  misc_feature (109)..(109): n is a, c, g, or t
  misc_feature (126)..(126): n is a, c, g, or t
attgaattaaangaaggggcaaaaggttctgaaggccccagaaagctgcccacctcaacaaacccctgggctccagaaccagcccagttnctcagtgacccatctgcanatccctggccactcagnaggtcccgcagcctcaccttcacctccagcttaccccccggtgggcttccttccatcccaggacctgtgaggaccacagagagggaaatggtaactaaggggacagagatggggagcaggcaggtccctacattcccaggaaagaagtgagaggagctaagatgtcctgtggcatgaacacaggaatctccattcatgaaaaccctaccctcccagtatttggaggaggaggtggtggtggttttaggtgagtcttattaaaaaagtaataaataaatccagacaagcatcctagagctctgttcattttctcctcaatccccacggcaacttctggaagaaacattggcttgaagaagcagccttccactgacccaaaccctcacttcacagatggccaagagagagaagcagatgactctatgtggcagagtcagcactggaaccccaaacccagggttccttcccattcaccacgctactccctcttttgggcagaagatgaggcagtc

SEQ ID NO: 378478 - DNA, 348 bp, Homo Sapiens
gaagcaggctgtggacttctggaattaccaacaggaatgaggaaagaagaaaactggagtttccagtctctgagttctacctgatgtaactcttgattggttttaagaactttgttggccttcatttcatatctgactgcaagctgatttttctttcttgctttcattttaattagtccaaaattaagttttaaagatttttcctcacaatttaaatccatagacaacagaagggggtttaaaatgacctttttttcagttgacccgaaagttgtggttagatgattaaaaagaaacatttgaggatggacttaattatttcagtaaaatattataatttgcctattg

SEQ ID NO: 378479 - DNA, 505 bp, Homo Sapiens
ctaaataactaaaagtatgtaaaggtaaaaggtttgaaatttttaagcacattttttaaaacttaaaatgtatttggaggagaaatcctgcaagtaatcttaataaaatcatttcaagtaaatatttgaaatgtagaacaataagcattatgatgatctgaaataacattaatttgattgtaaccctattggggttagttcccaccctttgttccatcttgagcagagatgtgctgcatttcttaacgtttggtctctatacattataccatctgctgaagtttagctttgtgtgtgtgtatatgtacccatgtgtgcactttaaatatcagtacaaactgataaacaatgtttctggttaatgttgcaaaaatggaacactgtattttacataattgattttctactcctgccctgtgaattaaggcagagttttactgtaatatttgcaagtatccaaaatggttactgatgacaaatactttttaataaatgtcaaaatcac

SEQ ID NO: 378480 - DNA, 446 bp, Homo Sapiens
gccattgaggccgaagccaaaatcaacttatttggggaggaggctttgccaggggtcttggttacagcacggactgtcccggggggcggcttcgggggccgccgaggcagcagaactcttgtgagccagaggctgcagttgcagagcatcgaagaaggagatgttttagctgccgagcagagatgagggcctcagggtgccgtggggctgcagcctgagaggctggcccggggaggagttcccatcaccgcctgtgccgcggccttgggagcatgtcactgtgtacagctggccacacacagggaaggagcagcatctggtatgcagccaccaggacaaggactgaaaataatgtctacagtccacagcttcagcatttccagagaccacatgtgagcttcttttaggtcccagtgatgggaccagaagcatctaaagcaaaaaaa

SEQ ID NO: 378481 - DNA, 236 bp, Homo Sapiens
  misc_feature (22)..(22): n is a, c, g, or t
atcctaacctcaaaaaaccttncccttaaattacttgcaaaatactctttatcccaaattagtttgcattccacaaatcctggaaccttaattacttggacatatattttggggggttgatggttggaggggcttttaattccaactcagtacatcttaaataaggaattaatgccccccaacttgccttacaagtcatatattaaaaacaatgttggcctggcacagtggctcat

SEQ ID NO: 378482 - DNA, 456 bp, Homo Sapiens
cttcccacataaaaattcaagaccacaagaggataaaagagaggtatcgggaaatagcaaacctgaatggacaacttacaacaacagagtgaaatgttattaggattactgttttcaaagatgcctatagccaatgagtttgttggagaatgttttggaactttccaaaaataggtaagaatgttatgcttttcaatctacctcataaggcaaatatagtcttattttccaaaaacagacaagatatgcacaatgattttttatgagtatggctataataactaaataaaaactctagtaaatagaaaaaaagatcacattaaaataattttcctatgaacaagcagagttttgttcttgtactgcataactagacacaaggaaaacaatataattcatcacgcaaagagggacagtatagaaatcatatcgttaatgcaacaagtgcttatagaa

SEQ ID NO: 378483 - DNA, 484 bp, Homo Sapiens
ataatccatagtccttggggtcccagcaaagtcagttttcctacaagttgtgtttgttttgtggaagcccaaagaagtggattgagagagaagagatttttatctaaggtggaaggtttttcaactagcccctaaaggtctttggtagttaattaacattcaacagacccacagcaactctggtgtcagaagctataaatggtctggccaaacaagactcagagtattttctgaaatcctgagctgcaaggttctgcctcacctgtctctccactctgacatcacgaaatcagcaaaaccagatatttattctcctcactcccagcagatacgaggacaccaacaatgcagttgatccctctgggcctgagtctcccatctgaaacatggggaattggggtaggtcaagctttttgaaactgcaaaacctctacctgtttttaaaaatgagatcttttgaccaggcacagtggctcacacctaa

SEQ ID NO: 378484 - DNA, 427 bp, Homo Sapiens
  misc_feature (113)..(113): n is a, c, g, or t
tggggggtgcctaaaacagaggctcctcatctcccccccagggtcttgtcaagtccagaagtccctaaaccccttcaaattaaactatcccctcctaatcccccagctgaacncccgggtaataccctccccacccaagaggtatcctgtgtggaaccctggcccctatttagggattaggtgatggagataaatttcccatggcaaacggccctcgtccccgttcgtttgcagagcacaacaatccagattaaggtacagagtttgggttttatttggagattagttggtattacaggtgatggtgataccaaaacccaatgctgctatacctgcctccatcccagatctgtcaggttgtctccacagccccacatcagagggcatccaatctgatctttgtgaaaattaaatcaacataagcccc

SEQ ID NO: 378485 - DNA, 363 bp, Homo Sapiens
  misc_feature (86)..(95): n is a, c, g, or t
  misc_feature (101)..(101): n is a, c, g, or t
  misc_feature (116)..(128): n is a, c, g, or t
aaaggatttctaggtcctaaaatctggaaaagggatctggaaaaatttggactccatgagtagtttggattcaatctctctgtgcnnnnnnnnnnctttanaacaggaatgggatnnnnnnnnnnnnnaataaaacttcttatgctatataggtcatgtactgtgagaaacaagaatacaaaactatgggtttaaaaacaacatatacagaaataatcgccaatctctgtctacctccacatcattttgtcatagaagttcattgtgattaaaaagtttaaaagtttttaagagaaaaggtagattgagaagtagaaaggaagtaggaaagaaattgtggcaaaaaaagaaacagtttattag

SEQ ID NO: 378486 - DNA, 381 bp, Homo Sapiens
cagtttgggtagctgtccctaattcatttgttaaaggagaagcaagagcaagaacctttaatctgttctcctcttccctaatttgaaagtagcttgttattttgaatatcactttctctgaaatagcacatctccatctcagagaatggatttaatgtttggatacagccaaaagtcatttcattaccaaaccatggggtgaatataccatgtaaagcagtttgggatcagaactcacagtctgaattgtaagtgatgagactgctgtctctctgctacagcttcttggctggctctgaaggctctttgaaggcagatcctaacaaggggactgctttgaagggccattgctcatttggaatgataaagtctatgttgttc

SEQ ID NO: 378487 - DNA, 379 bp, Homo Sapiens
tgcccatactccactgactatcacaggactgcttgtgggaaatgttgtgttacttaactctatggtgagtgcttaggtaatagtcctgatctccaacaaacacacctgctcacagggaggcagtggagaatgtcaggggagtcggcatgcacctactgtaccaagagacaattcacagcaagcataaatagagccagctgtgcctttggggcagccactctctggcctgagcctgctggagggaagttggctctggagatcatgtctagagactcctcacccatattttgttttcagaactgcatgtgattttagaaacacttcctgttctcctttcagcacaggttttatttaatgaggtgtgatgaaaccaaatatt

SEQ ID NO: 378488 - DNA, 639 bp, Homo Sapiens
aactggcacacctccagcaacatgcggagccgctcccagcgggcttcccacttctcattcatctctttcctcctggacatcacctgctgcagtttctcgcggatctcctctgaggcctggtgctgccgctgcagcagggactcgccaagctccaggcaggcactgaagttcttgctccgggtttcaatctctgcattgatgccctggtgatacttcatgagcagttccacagaggagacatccctgggcctctcctgggtctcgatctgccggatgatgctctccatccaggagaggaggtcacgggccatgctgaagaagcggaatttatccgccgtgtccactagctgggtccggcgcccggcacaggcatcgagcagcgcctgccacgcggcagacacctcctgctccttgttctggatggcctctgccttctccccagcatatgctgtctgcagacgggtggccacgtcctggaactgctgcacctggacacccagcaggtggctcccgctcgaaggctgtgtgcacccggtggaaggactcggccgtgctggcgtccagccccacgtcctcgggcagctcgcggtgcttctcgtcgatgaggcccaggatctcggcacccgtgtagaagtagcc

SEQ ID NO: 378489 - DNA, 1006 bp, Homo Sapiens
  misc_feature (17)..(17): n is a, c, g, or t
  misc_feature (86)..(96): n is a, c, g, or t
  misc_feature (710)..(710): n is a, c, g, or t
  misc_feature (727)..(727): n is a, c, g, or t
  misc_feature (752)..(752): n is a, c, g, or t
  misc_feature (765)..(765): n is a, c, g, or t
  misc_feature (786)..(786): n is a, c, g, or t
ggccccagtccaaactnaaaacggtcccttgaagtcctaatgggtcaagttccgttaaaatgtcaagagcttttcaacatttttgnnnnnnnnnnntgcgtctccttattaaaactttaaggtatccctgaaatgctctatcagcccaacataaacgagttccttggcgggtatgttaaactttaccacctgtttacatcccccttcttggcagagatcaccaaaccagtggagtccctggccaagcctcctttgtaatggtaataagttccttccttaaatagaaacaaaacttctctgtttgacactgagcaaacaaaaagcatgcacccaaatatttctggccatgttgggggcacaagcaccccctttctacccccaaagcctggcttctgcattgcagtgctacaaaagccattcgcatagctgtgtcaaagcctccaagcgaagcctccgacctcagcatcccaccatccatttgtcccctactctggctctgaccaccaagtaccatccatttacttctcgagtattgggaattgggggatggtgcccgaattggccctctgtccccaccggcctctctggcaagtgcacaaaacggcacttcccctgaggtgggctggtgggctcacggagaggcggctccttagggccaataagatggtctctatatgccctggacctagtcggcaaatcgctgccagganacggtcctcccgtcctncagtgccgcccgcgccgccgcccgnactgtccatgaancggtcgcaggggaattcgatnaggtccgcctcactgagcgcgcacacggtggtgcgtggccggtgcgactggaatcccgagaagttggcggacacgccggtgcccatggagcgcaggggccgtcgggtggagtacatgtgccgaacgtggaccgggccccgcccttccgcctagcccgcagtttcctacgcagccagcgagacgcccaggccccaaggccaggagcaccagcagcgcgttg

SEQ ID NO: 378490 - DNA, 187 bp, Homo Sapiens
tctgcacaggtttccctctgcctggaatgcccttcctattctccatctgcaaactcctattcacactccccaacctaagaccctgagggtcccaggcagcacaggttaatccctctccagcacctcccttgacaggtcattttgatatcaaagcctttgtcggccaggcgcagtggctcatgccggg

SEQ ID NO: 378491 - DNA, 496 bp, Homo Sapiens
gctcgagttgcttcttctgcctgtcaaactcctactcatccctcagaacctggcttcaacttaactctgggaaacctccccttaccaactccaccctaaggcgagcaagcaactcccttttctgggccctaacgcaaccctcccagcggagtacctttgattgatcatgactcagctctttacacagtcagagagctcctgagggctgggcaggggtcctcaccatctcagtgcccagcacctgacgctgggcagcggctcgccaatgtccgctgggagaacgtgagggagactgggatggtttggacatttgtccccgccagatctcatgttgagtcgtaatccccagtgtcggaggtggggcctggtgggaggtggttgggtcatggggtggatatctcatgaatggtctggcaccataccctgggtgctgtcctcacgacagtgagtgagttctcctgagatctggctgttcaaaaatgtgtgtgtggcacca

SEQ ID NO: 378492 - DNA, 679 bp, Homo Sapiens
  misc_feature (522)..(522): n is a, c, g, or t
  misc_feature (535)..(535): n is a, c, g, or t
  misc_feature (548)..(548): n is a, c, g, or t
cccggcgggtccggccgcctccgagcccggccggcagcccccggccttaaagcgcgggctgtccggaggggtcggctttcccaccgaggatttggcactctggtgagggaaaagggcgaaagagaaaagcgagcagccgtcctttcacagcctcagaaagtgctcgcttcccttcgggggctttcgcgaatcccgaggcaatctcggaggcggtatttgacctgtccaaagacgacttgatacctctataatgtaacagaaaaggtcagaaaatattaagcaagtagaagtgtggagcatattaagcaagatgaacatctcgggaagcagctgtggaagccctaactctgcagatacatctagtgactttaaggacctttggacaaaactaaaagaatgtcatgatagagaagtacaaggtttacaagtaaaagtaaccaagctaaaacaggaacgaatcttagatgcacaaagactagaagaattcttcaccaaaaatcaacagctgagggaacagcaganagtccttcatganaccattaaagttntagaagatcggttaagagcaggcttatgtgatcgctgtgcagtaactgaagaacatatgcggaaaaaacagcaagagtttgaaaatatccggcagcagaatcttaaacttattacagaaactatgaatgaa

SEQ ID NO: 378493 - DNA, 935 bp, Homo Sapiens
  misc_feature (17)..(17): n is a, c, g, or t
  misc_feature (22)..(22): n is a, c, g, or t
  misc_feature (38)..(38): n is a, c, g, or t
  misc_feature (74)..(74): n is a, c, g, or t
  misc_feature (110)..(110): n is a, c, g, or t
acggtttggaaccctcngttcnatggaacctaaagggngattatattaaatggttaaatttgaccctcggaaantccccactatacctaggatgttgcccctaagacctnctcaaaggactgggggacccagcagaaacactgccccatttcaactcctagaacccacacacaagtctgttgttcccccaagcccaatgtgaaaagctataagcccttgagactcaaaagaaccacaggtgtcccacaggtgaccccaaacatcaaaagtgagatcacccttcctcaggaaggaaagataaaatcactgcttgcaagtctgtggcaggtttgctataaagatgtgaaacaaattttaaaatatggattattctacagaaggggtaagacaccagggagaaaaaaaggactcaatggactttttcctggccagtcacaccaagaaaaaggattaagaaacaacaggtcttcaaatggcactgaacgaacagtagccaataacccaaaaaccacccaaccacctgcaggaaaccttccaccaaaaagcagaaaacacatattcagggccattgtcttctactggactaaaagactgaagtctactaaaggttagggtccatgtgggacaagattacaaacacagccaactgatttctgcattcactcttcagagtacctttgaccaatactacccagctaacgtaagcaccttgtgaaagctcattccttttacgttgtgccttcaagctgctaacatagctagaccatactcctctgctaaccacagaagatccaagataaatggaatgtttttattggtgatttcattactctgataacccagattaaagatttcattatgaacaattctcaagacctccatactttatcatagtttttctttacacttgtttgtactcagctggtggaagtcaa

SEQ ID NO: 378494 - DNA, 212 bp, Homo Sapiens
ggcactgtgccaggtgtttacataacaccatcacacataattattcccaattacaggtgagcaaactgaggctgaataacttgactggggcccttctggcagactttgaagcccattgtctttaagcctcaccacactctctacacacatacacacatacagtataatttcttctttaagaaaaaaggtcccgggccgggcacggtggctca

SEQ ID NO: 378495 - DNA, 766 bp, Homo Sapiens
  misc_feature (86)..(86): n is a, c, g, or t
agatgtcagctctcggaagtttcactcgacggacatctcggtatgggcccttttctgctcaatgagccgctcgagcatgtggaagnaagtgctccacttgaacggtacgtctggatgagggtgatgctgaggcagcgcgtactccctctgcagctcggccagtatctcattcgccttgcgcgaccggtgcacccgctcgcagatcttccgggcgaggctcagcaggttctgcaccatccgctggctcttaatggcctcgctgacgatcaggttcaccgtatggctgaagcactgcacgctcgagtgctccccctcgttcagcgtcttcccgatgctggcgttgtcggtgacggtgatgcccacctgaaggccggtggaggtcacccacgcttcccaccagcactccagctgcttctgaatgctgttgccactgtagtcgcagtccacctgcgacacgtccaacagcgccgagcagtggtggtcgtcacagcgcggccgggctggcgactcgaaggaaacccagtggcccgtgagggtcaggtactcacgggtctggttactcatccatattccagacgtgaagtggatcacaccactctcagcttccttaaggtgggacataattatctgcttcacattatcatacatacctgggatagctgtcctggagaagtaggaaggggcggggagggagtactgaggtttcaagtattcaagcagcctgttaaagccaacgttgtctacaaaagaatatggctggaggtca

SEQ ID NO: 378496 - DNA, 607 bp, Homo Sapiens
ggggggccgagcgcccggcctcgcaagcccacggcccgctgggggtgccgtcccgcgccggggcggagcaggccccggcagcccagttcctcattctatcagcggtacaaggggctggtggcgccacaggcgctgggaccgcgggcggacaaggatgggtccgcgcggcgcggcgagcttgccccgaggccccggacctcggcggctgctcctccccgtcgtcctcccgctgctgctgctgctgttgttggcgccgccgggctcgggcgccggggccagccggccgccccacctggtcttcttgctggcagacgacctaggctggaacgacgtcggcttccacggctcccgcatccgcacgccgcacctggacgcgctggcggccggcggggtgctcctggacaactactacacgcagccgctgtgcacgccgtcgcggagccagctgctcactggccgctaccagatccgtacaggtgtacagcaccaaataatctggccctgtcagcccagctgtgttcctctggatgaaaaactcctgccccagctcctaaaagaagcaggttatactacccatatgttcggaaaatgcacctgtgatgtaccg

SEQ ID NO: 378497 - DNA, 571 bp, Homo Sapiens
attggaagcaaaggccactcggcccttctgttcctcagtcaagttattgtagacatgacgactggagtaagtgatcaccactttttggttcccttcattatcggtgagcagccattcaatatccagagtgtctttttctggaagccccagttgatggtggcagggcaaagtgaccttttcctctgccactctcttgatctcagtgtgagtccccaaggttccaacatagtaggaaactagcaagaggagaaggaggagggacatcccgatccccggacgcgggcgcttccccgctcaagttgctgcttggctccggggcggccgggcgcctccgacggacctcgggcaagctgggcacggcgcctcggggtgcgcgcgaggtggctgcagccatgtgccgggcgggagccggccccgcgccccgtgcccctgggggcagatgggctcccggcgctcgccccaccagctggcgcccggacgggagccgggaccagggtcagggaggaaaacgcgaggcggaaaggcgctaccgcttcgtggaacacttttccctgtttggaaagaaaaaagc

SEQ ID NO: 378498 - DNA, 265 bp, Homo Sapiens
cttgaggccagagcaggtagcaaggcattgtggaaagaggggaccagggtggctggggaagaggccgatgcataaagtcagcctgttcaaagtgctcagggacttagcaaaatgagaagatgtgacctgtgccaaaactattttgagaattttaaatgtgaccatttttctggtatgaataaacttacagcaacaaataatcaaagatacaattaatctgatattatatttgttgaaatagaaataaaaatgtactataaaaaaa

SEQ ID NO: 378499 - DNA, 619 bp, Homo Sapiens
catcaatggacactttggcgcatacgttccaaagcactgatggtgtcagggtcaattgtagcatccccagtgtgcagacctgccactgtcccatcagcctgaattgccaagatggtgtcagactgcgggacttgcactgcatggtggatataagctgtggtaccatcttccagctgaaccgcctgtaatgcactctggtcataactatctttggaggtgtggtgaataaatgctgtggtaccatcttctaactgtactgcttgaccatcctctagacgcaaactgtcccctgtacttttaggtatgggtacatgttgaacataggccgcagaaccatcttccaactgaatgacctggccatctatgagttttgcatctttagaattgtgttgtatgtaagcagtagaaccatctgcaagtgttactgcttgcaagcttacgccttccatattttctaagttgtcaccatctgccacggtgactgcctctgtcaagcacagcgtaacatgttgcgcctccatccctcctccaggaaactctgtcattccctgagaatctcgatttatttgggctaacaacatcttctacctccgagaaaattttccaacaattccttcgt

SEQ ID NO: 378500 - DNA, 930 bp, Homo Sapiens
  misc_feature (802)..(802): n is a, c, g, or t
  misc_feature (847)..(847): n is a, c, g, or t
  misc_feature (871)..(871): n is a, c, g, or t
  misc_feature (894)..(894): n is a, c, g, or t
  misc_feature (904)..(904): n is a, c, g, or t
gcgtggtcgcggccgaggtacgcgggatctttctaaatcattttctgaagctgacttgctctagggtgcttcatcaccacttccatcttgcatcaccttataactgttctgtcttgttctctcccagcaatttattttaaaacaagggctagcttcaagcatgactgttaatggctcctctgtgacaaaacacaagttggaccaaggagaaagccctttggagaaactggaccctagttcagtttagatctcaaatataggctgaaatctcttaccaaagtgcgttccagataaaaatgagacttagaagacagactggtctaatatgctcactggtcatcacattcagcttattcttacgtgccagtgaggccctaaggtctcagtgcatagctacctgccactctggatgttttcctgggcttcatatctgtatggcaaggagggagctgtccttcagcagacaaagtcaagcagctttaagtacaaggcagcttgaaacctctctgatgaaagtgaaaaatgtgggtagcttatactttcaaactaatgccagtgactagagagaggtttcattcatgatgtgtatttccaatttggtcttcaattcaagagatgcttcataaaacacttatagccttaaaccattcaagggctaattaaaaaaatagttatgaaatcttagccacaaaaaataaatcaggtaaacattttaacctgtcgttaagtgttgtaacttcaaaaaaccaaaatgcttattttaatgtgatttttctaaaactattgaaaaattaatatttcnattatccctttaaaaaaatgggagaatgttttctctcaatttccnctggaccctggggtggaatacttnaataccgtaaggctatcctttgnattcccccantttttaaccaccaatgggtgttaccg

SEQ ID NO: 378501 - DNA, 511 bp, Homo Sapiens
ctggggacaggaagacacatagttcattttatagaaataaaagatacagtggcaaggaaacattttcatcccatttaacatatggcatttaatttggtaatagtcccgggcaagcacagggaaaggaaggagaaaggagggggtattgctgtctataccaaggcacagaactgctgctcacacttcagtgatccctgcagatgggaagtatgtgttcatggttattgtagaaacctccagaatctttctttgttacagctttaatagaattgttcctaagaggcgactcagaaaacatacagattgaatgccaagttgtggaagtcacttttcagcttgtgtctaacaacccagcattctcagcaaagcagtttcctcatgagaagagtggaggagaccttttttttaaaaaaattatttattgtatgttgttcgtatcctatacaccacacatgacttttactgtattggaaatgtattatttcagtggtaaatactgcatatcttactg

SEQ ID NO: 378502 - DNA, 999 bp, Homo Sapiens
ttttttttgagccatatggaagaagaaaaatacaccaaagtggctagtcacctattagccctgatttatacactactttaatatctcatccaaggaaatgaaaggcatattttcatcaaatacaatcgtttatagcttctaaaggggagacaaactgctctatgacaattacctgggcccgcagataaaatcggaagatgtgtcctaataaaacacccttgtctggcagccaccccgaggcagcagccagagttgttttcttccttgtgaattattatctaggcagaagcaaggactccatgcgctgtgcgccctatggggaggggcaccattgtgggagcgtgggaagtgggtcacgccccagcacccacgggcccttgatgggcaatggtgacatgttcacagtatcagagggccaacctgggccaggtttctgatgaccgaatcctccctccactgcccggctccccgtgtcactactctgtggcttctgtaaaactctgagtaggaggagggtggtgaaattcagttgatatgcaaccaacctaaatctgtcacctgggtacatggtccttggacacacatcttgctcgcttggtgacagaaatttagccgagggatgctgcttaaggtcttctcggttctcagttcctttgtgttcccttgtcaaagttccatggactaaaccaccaagtatctagggccccagagggactttccttgtcttcccgtgttcagagaagggagaaggcctttgatgggctctgttccaaggctgagcagataacaaatgcaggctcattcttcactcaacgatactaagtgggggcacagagctaggcgctgagatgcagggtaaacagcacagaaggttcccacgcaggcaaccctctctgcaggggagaaagactatgaccaggcacacaaaggcatcagccaggtaaggaacctcagtgctgtggataaacggaaccaggctaggctgggtgcggtggctca

SEQ ID NO: 378503 - DNA, 347 bp, Homo Sapiens
  misc_feature (65)..(121): n is a, c, g, or t
ctcggcgcgccgcgagaccccagtcctccccaagcagacggtcgcccgccgccacagcagctcgnnnnnnnnnnnnnnnnnnnnnnnnnnnnnnnnnnnnnnnnnnnnnnnnnnnnnnnnncatggagcccgaggccccggattcccgcaagaggcccctcgaaacgccccccgaggtggtctgcaccaagcgcagcaacacgggagaggaaggcgaatacttcctgaaggtgctgatccccagctacgcggcgggctccatcattggcaagggcgggcagagcatcgtgctgcgtgtgaaggagaccggagccaccatcaagctctacaggtccaaagacttgtac

SEQ ID NO: 378504 - DNA, 332 bp, Homo Sapiens
catgccagtacttcaccaaaaccagcgacaactcctgggaagtgcagtacaccttcgacggtcagcagcagaccggcgttccggcgacgacgttaaccttcgacccgaacaccgggaagctgacctcgccaaccacgccgcagaccattgaatttcaaaccgacgctgccgcacccatcgacttaaccgttgattactcgacctgtacgcaatacggctctgaattttcggtcaccaccaacgccgccaacggctacgcctccgcgactcagaatggtgtgcaggttgatgacgatggcaaagtttacgccacctacagcaacggcgagcgc

SEQ ID NO: 378505 - DNA, 542 bp, Homo Sapiens
aatgcacattctacatgggtgtaagtagttttataacaagtactcacatttgcaatttgtaaatattcaaaattttattaaattcttccgaattttttctttcagtgttttgtttgcaattatgaattgtcatttttaaatattttttattagataagcttgagctgtgccttaccttttgtgtgtaataattatgtactaaataatgcattactatttgtttatcttcatatatgagactaccatatagctatgccaatttacgtgttccttggagtggtggtggaaaaatacctcttctttcagagtttatgtggatttacatagtatgagtgttttagctatagggtgttttaaactgtgcttaaaataatttgttacatgttttgttactgtgttactttattgaggacagctagtccctttgtgttgttaaacgtttaaagacagttgagaagcttcataactctgttcattgtaaatcttagctttcttgtaatatgtattttaataaaatatttaccttgcaactctaaaaaaaa

SEQ ID NO: 378506 - DNA, 476 bp, Homo Sapiens
atgtgatggtatatggagatggaactttgggaaggtaattaggtcatgagagtggaccctttatcaatgggattagtgcccttacaaaaaggggccagagacctagctagttctcttctgccatgtgaggatacaatgagaagtagacagttggtgatatggtttggctgtgtcccaatccaagtctcatcttgaattgtagttcccacaatccccacgtgtggtgggaaggacccagcgggaggtaactgaatcaagggggcagtttccctcatgctattcttgtgatagtaagttctcacgagatctgatggttttagaaggggcttcccccttcagtcggctctcattctccttcctgctgccctgtgaagaagaacatatttgcttccccttctgccatgaatgtaagtttcttgaggcgtccccagccatgccaaactgtgagccaattaaacctctttcctgtacaaatt

SEQ ID NO: 378507 - DNA, 436 bp, Homo Sapiens
ttatgtaaatcattgtaagaccaatgtgaatttaaaccacagtgttggtgccagatattagccagggtcacaggctcttttttaaaatgaagtcaaattagttactgatataagttttatattttgtgattttgccatcatactggttatctgtgctcttgaagtctgctggttctcacaccagcagcaagaggcaaggcatgagacattttaaatatatttccagacatctaaacatctagacaggcctgagtcatgattggctctggtgtgcttccaggtaacatcttgttattgctgtttggggaaaaccaccaatagaattgcagctagacttttggggactgtgcctcgcaggctgtatcacttgctgtaggccaagcaacgagcacttccctcatggtagcaacagtccttaagcccaaagccaaaaaaa

SEQ ID NO: 378508 - DNA, 1008 bp, Homo Sapiens
ccaatctgggcagaatgtgagataaactattaaaactgccaacatttttctttccacatcaaatccaccaaagtcactgaataaaatatttaagcatctcaagacggaagagctctgcagataacttcagtataacctggttctacagaaacatgttcctactaacttgcgaaaatctggccagtagaagttgccttcttttatacttaccactttctatctcccttctagtttcctgatgatgtagaatataaaggaaagaaaaaataagccacttgcataagccaagttatggcttttgtcttagttttatttctaaatatccatggtgtataaggctttgtaagtcaaaaaatactgggaaaggcattcaaattcaaatcaaaacaattatggtgtaattttcacaataagtaatgtcttaaaactctgtttgtattcatagaaatgacataccaattagtttttcttctcagtcaacaagacaaagaggtaagcataatcagttatattataaactaaaggcaaacattttcctcaccataaacacaggtgttgatatattaaaatctgagacaaatatttcatttgagtattcaaaatattttaaatatacatataacactatacaagctgctttagacatcttcagtatttagccaaaagtggatataacaacgaattatagaactgttgcttctgtgggctgattcaagttcaaattattttgtccaggagcacaagtctctaataatttcatgcattaagcaacagaatatttaaatctgaaaatcaaactcaactgggttcaaggtacaattattttaaagggaattgaattatctctgccgaattcaagagtatatgttctacataaaggtatcctaaattaaaataatgaccaaaagaacatatctgtgataagtctggtgcttagatagacaaattatgttacttaagtgaagatttaaataacttctacgaccatgagttaatcattatttttta

SEQ ID NO: 378509 - DNA, 1051 bp, Homo Sapiens
tttttaagattaagaataatcctttgtgattttattccattgtgttgaaaaatctataaagtgataatttatattgatagctttcttctttttatgaatataccctggtcagatgattattctttcaatagactacttaattctatcttttaccatttaattgcatctataatcataagtaaagttataattttccaagtatttttcaggtattgatattgcaatgatgttatacaacttataaaacaagattatataaaacttggctttcaaatcttatgttcctattttttatttccagtttcatcttttttctatccattctcttgaactttcttctttgaaatcagcagaggtccctgggtattaacctagcacaactcctttctgggtcattgcacatcccggtagtatcattaagagttgtcagaaagatccctggcagcctttcggtgaaactctatcatcatgcaatcatggcagtactatgttggaagtcagagtccctttgcaaacataataaaacactttaatatatttgttaaagttacaaaccaagtatgtacaaatttaaaaatcacggccaggcacggtggctcacgcctgtaatccccaacttaaaatggtttgacttataattttcagctttataatagtacaaaagtgatatgctgctatagtttggatatttatcccctccaaatctcatattgaagtttgatcccaatgttggaggtggggcctaatgggaggtgtgtgggtcatgggagaagatccctcatgaataaattaatgtcctctctggattggggggtgaattatcactctgttagttcctatgagagctggttgtacaaaagagcctggcacctccttcctcaccctcttgcttcctctcttgccatgtgatgtctgcatacactgccccctttcatctgccatgagtggaagcagcctgaggcccttaccagaagcagatgttgcaccatgattcttgtaaatcctacagaacactgagccaaataaacctctttatttattaataaaaaaa

SEQ ID NO: 378510 - DNA, 643 bp, Homo Sapiens
tggaagtcacagtccctttgcaaacataataaaacactttaaaatatttgctaaagttacaaaccaattatgtaaaaatttaaaaatcacctactacttttaaaagcagagaaggcatccatagactatttccttgcttacaagctcagtgaacatactgaattcacttataaaaagaattttctcaattttagttgcttttcaaaaaattcttattccttttatttgtaattctttgacattgttgctgcttcacagttttggtaattggacagtttggtctttattatgatattaacatttttacctgtcctgaaacaagggaaatacaatcaaagaaacagaagattggtggaccttgaaccacattatgatatcagatgacccagagtcatggttactaagttgcttaaatttttagtaacaaagatgtattagaaagtgacaggtcaattcaataatggtttttttggatacatttaattatataatccccttaagttgtgcttagtcagcagtatttaatctgttgtctattatatatctaactggtctgttatgtttattatatatttatatattgcttattcatatcttattggagtaactcatttttaaaacaatatatttcatctcctaggag

SEQ ID NO: 378511 - DNA, 538 bp, Homo Sapiens
gtgccactgtgcccggccagaagagaaactttcaaaaagacaggaacatttccttgaactgatagagcaggagccttcagtttgcaaaggtacaccattgagagagactagcttaaaaaatgtaaaaattgccacactgactgaaattttagaacttttgcgataaagtaaaactcccagaaagttcctgtctggggtagggggcaataggagggaaggcaggtagcatactacctttaaaatttaggaatcagaatagtcctagacttaccattaggaacagtggaaacttagactctaatgaagctgttcattcaaaatacaaagtgaatctgattttcaacctaagattgcatgcttaacccaactttgaatttcggagtaaaaatattttcagatttgcaaggtcatagacaatttgattctttgtaaaagatattggagtgggggatggattagctaaagcatgactttctacagtgaagagaaaatgtctaaagttgaaaatgaagaaataggccatggtcgtggctcatgc

SEQ ID NO: 378512 - DNA, 433 bp, Homo Sapiens
cttctgaattctaaggggtcagagaaggatcttccagagattgctgagtggggagggcctggggatatggttctacagtttttggtcataaccacaaagattagcatctctgctgcctggtcgatgaagcatcccaaatagtccatcagcgagggcaaagtgatggaaacatttggagtcactgattcaacatgcttgagggctggatcccttatttgggaggtgggagtacttccagagcttcttttcacttaatgaaggctgggaagctcagagctcagtggtacagggctggaggaagtcattttcatatatagagtctttcttgtttggcctcttttgtagcaatgactccccaggaccctccagtaacaattttcctttacctgcatcccccaccatcctcaggttcctgagatcaccttgaaaaaaa

SEQ ID NO: 378513 - DNA, 459 bp, Homo Sapiens
gaaacaaaaggagagccagaggcttgaaaagcagtactgcactcaggtgaactcaagcaaacctattattgaaaatctggttcctggtgcccagtaccaggttgtaatatacctaaggaaaggccctttgattggaccaccttcagatcctgtgacatttgctattgttcccacaggaataaaggatttaatgctctatcctttgggtcctacggccgtggttctgagctggaccagaccttatttaggcgtgttcagaaaatacgtggttgaaatgttttatttcaaccctgctacaatgacatcagagtggaccacctactatgaaatagcagcaactgtttccttaactgcatccgtggtaatcttcccttaaccaactgtcagtctttcctatgggaacaggcaaacctttatgtaccaaatgtgtctttaagaaattatctataaatttgatta

SEQ ID NO: 378514 - DNA, 390 bp, Homo Sapiens
tacagcaatagggtcttggttagcaattacactagacagctgggcctggatttcttcctgtgtcgagaagcggcctgctgggttagtcctgctgtcagccaggcggaaggcaggtgttgcctcaagactggctgccagggggttctgtatgcccaggaaaggcgtatcttcacctactctttcatcttctgtttcactctctgagttactgctctgggagcttgtgttgctgtccacttccaatctgttagcaatgtggccattgggcttggttcttttggcccgccggctattggcgagtttcttaacaggctcttgggctggctcgtactcttgggtcgtttcatactcctcatcctccactatcctcaaggggctagcagggaggct

SEQ ID NO: 378515 - DNA, 187 bp, Homo Sapiens
tgatcttcatatatagacaggatggtatctaccatcatgaaaacaaacaaaggcttaaaactcactaatagaacagaaacacaaatgagaaaaaggaatcaaacattatgactatttaaaaaaccaccaaattgtaaagtaaacaatacaaaagaagataggtgaaaccccatctctactaaaagta

SEQ ID NO: 378516 - DNA, 450 bp, Homo Sapiens
atactcttcaaaagtgtcaagttcatgagtaacaagggaagacagcgacgctgtcacggattggcagagactaagaagacataacagatgaatgcaacgtggtattctggattggatccttgaataggaaaagggtattattggaaaaactggcaaaaagacaaataaagtccatagtttagtcaatagtgtagcaatgttgatttcttagttttgataaatgtgtcatggttatataacacgctacaattaggggagactgggtggaaggcttactggaaccctttatactatccttacaacttttctataaatcttagtatttcaaagttaactaaaagtgaaaaattgtaaagtcccttctttcttaaaacaaatctaggatgcttgttatgtgttaacaattcttgtaaatgcaaatcactttgaagagcaataaatattacccag

SEQ ID NO: 378517 - DNA, 395 bp, Homo Sapiens
gtgtgaaagtttaatgtaggactcaagaactgaggcttggggctcaagtctttgctttgtagcttagctctgcgatgccagtcctttttttccgagagcaagtgagttggaaaggggcaacaactagcatgtaagagttatgccttactaaatagttcttacaggttcttcatggcatcctaaactgacgaaagacaacaggcagggcatctacattggtataattactcaggtaagtggtgatgacactgtgaactagggctaagggagtagatatgtcagatgatacttatctgcaagttaacataaataggacttggcaaatgcatttgtccatttgctcagactgaaaccttggattccaacttggctcctctccttctcacactcaccag

SEQ ID NO: 378518 - DNA, 589 bp, Homo Sapiens
taataactaaataaccacagacagtgataccggatggtggcaaaaattccgtagaaaaataaaggggattgtgcacatatgggaggtcaggacagtttgttctgatgagtggggtttgagctgagatccagtggaagcaagagagcaagacatgctggtcagcttcttggtgacgggcactccaggcagtgccaatggcaaccggaaaagtctatgtgtgcgtcccacgtgggcagaggctggggtggaatagcaaagtgggctgaggatgagggctaagaatggagctcagagaggccacaggagccaggcctggtgagcatcctgtatcagggaaggatttctacttttgccgctgaggatgtggggtgtgactcgggagctttacacagacttgggtctgaaagaatcactggagatgtagtgtggaaaacacttagaaaatgattttcatctgttagagctgctggacatgacaaggtgggatctttggggaatcttggtagaattctgggtatatcttgaaggcagagtttggaggatttgctggtgagtgtgagaaggagaggagccaagttggaatccaagg

SEQ ID NO: 378519 - DNA, 531 bp, Homo Sapiens
cacatcatcagactgtggtagccattcaatgagtgcttagcgtgaattctacacagtgctaattacctgtaattctcacaatgtccttaagcggtggctactaatatgtcttcattttacacttaaccttaatcccagctactcgattacaatccgggttacgtgacctggctcacgtcacctagctaataatggaagagcccatgtatgtttgccataggaattggcattttcacgtccagctctctagccccaaagatttcaacctcttcgagccttgacagattggaataagaatcctctccaggaatctttcccaatatgctggaacctaaagggaaataaaaacccctactccgatcagcgtagactgggccatggtgaaaaggaatggatgatactccaggtgtgaggaattgcagctttttagcctgccagttatttttcactcagccatttgcaggaaatgaggcacactgctttccataactgatttgtcttgcaactttctgaacaagtcacagcttcccc

SEQ ID NO: 378520 - DNA, 485 bp, Homo Sapiens
agtggaactaccatcttttatccttaataattattaacacctccaatgaaactttaaaaaaactgaatttttatacatggcatacatttttctagttccttctgcttgctttattaactcaaaagttctagttctagtctgttgatctgccttttgttctcccaaaatgtacagtaattccatttgtttgtataaatatgcctggattttcattataaaaatgtcattgtagggagtagagactcatatcatggccttttaaatattgtaataaaggcaaatagatatttgcccttagtttactggttaaaagtttgtttacagaacttttctctggtgcttaaatgatgctatgtaaaatgtcatgagtggaaagaatatttgtagtagtaacaagaatttttcatttaggaaagatttcttaggttttgaaagaatacattaaaataaaaaacttgcccctactaggtaagaactttataatg

SEQ ID NO: 378521 - DNA, 230 bp, Homo Sapiens
ttataaggaacataaaattggttcagcagccatccagccagaaggtggtaagtcacccacaccatttaataaatctgaaaggtagcttaggattcatcaggttcctgaagtcttattagaatctctggaatctgatgagggccccccctgctctcttgaactagcaatgaaagaaaattggatcatcggataaaaattggagctatggtcggccgggtgtaatggctcat

SEQ ID NO: 378522 - DNA, 471 bp, Homo Sapiens
actctggtttaggagggtgtcccaatggggcatggattggacaatgctctccagcacttccatccaaaggatctagggcttcactcaggcagcgcggtgggaaggggagactaggatcagcgtgaaagatgctcattaaagaagacaagtgctgtggagagtcagaggaaatgtgatgattttgtctaaaacgcatctgggctttcctggagccctctccctgccggctgctgggtagggagatttccttttactcaacaacacacaggacccctatgctgtcctgggaagccaagttttagggcctcctgcctcctggctactctgcagaggaccaagctcactgtggcagagccccctcagagcccctgcccacgggaaagttgggtgggacccctcccgcccttctcactcctgtccttcagctggagcctgcagggcacacacatggcgccattcattctggtatct

SEQ ID NO: 378523 - DNA, 515 bp, Homo Sapiens
  misc_feature (461)..(461): n is a, c, g, or t
  misc_feature (472)..(472): n is a, c, g, or t
  misc_feature (490)..(490): n is a, c, g, or t
ttaacaatcacactcaattaagggcacaatttttggtctgtagttttggctttccaaatactttccaaatgtcaaagacgtgaattaaaggacaaaaggaggatgataaatgtcttcctcagctgaagcaggaggcactcttttctaacacttattatggctacctccgtgactcacctcctctctgaaaagggtaaaccaggtgtgagctttgtgcccaggggaaggtcgagcaggatggtgtcttatataaatacaaaatgctgcttaaaactatttgtagaatgactactgtacaaagctgttttctttacaaattcaaactaatgcttatttggaacaacgtatctggcacccaaggataggagaataatttggacctatcagttctcaaaggaaccctactctggcttctacagccagttccaagatccattaacagatggctctggcaaattccnagaccagaggnaagaggaattctaagaancggaacctgcaagcttataaaaatt

SEQ ID NO: 378524 - DNA, 572 bp, Homo Sapiens
agcatgcctgagatccttcatcatctcacagacagaccgcaacactcagatccatgcatgccggcatcccaaggcagaggaatattttcagtggagcaaattaccctgtggaattacttccagaaatagaattccactccacataatcagcattaagccatccaccatgtggtttggagaaaggagcagaaaaacaaatgtaattgtgaggactggagagagttcatacagagcttgtttttcttttcactcctcctacagtgagattaaagatttcttgagctacctctgtcctgtgaacgcatatccaaatgtcattccagttggcacaactatggataaagttgtcgaaatcttaaagcctttatgccggtcttcccaaagtacggagccaaagtataaaccactgggaaaactgaagagagctagaacagttcaccgagactcagaggaggaagatgactatctctttgatgatcctctgccaatacctttaaggcacaaagttccatacccggaaacttttcaccctgaggtattttcaatgactgcagtatcagaaaagcagcctg

SEQ ID NO: 378525 - DNA, 584 bp, Homo Sapiens
  misc_feature (484)..(484): n is a, c, g, or t
tgtcctgcttgccgtcccagcgcctgcgacgcttggatgccgtcagctccggccgcgccaaccagaaactttgcccctcgaagtcccccgcctgcctgaccgcaccgtgaggcgccaagtcggccgcgcgccccccggggccccggaaccccgcgagtcattgcctggccgccccgtaccccagcgcccgcggcgccccggtagccaggatgcgctacgcggacccctcggccaaccgggatttgttggggagccgaactttgctcttcatcttcatctgcgcctttgccttggtgaccttgctgcaacagatcctgtatggcaggaactacattaagaggtactttgaattttatgaggggccttttgaatataactccacaagatgcctggagctgaggcacgaaatattggaagtgaacgtgctgtccatggtgaagcagtcagagcctgtcgacaggtgggagagcctccagatgtgcanatgggcgatgaacatctctgaggccaaccagttcaagtctacttctgtcaggtgctgcaacgcccctgcctttctttcaccacccagaagaacactccct

SEQ ID NO: 378526 - DNA, 163 bp, Homo Sapiens
  misc_feature (41)..(53): n is a, c, g, or t
tgactgaagcgggttgggctcaggtgaccaacccctgctgnnnnnnnnnnnnnttccgcctccttgggaagggggcgtggcgggagaggaggaaagatactgggatcttcggcctctaggccttttcccctagtatcttcgtccccaagacccaagccagaat

SEQ ID NO: 378527 - DNA, 173 bp, Homo Sapiens
attgaaggtgaagctaaaagaacaacccccttcttatattacaaaaactgcattctcttgtgtatgatgagaaggaagagcaaaatgcgtagggacaaggaatcgcctcttccctgctcaaatggttaagcgtgcatcagaaaggaatttcttggccgggcacggtggctcat

SEQ ID NO: 378528 - DNA, 455 bp, Homo Sapiens
gaagggggaactcactgccactgctgctgcggctgctgcagctgctagaggatttggtagaattcgtggagccaatggctttgaaggttcttttgaaaatactaattttacccccagtggatgtgctgtcttctgtagtttgttgtaaggactgtatttaggtttcgggggcttcccagcagctctgtctttgtgccttctactgctaatgtgctgtttaagttgcgtttccgagttgacgtgcacatcacagatttcacagtgaaatgttttattttggaggcctgtgtttcctttattaacaggtcctttgcctttcactcctgccctaggaaaggctttgatagtgccacttccattccgggcttctaacatggttttgtgcttagtaccactgttgtgcgcctccagctgcgaggcaaagttgacagcaaccttgcatagcgaacagtaaa

SEQ ID NO: 378529 - DNA, 453 bp, Homo Sapiens
aaacaagagttccgtgtttcagtctctgcttctctgtacctatttcgacctctcagtcgaggctgggtctctaatatacctttctctattagccatgctgcttctccctcacggaagtcccactgtctaccttgaatccaacccgctgtggcgcctttcttgccaactcaatccatgcaccttccgtgggtggttttggcgggccgtcctgacccccaaacatccctcctccctccctggcgtgaaagggctgagatttgctccggcaccctacgcgcctgacgttataatgcacctggggtgggctgcgacctcccagctgagccttgttcctcgaagagacaggagactaagagacaatgagctgagtgaggagcccaggaacccgggttccgaacagctgcgtagaatgcgagcggccaaatggtggagaatctggccgggtaaaaggag

SEQ ID NO: 378530 - DNA, 476 bp, Homo Sapiens
cgctgggcccctcctgcgcacagtgttgttcagtttcacatggtacaaataagtaaaaccaaatgagcaaacacggtctttgtttctgattccttttaggggaattgcatgcaaactagactgaaatgatacaaacttccatctggtctgaccgcaaacagtgtttatttggggacaggggttgggatgggggtgtgggcaggggaaaacagagaacgggatgctttgaagataccatgaaataaaacccacagaggtatttgatgtatttaattgtgaaaggagactttgcagataaatgaggccagaatgacatgttttataattaactgaataaagaaggaagcattattatatattattgtggggaagaaccagccagttcgctttttctcctaaggtgtggaacttttattttgttttaaaaatatgaatcaaaattcctgtgttgtgtgccaaggtataaagtggagaag

SEQ ID NO: 378531 - DNA, 795 bp, Homo Sapiens
  misc_feature (14)..(14): n is a, c, g, or t
  misc_feature (78)..(78): n is a, c, g, or t
  misc_feature (117)..(125): n is a, c, g, or t
actggtttgggtgngcaatccaatacctagtaccctcatccaaaatatatacccaataacttaaaaattcatataagnactaaatattaactccaaaacatgacaccaaatacctgnnnnnnnnntttactttagttatctcaaacacagccatgaatgaagcaattttctcaggaccctgaaaactgactcatttcccatcataacaaaccaactccctcattttacaaataaaaataatgttcaaagaggcaagaccagtgaccaacactacttctaatacaataccaaatatgacctcacattcactgaatatgcaggaataatgcaaataagtagtgactgctttgagaaaacatttgaattttttggaagtggaaattaattattcaaaatttagatatgtcagaaaagctgggatgattgattttcacaccaccattatcgtgaatgggctatccaaatactcttaacagaaggaattccttttttaggtctttagtgattattactaggctcagtagaaaccagaagacaattattctcttaaatattgaaaagaggcagtaatatagataaaacacactattttctgagattatctgatgatagaaacaaagttggctgaattccttaggtattagaataaacataaacttgatcatggatacctcatggcagatcactttaagtgaggtcagagagtattatcacaaaaagataatatatttctaatgttttttcacacccaccacaaaacagttaagttaaattcaaaataatgtacactcattt

SEQ ID NO: 378532 - DNA, 568 bp, Homo Sapiens
tctggcgacaacattgactgggcggacggttgctattcctcagcctcgccagaggtcccggtctgagagtgatgtgagcagtgttgaacaggacagcttcatcgagccctatgccaccacctcacagctgaggcctcgaccaaattggcagagtgagatgggaagaagatcttctttgccatcctttgaaacactggactatggggacgaagaggacattgaaactcagctgtcatccagcggcaaggaattgggggatgtcagtgcccgggaggacagaggaggccacagtgatgacctgtacgctgtgccacacagaaatcaggtgccattgttacatgaggtgaacagtgaagacgatgaaaatatttctcatcaagatgggtttccaggctcccctcctgcaccacagcggacacaacaaaaagatggtaaacaccctgttctgaatttaaaggatgaaaaacctccattatgtgagaaacctccaccctccccagatataactggtagagcacgtcaaagatatacagaaataaccagagaaaagtttgaggcattaaaaaaa

SEQ ID NO: 378533 - DNA, 787 bp, Homo Sapiens
tgaccgcgcggctgctccgctctccccgctccaagcgccgatctgggcacccgccaccagcatggacgctcgccgcgtgccgcagaaagatctcagagtaaagaagaacttaaagaaattcagatatgtgaagttgatttccatggaaacctcgtcatcctctgatgacagttgtgacagctttgcttctgataattttgcaaacacgaggctgcagtcagttcgggaaggctgtaggacccgcagccagtgcaggcactctggacctctcagggtggcgatgaagtttccagcgcggagtaccaggggagcaaccaacaaaaaagcagagtcccgccagccctcagagaattctgtgactgattccaactccgattcagaagatgaaagtggaatgaattttttggagaaaagggctttaaatataaagcaaaacaaagcaatgcttgcaaaactcatgtctgaattagaaagcttccctggctcgttccgtggaagacatcccctcccaggctccgactcacaatcaaggagaccgcgaaggcgtacattcccgggtgttgcttccaggagaaaccctgaacggagagctcgtcctcttaccaggtcaaggtcccggatcctcgggtcccttgacgctctacccatggaggaggaggaggaagaggataagtacatgttggtgagaaagaggaagaccgtggatggctacatgaatgaagatgacctgcccagaagccgtcgctccagatcatccgtgacccttccgcatataattcgcccagtg

SEQ ID NO: 378534 - DNA, 517 bp, Homo Sapiens
gagcctctgggcatcaggctgcccaaggtgcaggctctgatggggaagaaaccggtgccgtcatggggacctcaggtagccagatgtggcctgaggagtctgtgctgtggcctcctctgtcctcaaggttaggctccagctggggaggagtgattcactcttgtaaattacagggaggctccagggaggcagatgcctccaaccctgatgactggcagcaattctggggcccttacctaggttctccctgccactgcgggctccgggagctctccatggtgacctaggaactcccctgggtgcttatgctccgccgagagttgctctgttgcacattcattcaacaaacatttgtttagtgcctgtcacatgggctcagagtcagctgtttgggttctgatcccagtcagggccacttcctgtggccttgggccatggcttaacgctgagcctcagcctcagaagtgccggccttgtagaggatcgatgccatcgagccagtgctcggctagggctg

SEQ ID NO: 378535 - DNA, 363 bp, Homo Sapiens
  misc_feature (44)..(44): n is a, c, g, or t
gggcgcgagcctttttctctcccctcctcccgcttgcggctgtntccctctccctccgtatccttgtccctctcagctcgccgggcgaccctgctcctgcctcccacattaatggcggcatcctcggaggatgatatagaccggcggcccatccggagagtgcgctccaagagcgacacgccgtacctcgcagaggccaggatctcctttaacctgggggcagctgaggaagtggagaggctggcggcgatgcgttctgactccctcgtcccaggcacccacaccccacccatccgcaggagaagtaagtttgccaacctgggaaggattttcaagccttggaaatggaggaagaagaaaagc

SEQ ID NO: 378536 - DNA, 755 bp, Homo Sapiens
cgctgtgtctgcccggtctctcctggggtctccggttctgccgcctcctgtccctccttccggctgccccggccagaggggctcgaaggcgcgttggggcccggggccacgctgggagacacgccttcggccgcgcctaattcgagccaggcgcgggacgcgtcccccggccgggcggagcgggaggggacgcccgccgcgctcggcctccccgggccccgacccctcctttgtaatttgaataaaacgcctcccccgcccgcgcgccgccttaacccgccgcctccgctctccccggctgcaggcggcgtgcaggaccagcggcggccgtgcaggcggaggacttcggcgcggctcctcctgggtgtgaccccgggcgcgcccgccgcgcgacgatgagggcgcggccgcaggtctgcgaggcgctgctcttcgccctggcgctccagaccggcgtgtgctatggcatcaagtggctggcgctgtccaagacaccatcggccctggcactgaaccagacgcaacactgcaagcagctggagggtctggtgtctgcacaggtgcagctgtgccgcagcaacctggagctcatgcacacggtggtgcacgccgcccgcgaggtcatgaaggcctgtcgccgggcctttgccgacatgcgctggaactgctcctccattgagctcgcccccaactatttgcttgacctggagagagggacccgggagtcggccttcgtgtatgcgctgtcggccgcg

SEQ ID NO: 378537 - DNA, 550 bp, Homo Sapiens
atccttaattaaattaatcctcctccccccgtgccttctcatttaccccaccagagttgttcttgctagacttttactctggtatcagagtctatttagccaagagactcactgggtattagctaattggcccatggaggagcttccatagtttccctgtccccactcaacatcaactgcagaaattgattcataggggccgtggtcccctatttgttagcaatacatggatgtttatctgttgaagaagacattgtggtacattggaaagggattggaataggagcaaataagccccagctccagtcagcagttttactgtgctatgtggataatcattttgctttgccaaactcacagacatgttatgtgactagaatatgatatcttgtgtaagagtactttcaaaattatacttacgtggaaatgagaactgatattaatacgtaatatatctgtgaaacattttatgagatttttcatgtcatttctctttgaaacagatgagtatcattagaatttttttgcaatttctgaaaggcagacctct

SEQ ID NO: 378538 - DNA, 826 bp, Homo Sapiens
  misc_feature (806)..(806): n is a, c, g, or t
tatgattgataagacttgagtgtgagatgtatgccttcccacactcatcacattcatagggtttctcacctgtgtggatccttttatgcactgtgaggcctgagctgttcctgaaggccttcccacacctatcacacacatagggtttctcccctgtgtggatcctcttgtgctgagaaaggagagagctgtaactgaaagatttcccacactcaacacacttgaagggtttctccccaagatggactcttttatggcttataagagttctgcttgagaaaaaagcttttccacattcatcacatgtatggggtgtcctgccagggtgggtactcttatggttaataaggcttgagtgtgagatgtaggcttttccacacacatcacattcatagggcctctccccagtatggattcttttatgaactttaaggcttgagttgtttctgaagaccttctcacacctgtcacattcatagggtttctctctagtgtggacccttctgtgctgagaaaggagcgatgtgtaattaaaagatttctcacacacatcacatttgtagggcttctccccaagatgaacttttttgtggtttgtaagggttcggtatgtgatgaaggccttctcacactcgtcacacttaaagggcttctccccagggtgtacacttttatgatttataaggctcgagagagagatgtatgctttcccacattcttcacatttgtaaggtcgttccccagtgtggattcgtttatgtactttaaggccagaattatttctgaaagctttaccacactcatcnacaccaaagggtttttccct

SEQ ID NO: 378539 - DNA, 588 bp, Homo Sapiens
aattacaaaaaagaaaatatgtaagatataatgaaggcaaaggtcaatctcataagaaacatgacagacacttgacatatcttattcataaaggtaacttttcaaagcatactaaatgctatgcaagttactaaggtctctaacagcactaattgatgtaaatcctcttgaggtaaattatcgcaccttttcataccaaaacaaagggctgaagaggtttacatatctatccctaactcacagagaaagcacatctgaaagccagaatctgaacctgtgtgtgcgggctaagatgccatgttcacagcattaagcaccattggccacccagggcagcacggattataaatcacagcaaatacgaggagtgtaggaagaaatgtttcaaggcagattatgggacctgagctgtgtcacctatagtgtgacagcaccactgctctcagatagcatttaagtcaccttatcttgcacaagttgtttagacagtgaccagatcatgttgctgtcctgagtaagctgtcctgtgtataagcaggagtcattctttacacagtgtgtgcaatgaagggatgttattctgtgcta

SEQ ID NO: 378540 - DNA, 558 bp, Homo Sapiens
  misc_feature (99)..(113): n is a, c, g, or t
atccttaattaaattaattctccccccccggtattatcatgaagaaaagtgcattgcttgctcttcatctacctcctctatattagatccaagattagnnnnnnnnnnnnnnntactagcatttgacttcaaaattgagattggtattattcttcacagcagcaggaagttatttttttaatgtcagtatcacttcctcaaccttattatatatagatatgacagttttataaattataaaatataaatgtaaagtggaatcctccatgtaacttagttttatttcttaattggtgcataaaataaaaagataagaattacataaaattaatgacttagttctgggcaatataagtaactttcaaagaaagtttagtgatgtatttttcaaagatttacaaaattttattgtaaaaccagcattattttacatcattttgtcacatatactccctttaggtggttcatttctatcttactcttcctaagatgtccaatattttattttaatcttcaaaataacatttatagattgatttttagaagttccccttaatt

SEQ ID NO: 378541 - DNA, 252 bp, Homo Sapiens
tattgttggggatattaacaaatgtgatttgtataatgaaatgcatttcatttggaagaattcaatgaaccatttttccaagtgaccagtacgtgatgttacaaaatcatgcatggctcaaagattgattcaaaagtgtaagacaggccagtggattttaatgtattaacaatataagagtgcattaagttttcggagtctacattgcctttaagaaactatgacttgtagtaagccgggcgcggtggctca

SEQ ID NO: 378542 - DNA, 544 bp, Homo Sapiens
agtcactcataaaaaatgcaaattgatgaacgtactattgtgatacattagttgaatggatgaaactattttaaagtttcagatgaactcccataatgaatgatgaatttgtgatgagggataacctggaagtggtattcacacattatgctacaataaaaggttctaccgtggagaggattttgacacattcagtaactaatggaacacaccgtcaacatgaattcgcaccttacatgacagaagtgattcagggattcctatgaatagaaatgctgagaaggaacgcattttattgcagaagctaaaaagctaaagtaccagtcatctagagagaaggaaattaatgtttcttaataatcctgttaaatgtttgattgtttttggaatgtgttattgtaaagatgtcatgcaggacatgtatatgttgtctgttgtaaaatgttaacgaatactttgttcagggctcactctctctttgtcatgaaagccagctccttgtggcgaggtaaagtggaattccaataaagaaattccttaaatc

SEQ ID NO: 378543 - DNA, 499 bp, Homo Sapiens
caaaacacctgtagtgttcaccttgttataagaacagaaacatttggaacaggtttcattctgtttctagatttatgttgttgtagttgaacagcaactgtttttttccctcagtgttaacgaaaggataaagactacctgtattgttgggtatgactatcaaaggatttccggtgattcatgtttgtgaattggagtttaaatgtttgcaggattactgtacttccaaagacccactagaatgtcagctgtactctgtactctccactgagaaaatgaacaaaatcctatgtcttaacagttatgctctaactttttgaaagctttttgatgtaaataataggttagaaactaaaagccttttaatcttacaaaatacaatttgaacgatggaaggttgttcagatactggctttctgtaaaaacatcattgtgttagattgtttgtaatgtactatcaataaaattggctgcttgggcggttttagttaccaccttt

SEQ ID NO: 378544 - DNA, 756 bp, Homo Sapiens
tgggtctgggacaaccgggtgtttcatcttttctacagataacgaaggcagacttttggcagggggtaataactggccccttcgaggaagaaaatggagcctgtggcaaggaggcgtccgacgggtgggctttgtggcaagccccttgctgaagcagaagggcgtgaagaaccgggagctcatccacatctctgactggctgccaacactcatgaagctggccaggggacacaccaatggcacaaagcctctggatggcttcgacgtgtggaaaaccatcagatgctgagaaattaggaatgaacaagtcagtcaagatcctgcctctcaggaagctgtattctagttgggggagaaagatgttggacaaatgaacacacagatgagcaagatgactgccagttgtgataagtgccaggaaggcaaaaaagtatgttgtgatagatagagctggctgatgtgaagaagatacatcagggaacaggacccagactcagatttggaaatcgtgatggtctttttcctgtttaacccccacagtgtagagcaatagcccccaaggttgggaggcacatgccttagaggttgcaagatgttcccttggagtacaggaagaaaatttcaatcttgtatttgtattaatatctaatttcatctcatcctttttaaagtatatgttttttaagacacataatatattagtagacttgtacataaatctaacttataaataaatatgcatatattggagatatt

SEQ ID NO: 378545 - DNA, 291 bp, Homo Sapiens
ctactttggactgtaccaggcacagcaggcaagaaagctggaaagaaagctgtgtggtgcgagtaactgtacagtattgctggatttgacatcgagctacgaagtcgcagactaattcctggggtcatctgtttaactggtggataaattatttccatctctactagacagaggtctacaagttgcccctacagagttgtaaattgccaagttctgtagttcttttgtctatttccaagtttagataatttttcttaaaaacacaacagtcaggccgggtgcagtggctca

SEQ ID NO: 378546 - DNA, 598 bp, Homo Sapiens
gtcatccgagagagagcacaaactgcaggcccttgttgcagctgaaggaagaccctacagagaatggaattgagagtggagacaggacacttcacaggacacttgagcacagtcaagattttattcacacttttggttcctgtgttttatatcgaagacttagctatgaattgctatctaaatctcagagcttagaagccaacccagtgactagaccttccagtgaagaaagtgatctcaagaggtccagggacttaacagccaagccacaccacccgacaggttcttctgtgacaccgagagatctaacccaaggcctgggttatgtcttagtcgagacatcatcatctgagaagcaccacatcctttcagacacatcctcggacacacatgcggtcttggtgcccccaggttcaatcctgcgttagctcttttgatgagaaggaaataaaccaaaccagccacttgcactatggcttccaagccaatgttattgactcaataagtgcttagcaattggcttcctcttttgtcttcctattttcagctccatttaaaccaggagttatttataaagacctcttcctctcatgtaaaa

SEQ ID NO: 378547 - DNA, 517 bp, Homo Sapiens
tcaaggagtgggtggctgggaaagtccacctcatcctctacatgctgggttgctcatgaagttaatctctcacgtgactaagggctatattcaatgctagtgatttctttttttcagcaaatgcctggttctgaagggtcacggggctgtcaacaggtgttccttactcataattgattattcaaacctttaagttagctttccataattcactgcacttaaataagtttaaatcaaatacagttattttagttacaggttaggaagatggtctttaaataaccaaaaatatgtttattttttattatagtgtagacatacccttcatctattatatcataatacatgttacattggactgaattagattttcccatttctaatagttggcaccattataagctataaggttcagaatcagaattttagtaacaactcaagagaaagttgttgaatataatccttagtgaaaacagtgtcctctaaccaatgcctatacaactaaatttatgctggg

SEQ ID NO: 378548 - DNA, 249 bp, Homo Sapiens
caaggtcttttcccatctgatgtaaaataaggctccaagatgaactggaacttggccagggtgatcctctactgaggggacaaattcacagctcagtcttccctagttatgtccctcagcccagaacccttggtacaacatgctgctttgtactgagggcaaggcaaattgaagacattatcatcaataaaatcacatcgagcccgctctcaaccaaattaaccaatgtggccgggcgcagtggctcat

SEQ ID NO: 378549 - DNA, 343 bp, Homo Sapiens
atttcactttcggcgcagcatcttcgggaataaggcggatatttgctggtcgccagaacagcttgatacgcgtttttactgctatttccagcgagttcgtcgctttgttgctcgctgatggcggaatatttttaatattcagccagaagactgactcgcgatcatcaggcaatgacacacctttggtgtgaataatgcgtaatattttttcttgcgaaggttctaatcgtgatactggcggaataacggtaaacggcgctttgcttttatcctctttattaaatggatctacccaagcctggatgagataaggtattttttcttctttgctaaatacagaaat

SEQ ID NO: 378550 - DNA, 278 bp, Homo Sapiens
agttagcagcaggattctggatggctgacaccgatgctgctgcaccttttggaaaaaatggatccaactgcttgccccgtcatcccagatggctaggcccccattcatcccctctcgctctcctactggaggaactgctgtatgaatcataaagctctgggtagggaagcagggagcaggttccaggcagagctgacaagtgacttcacttttgagcatcggttgaaccagatttaacgtctcttccagttctaacactgaggatgaaaataaaaaaa

SEQ ID NO: 378551 - DNA, 457 bp, Homo Sapiens
aaaaaacaatgtaaaccatattaaatgttttgaacttgatcctaagggtaataatcagccattatatgtaacaggcatagcagggacataataatatttcatatcctccttagaatgatcactgtttgcgtgtggaaaatagattggtgtctcagaccagtctgtttgtcacagtggtctaggtaggagaagacaatggcaaaggggatgagaagtggattgatttgagagatatttaagcaatagaatcaatagaacttgattgatcagatacatgagatatgaaaggaggaaggaatggtcagttttctggctcaaatagctgggtagatggagctcctcccaaaacagtttatcaaattatttattatatattgtgtttgatatatttaatcacattatagaaatgaactcaccactaattcagcctcatacccagccaggcacggtggctcat

SEQ ID NO: 378552 - DNA, 494 bp, Homo Sapiens
ccccccccggcccaggggtagttggagcggtgcaggttcccaggctccaggtactgggcgccttacgagctgggaggtggtgcctctcacccagctaattgctctctagcccttggccttcacaggtgttggtgcctgccgtgaacgcattctgacctgggccgtatctgtctcccaagactttgtgcctatggttggggacagagtgaggtcgttgccttgacgacgacagcatgcggcccgtggtcctcctaagtgtgagcttgcggcggaccgaggcccacctgcctccctgcctgcttcgccctggactcgtgactgcgtccgcagaagaaatcacaacagcgctggaattgctagtttgctaggcagcatcttttggacctgcgaaccatatgcatttcacctcaaatttgtttccaagttgaaaacctttgggtctttctatgcgaacggattgaagaaacgcaaaaagtttctacggactttaaatt

SEQ ID NO: 378553 - DNA, 810 bp, Homo Sapiens
ggaaactaaaacagaggcggtggaagaagttgcacaaggctagagagatcactgctggagggaaaagcatgatgggctctcgggttttgagaactggcaagttgttggaggcagctggagcggggcctgggtcgccggcactggctgtctttgcgtttgggcgtggccagtcactcctcttccaggttccagcctgaactgtctgcccctgatctgcggcgatttatcgatggtccaaaccgggctgtggccctgcttccggagctacgggaggtcgtctcctctatcagctacatcgctcgacagctgcaggaacaggaggaccacgatgcgctgaaggaggactggcagtttgtggccatggtagtggaccgcctcttcctgtggactttcatcatctttcaccaacgttggggaccctagtcatctttcctgggacgccacgttaccacttgccccctccagacccctttccttgaagactggagggttgagacccaggccccctgccagttgaagtgagaagttggtgatactgtcaagccctatccttctctgcctattaactccttcacgaggaatctgggcctcttatttcgtttctggggactgcattggactgagggctgggtaggcaggtgtcttggacccacctgaaatgcagtatcatctgatttactctttgggatcttgaagaagctcttttggatatcaacacctaggtcgccagtgaaatagaacacagaacaggaactagattataagccttatgaggtcaagaaatgtgacttggccgggcgcggtggctca

SEQ ID NO: 378554 - DNA, 222 bp, Homo Sapiens
cccctcctttcctcctcctgccccacaatatattattcatctggttttaatgctacataaatatgcattgtctcatgcctgtttgtgttggatgccttgtgctaagctgtaacaaaatgttgcttcttttgctgtctgtatacagctgcttgctttaaattagtagattctgaaatagctttccttgcatgtctaaaataaaagtattgcatgtaaaaaaaa

SEQ ID NO: 378555 - DNA, 363 bp, Homo Sapiens
  misc_feature (109)..(109): n is a, c, g, or t
  misc_feature (178)..(178): n is a, c, g, or t
  misc_feature (180)..(181): n is a, c, g, or t
  misc_feature (190)..(190): n is a, c, g, or t
  misc_feature (201)..(202): n is a, c, g, or t
  misc_feature (207)..(207): n is a, c, g, or t
  misc_feature (209)..(209): n is a, c, g, or t
  misc_feature (226)..(236): n is a, c, g, or t
tgggggcccggggggtcttttggcagctcccaatgggtgatggaaagcccggtctaggtgggggtgggcaagctccctttcctgtgcgcagggtgggaaaaggggaaanattttcactggcaagggtttgtggagtttccatggtgatgtttacaaccagggacggttttgtctcccngnnaagggcctngtgtccccccnnacccngnaacacccacatcccctnnnnnnnnnnnggccggggtgtgctcagggaatgtggattcgctcaaatgccggactgagccctgagtgtttggaaaggggagactccccctttttaatcacaaatgtagcctacaagcaagcggctttggattgttt

SEQ ID NO: 378556 - DNA, 566 bp, Homo Sapiens
  misc_feature (90)..(90): n is a, c, g, or t
  misc_feature (501)..(501): n is a, c, g, or t
gggagtaccatggtcagtctttccacggcaggagggcctgcccagaagctccagggaaatggcgtggctgggagtcccagtgttgtcccngcagctgtggtatcagcagctcacatccagacaagtcctcaggctaaggtcttgttgcacatgacggggcaaatgacagtcaaccaggcccgcaatgctgtgaggacagttgcagcgcacaaccaggaacgccccacggcagcagtgacacccatccaggtacagaatgccgccggcctcagccctgcatctgtgggcctgtcccataactcgctggcctccccacaacctgcgcctctgatgccagcctcagccacgcaaactgctgccatcagtatcagtcgagccagtgcccctctggcctgtgcagcagctgctccactgacttccccaagcatcaccagtgcttctctggaggctgagcccagtggccggatagtgaccgttctccctggactccccacatctccntgacagtgcttcatcagcttgtgggaacagttcagcaaccaaaccagacaaggatagcaaaaaaa

SEQ ID NO: 378557 - DNA, 577 bp, Homo Sapiens
agaatgcatttgggaggtagtgtataagtgactgtttgctctcaacacctgtaaactgttgacagtaattggactacagatgtttgctaagcttgatagacttctctgtctccctctcgatgaggtgagtctgggaaggggttcctctttagaagcaaaaaccaagtgcttgtatcagggccacatttccctatattcgttggatgttaatttgtttccttccctattgatagttattattgtagacacttcaatgttcgacaaaaaggctgttttgtacagaaagcagtgagatgttggcaaaaggtgtgttcgtagaataaaacattgtctttgtgggcgattgaagatattcaaggcactgtagaaatgaatggaatcagcctgctacccagctcaagaaaactccctgcatgcaatagagaagagcgatcttaaagcaaaaagcaaaggagagattgagaggggcgagcaggcagcagagagaccagtacagatcactccctgccttccattccaataacgctcacccgccgaggtgaagctacactgggaataaagaaaggaatagagttat

SEQ ID NO: 378558 - DNA, 599 bp, Homo Sapiens
tttttttgatacttagctggatatcataataatcttctcttctatcagaccgatagtctacttctttacactggatataggacaccattttgccgcggaataatttgggtatggtgccctctacacaggtgcctttcatcttattttccacattatcgagcaacactcgacaaagctcctgaacatcatgtggcatgaagctatctaaagtttcccaccccaaatggactttggttaaacttttttgttcctacaggtttatcactatgctgtaattcatagaacacttctttgtaatgctaaagggacggcttttagacggaatcatccccctcggttggcatcatgtacacagcctttcgtagctgattcgtgaaaaataacgtctgtagcaggctgttcatgtaacaagtcgctccctgattctttaagccgacggtagcctgtgtgcttccttgaatcccacgcaactccatggggagcatccgcctgtacaaagacttcaaaggtaactttgtcatcatctataaatcctttctcaggatcggtcacttcactccaggccataaaattggaaaatccccaatcattttctttat

SEQ ID NO: 378559 - DNA, 392 bp, Homo Sapiens
ccctcgccgcagtcgcgggcaccccgctcggcgtcggtgcctgagggaggccgcgatggcggccgaggccctggcggcggaggccgtggcgtcgcgcctggagcggcaggaggaggacatccgctggctgtggtcggaggtcgagcgcctgagggacgagcagctgaactcgccctacagctgccaggcggaggggccgtgcctcacgcgggaggtggcgcagctccgggccgagaactgcgacctgcgccaccgcctgtgcagcctgcggctgtgcctcgccgaggagcggagccgccaggccacgctggagagcgcggagctagaggcggcgcaggaggccggcgcacagcctcctcctagtcaaagccaagacaaggacatgaaaaaaa

SEQ ID NO: 378560 - DNA, 794 bp, Homo Sapiens
  misc_feature (143)..(143): n is a, c, g, or t
  misc_feature (172)..(172): n is a, c, g, or t
ccttggctgcgccccgccccgcccgttcctggcttcctcgatggcttcctcctcaggacgccggtctcccgccacggcgccctgagccaggctccagagcaggcggcttctctgggggaggccgggacccgcctgacaccgangggaggcccaggcgtgacccggccccggnggctcctcggccgaggacgatgatcccgccgggggagtgcacgtacgcgggccggaagcggaggaggcccctgcagaaacagaggcccgccgtgggggcagagaagtccaacccctccaagcgacaccgggaccgcctcaacgccgagttggaccacctggccagcctgctgcccttcccgcctgacatcatctccaagctggacaagctttctgtcctgcgcctcagtgtcagttacctccgggtgaagagcttcttccaagtgcttaactcgtgtgttgctgggttctgtccccctccttctctgttgtatgcccaggacaggggttggcagtggcagatgccgaagatgtggatgaccacacgggcgaacgaaggcccatgtcgttcaggaggccccgagcattggacacccaggccctgagacgtactcagttcggtctgcatctgttgatggtgaatattgcaggactgatagccactgaccgcctgtagtgatgtgtgaggacaatgaaggcaatggtgattcacaggcaggccagccccatatgggtgttagttgtaaattcatggttacataacataataaatttacctacgaattcattatttataaaaaaaa

SEQ ID NO: 378561 - DNA, 306 bp, Homo Sapiens
acctacatccattttattgaataattttgaatgacttaaagttcaactatgaaaaagctttcttttcacatgtactttttgattaggtattatcaacttatgaaacttgaagatgtgaagtgacaggttttgcatgtgatgagtgttttctgttaaaaaataaatattgaaatattaacccattaaatacatttttatggtaacctatgttttacagtggagttttaaaaatgctaggtctttctttcattttattgataactacaaatgaataaaaagcatttattctctttgttgataaaaaaa

SEQ ID NO: 378562 - DNA, 179 bp, Homo Sapiens
agcagaagctgacctccagtgtggacctctcagagaagtttgcatttacaagcccctttccttgaggatttcacagcatttaaataaatggctgtgtgcttatttggcctcatcgttagatgatttgcatggctatatcgtggtatattaaacaaggagtatatcctaccctcaagttc

SEQ ID NO: 378563 - DNA, 615 bp, Homo Sapiens
  misc_feature (452)..(555): n is a, c, g, or t
ctgacattcctttaacttccatataatgcaggaggagacatgaccacaaacgtctggtgagagataaaagtcaggcagaaagtagcgccctctgccctgcaatcaggaaccaccctgtgttatgtgctttgctgcatgtcactgttgatctgtcaggctccaaagtctacctattgaggccaataatatctacctgaccctctcacattggcatcttttaaaaaatagttttatttctactgtttataaaatacatgctcattgcaaaatagaaataaaatgctagtgaataatacaaaagaaaaaaaggatcgcctccaaaacacacccagtgatagccactgttaccatgctggatatatgtccatcagaatgttttctctatacaaacaacttgtacgcttttaatataaaaaatagaaatcacaatatatactctttttcagcttttnnnnnnnnnnnnnnnnnnnnnnnnnnnnnnnnnnnnnnnnnnnnnnnnnnnnnnnnnnnnnnnnnnnnnnnnnnnnnnnnnnnnnnnnnnnnnnnnnnnnnnnntctacttaacatcatggacatctctcctttcaataaatagacactttaagaactattaaa

SEQ ID NO: 378564 - DNA, 811 bp, Homo Sapiens
gttgctttgttgtatggtaagtttttccaaagtacttacagcatctaccctcccaccaacagtgtacaagagttgcagttgttcgtcttaacccaaacttggtgtgtggtggatttaagctgtatgatcctgatgacaaatgttgttgactgtcttttcctgtacttagtggtcatttgtatattttcttttgtgaaatgtacgtttgaatcttttgcccaattttaattgatttgtttattaagtgacaactcaatagtaagacttcttcagatatcctggatacaaattctttgtcagatttatgtgttgcagatttttttgctagtctgtggcttgtcttttcatattcttggtggtttttgaagaacagaaatgtatggaagcccatttatcaacttttttcttttatggttcatgcttttttatgtgctagctaagaaatatttgcctaccacaaaattacgaagtttttaaaaaatgggttttcaaagaaattttgtacttttagcccttacatttaactcagtgataaattttgagttaatttgtgtatatgaaatgagaaagtaaataaatgttcatcctctcactccatggatatcaattattcccacatcatttgttgaagaagactgttatttccctattgaagtatcttgatgactttgtctaaaatcatttgaccacatatgcatagcactgtttgtatggttatgtgaataaaagaaatgaatttatataatgcctttgaaggaaactcaagatcatgtaatccttctcaagtattataataaacatttattttcat

SEQ ID NO: 378565 - DNA, 230 bp, Homo Sapiens
acaggcgacggtggccctggcaagggcccgagatgccagctcaacgtctcttatctccatagctcgtcgggctacctcgaccccgatgtcgcgaaccatctggatcatgtcgatccgccattcctcggcccagtgccattggccgggtgcggcatcggccaaaggagccccacgaacgaggtcaagggcgctcacaagattggctagcggagccgtagatactcccccag

SEQ ID NO: 378566 - DNA, 461 bp, Homo Sapiens
  misc_feature (38)..(38): n is a, c, g, or t
  misc_feature (143)..(143): n is a, c, g, or t
agtgaatcctacgtgtaaccgttctctgtaacaaaccntagtccatggtacaactacatgtttaagtctgtaagaccttctagcaagtcaaacctgtccagtgccccggggacccgtttaacatacccttcaagacacccagnttttgccatctgtaaaatttcggtaataacccatattactcccaggattgttttgaagaggacctgaagtgtacttaaagtttttaacatgggccctaattgccatcattgtttcataaagtttttcattacttacattgttttgtgtaattacgattttataaaatgaaaacagtgaaagtttgtatactgattcttggctgcacatctgatctgtgtaagtgatttacctgggtcatagatcacattcagctttacttgataatgaaaagttgtttttcgataattaaaagttgttttccaaaacagtaaaaaaaa

SEQ ID NO: 378567 - DNA, 440 bp, Homo Sapiens
  misc_feature (122)..(131): n is a, c, g, or t
  misc_feature (146)..(316): n is a, c, g, or t
tcacttggtctctgaaataaggaaggcaatttaaagagtagcatttcttattgtcacccccagcaggcagaggatacccgctacaaagctcctaaagggaaatggagctctcctccgcacannnnnnnnnngtaagagaaggtctnnnnnnnnnnnnnnnnnnnnnnnnnnnnnnnnnnnnnnnnnnnnnnnnnnnnnnnnnnnnnnnnnnnnnnnnnnnnnnnnnnnnnnnnnnnnnnnnnnnnnnnnnnnnnnnnnnnnnnnnnnnnnnnnnnnnnnnnnnnnnnnnnnnnnnnnnnnnnnnnnnnnnnnnnnnaaagaataaagccacggacctcgcagtgagtgttacagttcttaaaggtggcgtgtctgcagtcgtttgttcctctctgtgggttggtggtctggctgactaaggaaatgaagccgcaggccct

SEQ ID NO: 378568 - DNA, 373 bp, Homo Sapiens
  misc_feature (69)..(69): n is a, c, g, or t
  misc_feature (72)..(73): n is a, c, g, or t
  misc_feature (77)..(78): n is a, c, g, or t
agccgtgggaactcttaactttatccagagggatctgtgcaggcgggggtgggagaggttctcctcccntgnnggtnncctccccctcccgggccgcccctcccccgcctcccatggcttcgctttcagagcatcctcactccgcccagttcggtgccagctgcgtgggctccagcttcgatcgttttccttggaatgctccaaaactcagcagcgactaagggaattccattggaatttgccgggcgtgctctcaccccgcacggcacccgcgccgtcagtcctcggatcccatcacttcagcccgaagattgcaactttgcaggtaaagaggatgtcgcctctgggctccgttcgaccggagctacacctc

SEQ ID NO: 378569 - DNA, 639 bp, Homo Sapiens
cggaaagtgcgcttgccacatcccttcggatcacttcgtcctcccgagagcgttctgccttctacagctcggaaagaaagaaatcttagctgtgaagtgaccgtggagaaagcgcaggaagcgacacaattggttagggaggcagagagtgtgagcgggcgcaccccttgcctggggaccgcgctcgcgggcggggacggagcatcccagtggctgcacccgccgctccgcgctcctgcctggcgtcgccaaccccgcggcggccgctggaattccagagctgccaggcgctcccagccggtctcggcaaacttttccccagcccacgtgctaaccaagcggctcgcttcccgagcccgggatggagcaccgcgcctagggaggccgcgccgcccgagacgtgcgcacggttcgtggcggagagatgctgatcgcgctgaactgaccggtgcggccccggggtgagtggcgagtcttccctctgatccttccccagcacccggcccgcgcccgctctttgggcgaaccctccgtttcctgactttgagaggcgctttcccgcccgaccgccagagcagtttcgctttttttctttgcctattatcttgactgctggataaacccatgcagggacccatg

SEQ ID NO: 378570 - DNA, 651 bp, Homo Sapiens
  misc_feature (529)..(529): n is a, c, g, or t
  misc_feature (551)..(551): n is a, c, g, or t
  misc_feature (562)..(562): n is a, c, g, or t
  misc_feature (613)..(613): n is a, c, g, or t
  misc_feature (622)..(622): n is a, c, g, or t
  misc_feature (635)..(635): n is a, c, g, or t
ataaatatgttaataatttcatcctgaagaactttcctgctttattgagtactggggagtttctaaaactcccttttgaacgacttgcatttgtgctttccagtaatagtcttaagcactgtaccgaacttgaactctttaaggcaacctgtcgctggctaagcttggaagaccctcggatggactatgctgcaaaattaatgaagaacatacgatttccactgatgacaccacaggagctcatcaattacgtgcaaacagtagatttcatgagaacagacaatacctgcgtgaatttgcttttggaagccagcaattaccaaatgatgccatatatgcagccagtgatgcagtcagacagaactgccattagatctgacaccactcacttggttacactaggaggagtactgaggcagcagctggttgtcagtaaagaattacgcatgtatgatgaaaaggcacaagaatggaaatcgttagccccaatggatgccccaaggtaccagcatggcatcgcgttcattgnaaattttctctatgtggttggncggacagagtnattatgatacaaaaggaaaaacggcagttgatacagtcttcagatttgaanctcgatacnataaatggatgcnagttgcatccttaaat

SEQ ID NO: 378571 - DNA, 546 bp, Homo Sapiens
ctagactgacttattcattatagcactactaaatttaactgccagattaatattaggggtagtgttgattttccatgtttattaataacgatgatccataatagaaggcaagatttatttagagactaaatatattctaatacttagaaatcaacttttatattaacaaaaacataacccacaaatactcatgagaaaatactttgtctactttgccttatcaataagattctttataactggaaattcttagtctgcctacttaaaaaataaatcgtccatatttttaaaaggctcttaagcaaaattcttaactttcttataatttttgaactttaagccttcaaaaccagtctgcatccccaattcacaaaattgacagttataaaaggacttgaatctgcctggcttaccaaaacctaaaacacagcctgaagcctcttaggcccatctaccagcgcagttcacaggcatctgcatgaatcacctgggactgtgtttaaaaagactcacggggcccaatgcagatctactgaatcagaatcc

SEQ ID NO: 378572 - DNA, 499 bp, Homo Sapiens
  misc_feature (422)..(422): n is a, c, g, or t
gaaaggttcggtgctggaccgcggggcatccaacccgggaccgggggcgacccacggacactgaggaaactaccgcctataagcctatcatcagaacctctggcacaacacaggccagaaacaccagcatccaagatgaaggcaattttctgtttatggactgagtaccccacaaaagatcttattctgaaggccatggaacatgtctacccacatggatcaagtgggcagactggaggagaaacagtttaaaggccctgggggaaggagggagcgccagggagagctcctgaagacaacaggaattccaagtctggcactcgggagaaatcctcccttcagacattattgatgtctggccgaggagttaggaaaaacttccttgaaggagggattgaggttgagatgggcatggaacccanatcttaggcagagaaagcatattcctgtttggaagaaccctgagtacagaagtcagctcaaagatatcagcttggcc

SEQ ID NO: 378573 - DNA, 193 bp, Homo Sapiens
gcactgctctattttagatagagattcagtggggcaaaacctgagaattatctgcccggctagcaagaagatagctccttgcatttttgcggggagagcacttttgcttcaagggagtgtttcttcccaggattataaatctttctgtaacctcaggaaacactgctgatgaaaaccaggcatggtggctctg

SEQ ID NO: 378574 - DNA, 894 bp, Homo Sapiens
  misc_feature (153)..(357): n is a, c, g, or t
atgagagacagctttgcaagggccatttcaacatatgtcaaggaaatatattttgaggtaaaatactttgattccttcggggctactatgtgtcatgtgatgctataccggagtcccgttgaattgggtatcttattgctacagagagtctgnnnnnnnnnnnnnnnnnnnnnnnnnnnnnnnnnnnnnnnnnnnnnnnnnnnnnnnnnnnnnnnnnnnnnnnnnnnnnnnnnnnnnnnnnnnnnnnnnnnnnnnnnnnnnnnnnnnnnnnnnnnnnnnnnnnnnnnnnnnnnnnnnnnnnnnnnnnnnnnnnnnnnnnnnnnnnnnnnnnnnnnnnnnnnnnnnnnnnnnnnnnnngcaggatttgatgggcatgcatatttatcaatgtgaaagtgttgtctgtgggcggcggagggcttgggccgtgtccaggccacgcactgcaagggtgcagcccccacacacggtccctgctcctaaagctgttgcccccactgcaagagtggagtaggttgaggtgtagccatgacattctggaaactacattttttgtaatagtcattttgaaaataaaacatttgaaaatactgtgcagcaaaaacttgaataattggaataaaaatgttcagtttaatgtcattgcttgctgccaccgttttctgattgtaaaactaacgtgattattaggtactattttggtaatgtagaaaactttaaagatgaaaatagatatcacttataactccacatggagaaatagttgcccctccaatttaattgatttacttttgggccacaggggcccagaatttgattcattgtactccttggttcatgccagtgttcctgcacccagcactgaagctgaacattgacagtgatttgcccctg

SEQ ID NO: 378575 - DNA, 257 bp, Homo Sapiens
  misc_feature (87)..(88): n is a, c, g, or t
tggcttgacctgtgctgcctcagagagaatcaagtaatgattggtcagcgtctgaattcccacaccccactcgatcctatcgagaanngggtaggatttcaacgtagtctgtcggaaacaaccctcgttatcctttaatatttcttccttccagccatcatccacatacatacggatttgtgacacacaccatttatccttcatcaaccgacagatcatgatttccaggttcagcagcaaaatcatacataacccga

SEQ ID NO: 378576 - DNA, 505 bp, Homo Sapiens
  misc_feature (474)..(474): n is a, c, g, or t
attcatcttccaggctctgcgggcatcaagtctctcctccctagcgctctgggtccttaatggcagcagccgccgctaccaagatccttctgtgcctcccgcttctgctcctgctgtccggctggtcccgggctgggcgagccgaccctcactctctttgctatgacatcaccgtcatccctaagttcagacctggaccacggtggtgtgcggttcaaggccaggtggatgaaaagacttttcttcactatgactgtggcaacaagacagtcacacctgtcagtcccctggggaaggaaactaaatgtcacaacggcctgggaaagcacagaacccagtactgaggagaggtggtgggacatacttacagagcaactgcgttgacattcagctgggagaatttacacacccaagggaacccctcaccctgcaggccaggatgtcttgtgagcagaaagctgaaggacacagcantggatcttggcagttcagttgcgatgggcag

SEQ ID NO: 378577 - DNA, 574 bp, Homo Sapiens
ttagcgtggtcgcggccgaggtacgcggggcttttcctttcatgtaatgtctgatttttatgtggaagagaatgtaagtagtgctgtataaccctgcggatgctatgccctaagagggaaagcaaatatttgcaagtcaaactgaaaaatgtccagaccctgtactgattaagtagaaggggaatctaaccactttgcatttgaaagaaaatgcagcatatagcctgaggaagaacttgatcctgaagagagggacaacttcctccagcagctttataagtttatggaagacagaggtactccaatcaacaaaccacctgttttgggctataaagatctcaatctcttcaaactcttcagactggtttatcatcagggtggatgtgacaatattgatagtggtgctgtatggaagcaaatgtatatggaccttggcattcctattgtgaattcagctgctccctacaatgtaaaaactgcttataaaaagtatctctatggttatgaggagcactgccgttcggcaaatattcagttcagaactgttcatcaccatgaaccaaaagtaaaaaaa

SEQ ID NO: 378578 - DNA, 613 bp, Homo Sapiens
  misc_feature (553)..(567): n is a, c, g, or t
tttttttgccttactttcatgtgcaatgagaattacttaagaattggtaacgcatgtagccttttttagtaaccttggaagctgtagaaattctaaggaatcatgaaccttgcctggacatttgccacctaaacgatcagtgtggtgctgcgttctggcccagtaaattccatgtttttggcctatatcctcatcccaaactgagcagtttcctgtgtatatatagaaggtagaaatgaaaagtgagaaaatatttgaaagggattatattaattgctaaatattttattcacaaaggtcaataacatggcaagataaaattatttgtatagttttgtctgaatgagcgagaaaaatgtggatgtactgtttgtatatattgtatatattaaaacagatatgtgcatgaaatcaagaaaaaagaaatgaacaaaagcaaagcattagtggctatggtctgtaaaatgaaacaaaaaaactttatttcactataagagtactttattttaaatgttctttaggagaacattttctaaagcatgactaaactgcnnnnnnnnnnnnnnngagctactgtatttagacttaggaaaaaaggcagagtaacattact

SEQ ID NO: 378579 - DNA, 558 bp, Homo Sapiens
  misc_feature (38)..(38): n is a, c, g, or t
  misc_feature (45)..(45): n is a, c, g, or t
  misc_feature (59)..(59): n is a, c, g, or t
  misc_feature (89)..(89): n is a, c, g, or t
  misc_feature (235)..(235): n is a, c, g, or t
atgtcttggtaataggaaaccttccttgtaaggcagcnaattccnagccctgttaacanaaattttatcctaggccccaatgccaagtnagtgtcccccatcatggtggcttatgaagctcacggcttgaagattccagaaggtccctggtctccccatgcccaagggatgccatgtagcccccagctggaagtgacttccgcaggaattgagagggaatagctcacccctcatntccgtcctccgggacttaggaaccagtgaccttggctgcccaactgtgtggaggctgagtgattgacaaacacaggttggctcattcttgctgcaagagcaggtaccccccgccgcccccctggaaagcacaagtgatgagcaagaaggcattttccttgggagagaaggggaaatggaccctgacccccttgatccccaaagaagctgcgccccacctttccagatacccacaaagcccccagacagaatctagcatcgggactattagcaatggcttccagaatgtgcttgggtcccacgtgactgatctgacaaaaaaaa

SEQ ID NO: 378580 - DNA, 525 bp, Homo Sapiens
taaggaatgccgctagctcagggccgtctccacgcactgtgtccttcagtccctgggtgccacatggggggttaccacagtgggaagataactcctaggctgtcagaaagaattctgtgtcttccttcttgccatctctctctagcagtctgcagaggaatgcattctcctagattttcccctggggagggtgggcttgcttcccaggtcactgggagcaagaagaaggtcaccgttaggaaaggaatcctgcagcctttcccagaaaacaggaaggcggcgcctctcccagaactccttttcctccctactcctgcacagtggctaatctctctgccaatgaaatctaaccctcacctcttgaagggtctctgttctccagcaggaggcagaagaactcgcagaaaagccaccttcaaagaagtactcattttctgccctgaagaaccagcctcagctgcagcatttcagtcccctctcatggaggagggggctttgaagaatcatccctggggtttctaccca

SEQ ID NO: 378581 - DNA, 700 bp, Homo Sapiens
gcctgggagctcctgtcggacagctccaactccagctgcatcacctgggaaggcaccaacggggagttcaagatgacggatcccgacgaggtggcccggcgctggggagagcggaagagcaaacccaacatgaactacgataagctcagccgcgccctccgttactactatgacaagaacatcatgaccaaggtccatgggaagcgctacgcctacaagttcgacttccacgggatcgcccaggccctccagccccaccccccggagtcatctctgtacaagtacccctcagacctcccgtacatggggctcctattcacgcccacccacagaagatgaactttgttggcgccccaccctccagccctccccgtgaacatctttccagtttttttgctgccccaaacccatactggaattcaccaactgggggtatataccccaacactaggctccccaccagccatatgccttctcatctgggcacttactactaaagacctggcggaggcttttcccatcagcgtgcattcaccagcccatcgccacaaactctatcggagaacatgaatcaaaagtgcctcaagaggaatgaaaaaagctttactggggctggggaaggaagccggggaagagatccaaagactcttgggagggagttactgaagtcttactacagaaatgaggaggatgctaaaaa

SEQ ID NO: 378582 - DNA, 577 bp, Homo Sapiens
  misc_feature (288)..(288): n is a, c, g, or t
gatggttctgctttgaccgccaagcccgccgcttggcctactatgcggacaaggaagagaccaagctcaaaggtgtcatctacttccaggccattgaggaagtctattatgaccacttacgctgtgccttcaagagccccaacccccgcctgaccttctgcgtcaaaacctacgaacgccttttctacatggtgggctccgagccccgaagccatgcgcatttggatggacgtcatcgtgacagccgctgacgaaaaccacgccccctgagtgggccccgccctcttnggggggaagtcccttcgaggctccgccggcgcggggcgcgggggcgttcctaggccccgcccactgccggaaaacttggacgcaccgctttggaactctcccgggaattccgcaggcgcggcagttcagctggcctgagctgctgcgttctgggttgcaggtgccttgcccccgacgggatcgccggcccctaacgccctgcccggggcaggaggaagattgcaggggcgggaagaaactatttattggtgctcctgtgataccgaattaaatacggaggaaaaacagg

SEQ ID NO: 378583 - DNA, 724 bp, Homo Sapiens
  misc_feature (519)..(537): n is a, c, g, or t
  misc_feature (571)..(611): n is a, c, g, or t
tgagctggcctggcctgcctttcagtgactaggatggtctgaaacgtgtcgggatcagcctgctaggaagacccagcaggaaggggacctctgcagagcttgatggaaaaaagtaattaggaaaaagtaaaatggttttgtttcagagcccatggattcgagattctccaataaactggttctacaagtaaataaatgatcaagataatttgaggcagtgcagatgacaaaacggagctgagatgggtgttgatttgtggggtaactggtttggggggataggaaggactatgagaagaagggacatttgcactgagattcagcaagaaggtcagcaagtgcaaaggccctgaggcacgaacaagcttggaacatggaggaacttaaggccggtgaagacataccctggtgtgtgccggggaaggagaggaaggtgagatagggagggtccacagtgggaggaatttctattttattccaaaggcaacaggaagccagaggtggatggacatcagagcnnnnnnnnnnnnnnnnnnngagagcctgggtgacagggtaagactccatctcnnnnnnnnnnnnnnnnnnnnnnnnnnnnnnnnnnnnnnnnnaagaggcatcagaagcccagccagagcttgggagttacctgatgtgcagggggaggccgctgaagggtgttggttgagggagggggtgatgtaattttggagttggagttaag

SEQ ID NO: 378584 - DNA, 683 bp, Homo Sapiens
ggatttctgtaaaagttgccataaaactttgaaattctgcctgaaaaacagtcccgtgggaagctgggattcaggaggagggggctaataaggtctctgactgagatttgggcaactgttaaaccaagtaatctgggtttttgcggcccgcggtcgtctgcgggacacacccacatatagcagcagcgccggggtccagccgccaagctcttccactcgccacgcccccatcagtaatgagcttccactagccacgcccccatccgtcagcctagctcttccactagccacacccccatccatcagtcatgggcttccacaagccacgcacctccactctccatggcccccattggtcagtcgtggggtttccactaaccacgcccccattcatcagccaagctcctccacttgctacgcccgcatccgtcaattacgggtttccactaaccacgcccccattcatcagcctagctcttccactaatcacacccccacttatcagtcgtgcttcagccacgccttcctgcttcagtcaggggcttccactagccacgcccccatgcatgagccacaaactgtttctctttatgggcatcctgggaacacaaaagagagacgttcatttgcctgagccaaagagctggggttgatggggtttcctaaataaagcaagtaatttt

SEQ ID NO: 378585 - DNA, 475 bp, Homo Sapiens
  misc_feature (465)..(465): n is a, c, g, or t
gtcttgctcctgcctccctacctggcacccaggccggccctggtaccctggtactgaataaaggcacacgtctaaatgatgtcggggggaatctgcccagtgttggcactggagcgaacacgacccactgccagcatggccacgagccacacccccccaagccagcacctcctccccagaggaagcacggggctcgacggggcacgcccctgaatgggaggtcacacatggtgagggctcccttgttcccagaggtctagctgtctccctgctaagatgcagagctcactatgggcctcgcagggggttaagccgagtcatttcatctttcacagcagctgtaggtcccgcttgacattagctggacacattaggaggagcttaaagttgacctgttgcaaaggttcacagggttagggagttaggcaggcacggggggcccagcaacgagggaacagctttagncttcccccgg

SEQ ID NO: 378586 - DNA, 664 bp, Homo Sapiens
  misc_feature (650)..(650): n is a, c, g, or t
agagagccaccagaagcaagagcttgaatagttgccagtgtactgttgctcattagagctgggctgagagcaccgctcagggtccctggattcagactgagtaaggcacctccagccgcaaactgtgagggtgccatcaggcttgggtttagtcctgcagcagctgccatggcagcaagactggcatttgctggcaactgtgcagctccttgaagggcagcagctgctgctgtttgcaaacctgatgctgtcaccatcacctggctggtcccaagaggggaggacaaaggaatggaggtggtcctgtgttgtgctggtcctcactggcactggatgcctcggaggtggaggctgaggcagaaggggagggactcagagagggggacgtgactgctgaggaagctggaggcgctgtggaaatcacggttgctgtgttgttggaggtggtgtctgaagtgcctgtaactgaaagattcgtcacagcagcactggtcagagggaggacagggctgactgtgagggtagttgctgcactgctagtcacaaggcttggtgtggtcgccaccagtgaagttgggctggggaaaattgctttaataggtgagctgctggtcccaccactgcttggtgggttgattcttttttctttnctggcggcggttac

SEQ ID NO: 378587 - DNA, 742 bp, Homo Sapiens
  misc_feature (247)..(272): n is a, c, g, or t
ggggagaagaaaggcttagggttgctgattatttacagctccaagccccgggcaggtacacagaattaaaggcctcccaccactccaattgcatttaattttattccgaaaatgactacctgccaataagcctcattgttcaccagcatctctgcaagtactttgaggtactattacccgagttcacttaacaccgcttgacaactttaagcagataacaattgaggtgctggtaatagagtctggnnnnnnnnnnnnnnnnnnnnnnnnnnaccacatgactttatgactctctttatcaagcgtgttgaaattaatccatgtgttgattggagtatttcctcacccctgctgtgtattgagacgttggggagggataagggttggcggctctgagcagctaggtattccggggcaatgggtggtcctaagtccggagccttgggagttggtcagtggtgggtttgtgttgagcctgcagaagtctgaggtgtgtgtttggaggggagaatcaagggatggctctggaggactgccttggcaggtaaaattatagttcccatatgaagggaggatgcaggagctataatcccatctcgttgccagtcaaagttcctacagattcatggcagagctgtctgtgcaagcaggaatccaattttatgtccaaacaaatgcagcatgcagattggactgactgcttccccgagaatagcaaagacaggcattcaggtcagctggc

SEQ ID NO: 378588 - DNA, 498 bp, Homo Sapiens
cagaattcatatccccaaatttgaatgttaatatatttccaaaataatctggacagcaaacagagtcttgaaatgccatctcaaacattctttagaaaattgttaggagggcaaaaagtccataaagtatggcacaagggtaggcaacaagaagctgctgtccttccatgtgcaaggctgcaatgaagatcttggaagctgagagactacaccagccaatgatgaccagggatgacatgattccaaagatgccctgcagtgaaaagaacatggcgcagccagacaggatgaccatggggagcaggcagtaacccagcacgctggccacacagccgtacgacacccctgaagagctcatcaggttcagcaaggcatgaatcacaaggcagccaatggcactcatgccatacacataaccaaactgaacttttcctgccagaagcaaggtggctcccagggctacgcaaaaaagaatgggtccagtgaggtccgtttcat

SEQ ID NO: 378589 - DNA, 645 bp, Homo Sapiens
  misc_feature (459)..(487): n is a, c, g, or t
aattcggaacgagggggcagtaaaatgacatccacgtgttcctgtcggacgcagcggcttcgggaacaagttagcgctgggggactatctgggctcgtctctctctcttcgtgaacccaccacaccagggcctgtctgctgtgctatttatttgccttccgtcttcccaacctcagctgcctgtattcatgccagaggtgcaaaggctgccagccagtgctgctgacagatgctttcagactgtagagctcagagaaagggagcggcagctagaggtagccagggaagctggccaggctccccggggccttcctattatgtaaatcccagctggacagacagccccgggagccaggtggccctgtcccctgtggagcacttggagcagtgatctgttgttcccaggtgtaagtctcgacactgcactccagctggagtgacagagcccaaactccgtcnnnnnnnnnnnnnnnnnnnnnnnnnnnnngacatgggagagatggtgtttttcctctccaccacctggggatacgatgagaagatggccacctgcaagccaggaagacggccctcaccagacaccatgtctgctggcaccttgatcttggacctcccagcctccagaactgtgagaaataaatgtgt

SEQ ID NO: 378590 - DNA, 821 bp, Homo Sapiens
  misc_feature (157)..(157): n is a, c, g, or t
agaagcccggaccatgaaaagtctttcctcagctcccctgcagtgaaatccctataaatgcgaatcaccctgcctactccttacctttaaaaattacttagggtgagggggctttaggatgaggacagccttggcctccagggggctgtggggaagnacgcatgtgtgtgcattgggggcagatgttccagaccctcgttgtcctccctggctccttgctggtattgactagtggggctgggcatgggacaggccttcatactgggggtaccagtcctgtccagctgtttgggtctctggctgtcactgaagttcttgattccaggtatttgctactggctgtgaaatccccacttaggatagccttgtctcctgagccaggccccttactgggacacttttggattcttccccaggagaactgcctcagctcaacaatccagctgctccttccagatgtgctagagcttgccctcctgctcctaggctgcatgccggaattggtccctgcccctggcagacttctacaggacctcagtttctctcttctccttccaaccctctcttggcctggcatatccctctatctcccagagggagttcccgtatgtcttactctccttctccagggaattgtaagccctcaggctcagcctttacaaagaaaagggtatcctttctacattacgaaagacccccattaagcctgcaggtgagacaggtgagactgttaacctaggaactgagggacaactaggaaccaggatattgaggaggacaaaatatttggcatcctcagaatatcctgtgccgaatctcct

SEQ ID NO: 378591 - DNA, 860 bp, Homo Sapiens
tttggtttacaagatagatgggatgggagatcgagagcgcctcagaggacaaggagagttgtagggtgatgttactggagagagcctcagagcattgcctgccaagcccgctatgttgtttaagcttcgggatttttcatatcctttcctgatccctccatcagaagcacacgtgtaatcacctgtcgtcagtaggaaacatgtttcccctcttctgtttttgtctctggtactagagcgtctgatggggagcctttctgggggtgatagtggcggctcacttcctgtactgtcgtcacctgataacactgatctgttatgttccagaagtcgattgtctttgcccagacatgtgtcactctgtgtactattgcaggccatatttaattctgtcttgcaaaaagtaggtgagcttgcctgaggagcaggagggatgtgcttctttcttttccttggaagtttctgctttgccattgccaaggagtagtacattccaaaattattgacaatgacaggcactggcatggctattgtcagcactccagccagagcacacagggctcccaccagcatgcctgaccatgtttgggggtacatatccccataacccagggtagtcatggtcactacagcccaccagaacccaatgggaatgtttttgaactgtgtgtgctcactagctgaagggtcgttaggttgagctcccactctctcggcatagtagatcatggtagcaaatatcaaaactcctagagccaggaaaattatcagcagcaaaaatttcatttagtacttagcttcgaagggtatgttccaaggcaccctcagaccttacaaaatgggccgggtgagcttggaaa

SEQ ID NO: 378592 - DNA, 529 bp, Homo Sapiens
ctcagcgtaacgcccttgaaatgtatccgggttgttgcacgtatcagtagttcattccttttattctatgatatggatgtatcatagtttattcagtcattcaccttgtgaagagcatctatctgatctgattccagtttttggctattatgaataaagctactgtgagcaaacatggttctaaagctgcctatgaacaatcaggttttggtgtagatgtaagttttcatttctctgaaataaatgttcacgtgtgcaattgccttggtcataaggtaatatcatttttggttttgttaagaaaacatcatacactttcccacaataccattttactatcaccagcaatgtgtgagactcggtttctctgtatccttgtgagcatttggtgttgtaactatttattttaactatgccaaaagttgtgtagcttgtgttcttaatatccattttcctaatgcctgatgatattgaacatatttccttgtgcttttttgccacttccttcaataaaaaatctcctcatttt

SEQ ID NO: 378593 - DNA, 458 bp, Homo Sapiens
  misc_feature (27)..(27): n is a, c, g, or t
  misc_feature (48)..(48): n is a, c, g, or t
  misc_feature (54)..(54): n is a, c, g, or t
  misc_feature (71)..(71): n is a, c, g, or t
  misc_feature (82)..(82): n is a, c, g, or t
caggccctacaacaacctttggggccngggttaaaaataaatgggttncaaacncccaaatgcctccacanggaatacagangaaacccgaagtcctccacacattgctgggtgaatagtaaaagggtattgtggggaaagtgtatgatgttttccttaacaaaaccaaaaatgatattaccttatgacccaagcaattgcacacgtgaacatttatttcagagaaatgaaaacttacatctacaccaaaacctgattgttcatagcagctttagaaccatgtttgctcacagtagctttattcataatagccaaaaactggaatcagatcagatagatgctcttcacaaggtgaatgactgaataaactatgatacatccatatcatagaataaaaggaatgaactactgatacgtgcaacaacccggatacatttcaagggcgttacgctgagtga

SEQ ID NO: 378594 - DNA, 441 bp, Homo Sapiens
  misc_feature (418)..(418): n is a, c, g, or t
  misc_feature (427)..(427): n is a, c, g, or t
gcttgattcttcctggcaagtgggacagggtgagcttcccggagaggggaccttcgagctgtgtagcggggaaggtaggagagcgatgagagcgcccggaagactaagcattcggggagactgaagcgcattcaacaacatatttattgagcacctactacgtccaggcactgttacatcggtgatgtaacaaaagccgacaaaaaccctcaccccgagcgcaggcaccgcagagggcgatgacgacccgagaagatgccgaacgcaggccaggagggggctctggggaaaagcaaaggcaggggaggttgcccatcggggagcctcgcgtccctgggccctccgtactctgcacatatgcagaggcccccacccgtcctgttaaccgcaaacttgctttggcgttgactttggccancggagggtnggagcccagggttt

SEQ ID NO: 378595 - DNA, 479 bp, Homo Sapiens
cccggccgtatttctctgcaaactccttaaacgtggtcctgggagacactttagattcctctagaagtttcttgaattcttctttggctagcagcaatttacttttcttttccttgtattcttcttttattcttgtcttgacaaactgttcaaatatctgctttcgttcctcagagttgagcaggagatagcgtgggtcaaacacgattttgtgtaattctttctcccaggtagaaaatgctgatacccctctctccagcagcatgtctcggaagtgggtcacacgctcctccagaggcaggaggatctgcgggggcggcgtccttgtgcctttgtcctctctctttgcctcctctggcttgggactcccgcagccttcggtccggttcctcttggttttcacatcttggtcttccctgttgtcttcagaactggacccatcgctgttgtcagttgctggtgcctccagcttgcgtttg

SEQ ID NO: 378596 - DNA, 226 bp, Homo Sapiens
  misc_feature (13)..(13): n is a, c, g, or t
  misc_feature (115)..(115): n is a, c, g, or t
  misc_feature (191)..(191): n is a, c, g, or t
  misc_feature (193)..(193): n is a, c, g, or t
tgggccttggctntattgatgctgcagatgctgctctttgtggctggggaacagggcacacaggatatcaccgatgccagcgaaagggggctccacatgcagaagctggggtctnggtcagtgcaggctgcgctggcggactgggtggccctgccctgtctctttaccctgacagccacggccaagcgtancngtagatgcccctcggataaagtggaccaaggtg

SEQ ID NO: 378597 - DNA, 522 bp, Homo Sapiens
  misc_feature (35)..(35): n is a, c, g, or t
  misc_feature (39)..(41): n is a, c, g, or t
  misc_feature (401)..(401): n is a, c, g, or t
  misc_feature (409)..(409): n is a, c, g, or t
  misc_feature (458)..(458): n is a, c, g, or t
  misc_feature (483)..(483): n is a, c, g, or t
  misc_feature (490)..(490): n is a, c, g, or t
  misc_feature (511)..(511): n is a, c, g, or t
acgctcccagaactgcctcagacctgcccctatanaaannnagcccagcagcgcccacccagccaggccctgccccctctgtggtcatgggccccccagtagagtggccctcccctcccacaggcttggagggctgagtctgtctctggggccctgtaaccatcttgctccagtgtctctaccactgcaggggcatctgcttcccatgctggaaatcagccaagtctcccctgtgccgctgggccctgttcctgtgtcttctctgtccatgtgggtttgcctcccccttgaaggtagaattcacagttctccatcccaccctcttcgtgccagcgcagtgcctgacacatcccctacgtccgtttctgaagagggaaaatggggcagcagagggtgttccngggggttnctttgcccaaggctgttcagttaacctttgcaggcccagaattgagaanggagggattgataaccccattgacntcaaagntgttcaataaggggagggttncagatgattga

SEQ ID NO: 378598 - DNA, 404 bp, Homo Sapiens
tatgcctcgctccaaaaatgccgggcaatccaagaagaaaatgttaaaggggagaacaattttaaattgttggaaattttagggatttcagacagacagtaacactttgtaggaactcactggcggccttcaagagagtagtttcagcaagatgccctggaggaccaaaagcccagagttgaagtgttgagtgggcaaagtcagtgcggttaaaaataagagagcagttcagcgaggtgcctgggccacgggagggctctttgtcaccaagatgagacgtaagtatgcttgcgggtcaagataaagaatcaatagagtggttagagaatgaagaagtgagtaaacagatgctcgatgcagcaacattcatttgttccattgaagatggaatgagcacgtattac

SEQ ID NO: 378599 - DNA, 430 bp, Homo Sapiens
  misc_feature (155)..(155): n is a, c, g, or t
  misc_feature (384)..(384): n is a, c, g, or t
  misc_feature (389)..(389): n is a, c, g, or t
  misc_feature (401)..(401): n is a, c, g, or t
attcggaacgaggtcacatttggtgccaggctgtattgcttcttctcactggtgagtggcagctgtgtctcctttctgccagtccagcagtcccagctgtcagtggcacctgcataatgacacgtctgcatttccccccaatcagcgtgcagcgnttttgggaggaggaatgcgactgcatggcgcgctcgctgcaacctcagtctgcagcctgctagggacgcacggccacactcctgtctttcagcctcagtctgcagcctgctagggacgcacggccacactcctgtcttttcagccttcagtcttgcagcctgctaggggacgcacggccacactcctgtcttttcagcctcagtctgtagcctgctagggatgcacggncacgntcctgtctttgnaggttgctgtcagaacagctttgtgcctt

SEQ ID NO: 378600 - DNA, 335 bp, Homo Sapiens
  misc_feature (295)..(295): n is a, c, g, or t
ggaaaaggaagttactctaatccacgtatgttaagagaatattgagttttcttagttgtaaagttggggagatggcaccttctcagaggattgtgaaaatatgaggaagaaacaaaacagtgcatgtaggagcacagggccacacaaaggcattctattgttatgctcattctgcttctgtaatgacttttcataggtcattcttgtgaaccattttgttttgcaagcaaccaaggaaagaacatcttaagtgggaaaatcagtggtggttgtgaacacttaggagaatagccantccacaggccaagaataatggtattgttttgtaggagctt

SEQ ID NO: 378601 - DNA, 548 bp, Homo Sapiens
  misc_feature (501)..(501): n is a, c, g, or t
  misc_feature (509)..(509): n is a, c, g, or t
  misc_feature (513)..(513): n is a, c, g, or t
gtgattctcaatagcaggctctgtttaatggcaataatattatcttctgctgctgacatgccatctccttttttaaaccgagaatatttggctgtgttttcctctacatgcggcgccatttcagacagaaaggagtctccagggcctgtgacctgggaaacgcagagccagcagggaggcaggcgaggatttacccgtgagcgaggtgacatggtgacatggtctggagaaggccagaaagccaggagggtggagtgcccaggggcgggggtggcggggagttgggaggaagagggagatttttgtaccaattcacttcaattttttatttcagcaagcagcagtgggcctgtgaagttttcaaagtgccccaggcatttctttctggactcaatatattaagtcaaagaaagtagcaggtctttaggtgcccaatgaagtggcatttaagctatttctcttttgcaaggcctccttctctgtaaaagcaaatcccagccnctcactcncttnaagcaatgcagaacgtctggtcagcaaacatgaaa

SEQ ID NO: 378602 - DNA, 474 bp, Homo Sapiens
ctcatcgacttgaaactgtttaaagcccggcaaccgatgcccgcccattgccacgcgaagctaattttgcacggtgccgatgctgtttatatcggcggccctggttttggtgcccgtcataatgccagtaatagcttgaaagatattgccgagctggtgccgtttgcccatcgttatggtgcaaaaattttcgtcacgcttaacaccattttgcatgatgatgagctggaacccgcgcaacggctgattactgacctctaccagaccggtgtcgatgcgctgattgttcaggatatggggattctggaacttgatattccgccgattgaactgcacgccagtagcagtgcgacattcgtacagttgaaaaagcgaagttcctctctgatgttgcttcacgcagattgttggcgcgagagctgaatcttgatcagatccgcgcgattcaccaggctacggacgcgaccattgaat

SEQ ID NO: 378603 - DNA, 477 bp, Homo Sapiens
  misc_feature (16)..(16): n is a, c, g, or t
  misc_feature (43)..(43): n is a, c, g, or t
  misc_feature (86)..(86): n is a, c, g, or t
acacaaaatttctgangccccaccctgggaaaaacgggtgggnccccatcgcactccccaaacctgtgctcccattcaggccttcnagtcctgcttcccagccgcccgccctagggggtccctgggggctttgggtttgtggtggacgccccctgagtatgtcccttgtgcttgtgtggcaggtttggtttcagaacagaagggccaaagagaaacgcctgaagaaggatgcagggcggcaccgctgggggcagttctataagagcgtcaagaggagccggggcagcagcaagcaggagaaggagagctctgcagaggactgtggggttagtgacagtgagctgagcttccgaggtgagcagggctggaggggccagccgaggccttaggaaagtcccctgggaatctgtaatccctggcactcaggagggatctttcttgaggccttggcaactccctcctgaacacaggcttttc

SEQ ID NO: 378604 - DNA, 316 bp, Homo Sapiens
gcatgagtcaccacacctggcctggtcatttacatttttgccagaatgaaagataagcaaaagttacacatgcacacatatacatacatgcgtgtgtagagattataggtatatgtgtatgggcatgtatgtatataccatttgtattgtcctccattttaactccttattttgcccatatttttgttgtctctcctaagttattttttggagacgggatcttgctctgtcacacaggctggtatacatggggtgagatcatgagctcactgtagccttggaactcctgggcctcaaaagatcctcccatctaaag

SEQ ID NO: 378605 - DNA, 480 bp, Homo Sapiens
  misc_feature (460)..(460): n is a, c, g, or t
gaagcatgattgtgcactagtcatatctggggactctctggaggtttgtctaaagtactacgagcatgaatttgtggagctggcctgccagtgccctgccgtggtttgctgccgctgctcacccacccagaaggcccgcattgtgacactgctgcagcagcacacagggagacgcacctgcgccatcggtgatggaggaaatgatgtcagcatgattcaggcagcagactgtgggattgggattgagggaaaggagggtaaacaggcctcgctggcggccgacttctccatcacgcagttccggcacataggcaggctgctcatggtgcacgggcggaacagctacaagaggtcggcggcactcggccagtttcgtcattgcacaggggccttattcatcttccaccatggcaggcttgtgtttttccttcagtctttcttactttcggcatccgttccntttgtattcaggggtttcct

SEQ ID NO: 378606 - DNA, 534 bp, Homo Sapiens
  misc_feature (478)..(478): n is a, c, g, or t
ggctgcagtggctggcctggggagccaggggagagtcttcacgtcccagcagttctggtgcagaggcagctcagttggattattcgtcccggttcctaatgaaagtgaaagctgctggtacctgccagccctctcttggcacacagcgagctgaaaatgcagagactggagaacgttgccaccagagtcagcttgtcctggtgcagctcagatttggagctgagggttatcgatgcattggtctatcttattccaggatttcctaggcttcagttatctcccaactaggaaccacagctgctccttcctaacctggtccctccttgccaatctgtggcctgtgctatcagcagaacccctgtgccggacatagagctgcccaggtcagaaacccaaacctttccacagggacacagtcagatttgaggtatgggagatcccacagccagggggtcagggcggatgcaggaaaccaggncaggaagttgtgggtgttcatttaagcaagagacagacattggtgaacacagggag

SEQ ID NO: 378607 - DNA, 651 bp, Homo Sapiens
  misc_feature (31)..(31): n is a, c, g, or t
  misc_feature (70)..(70): n is a, c, g, or t
  misc_feature (86)..(86): n is a, c, g, or t
  misc_feature (101)..(101): n is a, c, g, or t
  misc_feature (115)..(115): n is a, c, g, or t
gaacccaagatcaaacaaagggagggacctnacctgaaaagactgttgccgctactccagtaaccgcacnaagtaaaccatcctgnacttcaaaagcagtnaaataacacaagcnaccctccctctgacaagggtgggaagcacagcacatttaactttatcactcagcgcacatggtattggactggtacatcaaggtttgttaggttttgttttcagcaacattaacataatatgacgttaacatataaaaatatttctggtgttttgatttgctgttcagccacaatccattcccaatagtgcagcttggggcactagcctagggttcaatatacaaataaaagtggctgcacacagagttcctgatgtcaccagatgcttaagatctcattcattaatactgtgactccagacaaatatttacatgcctgcatgcgttaaaaccagaaagacatctttctgaccaacagggtgacaaaacatattttctaaaattttcattttcctaaactctagtatactactgcatacataataccttccttgtgtgttttatgtttatatactgtacatatgaccaacagtttgaataagaagcaacattattatctttaattctatataccactaccagtttggaatgaaaac

SEQ ID NO: 378608 - DNA, 488 bp, Homo Sapiens
  misc_feature (21)..(21): n is a, c, g, or t
  misc_feature (27)..(27): n is a, c, g, or t
  misc_feature (238)..(238): n is a, c, g, or t
  misc_feature (356)..(442): n is a, c, g, or t
  misc_feature (478)..(478): n is a, c, g, or t
aaaaaatccctgtgttagccnaggccnaaactcctcacccaaaatcccaaaccctttcccgagggcaagattttaccaggaacattcaccggggctggtaacctctcccatttctgtgtcagatgttcatagctgagtaacagataagcaaggaaaaaagagcaagggtccgaccctaatctttatccaacacaattacccaagagggccaagtggctcatgtgggatgtgggtaccnaagcttgagggctcagggtcacttctggaaacaaagctgacaggctgatggttcttactgacctgtcatagcttcctcagcagtctttcatcctaactgaaatatgacccactatggnnnnnnnnnnnnnnnnnnnnnnnnnnnnnnnnnnnnnnnnnnnnnnnnnnnnnnnnnnnnnnnnnnnnnnnnnnnnnnnnnnnnnnnggtaggcaagggtgagagacctgggcactaggaatncctgtgccga

SEQ ID NO: 378609 - DNA, 252 bp, Homo Sapiens
  misc_feature (133)..(133): n is a, c, g, or t
  misc_feature (196)..(196): n is a, c, g, or t
  misc_feature (206)..(206): n is a, c, g, or t
gacacaactcttcagcaaacatttacaagagatgtgggccacactgaaaaaaagagtgcactccgcggacagaacgagtcccacgcatccaattccaggacacagaaacacacacaacatacagagatctgantaggcacagtaaaccaaataaatatgacttattccaaatcacaaccacagatgctctctggancatcacaagngaaggcagagaagagattttgtgctgtactttgagactagtctgtt

SEQ ID NO: 378610 - DNA, 380 bp, Homo Sapiens
ctcctctgcaaggggcctttgggactgttctggacatggctgaagattgacttagagattgaccctccacctcgacattactgacatttggggccaggtgattctttttgaggggactgtcccctgcattgtaggatgctgagcagcatcccgggcctcaccagatgccagtagtgccatcccccaaccatacccctggttgtgacagcccccaaaaatgtctctagacattgcgaaatgttccctgcagggcaaaattgcccccatttgagaaccactggcttggagaagggactacaaatgtacttcctcccccattcttttgacgctaagccaccctggtcctgacgcctcccctcacttagaaaaggcatacagga

SEQ ID NO: 378611 - DNA, 450 bp, Homo Sapiens
  misc_feature (14)..(14): n is a, c, g, or t
gtggtgccaacccncttcttccctggcaacatcctgtctcaagaaggatcctcttgggccctccctttcccttggcggggcaagggggtgatgggggggcacccactcaccaacacagtggccaccctcactcccatctctcttgaccattccaatcttatacagacagggaggagtggggagtagggggaaggggagctcacagcagcaggaccaattcttccgcctctactagggccatggggaagggggctggccctaagcttccatgatctctttaggaggtggtttatttagcatctttgtccacagctgtggccctggtaaccaattctggggcaaccggaaatgtccccgctgcatccccttggttatggtgagccttcccttttggaacatgtgacacgaaaccagcagcctggcgttgctagtgcctaggaaaatgcccgg

SEQ ID NO: 378612 - DNA, 468 bp, Homo Sapiens
  misc_feature (14)..(14): n is a, c, g, or t
  misc_feature (47)..(47): n is a, c, g, or t
  misc_feature (73)..(73): n is a, c, g, or t
  misc_feature (78)..(78): n is a, c, g, or t
  misc_feature (87)..(87): n is a, c, g, or t
  misc_feature (125)..(125): n is a, c, g, or t
  misc_feature (138)..(138): n is a, c, g, or t
  misc_feature (143)..(143): n is a, c, g, or t
  misc_feature (160)..(160): n is a, c, g, or t
tgactgtggtgacnaatggtgccatcgggcatgatggtccggtcaanagtgacttctcgcctgacggtgcggnctggnatggaatgnccagccagggccaccaggacctcttcaaagccccagcncccaggtcctgtnggggncctttctgaggggcagntggggaaggtgcttccagtgagggcagtgagggcaggaggcataagtgaggctcggtacagatgcattctaagtggcgctggcccaaggtgactgagtgaacaccctgtggtcctctgcgggcaaacacaatacagaagctattgcttagctcccagggcaagaggacaaatgtctgtctcaggcctcaacctctgtttggcataacctagagtagggagtcaggagtaccagctgcttttaagagacaggataagatcacagaaaagcccctgaaaatgcctgctttgccaaccacccagcacaatt

SEQ ID NO: 378613 - DNA, 464 bp, Homo Sapiens
  misc_feature (396)..(396): n is a, c, g, or t
  misc_feature (415)..(415): n is a, c, g, or t
  misc_feature (420)..(420): n is a, c, g, or t
  misc_feature (431)..(431): n is a, c, g, or t
aactgtccaggacacagtgttacatccattctccatagggttttcttaagctgcgtggtttgcaatgtaaggacaagtgttatcctctcaaaagcgcctttggactggaattgattcctgtgtccttgagccatgtccttttcagccatttcacaattccttaactgttgaggacttaacatatatgagatatttgggcaggcacgacttccatgttcctgtctttcttcctaaaatatcagaggagcgggagtcacagcatctaaaatgaaactcatcttggcagtcccgtgaaatacggagctgatttgttttcttgctgcagagagcacaagaataaaggaagactccacaagcctcgtctttccagatcgtgcttgacctgcttggctcagnctttgccctgggggcagantcggngatgagaattnacgggattcacaaaatatcccaaaaccatccct

SEQ ID NO: 378614 - DNA, 457 bp, Homo Sapiens
  misc_feature (14)..(14): n is a, c, g, or t
  misc_feature (33)..(33): n is a, c, g, or t
  misc_feature (246)..(246): n is a, c, g, or t
aaaagggttgggtncctggccttcaaggcaccnttaactgctagggatgcctcaaaggggcaagcctggggcccttcccctccctgtctcttcctcggtctttcctctctgagcagcctccctacctcccctgcctgagccctcactcccacagccctccccaggtacctagcagaggctgtcagtccttggctcaccctggaacagggctggggctgggttggaacaggtgtgtgcccccaccanagctctatgactctgttctccctccctgccattgtggactcttgtatttgagggacctcaagagagtgaggaccctaccatccactgtccatattcagtcccagccccagtgcgcttcctctgttccctccctcagccatccaattcttgagttttctcactgattggttttctttctttttccttggattaaatgtgaaagcaaaaaaaa

SEQ ID NO: 378615 - DNA, 416 bp, Homo Sapiens
  misc_feature (20)..(20): n is a, c, g, or t
  misc_feature (104)..(104): n is a, c, g, or t
ttaaacccttgtagaaaccngtaagcattcacaacccccttgacttgtagtgccctgattgtaaaaagaacagttgaatgagctcattgttttctggttttttnctttaatgtattttacaaacactctggtgaccaggccctgacatgcctgatttcctatgtactggcacttcagtttgggattacagcattaataacagagttcccatgcatcatgcccatttttaagcatgatcgttatgataaagggcatatacttaattacaggcctgcttaataacagctctgttgaagctcgtttgtttaggagaatgctaattgcgccacagagccagcggcacatccttgctttcatctgctggaggtagctcgatgctgtggatcagcattttgttaaaactgccaccaaaaata

SEQ ID NO: 378616 - DNA, 541 bp, Homo Sapiens
  misc_feature (440)..(440): n is a, c, g, or t
  misc_feature (448)..(448): n is a, c, g, or t
  misc_feature (468)..(468): n is a, c, g, or t
  misc_feature (477)..(477): n is a, c, g, or t
  misc_feature (515)..(515): n is a, c, g, or t
aactttctcaacacccccaattaggagctcagtgctctcttggggcaatgcagttaaaagggtgagcctcaaatctagtcattacaccagtcaacagaagtggacagggcctaggctctcctcagctccttaaccctcctccttctgccctggattgtaacctctcccttgtccaaatctaggattcctggtaggaaaaggaaaaggcccttcccttccctccaccacttccaactggcccctttgcctgacctgggacttggagaaccagaggaaaagagagggagcggaagtggggagatggagcagggcacctgttagaatcagagctgcaggatttcttggggaccctcctctcttcccttcactgcttcccagcacctcctggaccctttccctctttccaagggagaaagcccattgatttgcagcttgtattntttaggcntatttacaatctatgtggcntgacaattnaacacaccgcagggttaattgtttcccaccagaggttncaattgaacaaccaggacaggacaat

SEQ ID NO: 378617 - DNA, 474 bp, Homo Sapiens
  misc_feature (405)..(405): n is a, c, g, or t
  misc_feature (461)..(461): n is a, c, g, or t
gagacaggtttctccttctgtcatccaggctagagtgcagtagctttttcctggtctatgtaatccagaccaggaaaaagccctttacagccagtgtggcatggtccagggcagctctagctgacgttcaccaaggggagatcctactttgctatggtagggaggatttgggatagacatttgcagcctgcacttctagggaacctagtggatgagtgactagggagatgacagccatggctcagatggaacatagtcctgcctacgggcactggttggggaaaatgggtttaggaagcctggggaggctgggaaggctctagggtggggctgcacaggctctggggtatcctatctcgggccttctccaggggcatgtgttgctcaggatcctagcccgggttnatccctcctcaagggattaataaagtggaaagaatttggcccttgccaagagcccngggaagttagcaa

SEQ ID NO: 378618 - DNA, 440 bp, Homo Sapiens
  misc_feature (58)..(58): n is a, c, g, or t
  misc_feature (118)..(118): n is a, c, g, or t
agtacattcacaatgttatgcaaccaccaccactctccatttccagaacatcttcatncatcccagagaatctgtttgcagcctcactccctattccacccttcccctagaccctggncaacctctaccttctggtactctgaatttgcttattctagatgcctcatctaaatggaatcatatttgtccttttgtgtctgggcttatttcatttaacatgttttcaaagttcatccacgttgtagctgggcatcagaacttaatgccagccccacacccaccccctaccgtatcaactcacacagaagacaggggacagggccagcagtatcctctgccacctgggcacctacgtggccgactgccaatgaggaaatattgccctctaagaaaccttggagggacttttggaggccgtttgtgggggcatgggtccaaag

SEQ ID NO: 378619 - DNA, 639 bp, Homo Sapiens
cggtgctgcgacgcctcgagtacttctgcatcgcctggttcagcttcgaggtgtcgtcgcgcctcctgctggcgcccagtacgcgcaacttcttctgccacccgctcaacctcatcgacattgtgtctgtgctgcccttctatctcacgctgctggctggtgtggcactgggcgaccagggcggcaaggagttcggccacctgggcaaggtggtgcaggtgttccgcctcatgcgcatcttccgcgtactcaagttggcgcgccattccaccgggctgcgctcgctgggagccacgctcaagcacagctaccgtgaggtgggcatcttgctgctgtacctggctgtgggtgtgtcagtgttctctggtgtggcctacacagctgaaaaggaggaggacgtgggctttaacaccatcccagcctgctggtggtggggcacagtgagcatgaccaccgtgggctatggggatgtggtgccagtgacggtggctggcaagcttgcacctcaggctgcatcctagggggcatcctggtggtagcactccccatcaccatcatcttcaacaagttctcccacttctaccgcgcgccagaaggctctggaggcagccgtgcgcaacagcaacccctgtgccgaat

SEQ ID NO: 378620 - DNA, 259 bp, Homo Sapiens
  misc_feature (32)..(32): n is a, c, g, or t
cccttcccccaatgcaaaagccagcccccaanaaccctgggggtggacaccactcagggaaacctggggtgggggtgggctttggtcttagcactttccttctccagatcccccctacccaccccagtcccaaatccagtcctctggcccttgcctagccctgaattgcttctctaagctggtgttcccatgcacagggccattcaggaagggctgggggagtgtgtgtggcaataaagcttgaaggcaccgtgaaaaa

SEQ ID NO: 378621 - DNA, 535 bp, Homo Sapiens
  misc_feature (13)..(13): n is a, c, g, or t
aaatcatgtttgnccctttgtgttggaagaaagagaaattatccccaacttcacaagatgaggaaacccaaggcctaaagagatgaacgaatgcctctccccagatgttcacaattaagaagtggcaaaagtccaggtttggaatctgggccttgttggtgtgccctggagcaatgctcccatcaaactcccatctttcttctgccctcatgaagtttgcgtgtgttttttggtgattcatggatccccagagttgatccacaagataagaaatccctttcagagccagggaagggtccagacaggagatttggatataggagctctggatctcagctgtggttcctttctaggagcatccaacaggagtcagcaatcaaagatgagtcctggagggaaggaggatgagtcctgggaggaagtaccatagcattgtacttgcctctttagctggtatgcaagatttgctaagcaataatcttccgaccttcctcccagggctgatgtgagagaaagggaatccctcgtccgaatt

SEQ ID NO: 378622 - DNA, 410 bp, Homo Sapiens
  misc_feature (22)..(22): n is a, c, g, or t
  misc_feature (48)..(48): n is a, c, g, or t
  misc_feature (58)..(58): n is a, c, g, or t
  misc_feature (78)..(78): n is a, c, g, or t
  misc_feature (91)..(91): n is a, c, g, or t
  misc_feature (94)..(94): n is a, c, g, or t
cagaccttaaatacttcggggnttcccacaccccctaaaatattgggncttcttaggntcccagttttcacgggtccnagtttgggttgtntcnagggtccagggtctccccaggtccaagtcttgggatgctaagccagccaaacggtggggtttagagtctgagatccgatcccggggttctgcactcagatattggggtgctgagtcaagattgggaggtctcaagccccagatttacagcactcaggtctgcagcaaggacttcaggcccaaactcgggttcaggccccttggaatcccacagtccagatcttggaatttgaggcctgaatcccagggttcaggtccccaagagtgggttccagggtacagtactggaaatccagtcccagatttcaaggtccccc

SEQ ID NO: 378623 - DNA, 480 bp, Homo Sapiens
  misc_feature (81)..(81): n is a, c, g, or t
  misc_feature (317)..(317): n is a, c, g, or t
  misc_feature (420)..(420): n is a, c, g, or t
  misc_feature (449)..(449): n is a, c, g, or t
ctgaagtgggtcttgacaaagttgaggatgtcatccggcaaggcgctggaggcattgtactgcatcccgggggctgcgcanacccggcacggggtcgaggcacctgatcctccggcacccgcgtccagatggactcgggggacttctgctctcggaagcggccttcaaacacagctgccacctgtgtcaggtcaaaggcgcagacagccgagccagggatgctgttgctgggcgtggaaaaaacggccaggaccacgggccggcccccgaggcttgaccacgcccgtgacagcctgcagcacgttgaagtagaaatnggagttttccgggtacagagcagtttgagccgcgcctttcaggaaggacgttccactgctttttcagcacgcgggggggagcctttccacgttcgtttttttncaaaattggggccaagcggggaacaacancaacttttttcaggtagttaaatttcattcg

SEQ ID NO: 378624 - DNA, 374 bp, Homo Sapiens
  misc_feature (355)..(355): n is a, c, g, or t
aataattaccgggtaattagatggcaggcatgataggtgccgggtactggtttccaaggggacttcgaaaaggtattctgccgccctatgcctcctcccagtacaaggcacagttaatgcctcagatcccacaccgcctctctcgtggaagtgtgctctgagccactggggcctaagccgagttgacaggctccattagagagcgactctgtcatggaaattgtgatcttaacagagggacatgtggcagataccaattccactcacatccttgtactacgtggctttcccagggggctacttgatgggatcaagggatgttcacaccaccagttccccaactgcctttcatgtngacctgacctgttacggcc

SEQ ID NO: 378625 - DNA, 351 bp, Homo Sapiens
  misc_feature (31)..(31): n is a, c, g, or t
  misc_feature (75)..(75): n is a, c, g, or t
  misc_feature (228)..(228): n is a, c, g, or t
aaggaatggtcccctcagactgcctgggtanaggcccctggggcaggctggagagagaaaagtgggcagagggtnaagggatcacaggggtcttggaaggtggcagtagtttggacgggggtggggagtatgtgggagaaaaaaacagactgaaggtagaatcccttgggaacctttgaggagcggcacattctggcaggcacgttttctgtgagcctgaagttaggnagagacattctggaggtcaatttcctacatcctcttacaggcggagaccttgaagtggggccaggaaggaaggttggcaaaacctttgaccagaactgtccttcatttacagaaactgaccca

SEQ ID NO: 378626 - DNA, 505 bp, Homo Sapiens
  misc_feature (98)..(98): n is a, c, g, or t
  misc_feature (357)..(357): n is a, c, g, or t
  misc_feature (404)..(404): n is a, c, g, or t
  misc_feature (457)..(457): n is a, c, g, or t
tagcgcctactgtatgtttggcataaaatggtggtccctaatttcaaaagatttggagtctagagggcagaaattgaagaggttggtgctctgcagtnctgagtccgcccacagactgaataaataagctctgctgggaaaaaaatcttccccacggcggaggagttctcagtcccacgcgcccagagtcgcacccactcgagccacccgcctgttgccgtcgccacgccctccagccgcagccccagcgcgcattcctacgggtcgccgggtctgtcgccagcgatcgaatgaagtcggctgatcccccacgtgtgggctgctccagtggacacccaggggaggcctcggtccttnacccctagagcaaccaatgggctggccttaaattgttcagcgggggngttctttttctttcctcccaagcaggcgggccgttggggttcggcccaagagncaagcgactactacggttcttcctttccaatgggatccctgtttggtt

SEQ ID NO: 378627 - DNA, 510 bp, Homo Sapiens
  misc_feature (12)..(12): n is a, c, g, or t
  misc_feature (22)..(22): n is a, c, g, or t
  misc_feature (99)..(99): n is a, c, g, or t
  misc_feature (117)..(117): n is a, c, g, or t
  misc_feature (145)..(145): n is a, c, g, or t
  misc_feature (222)..(334): n is a, c, g, or t
  misc_feature (488)..(488): n is a, c, g, or t
  misc_feature (490)..(490): n is a, c, g, or t
tgtgtttccttnggaaacagangttactaaaaacaacctaatcccaaagaacccttttgatccagctgttctcccctaaaaacattttcgctaacgganttcattctttactatttnaacagtggacctttaaaacgtacctttnaaaatgctttctatagtaacatgtttccacatacaaattataaaatgtgtttattttgctgggcgcagtggctcatnnnnnnnnnnnnnnnnnnnnnnnnnnnnnnnnnnnnnnnnnnnnnnnnnnnnnnnnnnnnnnnnnnnnnnnnnnnnnnnnnnnnnnnnnnnnnnnnnnnnnnnnnnnnnnnnnttagctgggcatggtggtggacgcctgtaatcccagctactcgggggctgaggcaggagaatcacttgagcccaggcggtggcggctgcagtgagcttgagatcgtaccactgcactctgtcctgggtgacagagtgagactctgactcaaaananaaaagtgtctatttcgtatc

SEQ ID NO: 378628 - DNA, 408 bp, Homo Sapiens
ggaactaacccgggatcctcgtctgaacaggataagcccaacattctcatggaaaagatccagagtccacaggaaagaatttctaatgaacacattaaaccagtctgatactaagacaagtaaaactataccctctgaaaaactaaattcatccaagcaagaaaaaagtaaatcaggtgaaaaaataaccaagaaagaacttgaccaattagattctaaatcgaaatcgaaatcgaaatcaccctcacctttgaaaaacaaattatctcacacaaaagacttgaaaaatcaagaatcggaaagtatgaggttgtctgatatgaacaagagagatccaagattaaaaaaacatcttcaggataagaccgatggcaaagatgatgatgtgaaagagaagagaaaaactgc

SEQ ID NO: 378629 - DNA, 476 bp, Homo Sapiens
  misc_feature (370)..(370): n is a, c, g, or t
  misc_feature (438)..(438): n is a, c, g, or t
  misc_feature (448)..(448): n is a, c, g, or t
  misc_feature (456)..(456): n is a, c, g, or t
aaataaaaacagtaagcaaataacactgtgggcagcatacagaggtggcaaacaaataaagtcctgggttactaagaggaaccagggtgaagagtccagtctggatgcagtgggttggtgggcagcggcaaatctcgtcaggggctaagctgcagtagcagacccctgagagcccacctggggctgcagcctggccccgggcctgggagttggggctgccgctttccatgctggggtcctgctgggtccaatggggcacctgccctctggcccagctcattgggtgaagcatcagatgaggcgaggtggttccagccccctaaaccagggtgatgagggttcagcgaccttcggagccaggcccagggtnagtttttgggatgccccagggttcctaaaacaggttccccgtccccagtttttcttttggaacaagcntgctggggtnctcccggnataagtgaatcagagttttt

SEQ ID NO: 378630 - DNA, 476 bp, Homo Sapiens
  misc_feature (353)..(353): n is a, c, g, or t
  misc_feature (358)..(358): n is a, c, g, or t
  misc_feature (414)..(414): n is a, c, g, or t
  misc_feature (439)..(439): n is a, c, g, or t
  misc_feature (460)..(460): n is a, c, g, or t
tttatcctcaaaatatccctattatataattactattcttatactcttcaaaatacatattttatatatttattaactcaacaaatatttattaaggatctttggtgttctggggactagggagtctttcttaaacaagactaggtcctgttttcttgtagttaatattctgttcaaaggtgtgtgaggaaaagacagcgaaactgaaacattaaaaggtataaacttgcctaaattcacacaggctatagatggcagagcagcgctgaataccaatctgcctgacccggaaaacgacactcctaaaagtcaaattgcagatttcattcttcctacacaagctctgcataganatttnattttttagggcaggcaagccaacttctttgtggcatgggagaagttccaattatngccttaaggtaaaatattcagcttntttctcagaggtgggaatggngccttttaagaaaagg

SEQ ID NO: 378631 - DNA, 405 bp, Homo Sapiens
  misc_feature (252)..(252): n is a, c, g, or t
  misc_feature (309)..(309): n is a, c, g, or t
  misc_feature (350)..(350): n is a, c, g, or t
  misc_feature (357)..(357): n is a, c, g, or t
  misc_feature (364)..(364): n is a, c, g, or t
  misc_feature (385)..(385): n is a, c, g, or t
ctggcttacccagcccaaaggaccccactcccgggggtctggggacctgaaggctcttgtctgacccctctccccacctgtatttcctggctggccttgcgtgcctctgtgtttagaagaaccgacgagtttattagagaaggaaagactgcactgtgtgaccttgaataagacagttcgcccgtgcctcagtttccctgactttcacgcaaggatcaccacggtttcctctgtcaagttcctgagatggcnaggggggatttttgttctcccagcacctgcggctgttgagaccagagaagcttggtnggtcgaccacagcctggggtattagtttcacccctaggttntttcccnagcgagnacccaggggcctttggaaaanggggatttaaggcttttttt

SEQ ID NO: 378632 - DNA, 369 bp, Homo Sapiens
  misc_feature (219)..(219): n is a, c, g, or t
ggtggtgatggtgatggtgatggtgatgatgacagcatctagtacttatttattgtttacgatgtctcaggcactgtataggcacttaatatacatgctcttctataaccctgttttattaatctcacttcatctataaggaaaggggaacttaggttaagtaacttgacaaactccactaggaggtagaggtgcaatttgaatccaggattgtatggnccaagggctgagctgaacttgcagaagtatcactgtattgcctcctatgatagggaaagtgtagggttttacaggacctcacagcggaagttaattaaattaaattaggactgaatctaactaatcaaacataactaaatctaactaacc

SEQ ID NO: 378633 - DNA, 503 bp, Homo Sapiens
  misc_feature (378)..(378): n is a, c, g, or t
  misc_feature (390)..(390): n is a, c, g, or t
  misc_feature (427)..(427): n is a, c, g, or t
  misc_feature (450)..(450): n is a, c, g, or t
  misc_feature (461)..(461): n is a, c, g, or t
gggattacaggcatgagccaccacgcctggccaaggagagcagagtttttaaggactacttggtgggtgagttgagccagtgacccgggagtgctgaattgtcagagataaaatcgtagtgggtacatgctgtcttcttgcactgagtcagttcctgggtgggaggagccacaagattagatgagccagtttatcagtctgggtggggccagctgctctatcaaatgcagggtctgtaaaatatctcaagcactggtcttaggagcagtttagggagggtcagaatcttgtagcctccagctggcatggactccttaagaccgtaatttctaatcttgtgggctaaatgttagtcctacaaagggcaatctagttcgntttgttttaaantattaaactaaattttcttcccaaagttagtttcagncctatggcccagggattgaaacngaggacagttnggaggttaggaaacaggttggagtccagtgaagttagatctc

SEQ ID NO: 378634 - DNA, 307 bp, Homo Sapiens
  misc_feature (272)..(272): n is a, c, g, or t
  misc_feature (292)..(292): n is a, c, g, or t
gcttcaaactcctgatctcaggtgatccgcctgcctcagccttccagagttctggggattacaggcgtgacacctgtgggccggccccatccatatttcttaaacatgttaaagcccgttcaaaatttttccatttcaaatgggtatcaaagtccttgcaaatctcaattgaggatacctcatcaatgattcaatgagtacccggggttagaaggtatatgaaaagatgaggaagctcacactggggttttttcagttaacaaaaccccttnggggttcaaacccacttttnttcggtgccctttta

SEQ ID NO: 378635 - DNA, 416 bp, Homo Sapiens
  misc_feature (33)..(33): n is a, c, g, or t
  misc_feature (42)..(42): n is a, c, g, or t
  misc_feature (272)..(289): n is a, c, g, or t
cccttccccctattgcccagccaaaaagctggnctgaccccnaccccgggccataggcggtggcagcggcagcagaagaaggtgaattagttagcccaatcgatttaataaattggatcgatcacacaactgccttagaaatggattgaaggaaagtagctgactattatttatatttcataccttgtgttttcaagtgacattgtctggtggctcctaagggtttaaccccttagcctaccatctctatagccccagctccctcacaggcnnnnnnnnnnnnnnnnnnagaggtcagttcccctccatctgcatacacctccctgtcttcaaataatgagatggaactaatttgttttaactaacctgatctttgggaaacaaacggaaataaagacacttcttggatgaaaagt

SEQ ID NO: 378636 - DNA, 418 bp, Homo Sapiens
  misc_feature (21)..(21): n is a, c, g, or t
  misc_feature (37)..(37): n is a, c, g, or t
  misc_feature (43)..(43): n is a, c, g, or t
  misc_feature (65)..(65): n is a, c, g, or t
  misc_feature (92)..(92): n is a, c, g, or t
  misc_feature (97)..(97): n is a, c, g, or t
  misc_feature (165)..(165): n is a, c, g, or t
  misc_feature (174)..(174): n is a, c, g, or t
  misc_feature (388)..(388): n is a, c, g, or t
aacttcctgaagtacggcctnggtccctggccctganggaaanccccaggctgcagctgcctttncccgggacatgtgaataaaggccccgnaagancccttggatcaaggtgtcagcccactttgtcggaagcccccggaaagggcctcctccttcccttccanggacattcncccagggttgggtagtggttccggcgggggaattttctgtgcctctggtcactcatgtgtctatcccccctgagtttgtatgccaattcttttaaactagcgttgggaccatggacagtgctcttatcttccctaagcctcagtgtcctcatctataaaacgggcataataatatacctactgaataaaataatgtatgtgaagtgcttcacancttgctcagcacattattaaatgttcaaaa

SEQ ID NO: 378637 - DNA, 211 bp, Homo Sapiens
cactttgggtggttatccagcttgtttttcccctgtaggctgttctgggctcaaaccaatcaaatgagtgaaaaccaattttgacaggagccataaagcatgttgcaccaattaaattacaccaatatattattataatacctttgaaatgcctttcagaccaataaataaaaaagacaaattcaaataaaaaagtcaactttttattacc

SEQ ID NO: 378638 - DNA, 557 bp, Homo Sapiens
  misc_feature (424)..(457): n is a, c, g, or t
aaaacttgccacacgaacttgccgggaagtttgcaagtttgttactcagacaagaaaaactggatggagcagccgctgaatcatgtaaatcaggttgaacttgactctggaaaccacggatttgtcctgaagattttcttcacagccctggactctccgcccgagatattttcctctgacatgcacaaacccaggggttataaatttgtgcagagccagtgtggtgatgctgatacaggtggccctttccaaagtaaagaaatgttgccccagttcaactgcaatgcctacccaccactggcttttagaaggcacagcaagcttccagaaagcatcagcaggttcacagacttgttgaggagcattaagacacaccataatagttttaactctgactccaaaggagcacccatgatttaaaatnnnnnnnnnnnnnnnnnnnnnnnnnnnnnnnnnncttaggttatccccatttacccaccccacgtgtataggaatcttaaccctaagtaacacttacccatagctgcctgaagctagggtaggctcacagttcc

SEQ ID NO: 378639 - DNA, 409 bp, Homo Sapiens
  misc_feature (16)..(16): n is a, c, g, or t
  misc_feature (22)..(22): n is a, c, g, or t
aagtgactggtccggntgtttnaacccaggtggagctgtggagaaggaatctctgggaaagctgacccactggagatgcttgtgtctctacccagctgtgaactagccagtgctctgtcccatctggatgccagccacctcacagagaacctgcccaaagctgcatcagagctggggcaacaacccatgactggctcttctacacccgacatcacctggagaggctgctgggccttccaccccacggatgtgctgtaacgagtcaaccttcctcccatgattgggcatttcgaacgtttccagagaaaaggttgtcttgaaaggtgacaaccaaaggctgcctcagtgtaacctcgtctccctcagatgaagaccttttaagttacagactttgcaataaagtatttat

SEQ ID NO: 378640 - DNA, 446 bp, Homo Sapiens
agtaccttcagcttagaaagagcagggaggcagtttggttccaagaagcctacgcacactcctaaccactaagttaaaagcacccacattgtgccctagaccactcctagctattaaccttgcccctatcccagagagaaaagaagggagccccgggctagattaaagagacttggttcctagtggtgtatcttcccctggcttcctctaaactctggagtaagtcattttccttgctggacttcactttccctctctgtgaaatggaaacagtcatcacaggcctgcctgtcttccagggctgttaggaggctcagatgacacccggtgtaagaattctcaagactaaggagcctggaccaagggtgagagctgaggaatcctggaccatcacccctgggacagccctgatttttctgtaccttggctaccacaggttctgctga

SEQ ID NO: 378641 - DNA, 572 bp, Homo Sapiens
  misc_feature (43)..(43): n is a, c, g, or t
  misc_feature (101)..(101): n is a, c, g, or t
  misc_feature (364)..(364): n is a, c, g, or t
ggggccctgcctgttctggtaccgttgcctgcctaacccctanaggaaatttgtcacagggtaggaccttaaaaaatatgtgttggatgaatgatcagagnaaaagagagtgcagaaagtggccaaaacaagaagctttcaagcagtgtatctgcaaataaacctaaaggcatgatttgcccctggtgatccccccagaggtgcttagtctcttggctgaattccttctggaatccccagaatccccctccttggaagttttccccaggagtctgaggcaggcaggtctctcagtcacggccacatgacctcaagtgaaaacaaaccagtctggctgttcacagactcagctggtcagagcctnctgccgaggggcccacgcaccacccgccactgcagaagacgcctccacgtctgtctctgggctgcctccaccttctgcaggcctcctggagcctctgctggctgcagaagtggggtgcatgctgcctggaggaggaacatctgtggtgggaccccaaatccatgtttgtgttaccatcgtgttccaataaaactatcgaaagcagaaa

SEQ ID NO: 378642 - DNA, 393 bp, Homo Sapiens
  misc_feature (24)..(24): n is a, c, g, or t
  misc_feature (360)..(360): n is a, c, g, or t
tcaaagctgtttccgtgagaaagngctcctcctgctcattttagtgccctgaaatgtcacttccttgaggaagtcttccttgaccctccacaccaaaccaggccccctgccacacccctcagagctctccttggaaggcactggcatggctgtttgcgtgattccttgaacgttgtctgtctctcctcctcaccagggctgtgggtcctgtctgtttctgggtgaccgttgtctgtctaacccctagaggagagtttgtcacatgggtagggagcttaataaatatgtgttgggatgaaatgatcagagaaaagagagtgcagaggagtgggccaaaacagatgcttttcagcagtgtantctggccaataaaacctaaagggcatggatttt

SEQ ID NO: 378643 - DNA, 442 bp, Homo Sapiens
  misc_feature (12)..(12): n is a, c, g, or t
  misc_feature (23)..(23): n is a, c, g, or t
gctgagtgaaanaaccccaaacncgaaaggaccagaatacggcaaaactccgaccttatgtgaggtccccctagaggagtcggattccatagagactgaaaggatggcgggcccccggggcggtggagaggggaaatggggagttactgtttaatggggacagagtttcagttttacaagatgaaaagggtccctggagctggatgggggtgacggccgcacaacagcatgaatggactgaacgccactgaaaactgaactcttgaaaatggttaaactggcatattttgttatgcatattttgccacaaaaagcaaacaactcttctccccaaaaatatctggggtgtacttacacttaaatatgtagggcatatttactctcaacatttatttccattatttgaaattaaagtatttgggacacactgcactacaaaaaa

SEQ ID NO: 378644 - DNA, 424 bp, Homo Sapiens
  misc_feature (31)..(31): n is a, c, g, or t
tccaggtcccaaaattggcccagctgcgggnacttaaaaagctcctcccctgaagacaagtttaggggtagtcggtgaaaaggcagatggaaaaggggctcagggctgctgccttcctgtcctctggagagaacccagcccaggcgcggtgccccttcctctcctcaggctcctccttgcccccaccttgccccaggaaaggccaaagtcccaggtgactgccctccttctttcttgtaaataccaaccatgcatttgtacagtgggccctgttcatgcgaaatccacatccatggtctcctagacctgctaccctggtacttccaccctaccccaccccgagaagggcagagacgcatgtgactcacccctgcccttggtttcccagacccctgctatagccagagaacaataaagaagggag

SEQ ID NO: 378645 - DNA, 411 bp, Homo Sapiens
  misc_feature (51)..(51): n is a, c, g, or t
  misc_feature (312)..(312): n is a, c, g, or t
  misc_feature (348)..(348): n is a, c, g, or t
  misc_feature (388)..(388): n is a, c, g, or t
  misc_feature (394)..(394): n is a, c, g, or t
agaagcagccgcagctgatcgtgaagggggcgctggaccgcgagcagccancttcctacgagctgaccctgcgagtccgcgacggcgcgacccgctcgctcctcgcaggccatcctacgggtcctcatcaccgacgtgaacgacaacagcccccgcttcgagaagagcgtgtacgaggccgacttggctgagaacagcgccccggggacccccatcctgcaactgcgcgcagcgacttggacgtgggggtcaacgggcagatcgaatacgtgttcggggcggccaccgagtcggtgaggcggctgcttgcgnctttgaacgagacgtccggctggcttagcgtcctgnaccggattcgaccgcgaggaaggtgaaccagctgcgtttnaaggtnatgggcccgcgaccgag

SEQ ID NO: 378646 - DNA, 641 bp, Homo Sapiens
  misc_feature (60)..(60): n is a, c, g, or t
cctttgtaaaagcaaaataaatactcattaaaaacttttcaaataggcttctccctgtanccacatagtcaaatgcgttggcctcccattcagcatctccccacattgaataggcaggacttcttctttaactgcccacagaggtctcttctgtgttaacatcactaggcttctctgaagttgattcaggttctgcttcagtttcttctggtgtttctgaagcttgtaaggcagggtatggagctctggtaaaagacttccaggccatccgcagcgaacctagcaagttgttcttaaggtccatactcatcctggtcaagccctctctcagttctaagtgatccgcttcctgcctttatgatgtgggatcagcattggctcaaattccactcctgggaccaccattggttcaatcctataggccacaggatcaaaagggtgataaatattgaagaaacctttgcacgttggaaatctgtagttgggatcaattctttttagtcctcggacagtaaggaacattccaatgggagatccaaaggcaaagaatatctctggtttatagatgagccgggggtatttcacagacacctgcccaatgccaacatccagatagtcaccatttctagtattactgctac

SEQ ID NO: 378647 - DNA, 558 bp, Homo Sapiens
  misc_feature (343)..(343): n is a, c, g, or t
  misc_feature (404)..(404): n is a, c, g, or t
  misc_feature (435)..(435): n is a, c, g, or t
  misc_feature (440)..(440): n is a, c, g, or t
  misc_feature (461)..(461): n is a, c, g, or t
  misc_feature (479)..(479): n is a, c, g, or t
  misc_feature (495)..(495): n is a, c, g, or t
  misc_feature (504)..(504): n is a, c, g, or t
taggttctgctaattataggaaaacttggtgaacgtcagagcataaacaagacactgccacaacatcttgtggttctcaatgccaggatacaatgagacatcccagagtccagccctgaaggggttttcgcatcctctgagactggaatcagaaggtgtgaatagaaatggaagcagtggcctgtttcatccccttctctcccctcccctgtcccatcttttttcctcagggctctgccgacccatttctgctgtttccgtattcccttcacagcagctcccatcctctactccttccctttgtctacctctccttgaaggagggagccttttccaattacancctttccctgtggattccaaccttgggtaaagttcaccaaccaggtgggacttcttccagnacaggtattacaatttggcaggcccaaggtnggggnagttaggaacattgggttctntggcccaaggtggcaggntggggtaagagaattnggcaattgnaaaggggattgattttggggttggggaacaaaaacaggcttcaaattcaagggg

SEQ ID NO: 378648 - DNA, 610 bp, Homo Sapiens
  misc_feature (20)..(20): n is a, c, g, or t
  misc_feature (381)..(381): n is a, c, g, or t
  misc_feature (457)..(457): n is a, c, g, or t
  misc_feature (471)..(471): n is a, c, g, or t
  misc_feature (538)..(538): n is a, c, g, or t
  misc_feature (556)..(556): n is a, c, g, or t
  misc_feature (569)..(569): n is a, c, g, or t
  misc_feature (577)..(577): n is a, c, g, or t
  misc_feature (583)..(583): n is a, c, g, or t
agctaacagccaccaggatntgaactagaactggggatacaaaggtgagaaactgtgtccttgagaagctcgccactcaggcatgtacaatgcctggtggctgttagctccttccccacttattagattaaacaggacaaatctctccccgtgcatatagcaaatactcctgggacaggaagttcatgaatcaactgtgtacgctgcttcttctttcccttaaccttcactgcattttgctttattaaaacattcctagaatgttcattcctattcaaggtatacataatcaatgacaattaaaaactgttaccaattgtatagggggttttacgttctgatttaggactaaggaagacaaaatattaaaggacgggaggngagagacatctttacaatttaggaagggaaggaacctggggccaggcagggggaggtttttttgttgggagttgcntgaaagcattaccntggtgttattacggcagggtactgcttggggtaccaaggtttaaggtccgttttcccggaaaggaanccctaggtttccagcttncttttgggaggtncagttttnggccanttttcccaccaggttttaggcttactt

SEQ ID NO: 378649 - DNA, 402 bp, Homo Sapiens
  misc_feature (26)..(26): n is a, c, g, or t
  misc_feature (35)..(35): n is a, c, g, or t
  misc_feature (50)..(50): n is a, c, g, or t
ggaaaaggccaaaccctagggagacnggaaaaagntcagtggttcccccngggttaagtggggaggaaggggtgataggtggaaccacagaggatgtttaggaccagtgaaagtattcctgtattaaactttaatggtgaatacatgtcattatacatttgtcaaaactcatagaacatacatcaagagggaagcctaatgtaaactatgaactttgggggataatgatacatcagtgttggttcactgtaacaatgaatcactctaacaggggatgttgatagtgagggagcttatgtgtatgtagggggaaggggatacatgtgaaatctatactttctgctcaattttgctgtgaaccccaaattgttctagaaataaattgtattaaaaaaatcaatg

SEQ ID NO: 378650 - DNA, 475 bp, Homo Sapiens
  misc_feature (30)..(30): n is a, c, g, or t
  misc_feature (224)..(224): n is a, c, g, or t
  misc_feature (366)..(366): n is a, c, g, or t
  misc_feature (375)..(375): n is a, c, g, or t
  misc_feature (429)..(429): n is a, c, g, or t
  misc_feature (446)..(446): n is a, c, g, or t
gagaactgcgagtcccgggcctgcagcacncctcgcacccttgtgccaacaacacctcagtctgcctgccccctgacaagctgtgtgatggcaacgacgactgtggcgacggctcagatgagggcgagctctgcaaccagtgctctctgaataacggtggctgcagcacaaactgctcagtggcacctggcgaaggcattgtgtgttcctgccctctgggatgnggagctggggcccgacaaccacacctgccagatccagagctactgtgccaagcatctcaaatgcagccaaaagtgcgaccagaacaagttcagcgtgaagtgctcctgcttacgagggctgggtcctgggaacctgaacggncgagagttnttcggcagcctgggaccctttcaagccgtttcattcatttttcttccaaccggncatgaaatttcgggggnatcgattttttaaaaagggggattacagc

SEQ ID NO: 378651 - DNA, 390 bp, Homo Sapiens
  misc_feature (34)..(34): n is a, c, g, or t
cgagccagctggattctctgcctgccactgtcanggtttaagcggcaggcaggattgggcttttctggcttctaaccatgaaatcctggccatgggaccccagtgaaagatgatgtcttccatggtcatcagtgacctcagtagcctcaaatcatggtgagggctgggcttttgctgtcctcttctcacgcagagttctgccaggagggtgtgctgtgggggtcagactcctgaggctctcccttccctggggctagccagttactggtcatggctgctgtgggcatggaggctggaacttgtggttgaggcagggccatcccgatccttgctctacctggctagagtttcttctcatcagagcactgggacattaaaccaaccttttac

SEQ ID NO: 378652 - DNA, 210 bp, Homo Sapiens
  misc_feature (49)..(49): n is a, c, g, or t
  misc_feature (86)..(86): n is a, c, g, or t
  misc_feature (188)..(188): n is a, c, g, or t
  misc_feature (197)..(197): n is a, c, g, or t
gttagccccggactagcacgccccacccggagaagccgcctggaagggnctgcggaccaccaggcggaccctggcacaccgaagtncggctgggctggcctcctcgtctccgcactggaagaattgcccttccgcaagtcttcccttcccacatgggggccctccaggcgcacctcggtcgcccaccntttcccttnagaagggagacta

SEQ ID NO: 378653 - DNA, 359 bp, Homo Sapiens
ggccaccttaggagaggatagggaagagtaaagaggactttacttgccacttggataccagtttagccacagaaagacagggcactaggcagagtcctgagggccccatcccagaccttaattccaggatgacatttctagacacaccctgggccaaaagggaatccactgccttgaaggggagaacccagtcctggcaggattcatcatctgctgacaaaagagcccttgggcttgaactttcagcagtggtagctgggcagtactcgctgtgggccttgggtgagactcaaagacatgctggctttcaggtgagacccagtacattcccagctgtgatggctatagggagagattcc

SEQ ID NO: 378654 - DNA, 502 bp, Homo Sapiens
  misc_feature (425)..(425): n is a, c, g, or t
  misc_feature (442)..(442): n is a, c, g, or t
  misc_feature (468)..(468): n is a, c, g, or t
  misc_feature (478)..(478): n is a, c, g, or t
  misc_feature (492)..(492): n is a, c, g, or t
atttctaaactgtaaatgcttgaaacgcaagttggacattttctatactatgtgtaaaatgccaggttatacctctattttctttcttcctaatggtcattgaaatgagcttgtttctctacattgagcaagctacattttattttaaatgagtcaggtgcatgttcagatgtctgtattcccaatacattgcatgcagcctgagcacaagtatgccttcaccctctgggctcttttcctgacaccaaacagagaagtccacagctacaagcacaaggggcttgacaggtagggccttgttttattatgaacaaattcaccagaaaaccattcttgaggaaccagccactcccataggcatttttagtcttagggaagaaaattggcagggaagaaaaattggcagacaatgggaaagaggtttngtcaacctgcataagtngaataaagtcattgaagtactttgcnaaaagaaganggaggttttcctcntgaagggatt

SEQ ID NO: 378655 - DNA, 267 bp, Homo Sapiens
tgtagagacagggtcttgctatgttgcccaggctggtgttgcaaactcctggcgtcaggcaatcttcccacgtcagcctctgaagttactgggattacaaagcatgaaccactgtgcctggtcaaatcgtgttaatttttaaagcagctgaataatgtgattaatttttagtatataaagtgttaaaagtgttaagaaggatacagtttagaaattcatattctccctctccaccttcctctcttttccacttcctttcattatatc

SEQ ID NO: 378656 - DNA, 541 bp, Homo Sapiens
  misc_feature (57)..(57): n is a, c, g, or t
  misc_feature (59)..(59): n is a, c, g, or t
  misc_feature (342)..(342): n is a, c, g, or t
  misc_feature (460)..(460): n is a, c, g, or t
  misc_feature (470)..(470): n is a, c, g, or t
  misc_feature (479)..(479): n is a, c, g, or t
  misc_feature (514)..(514): n is a, c, g, or t
  misc_feature (519)..(519): n is a, c, g, or t
ggagccagggagctgcatgttgcttactagccccggtgttttgcctccagcagaggngngcctgcaaaggtgcctgataaacacactctcagatcacttccacgtggctctgttcattcattcactcaactaatatttacagaaggggggggaatctggacggagctatattatcaccagactattaaaatcttcgattagaaggttgacgcaggtgcagcgacgccgtgggacccgaggcggccaccacgatcctgcccaatttgcagcctccaccctgcggggatcacgtgaactggccagtccttgaggattgaaaagggagggaccatttcccactcnacataacaggctccattttccccgcagctgccttgggggagccccgttgtgaggccagggatattaacgcccgcttttcccattttccccgacaggcgtgagttgacaccgagggcgngccaccgggngaagttcgnccccctttcagcatgaattgggtcgtgggcagcgnggacntggggattatcaacgccaccag

SEQ ID NO: 378657 - DNA, 489 bp, Homo Sapiens
gattcccacaaagtgaaggaacagtttccaaaacccctgcgaggcagagttaagacctgtgacgtggggagcctggaaacacctggcccacgcgtgctgcagatgtggggaccctggaaacacccggccccacgcgtgctgcagatgtggggagccctggaaacacccggcccacgcgtgctgcagatgtggggagcctggaaacacccggcccacgcgtgctgtagatgtggggagcctggaaaaacctggcccacgcgtgctgcagatgtggggagcccggaaacacctgggcccatgcctgttcagtccgtcatggcgtttggtttatggtggccgatactaagagccactgaggtctgggttgtgtaagggttagctaccaccctataacctccctaccaggtaataaggagaccaagtctttgatcaaattctgattttttaactaaattttcattagaaagcaagcacaaaataaaatcaaaa

SEQ ID NO: 378658 - DNA, 548 bp, Homo Sapiens
  misc_feature (202)..(210): n is a, c, g, or t
ataattgccaaaaccaggcttgaggttggtgactcttgaaagattttctttcttcaggcctagatcagaaaattaagtgcagcaatatcatgaattctcagaagccctttcagggagccagtgagtcatacagtatccacagttgagtcacttaaagatgtcagtatacgaaacattattcacaatccttgggcaatctcannnnnnnnnccttctcccctcctccccgcccccccatacatttctatccttgagttagttttggaggggcaggaagtacttaacatctcagaagctagattgggaaacatgctcagctataagaactgagctttaaattttgagtttaaaaatgtacatcaggagcagctggggagggtctttttttaaaaaaatctttcaaatttggttttctgtgcatatggccgttttgtaaatactttggggtttttcatttttttgaaagtagatgaaatctgttgtgggatttttttcccgaaacattacaaaataacctgtttatttacatgcaaataaacttctttgat

SEQ ID NO: 378659 - DNA, 499 bp, Homo Sapiens
  misc_feature (429)..(429): n is a, c, g, or t
  misc_feature (463)..(463): n is a, c, g, or t
  misc_feature (473)..(473): n is a, c, g, or t
  misc_feature (489)..(489): n is a, c, g, or t
ggattggggtgcccaacagaagaaagcaaatagatcatcagaaaagaataagaaaaagtttggtgtagaaagtgataaaagagtaaccaatgatatttctccggagtcgtcaccaggagttggaaggcgaagaacaaagactccacatacgttcccacacagtagatacatgagtcagatgtctgtcccagagcaggcagaattagagaaactgaaacagcggataaacttcagtgatttagatcagagaagcattggaagtgattcccaaggtagagcaacagctgctaacaacaaacgtcagcttagtgaaaaccgaaagcccttcaactttttgcctatgcagattaatactaacaaggagcaaaggtgcattttacaagtcccccaaacagaggaaacggttgggttcagcacagtgttaaaggnttgttttgctttctggtttttaagtaattgaccnctttggccanacttttccgggtgttntgaaggaggt

SEQ ID NO: 378660 - DNA, 443 bp, Homo Sapiens
  misc_feature (17)..(17): n is a, c, g, or t
  misc_feature (240)..(240): n is a, c, g, or t
  misc_feature (403)..(403): n is a, c, g, or t
  misc_feature (411)..(411): n is a, c, g, or t
  misc_feature (419)..(419): n is a, c, g, or t
gggaagcatacatagtnaattccttgcatacagctttgcctgatgtgtgttttaactctcctgctaggttgaaagctccctgaggcctcagatgcctctgtatgcctgcaagcctggcacaatgcttggcataaggactaggggcagacaagtctgtgctggcatggtcccaacagctgtaaccagggctcccgcagtgcatttgctgagcaggcataaaatgggaaaggcatggccttnggagtggtgtttcctctgatcactggcatcagaaacaccttagggaggatttttgtttgctcattttatataattgcagcttcttagactccacccccagagatttttccttcaacagtttttgttcaacaagttgaggttaggccaagggatccacattctnaacaagtntcttatgncaatttctgtacgcccattaggac

SEQ ID NO: 378661 - DNA, 636 bp, Homo Sapiens
ttcggcacgaggtagcaatgtattggagggaggtgttgctgcaaggtccaggagctgggaaactctgggctcggggggagataatgcaccaccagcctcaaaaaggagctgcccaagttgaatatgtagcaaagaccatgggataagttgaatagtggccagacgaatcactaataactcaccatgggaccctctgaagagaggcctgtgctcgtgtaaccatagcaacagcagatgccagcaacctactcattagtaccacccagtgataaggccatcccctgggctagacccaggggccataaagtagcaaagtagcaaatgtagcaataaagggcccgggtctatacggggacagggtccaaatgaccaggacttggccctctccccagccccgatgagggctcagagccagctgctgtcagctgtctggggagggaaggccctgctccataccaggggtccctgttctatactctaagcccactcaccgcatgatcacggactcatcggaatggcctcctcttagtgcatgtggttctctttagtttatttttctggaatttggggattggaccccagaaccaaacatgctggtacagtctaaaaataaatgacttgaacccacttcaatcc

SEQ ID NO: 378662 - DNA, 397 bp, Homo Sapiens
  misc_feature (63)..(63): n is a, c, g, or t
  misc_feature (152)..(152): n is a, c, g, or t
  misc_feature (241)..(241): n is a, c, g, or t
  misc_feature (263)..(263): n is a, c, g, or t
  misc_feature (286)..(286): n is a, c, g, or t
  misc_feature (298)..(298): n is a, c, g, or t
  misc_feature (306)..(306): n is a, c, g, or t
  misc_feature (315)..(315): n is a, c, g, or t
  misc_feature (324)..(324): n is a, c, g, or t
  misc_feature (330)..(330): n is a, c, g, or t
  misc_feature (336)..(336): n is a, c, g, or t
  misc_feature (339)..(339): n is a, c, g, or t
  misc_feature (360)..(360): n is a, c, g, or t
  misc_feature (366)..(366): n is a, c, g, or t
  misc_feature (374)..(374): n is a, c, g, or t
aacagcagacctccacagctcccaagagagatgaacttgccttctgcctagatgaaaaccccnggaaagagtaaacaggactttgtcttgcaacttgaataccagctcagcccactgtaggatagggcaccagacagagtacagaggtcccnattcccaggccttatctctcagatgacattttcaagacactgtctgggccaaaaggaaacttggctacattgaagagaagaacctagtncctgggaagattcattatctgncagaacaaatgaacaccctgagnctgtgaatagtncagttagncagttagtncaggcagtnacttgnccttgnagnccttgggtttgaactcagagnacctgnctggtttncaggtgtcaacccagtcacattt

SEQ ID NO: 378663 - DNA, 508 bp, Homo Sapiens
ctgtgttagctgatgtgtgaaagcgtagccggccagccacactagagatgccttttctgaataatgtattatgagcagtgtcagatttataaagccgaggagtggtttggaatatacagctggtccccaggtgcaggtcccagtgtttagatcccaaatggaaaacagcagcttctaagaggtacaactgttggaagaaaacacagttgaaatgcacccaggcaggtactagcaagtgtgcaaagagcacgtctacatttgagtaaaatgtctacacagatatttgtcagtgatgagaatgcaggaaaaggcagacatttcaaacatacctgaagtctttttactcattatcttgttaaagaatcactgaggtgcatgatttctacacatcgtgactgctctgctctgcgtttacaaaaccaacagcccgcgcaggtacctagctacctgcattcatgtgacatgtctggggaacagaagataaataaaggatcttgctgaaaaccag

SEQ ID NO: 378664 - DNA, 449 bp, Homo Sapiens
  misc_feature (21)..(21): n is a, c, g, or t
  misc_feature (39)..(39): n is a, c, g, or t
  misc_feature (123)..(123): n is a, c, g, or t
  misc_feature (147)..(147): n is a, c, g, or t
  misc_feature (398)..(398): n is a, c, g, or t
  misc_feature (401)..(403): n is a, c, g, or t
  misc_feature (414)..(414): n is a, c, g, or t
cctccctaggaaggggttccnagctctccaagaccaacnaccagctgcccaaaggccttgaaccaacccatctgtccccattgttttcccacactccagggcctggtggccgtgcctctggcnagaagaatcataagcagactcccnaaaccctgggaatgctcaagaaatgggggaggaagccccaacccccagacagctatggagcccaccttctgaccacggaccagttagactctatggcaagctggggttcaggtagggagattcataggcctgaggcaaattaaaacagctgttccccaccatcaccatccttccccttcacctggtatccaaaagcatactttggggatgggagtaagatttcaaaacgggcaacacacagcaggaagagnagnnntatctgtccantttgcagaggggagaggagcaggatggccagtccc

SEQ ID NO: 378665 - DNA, 459 bp, Homo Sapiens
agtcttctccagtcctgctcctccagctctcagcctctgcacagccaccagggttgcaaagggagccttgtgcttggaaagctactgcgtccgcgacctctctccttctcttcccctcgttcacctatgcttcttttcatgaaagatatttggcaatagttgggtacttcaaaagtctcaattctgctatcaaagggatgcaaagcttttatggctagaatggggtttgtggtttatacggacttggtttgcccttccatgtctactccccactgagaccctgattctcctcctgccctctcccttccctgcactgtttcctcccttccctctgccgtgatagatgctaaggagtggggtggaggtgggaagtgggaagcaacagtggcgtataggaaaaagaaaatataccccgtgcacattttcaacatgtagttgaagaagcctaaattaggtact

SEQ ID NO: 378666 - DNA, 501 bp, Homo Sapiens
  misc_feature (25)..(25): n is a, c, g, or t
  misc_feature (39)..(39): n is a, c, g, or t
  misc_feature (66)..(66): n is a, c, g, or t
  misc_feature (88)..(88): n is a, c, g, or t
  misc_feature (131)..(131): n is a, c, g, or t
gaaggccagccagtggaggagttanggagaataaaatanggggacaggaatccaactaaaattaantaataacccacagttccaaaangttaagtgtgaaaagttttaatcaaatatccgaaaattgtggnaatggtgaagcagaatacaaactgggacccctggatactgaagatcctaactctagatgtaccatagttagttgtatgagaattggacaagtcaaagtacttgacaatcagtttcttcaacttagaaataaaacagtttaggccaggtttattaaagtattaaaacccctttcagaggcatagttctataactctaaggaacataagactgtggatacctatctactgtcaggtactgctttggcagcagtgaaaatatcagtttcaatataactttaaacaataaatggactaacacttttgaagtatgaagcaaatacaaaccactggaatatttttatcccataaatcgttactttctttcattaag

SEQ ID NO: 378667 - DNA, 431 bp, Homo Sapiens
  misc_feature (376)..(376): n is a, c, g, or t
  misc_feature (417)..(417): n is a, c, g, or t
aaaaggaaggtgcaacttgggataatcatgaacaggttaaagataagatttcaagaagccatctaagaatacagaaccaaattggatccatttttttaaaaaaatggttttgcatggaacctggaccaaggcaaatgtcttttcttcgcagaattgttttccaggatgccagtggattcagatagcaatgcttggagtagaatccgttactaaaatagtttcaaagttgacaaaaaattttcaaagataaaagcagttttacattgggggttgctgaggtaggcacaagaaaaagtcaggcataaagcacaaggcagactgtttgagtggattggttgctgctcactaaaagttgttcccctgatctctaaatatngaggtcattacccaagaaatgcttttggtatgaatgagaanccagatctccactg

SEQ ID NO: 378668 - DNA, 544 bp, Homo Sapiens
  misc_feature (496)..(496): n is a, c, g, or t
tttgcttgaagggcttgacacaaagttctaactttttgttaaaaatctctggctttcctggctggtgaggaggcacaggctggggtcttcaggtatccactggtgccccgcatctgttccctccactccccagcccacattcttggctcttccagagagtctcagaccccgaagaactggagtgagaccctgctgaccaaggatccgatgcccttctacagttctggtggggtctgaaacttcgttccttagataaccggattttttaaaacatgaagatggggaagcttgaaagacattccatgagggtccaccgtcaagatgctcagagtaagctatgcatctcctctggcctcttgcctaactggaacatgctcaaggacctagagaatccatccatcctacttcgaatctgtctccgtgtggtcccacaaagtgcactacagagtcccagccagagagcgataacctggcgtcacattctgaaaaggccccnagtcatggtttaaagaccattctgggtgcccctttcagcctcaaaaaa

SEQ ID NO: 378669 - DNA, 407 bp, Homo Sapiens
  misc_feature (30)..(30): n is a, c, g, or t
  misc_feature (35)..(35): n is a, c, g, or t
  misc_feature (43)..(43): n is a, c, g, or t
  misc_feature (52)..(52): n is a, c, g, or t
  misc_feature (62)..(62): n is a, c, g, or t
  misc_feature (79)..(79): n is a, c, g, or t
aaaccccaaccgggaaaccccctacccccnggaangaatcctnagcccttangaacgggggnccggtgtgtgaagggtnaagtggtttcccggggtccaggacctgttcctgaaaaggaagacttccagccaggaaagtggaatgtgtgccagctcctcacccacgcccgcccttttacctttattgaaaatgagtggcatgttcaatgtgggtcccgtcatgaagggccttactctctttccccaaggtgtgcacgtatccttaataaatgatttaaaacatatggaaaattatagaggataatataatgaattagcctgtacccaagacctggccacatattgatatcttccagtaacagtttcaaaattgtttaagaaagaaaactttgcaggctgggcgcagt

SEQ ID NO: 378670 - DNA, 375 bp, Homo Sapiens
  misc_feature (102)..(102): n is a, c, g, or t
  misc_feature (236)..(236): n is a, c, g, or t
  misc_feature (299)..(299): n is a, c, g, or t
  misc_feature (305)..(305): n is a, c, g, or t
  misc_feature (314)..(314): n is a, c, g, or t
  misc_feature (330)..(330): n is a, c, g, or t
  misc_feature (361)..(361): n is a, c, g, or t
tgtggagggctatgcaccccgcggcggcacccccacagctgcaaggctgtgactgacgaggaaccgtttctgatcttcgccaaccggtactacctgcgcaanttcaacctggacgggtccaactacacgttacttaagcagggcctgaacaacgccgttgccttggattttgactaccgagagcagatgatctactggacagatgtgaccacccagggcagcatgatccgaagtgncaccttaacgggagcaatgtgcaggtcctacaccgtacaggcctcagcaaccccgatgggctngctgtngacttggtnggttgcaactgtactngtgcgacaaaggccgggacaacatcgaggtntccaagcttcaatg

SEQ ID NO: 378671 - DNA, 363 bp, Homo Sapiens
cgctgtgtgaccttgggtaacgtggccgccctctctgtaactgagagcacaggattaggcaggctttgaggctctgaggtgaccctgctccccctcaccccgtcatgctctgtgccttccacggcctgcctcctggccctgctcgggccgtagtccttctggaatgcccttcttgctgccttgtgggcagtcagactgactcgaatccagcaggacttaactggaccttcccaggggaatgtgggggctcttgcggggaatcgtgtctctccccacagttctgagtttcttgaagggcaggattggggctgaaccgctcttggtcttccgccgctgacttccagtgcctggcccagagacaga

SEQ ID NO: 378672 - DNA, 377 bp, Homo Sapiens
  misc_feature (366)..(366): n is a, c, g, or t
cccctataatttaaaaatacttaatatgtttataaggctgcatgcatggcaagagcactctaaagagaaataaaataatatgtgtgccctcagagcatttatgatatattttggaagaaaagaacgtgtaaaatcaaaaagtttcaacacaagtgataaataatgatgtgtcaaatgagtagtgagtcctattaggctttaaaatattaaagaaaacactaccaaggttttgcacagcgtcctgagttgtacttcagaataaaattagagtttataacggctaagagacaaacaaaatagcattatatgtaacgattatttaaaagagctgtagaggtgggactgggaatgggagaatacttcggnaataatgtgca

SEQ ID NO: 378673 - DNA, 439 bp, Homo Sapiens
  misc_feature (420)..(420): n is a, c, g, or t
cagcacagtgagagcgggtgacagcatgagaaaaatggatgtgttcttccatcactgctgttctcctctctgtttggattagacaaatggcacatacccaaggggaactagggacaatgctctgaggacagtaaccacttccatacagccctgccagattcatgagagcaatggtgcatctgctttttgttgccattgttgttacttaatcttgtcatggacagattatcgtttctgtggcatttcttttgtgggttctcactcaaattactttctttatcatggctgtgctgggattgtctgttgggcaagtcagcaccatttaccccttctggcaccttggacttgatatattgggtttctgagaagtgtggcatgttgggccttttgttcttccccttgtttcccttaccacccaantttaaattttaggataccc

SEQ ID NO: 378674 - DNA, 178 bp, Homo Sapiens
  misc_feature (92)..(102): n is a, c, g, or t
cccttatttcaggagacattttgcatgaggtatttgaaattcaggaacattttgattcttctcgaagtgcaggaaatagacaggatcccttnnnnnnnnnnntaagagcctcaccctcagaaactcttagaaaatggaatccagcagacacttcccatgatggtcaggagaaagcgcc

SEQ ID NO: 378675 - DNA, 450 bp, Homo Sapiens
  misc_feature (19)..(19): n is a, c, g, or t
  misc_feature (27)..(27): n is a, c, g, or t
  misc_feature (122)..(122): n is a, c, g, or t
tggccgcatctggaccttnaaccatgnattccccattctccctcactcagctctgtgccatttcctgccacatctgctctccatctggccctcaaggatgggaacttaaccggccagtgggnaccccgtggggttcgttacttgaagcagaaggaaggcttccacacctgagcctcgaatccccggcgttccgggtagagaaggaaggcctgggggcctgcttggctcggggagaccacgccctggagggagacacgggggagatgtcaccgccgtaaggagggctcacggcagtgggctgcaggctgtcctggccgggggaggtgtagaggcccggtgaggagcgcgagggccgaggcagggcaggagatggagggagagcccccttgggcaggttgggcaccaggtccaaggagctgggcttggcgggcgaggcagctcttggtgagc

SEQ ID NO: 378676 - DNA, 347 bp, Homo Sapiens
  misc_feature (146)..(146): n is a, c, g, or t
acccctcgcgtcgaggccaccgcctggcctccccgcaccttgagccccttcagctcctcctgcagctgcgccacattgttctcgtcgggcagcgagctgttcccctttcccatgtcgagaaccttgtcctgcatctcccgaaggcnccccagtgtctccgtctcccgcagcctcgactgctccagctcggtctccaggtgggacacgaagtcttctgtgaggcgggggttctcctgctgctcctgtagctgccggatgggtgctctgtgccttctgcaggtcctcagccgccgagctgcactgctgccgcaccaccgccagctcccgcttgatgacgtagttcttcc

SEQ ID NO: 378677 - DNA, 813 bp, Homo Sapiens
cagcagcctggtgtgaccccacacacccagtgaggtctctggagccgcggtgcgggaagcggggacccgggtttgaatcctgcccctctggtgtggtgcggcctcttcccacagacttttggcctcagtgttccccgcctgggaagtgggaactggccctggtacctggctccagagctgcacccagaggcgatcagcccggtgcgggaacggggcggggtggccgcaactacgggccacggatcctgacccgccctgcccacgatgactatccacatcctcatcctgctgttgctcctcgccttctccgcccaaggggacctggacactgcagccaggcgaggccagcaccaggtcccccagcaccgcgggcacgtctgctacctgggcgtatgccggacccaccgcctggcggagatcatatactggattcgcttgtctccaaccaaggagccctcgggaaagcccagccacggagccccaggaccccttacagcttatgggcgccgccggtggcgcgaggcggaagcccggctcggttcccaggattccggcctgcagcgagggggctagcgcagtgcccagctcgctgggtgacctcgggcacggctcgtcccctcctcggcttcagtttgcctatctgtatgttggagcttctactccacatttcttctcccctaactccagcccctgaaaccgtcttccccagtccctccccgggctgcgactaggttggacctagaagcacacgggaccaggctgggcgaagaacactgacgcccagagccgaataaacaagagttccgtgtttca

SEQ ID NO: 378678 - DNA, 581 bp, Homo Sapiens
  misc_feature (454)..(515): n is a, c, g, or t
cggcacgaggaatccccaggaaagaagaggcatttcataacggaaacactaacagatacgatcactccgagccgctctccaaggcgtcctcatcgttaaatcaacaccaggggttgtgagcgggcaattgtgcccctctgacacccccgctcttccgcagactcgggctccaatccccgcgcgaggagtccctcgagactagccagctcttcctcgagacttcggaagctgggaaatccctgggccagggaaccagggagctcaagccccctcccctttcctgaaaattaatgaattggccgtctgattgtttatttaatgaggtgtgtagtggcctctactggtgctagtgtgagcacaagaatgtcccactcttacaagtgggatgagcctgggggaggggagagaggcgaggggtgaacctgcctccaggtacaaagctgggaactagacnnnnnnnnnnnnnnnnnnnnnnnnnnnnnnnnnnnnnnnnnnnnnnnnnnnnnnnnnnnnnntctcctccccaccacgcgcgatcccctttctcttcggcaaccggagccgaggcagagaagttcctg

SEQ ID NO: 378679 - DNA, 557 bp, Homo Sapiens
  misc_feature (105)..(105): n is a, c, g, or t
  misc_feature (130)..(130): n is a, c, g, or t
  misc_feature (154)..(154): n is a, c, g, or t
  misc_feature (172)..(172): n is a, c, g, or t
  misc_feature (286)..(286): n is a, c, g, or t
cgtgacaatgactaagcctttaaattggagcgtccccaaaactgagcacataagccttgcttgttttattattccagaatttttactaggtgtccgctttgcatncagaataaagattctattctttcancaatatgttgtagtgtctttagtncatttccaggctatagcncgtagactcaaatctgttattaaactggatctttgcagacagggttggcccaaataaacgtggaaaaaggaggactgtgttaaaacacatgcagtggaaactaatcaagggcgncgtacagacgcgggcagctacttgccaacaaccaggccgagcataaagtagtatcaaggaaaatcaaccaagactgtttcatattagaaggtggaaccgcctggaaacaacacgccctctcggaaagttcccgccatgctctggcgcagtttttcatcgtgatgcatctccccgcgcagcctggcgctctgcgggctacgcttctgctcacactggcagcgttggtgcacgtgggagtgcagtcacggggcctcacgttcgcgtttcctcg

SEQ ID NO: 378680 - DNA, 674 bp, Homo Sapiens
cgttgaagaggcatcaggttgggcttaggatactcagagcgaaagccaggcatggctttgggtagttctgtgaggtttgaccagtcacagaatgtcttaagcagttttctcttctgtaaggtatgattttgaggcctaagggaatgcatgtgaaagttctttgtagaagagctgtgcaatgttaatagttgctgtttcctgtaatcgctgttgttagagatgttgtgggcatgcgtgggagtctgtggggagctccatggctgaggtgacctggctcctcatgacctgttcttccatgttgatttggttccatgctcatgaagaccctggcatcgcctgaggtcatggtgatgtcccagcaacagatgatgagggcttgaaataaagtgagcttggatggtcactttatggagaaggaggaagtaattccagaaacactgggggataaatgtggtagggtgtggtgaacagacacacaggattagaaacagggaagaagatactgtgattccagctggtgagaccagatcaaaagtggacccgtcagctgtgatcgtcttctgtgtaggtctgaacttgcaaggaaagccagggctaggggttcacacttaggaataatgaacatctgatttgtagctaaacccatgtgagtagaggaagtcaccaaggggagc

SEQ ID NO: 378681 - DNA, 920 bp, Homo Sapiens
  misc_feature (486)..(486): n is a, c, g, or t
  misc_feature (662)..(676): n is a, c, g, or t
  misc_feature (906)..(906): n is a, c, g, or t
ccttacagcaaaagacacctttcagccctgctcccagcagtggtgtcgcagcgccatgcttgtgccgccctcgcccgccgcgccttggcccgtctccccgtgtgccagccaaactctccctttgggttcactcggatgcctgtagacacttcacaccatccctgggacacaggagaagaaaacgctcagctgaggttctggagtccggccctgccaccttcccagccctgtgtctgccgttctgccctgtgcgccgccttcatctcctcctgctgttcctcttcatccgcgtacgcatttattccctctttctcacgctcccctcctagttcccagtttccctgcaccccctttccccacgtccccatgtccccagcctaccatggaggccttgaggctgcctggccctgcttcaggcaaacctggctgaggcccaggtggtgtgttgtcctccatttgatatagaaattgtggctggtgacgggnaactcaaacttgcccccgaattcggtgaccttttccccttgattttaactctcaaggtcacacattagataggaagcatggtcccgagattcttgaaaatgcagagaaaatacatgaaggacatttggctgtagtctctaagggatgctgcgcagtgctatttgtttgaaaagagnnnnnnnnnnnnnnngagaagagtcttatgaatatagagcctgatgactcgtctcttgagtttttcatgtccccccgagtttagaatcccaggctaatagagcctcagcggtttctgaagtcactttctccacagaggcacatgcccaggttctctctgcctgtcccatcttgcctgtgaaaccagagatccagaaagaagtggaatgcatggaacctaaggggagctaactttcaaaaataaanagatgctgattggt

SEQ ID NO: 378682 - DNA, 527 bp, Homo Sapiens
ggccgcagagttgtcaaaagcatgaatgggaagccgccgcagagcggactccgggcgtgcagggaaccttgggctagcggggaagtgcctcccaggtgtctgcccaggtgtcaggacgaagtaccgtgtgcacgccacgccgcccacatgtgtgcccccgacccgcaattggaagtcacactgtgcgcctggggaacttgaattcgtccagcaaagagagaacatgagatcagtgtgcgagggaatggaggagagtgaaacaaaccgagagaagctttaacccgtgtacatattttagaggcaccaccccaagtttctggaagtgattcattcaccccaaaagtaaaaatctgattcatttttaacttgagttgttagtccttccctctttatggttgtcttttcttgggcaggacgagaccctagggattaggagaatataaggaattcctacaaaacatgtttagaaaatactgttttcggtcaaattttgttcactaaattaagcattggcccgcaaaacttag

SEQ ID NO: 378683 - DNA, 426 bp, Homo Sapiens
  misc_feature (347)..(347): n is a, c, g, or t
ccgggcgtgcagggaaccttgggctagcggggaagtgcctcccaggtgtctgcccaggtgtcaggacgaagtaccgtgtgcacgccacgccgcccacatgtgtgcccccgacccgcaattggaagtcacactgtgcgcctggggaacttgaattcgtccagcaaagagagaacatgagatcagtgtgcgagggaatggaggagagtgaaacaaaccgagagaagcttttaacccgtgttacatatttttagagggcaccaccccaagttttctgggaagttgatttcatttcacccccaaaagttaaaatcttgatttcatttttttaactttgagtttgtttagtnctttccctctttattgggttgtcttttttctttggggcagggacgagaccctaggggtttagggagattttagggattt

SEQ ID NO: 378684 - DNA, 700 bp, Homo Sapiens
  misc_feature (402)..(456): n is a, c, g, or t
ttatatcctgatgccacattggatagaacagcaggagaagcagaaaatctgactcaggattcacctgagagaaacagaatcatccaaaagtgacatttaaaattagaagagactaaaataacatgaactggcaactgtaattccctacaccacctcagaataggtggtttactgaaaataaaatagatttgttacagtaaagcagctaaattttctttgtacacatgattggcaatacatttttgagcctacaacagtatcatgagcagcaaaatttcttaacactaacaacatggcaaagagtttaaaaaagaaaagaaatgagggaagataaagtaggttagtcaatggacatagaaactgagtttattggaaccaatttgtgtcccacttcaagagtcnnnnnnnnnnnnnnnnnnnnnnnnnnnnnnnnnnnnnnnnnnnnnnnnnnnnnnngtacgtactacaaatatctagtactcattatactgtctgaagtattaatgtcttcagcagcaggatatttcagtagttgctacatatatgtataagtatgtaagtcctaaatgttggggttcaaaaagctataccccaaaatatggtgctttggcatgctgggtatttttaattaaaatgtctcagaaataagcctcagaaccaaggtctctctctgcctttccactctcctgccctccctcag

SEQ ID NO: 378685 - DNA, 372 bp, Homo Sapiens
ctgaatgaatataaacagaaaccacagatgctattacatattaaattggataatataacccattacagccgtgagccacccaagcccggccctaaaacatttaaaaatgtttattttaaacatacataagacatgcacacataaagatacgcatagcatgattgagggcttggtgttttgtttctgtaacactggatttgaaacgaaactataatgagaatgtatagcagggctgggcgaatgacaggcttgcttatgactggagggtcaagggctattgagtgcaaaagctggatgtaatcagattagctcagtgttttgtttttatagctatgcattttagcgtttaaaccatggtaaagaacagctttt

SEQ ID NO: 378686 - DNA, 522 bp, Homo Sapiens
ccgggtgtgtgccctggctggaccgaggggtttcctccgctcagtcggcagggaccctcgctgaggtgcgaggacacatggctgactctgaactcgcagcttcagggaaaccttccagcagtttctccaccgcggctctcacgttccccgtggcgcagcttcttcgtatcaccaatggctcggacacgcgggcgccacccctctcttgcccttgtcgttgttcttccttttgttgggaatgttctttcttcccttccacctgaggatccctcggcttccaggccccagttcagatgccccctcttctaggaagccttccagagtcctctcttctgggtttttacataaaatattaaaacttccccataggcctttgaaaaaaattcatctatttgaagtgcagagtcacatttttgtgaggcgaatgaactaatgggggtgagtctgatgcagagagggaactcgaacccagtgtgtcagacgcccgtgatcagtgtgatcagtgatggtgggtgtgcggcc

SEQ ID NO: 378687 - DNA, 530 bp, Homo Sapiens
  misc_feature (14)..(14): n is a, c, g, or t
ctctgcctctcagnaggtggccttggtcttcaagtttcagcaattctgggaagccaaggacacctccatctcctcctccctgatctgcaactcatctaagagcagctttctcattggaatgtcttgtgtttaaggaacaagaatccctgtttccggtttgggtgcccaagtgcacctactggatccaacccagggattggagatactttgcagaacacaacatcatctgggcacatgaccagccatggtgtttcactttcacaatttcagcttccttcactgattgcagcataatcgtggttcagcagcctccaaggaccaggggctgatgtggggcggctacagggagaaattgaagaggaagttcttggtggtgccctccatgagtacaaagaagcctcagtccccaggacacccttccgtgcatggtgtcactgacatctttatttcttttgtcacgttctgtaaatcacaatgaatggggtattcttcttctattatatatttgttaagtcttttttggcatcttt

SEQ ID NO: 378688 - DNA, 513 bp, Homo Sapiens
  misc_feature (489)..(489): n is a, c, g, or t
tctcctagattatgctataccaggaatagagccctaaggggagaaattcctcttcaaagtcagagctagataacactgtgtgtgggtattcaggttgttctcctttggaaagagaaaaaaaggtgggaggcaaacttctaaaaccagccaacatcaaaaagcatattcctactttgtctgtgtggtgtgcatggaggggaggcagaggagaggtggaagtggccgggcaaaagacaattaacacatcctgctcagcagggggaggaacgtgggcatccggtccagggtactccagggcggtggtgggcaacaggaaaagtacacatgccagctctggcaactaccctatgctggctctaccaccaaagacccggaaccaaagttgggtgcacagtttgctccctgaatggtgggctcaggcacggctctgacttcatttctcaggcaggcaacagacacgtttaccttacgctctggctcctgctgttnccttgcagcaagggggaattcgac

SEQ ID NO: 378689 - DNA, 482 bp, Homo Sapiens
  misc_feature (130)..(142): n is a, c, g, or t
aaacagatgagtgatacagtacctgaatggtactgcttctgaggcaacactttggattgaaagtgctgcttttggttaaaggaactatgttgtggaaagcatattccagtgtaaatttgcagatgtgtgnnnnnnnnnnnnngtcacttttcataaggtttcgagtaagttgcagtggcttttgatcatagtttagcccatttaatggtccttttacctagaatgttcttaagcagttaatgacaatttgggaatacacagataacttgtaggcttaagatactattttcatttaattctcccgtggagaatattgctttattttttactagtttcaggtcagttattaaaataaacatggaggttttaatgaatgttgtataatattttatagtgaaggaaaattgtggaaagggcaaagactttctctttcccttatgtatttaactgtgccaatctaaatacatactgttttatacaat

SEQ ID NO: 378690 - DNA, 542 bp, Homo Sapiens
  misc_feature (21)..(21): n is a, c, g, or t
  misc_feature (28)..(28): n is a, c, g, or t
  misc_feature (57)..(57): n is a, c, g, or t
  misc_feature (65)..(65): n is a, c, g, or t
  misc_feature (80)..(94): n is a, c, g, or t
  misc_feature (104)..(104): n is a, c, g, or t
  misc_feature (142)..(142): n is a, c, g, or t
  misc_feature (173)..(227): n is a, c, g, or t
  misc_feature (480)..(480): n is a, c, g, or t
cccgccctttgaagccaagcnggagatnacttaagcacggagtcaaaccaccctggnaacacggngaccccatctctacnnnnnnnnnnnnnnngttgggcagntgtggtggtatgtgcctgtggtccacctgctcggaagnctgaggtgggaggattgggcccagaggtcgnnnnnnnnnnnnnnnnnnnnnnnnnnnnnnnnnnnnnnnnnnnnnnnnnnnnnnnagaacctctctcaagaaaatataaaataagccttcatttatgtaatgatcaaaataagcctaatataaatgaaaatagtgaaaactagtgcaaatgttatgctaacagagagctgaactatcaaactcctttaagacttaggttagagctctaacatgtgagtgctttccatactcttccttttcactaggaaatggctttcattaagaacaagtcagtcagtggctgggcacagtgacacatgcctgtggtncccggtcactttgggaggcccaaggtgggtgcattgcttgagtatgggagttcgggacccag

SEQ ID NO: 378691 - DNA, 576 bp, Homo Sapiens
  misc_feature (439)..(483): n is a, c, g, or t
atgattagtcccaaatgtcaaaagcactgcatttcggaaaaccgtcctagtggtagagaaagaagatgggagaaggactttttgcaggaaaaattctcttactgtaaaggttccttaccccaacacaaaacacatacacacacatatatacatgcacacccacacagataaaacagacaaatcagtgcattgctttgtgggcctcacatcagcctctgaggagacttgcatctctcagtggtgggggacacattcagggtttctagacgtgtcccaaaccactcactttccctgaattttcagcatttaggagaaatttccatggagaagaagaatcgctgtctggtcatccatgcaatttcctgctcagttttaatagcagctgggcttctccctgtctaaggttgaaaccaaaaggctgtattttcctgtgggggcnnnnnnnnnnnnnnnnnnnnnnnnnnnnnnnnnnnnnnnnnnnnncgcttacaaacgcctccctggacatttagaatttctaaatagaattttggctcaagtcttgaaaagcacagagtgatgtcagctgaggcggcc

SEQ ID NO: 378692 - DNA, 541 bp, Homo Sapiens
  misc_feature (248)..(479): n is a, c, g, or t
atttttaatgggttactcttaagtgttacgtaattccttatgctgtggtgatcttgacattttaccagttcaagtgaagtatagaaagcgtccctccatttaagattcattacctctccatttataatataattctcttaaatattttctctttatacattgggaacatcagacaatattataactttgtcatcagtgatgaaacacaagttagaaaaacagaggctgggcgtggtggctcacactgnnnnnnnnnnnnnnnnnnnnnnnnnnnnnnnnnnnnnnnnnnnnnnnnnnnnnnnnnnnnnnnnnnnnnnnnnnnnnnnnnnnnnnnnnnnnnnnnnnnnnnnnnnnnnnnnnnnnnnnnnnnnnnnnnnnnnnnnnnnnnnnnnnnnnnnnnnnnnnnnnnnnnnnnnnnnnnnnnnnnnnnnnnnnnnnnnnnnnnnnnnnnnnnnnnnnnnnnnnnnnnnnnnnnnnnncgacagagcaagactctgtgtcagaaataaatacataaatacataaatagatagaaagaaag

SEQ ID NO: 378693 - DNA, 662 bp, Homo Sapiens
agcatgagctctggagccagacaccagtgatttgtgtcctggctctgtcatcatttgtatgattttaggcaagttattaaacctccaaactgtacataaaataacaatacctatagggtttcttaaaaggactaaaatatgtatgcataaaacattagaacaccacctaatacataccaggtgcttaatagattagattacaataatacgcttctttctggttttgattgcggcattcttacagagttactaaattctttcatcctgctcatgattgggcagctcaattggacattctatttggctctgatataacgccatgtgactggtttacctttgtcctttgtgcctagaatcattttgttttcccacaccaagttacagtgggagtggaggtctggctattttgtgttctcatcacattttgtgcctgagcaatagctggcaagggtgttggaagagatctcggtagaggctacaggcaagtgtgtcatttttcttgtaagaccccaattctgttagcttttgagattttgttaaatgtcctacaccaagttgcatctaattggagaaatttctctaatttggagtgtggctagagaacatttatttccaccagagaatatcagcatagctactcactttaccccctttagactttc

SEQ ID NO: 378694 - DNA, 638 bp, Homo Sapiens
aaaaaacccataactttttgagggccaacaggacaccacaagtggaaagttccacaccttatgtgatggggcacaaagtgtaggggcacaacacatagtttattcagtgtccctaagggaaaaagactctctcaaccccctttagccgtgatatatctttgtatacatgcatagtatattagtcctcgcattgctatatgcattctcgcattgctataaagaactacctgagactgggtaatttataaagggaagagttttaattggctcacagttcttgcaggctgtataggaaacataacttcggaggcctcaggaaacttacactcatagtggaaggtgaagggcaaacaagcacgtcttatgtggccggagcaggaagaagagagagaggtgggaggtgccacacacatttaaacaactacatttcttgagacctgtgtcacgagaacagcaccaaaggggggaaatcagcccccatgatgcaatcacctcccaccaggcccacctccagcattggggattgcaatccgacatgagatttgggcagggacacgaatccaaaccatatcacctagattccctcacacaagtactccctcaaaggacaatatacaaatattccaaaatctgaaaaa

SEQ ID NO: 378695 - DNA, 701 bp, Homo Sapiens
  misc_feature (332)..(340): n is a, c, g, or t
  misc_feature (602)..(602): n is a, c, g, or t
aatgctttcttcatgtaaatgtttatacgggcatatataatcacaatgggaacagttaaaaccccctcccttcaaaaaaagaaaatctatatcagttgggtttggttttggttcttcattggctcaaggcagttaactgtctcagtatagcctttggggagatttaacctcattctagccatttttccatcctgaaggccaagaaggactattagaagggtttttgaggggtttcggaggtgagggcccaagacccccataatgacatcattaggtattcttgaaaggtgttaacagaccagcacgctcgatgtgttgtacccttcatttannnnnnnnnctcagcatcccaagttgtccatcagtacattccccttcaccttacctgatcttcatttaatgcccagtctgtaactaatgttctgtttaaagctctcttaatttgttggctatgagtgatttgtgaatctgggatgtaaccctgagtgaggagaaaagggcattgagccagcataaatctgaatgggcagaagccacaaacaaatgggagcggaaaagaagggcgagctcccccgcgccgcaccccgtgtataatccagtgntaacctctgaggaacacctcggctctcccaactgaggagagacaaaagagggattctttttacacccaggctggcgcattttcaagtgacaatctcggg

SEQ ID NO: 378696 - DNA, 566 bp, Homo Sapiens
  misc_feature (59)..(59): n is a, c, g, or t
  misc_feature (66)..(66): n is a, c, g, or t
  misc_feature (113)..(113): n is a, c, g, or t
  misc_feature (183)..(183): n is a, c, g, or t
  misc_feature (458)..(509): n is a, c, g, or t
  misc_feature (537)..(537): n is a, c, g, or t
ctgatttcagttaaaagtcaaagtggcatgcaagtagggcaagggtggcccctacatanatatagncatagccatttgttgagaaatttaagtgttcaaaacatagccaagancacttatcaggtattgaaaagctagaggccagccacttctggctcttagttccccatgtcaactcccttnataattttcaaatgaggaagtatcagtgtattctcccaaaccactctaaattcattagtaacattttctaccatccttctgcaaacattttacatacatcatgagaaacaaaagaaagtttcatatataactacgactccccaaaccaattgctactcactcttaattatactttgtttatggcaagtagaagttacagcccttaggattatctgatgagatactttctagtcttctcataatgtccctcaattacatgaagcatttagaattannnnnnnnnnnnnnnnnnnnnnnnnnnnnnnnnnnnnnnnnnnnnnnnnnnngaaagtccattttaataaaagcaagaangcttttaaaagtaattttacctcgtgccg

SEQ ID NO: 378697 - DNA, 391 bp, Homo Sapiens
tgagtagccaattggtttggggaagcccctagttatatatgaaaccttcccttttgttcccccatgatgtatgtaaaatgtttgccagaaggatggtagaaaatgttacctaatgaatttagagtggtttgggagaatacactgatacttcctcatttgaaaattataaggagttacaaggggaactaagaaccagaagtggctggcctctagcttttcaatacctgataagtgttcttggttatgttttgaacacttaaatttctcaacaaatggctatgtctatatttatgtaggggccacccttgccctacttgcatgccactttgacttttaactgaaatcagtgtgaattctgtatgcataagggatgtaataaagaggcgggata

SEQ ID NO: 378698 - DNA, 909 bp, Homo Sapiens
  misc_feature (364)..(364): n is a, c, g, or t
tggaaaaacacatctgcaaatgtctcatttttttcttcaggggtaagttttcttccttggagactcttgtcttgaaaaagtgatactagatcaccatttggcaagataattacaaaaggcagatagagtaattattttacatagctgttatagggtgactaagatctcagggaatgactgtgttctgtaatccacttgccccactcaataccccaagttttatacaagccaaagatgcttggagcagaatctgctacctgaggctccagggccttggccaaggggaaaactaatacttaactttttaagtggtcattgatgacatcccactcctttctgaggatggggtatggatttgaaaggncaggtgtattcatgggagagcagggcttgggacctttgctgcaagaggaggaactattagcctagacttttctaataaggactttctcatacctgtttcctagatctggtccacatagaagaaatcagggaacacacagggtaggactcttaaaggagtatgtttcttggctttttcctaaaaactaaaacaaaaacattcatagcaaagcagtttagcccagtgactaagagtatagaccattggaatcctgaaagatcctgggttggaattcctgccttcagcccatttacctaattatgtaacttcacatctctgagaatgggggaaattttctttgcagggttgttacaaagcttaaaagagttaagtcaagtgccctggaacagaacagccattcaataaatcatagaaatttttggttttacacaaatttttaaaaagtaatattttttgcatttgttagaaagactatattttctgtttagtggatgacatcatcatcataaaaatcactgttacaagttttgttttgagaattaaaa

SEQ ID NO: 378699 - DNA, 279 bp, Homo Sapiens
aattttagacctttctgagaagattattatatatgacatatctatagctatgtgtatggccatagatgtatttctgtgtgtacatatgtatagtcatgtattcctgcatatgtacatacaaatacagagatatataaagtacatagaaattccttacttgtaaatagccaaaaagtactgacatgagtgaattttcacatttaaatagtcatcaatatgaagccatgattaatgcttgtataatgtgatgcaataaaatttaaaataaatttctgcaca

SEQ ID NO: 378700 - DNA, 549 bp, Homo Sapiens
gtttcagaccagcttgtgtcaatagggtcctacagagcagctgatatcagcagttttactagtatgcaggacctgaaagaatatctcaaagggaaaacaatgtttcataatgttcaggaagttatctatagagcagctaaggggaaataatcttgtaacagggtctgggtgattctgaggtaataggccccaaacaaccatggggaagcaggtcagagggcaagctggcctagtgtttaacattgaatgggctgaaagtttggtttatttttgtttcttgtttctccccctcccttcttacctgaataattttatgaagtttatagggatggtttcaggacctccattctatctgttcctgaaatattacaaaaagattattattgtagcactcatctaattgtgttttatctcgttgtttgcatgtctgtttcttccccagtgagttgtaaattgcttaagggcaaacagacgcatcctatttatctgtctgtcactaacattaagcacagcatttggtatacagtcatcacttcttttaaagtttga

SEQ ID NO: 378701 - DNA, 588 bp, Homo Sapiens
gaggggaaaaagcacaggacttaaggatggaagtctagagtcatccaggtgatattgctttagtcaatcacttatctggacctcatctgtaatgccctctctagttctccagccccgacagtttaggaatccttatgaatcttcctttacataggatgtattctcaggttaggtatttggtaaaagtctccccttctctctacaaagtcatagaattctcatgagtaggttctttgccttattcaactttaaattccaagagccacagagccaagcacatggtaagcactcaaggtgtttgctgttgctgttgctttgttgtcacggacagtggtgatggtggtagtaatggtgtaaaagttcccctgaggtggtgacttccatgtgggttttattgcagatatgtaacttgctttagttatgcctgactgaggaaaattcagagatgagtgttttgggccagatcttcagaaggcagcctcccatttaacaggcacttatttatcatgctaacactatgtggtttgccataccaacattgaggatcatcttgctcaaggtaagtctgatgaagcctttttgaaaaat

SEQ ID NO: 378702 - DNA, 661 bp, Homo Sapiens
  misc_feature (561)..(608): n is a, c, g, or t
ttcggcacaggtagtttttttggggggtgatggggaggggtagtattggttttagaggtttcaaatctgtgaactttggagaggggacagttgttggctctggtatttactagttttgtagtaacgttttgctagcctgactgacttttcttactggtttttatgcccacggtccgaggggactgttcttcttgtttggggtgtctgcggaatagcgtctcgtcttgtttgtataggcagtcaatgtgtgtgacatgtgtgtcctttcagtccggaagcccactgtgtgacaatggcgtggggtgtggctgggaggtggggtgctgaagcttgaagagcatttctttgctgattcataacagtatttcccatcttttgcctgcaggcagggaaagtgtacagtatttattttgtttctgttttactttaaatttgtaagtctttaagtagcttacattgattattataggggaggacaagtgacttgtttaaagttgtatttagtattctttccaatttctgtattttaaaatattgaaattaaaattgtattacttctgnnnnnnnnnnnnnnnnnnnnnnnnnnnnnnnnnnnnnnnnnnnnnnnnagtataaatgttgaaaattgtataaaatgcgtccttgaaagaaaaagaatctg

SEQ ID NO: 378703 - DNA, 435 bp, Homo Sapiens
  misc_feature (12)..(12): n is a, c, g, or t
  misc_feature (284)..(284): n is a, c, g, or t
  misc_feature (336)..(336): n is a, c, g, or t
tttcggcacagngactcagaccccttcctagcccagagctctacccactctttgctggccttgggtcttgctcctcccagcagatttgggtgttccctccacagtgctccccaagggccttgcacagaccactgtgaaagcatgtaccagaatctgttgtcacaaaatacgcagggttttggagaccagggacctcgtgtcatgtctccggacctacagcttcttctgtaagcctggcccacagaaggcaccaggaaatgttggaaaaaggcaggagaagaggnaggggggcagaggaaagagggatgggaggagcagcaggggatggcaggggcntccacttgttgaggggggtcccccaaggacagcctgttcatttacagccgagttcagaaggaactgttgacctggttgactgttgagcaggaggtttct

SEQ ID NO: 378704 - DNA, 553 bp, Homo Sapiens
  misc_feature (538)..(538): n is a, c, g, or t
gattcggaacgaggcggatcctgggcaagtgcacccataaagatatagcctgatcttaacaaacatttcgttctccttggacagacatccttagaattcccactcatagatgtgtcccagattcctccctatggaaattagcaagatgcttggttatctcttaaatcagaccttgtactgcctatcctaggggctatgctgagatctctgggcctggagggttcagagcagtgaagggggtggctgctgagaagaagctgcatacctgtgtgaggccattgctccaggttaagtcattgaaatgtttaatgcagagcagcttggttggggatttgagaggactgcctcttagaaaggtttaggaggatatgaggggttcagagttctcttttatatctgtccagatgtcctcattgtaccatgtctggagccaacttgactttataacctttaattaatttagataacacatttccgtactgtttaaggccttttgaggcaagatattgtatttgtactggtaaacctcagtgttganggtaattagataaaa

SEQ ID NO: 378705 - DNA, 416 bp, Homo Sapiens
  misc_feature (352)..(352): n is a, c, g, or t
aattcggaacgagggcggatcctgggcaagtgcacccataaagatatagcctgatcttaacaaacatttcgttctccttggacagacatccttagaattcccactcatagatgtgtcccagattcctccctatggaaattagcaagatgcttggttatctcttaaatcagaccttgtactgctatctaggggctatgctgaggatctctgggcctgggagggttcagagcagtgaagggggtggctgctgagaagaagctgcatacctgtgtgaggccattgctccagggttaagtcattggaaatgtttaaatggcagagcagcttgggttgggggattttgaggagggantgcctctttaggaaaggttttagggaggatattgaagggggtttcagagttcctctttttaata

SEQ ID NO: 378706 - DNA, 691 bp, Homo Sapiens
tcattacttcttaatccttagggttgcattcaacaggctagatgtggacattactagacagaggttctggatgccttggactatgacctttgcccatttctgcctttcattaaaaataaaaccaagaggaggcagaagatggaaaggcaactgtctacctctccataagatccatattccacatgagttaagtattcttccctcttttctgaacgtgtgtttcatcataccaaccagagacacatttatttctcttttaaaggaacttccgttcttagatgagtctgccaaattttgccaaggggactattcttcatttgcctgttgactgtccttaatatcttcaacactccctcactctaattcatcattagatgattaatgaacacaggcttttttttggcctatttcttgaatggtttcatctgaaacacggaccttgagatcttacatgtctccgaggatttgaaaaagagtagattcattctagttctctccccttagtctaagcagatggctatgtgcctcaaagtttgggatctaaagttaaactactaggtatccgatagctttggaccaatcaagtccagcatcttcattttgcaggtgaggagacataaaaccagattgtttatttttccctggtttctatagagctaccaatggagctataaccaaaatccagattacc

SEQ ID NO: 378707 - DNA, 844 bp, Homo Sapiens
  misc_feature (97)..(97): n is a, c, g, or t
  misc_feature (104)..(104): n is a, c, g, or t
  misc_feature (507)..(507): n is a, c, g, or t
  misc_feature (660)..(684): n is a, c, g, or t
ctcaggcggactcagcccccctgctgcggcccatgctggggagacccgggcccgtgactcatcgggcacattctgggcccgatggtgccttggaagncgggtgnaggacagctgtgcccacagggccggccatacagtaggcggcagcaagcctggtctcggcagtgcctcttgtgaggctggcgtgtgagaatctaccatgaactcacacccaacccgtgacgttggctggtgccatgccgtcccccaggaccgggcgcgacagtgaaggaatgggtgtgaataccatcgggctgtgtgtcaatccacccccaagcccgaaagctgcccgggaccctgggctgcggacccgtctccctgtgcaggcactgagcctgtaagatttaggtgcctgagaatgcactcccgttctgtccccaaggagtcctgtcggggtggggccggttgtgtgaagcacagccagtaatggaacacagctaaacagccttctaactcccctcccttttncccctcctgagggaggcactgtgagatgacaccaaggaagctgaaaaaggcttcttgcctccctctttcctccaccgtgcctgggtcctcacccaccccgactccttaaaatggcctgtggcagggcgtgtgtcccatctgctgccctacccnnnnnnnnnnnnnnnnnnnnnnnnnactgggacgccttgagcacaggtcacctgccagggcactgtcatcgcaacggcagtgaacatttgctgcttgttctatgtattaggcagagtgctaagctctttactgtaccgtgatcctgggagggaggaaatgcgactctcccacttcaaaactgggg

SEQ ID NO: 378708 - DNA, 703 bp, Homo Sapiens
  misc_feature (142)..(170): n is a, c, g, or t
  misc_feature (389)..(389): n is a, c, g, or t
aaaatgtaaaagcattttgtgttaaattcatcaaggaattgacaaaaagctattttcctacacttgacagtaatatactgttttctgacattcctgttatcaactcctctgaaaatcttttagagatatacgactattagtnnnnnnnnnnnnnnnnnnnnnnnnnnnnnctgagactgaaatgtcaatatgaaaaccctgccaaataccttattcttatctatttctgctattttgatatttcaggtagagtccgaggaatagacaggaagaaatggtatcgcctgacagtcaattctacaattattttctttaaagagaacatggcaaacttacacagtacaactgcatactagaataaaacaagggaaagtactgaaaattcaccnatgcaaatactaattgttcccagcaattctctcatctcccttatttgtcattagcaaatatgttgctagtggctctcttaagaaaaattcccattctctgctctcttttacagcaacattctttgaaaatgttatctacaatggttccctcaattccttctgtggccttgtctcctgaaaccactccaaccatgctttaattcacctttctccctctaccaaaactgctcaccaatgtctgcaacaaccccaccccactaaattcaatggtctcaattctcagccttcatcttactgatcctgtctgtaacaac

SEQ ID NO: 378709 - DNA, 743 bp, Homo Sapiens
gcctcgcagtgctgccgttacataggtatacatgtgccatggtggtttgctgaacccatcaacccgtcatcttcaaagataaggccttcagtatatcaagatcagtggatcaaagaaacatcctcaagaaactaagaaacaacacaagattctctctgatgaaatgcttaagtataaggaaaatgatggaagacacagaagagcagcagaattgggtagaagactactacagatgccagatcgccacttctgaaagaaaggcttacgacaactggctctgtgtttaagcctcgcagagggagatgcaagagaagaaggctgcctacaagcagcacagatagggaaatgatttgaaaaacagagagtgctggagagacacattagtcaggagcccagctagtggacaaccccggcatagagaatcatccccaaagaggtcaatatggctttgggagggcccctttttcaggattgccctacttgctctactgcatggctggctcttcaggaccatttgtgggctgccagacacctcctctgcctgggtggcctctgggaacacgaccactgcctccatgcacaccacttggacaagctgaaatttgaagaggcccctgagctgtgacagccatgctgtggctcctacataacttggaaaagtatccaatacattttacgctgcctgcccagtgctgcctcatctgtctctaatcttctgtagtgtttcccctaataaaggtttg

SEQ ID NO: 378710 - DNA, 514 bp, Homo Sapiens
aattcggcatgagggaaaacctggaggcaaagaaaaaagagggaagcatgagggtactggatgcctgggcaaagattaagagaatttgccaagaggtgggacatttccaagacaaacagcatactttacactttggctaaagtccctcatggcagtactcatttttgatatgtgctctcactacatttaatcgcagtgacagttgtgagattagaggtaccgctttcttcaaaaggatcattgaaagttgtgggtttatccttgtgtttctgtttagttttttatcatactagttttatttgtaaaccaaaatgcattatattttagacctttgctccaaaaggctaatgtaataatttttttaatggacttaagattttaactctaaaacctcatcaacattccatatattatggattcacatgggacttgtaaaagacagactccacacttcagaactgcaatgggctttttgttcccactgctgagtatttccgacttcttttgaagggta

SEQ ID NO: 378711 - DNA, 651 bp, Homo Sapiens
tggagccttcctgcgttccagttcctctaggagaggccaagggctgccctgctcccagcttcagggagcctctgcctacatgggatggcccactgtgtggcgtcaggtacctggcacccactgagcatccggggaattaggtccctcctgtgccccagagctgctaggcagactgctaggcggttgactcaaggtgttacctgctagtgcctggggtgaaggctgcatggagcccaaccttgctcctggccttcctgtgctcaggcctctccccttttcgccagggcttcccgggtgcctctcccatgaagagggaacttcccctcccactccccatggaagacccaggtttgggctgttgcccagctttgaggccccctgtgggcttgcctgtcccaacccaagaggcagggctcaaagtgcccacccgggggttgcaaggacagcagaggaccacctgccctctgcaggaagctgtccaggaaaccgtgtcctgggctgtggtccttgactcccatggggagagctgggtcacttggcctcttctaactggccccaagcacgccaattctggagcatggttactaagtggctctgaagcttcagggtcaccacaggcttgtcctgactgcaaaatcatggagtggttgc

SEQ ID NO: 378712 - DNA, 385 bp, Homo Sapiens
cgtaagtgccctgtgtgcctctctgtgcctctgggagttgggagggaggaatgaggcatgaggtgatacctggggattagtggcctgctgggacttctgctggggcctcttcataccagagccctgtagtgaggtatcttactgcgggggaaggaaggaggcttgcctgccagcattctcttgctgggaaagacagaagggcacgtggtaagaagagggtcattggatcgaagctcatgtgcaccacagctgtttccccatcctccagtggctggcacaggaccccagggtagcacactggcacttgggacctagaaggggaggatctgggaagttcttgtgggactgaaggccctctctgtcttctagcctgggccaacatggt

SEQ ID NO: 378713 - DNA, 731 bp, Homo Sapiens
  misc_feature (207)..(225): n is a, c, g, or t
tttggggaacagatggtatttggttacataaataagttctttagtggtgatttgtgagattttgtaaagtgatacaccaccactttactattttgaatactactataaaggggaaatagtaagttactttatttttctatacaatcataattcatggtaatcaaatatgtaatgaaaaatatttctctttttagaataattccagcnnnnnnnnnnnnnnnnnnngacaggagtgaattttatattcactggctgttagcaccaaaaaaggagagaaaatcagacatgtaccttctgatggaagttcacagtcaccaggaataaatctttaaaaaattccacctgaatctaatcaagcctctagatataattaataatttccaggaagtacaagaaacacagagaagcaagttaaatgatacccagaaggatgcaataatcaaactgtagacctgtacaattatataggacaaatgattttgttctttcaatggagtcaaaatgtatttcaacataaaatacaaggggatgtgggatatattaggagagcttttaaactaagagacttaagggacgtgtcaatgaatctcaatctctgtatcttttatgaatttcaattcaaacaaattaattaaatgattatgagagggaactgtgaaaacacgattgttactagatttacactaagggattacagcaattatattcagtgagataatgtattagtccat

SEQ ID NO: 378714 - DNA, 339 bp, Homo Sapiens
  misc_feature (225)..(238): n is a, c, g, or t
tttttcttggaggagaggggaagggaggtgatggaatttctctatgtttattactttttcccatacatgctgttttattttccaaagtataaatgtgctacttttataatcagggaagaattactaaatgttcaatcattagatacctgagttataatatttttctctttttgtcagggaagaattactaaatgttcaatcattagatacccgagttataattannnnnnnnnnnnnnggcagagtgaatactgtaattacataatttcataatactttttacctacacaaatacaaaacaaacagtaatggtttctacacaaaatagtattatgaaac

SEQ ID NO: 378715 - DNA, 795 bp, Homo Sapiens
  misc_feature (60)..(60): n is a, c, g, or t
  misc_feature (68)..(68): n is a, c, g, or t
agcggagagcggcgctccggtcgcggggctcagcctccgcagaggctccgcggctgaggncgagcagnagaaggtaaggccacgcccccctgttgtgattggccaaccggggtccgacgtgtgggcccgctggctgacatgataggttctccggtgtcccaagagcggagcccgccggcaggcgccgggccccctgggagctgggctgcgacctctgctggggtctccgcgggtcgcccccctagggcttctccaggctgcggtacttcttgcgctgcacggacaccgggtccttaaacagcaccgggttccagacgcagacgagaggacagcaagggcatgtggcccgaaaactgccgctatctggttgatgcagtcgggggctggggcaggcggctttggccctgccccgggcccccaggcgcccagtggagcagcctccctggcgctgcttgccatagggcaccttgatagggggcagcttggtgactgctgctactatgaaattcatcaggacgtccacacaggtgggtgcctcatctgccagggtcctcagagccttgggcagggagtgggtgaagagagtgtggtaatacctatggtagaaggcggctgtggtgagaaccatggagaattcgttggtcctctcagcagtgtagccccagccaccatgggcctcgtcccagaaatggctcgacgtcaggaagcccaccatccgctctgggaagctctgccacaccagaaaggcaaagtccacctcacttgtggaaagactgctgcgggcatcgaggctga

SEQ ID NO: 378716 - DNA, 724 bp, Homo Sapiens
  misc_feature (71)..(71): n is a, c, g, or t
acaggttagaaagcaccaatagtttaggttttgaccagagaaatccaattaaacaaactggctagtctaancttggagttaaagatttttttctgattacacttagtcaccatcttaaccattggtcactgttgtcctgaaatttgttgacttccctggtgtcaagagttaacttttccttatcttctattgataccttccagctggtccatcgtacttctgtacaggctgttttgagtcacacagcttgctctatcaattgaaggtatagcttatgtacaaatgtattttagctttcatttctgattttcagcctggagcagtggcacactaatctacttctgcgttatctacaaacttccctgtcaatcatttgccaaggcctcactgcagggtcagggtctgagatctcactgaagctcttcccatcggcaaaccaatacatcgattctttacttgttttccgactcaggtctgctgttagaatgtaatgcagttattctctttaaaatatcatgctaattctcttaagttcctcttacattcagatctttcccaaaagctggagatcacataattcaaacatctgctgagctacattgggttcaggctgagatcctgtttctcagctcaacatcctggggtaatcatccacctacacctggctcagctgcattggccaagaataacaatgcatctgcacttttctaagcacgtttctgag

SEQ ID NO: 378717 - DNA, 541 bp, Homo Sapiens
  misc_feature (15)..(15): n is a, c, g, or t
agaacaacagcgagnaaggagccaaagctggagccagaaagcctggcaccgccaccttcccctgacagttagcaccttcctttcacaacatctcccttaagggggaagcgtctgctgtggaacccaccgcaaggcaacgcaggcagagttcagcctgaagagcgccaggccagcctcctctgtcttccgagcaccgcttctcaggtcgcttcccaatctgaggaggctgtcgtgtccacaaccagtccagggggatgtgcgccactagctgaggacgccaggcccggcgacaccacaaaggcttggccatgcggaatgtgccctcaagagcacacacttcgggtagagggcacttgcattgagctcttcagctttttaaatccactgtagttcatgagcctgtgtgacataattacttttacattttatattgtcaattagtttattggcattttcaatcttttcaactattggctatgaaaatatgaatttaacgtaacattcaaatgagtattaaagaaaaataaagtagaacttcaaa

SEQ ID NO: 378718 - DNA, 408 bp, Homo Sapiens
  misc_feature (27)..(27): n is a, c, g, or t
  misc_feature (119)..(119): n is a, c, g, or t
ggccagaagttccagccctgaaagaancgccccaggcccagccctccctctgtccttcccgagcacccgcttcctcaggtcgccttccccaatctgaggaggctgtcgtgtcccacaanccagtcccagggggatgtgcgcccaactagctgaggacgccaggcccggcgacaccacaaaggcttggccatgcggaatgtgccctcaagagcacacacttcgggtagagggcacttgcattgagctcttcagctttttaaatccactgtagttcatgagcctgtgtgacataattacttttacattttatattgtcaattagtttattggcattttcaatcttttcaactattggctatgaaaatatgaatttaacgtaacattcaaatgagtattaaagaaaaatta

SEQ ID NO: 378719 - DNA, 503 bp, Homo Sapiens
  misc_feature (31)..(31): n is a, c, g, or t
  misc_feature (41)..(41): n is a, c, g, or t
aaattaaaatccatatttccatagccaaatntttgaaaaanattgaaatgccaaataaactaaattgaacaaataataaaatgtaaaaataaattatgtcacacaggctcatgaactaacagtggatttaaaaagctgaagagctcaatgcaagtgccctctacccgaagtgtgtgctcttgagggcacattccgcatggccaagcctttgtggtgtcgccgggcctggcgtcctcagctagtggcgcacatccccctggactggttgtggacacgacagcctcctcagattgggaagcgacctgagaagcggtgctcggaagacagaggaggctggcctggcgctcttcaggctgaactctgcctgcgttgcttgcggtgggttccacagcagacgcttcccccttaagggagatgttgtgaaaggaaggtgctaactgtcaggggaaggtgcggtgccaggctttctggctccagctttggctccttctcgctgttgttct

SEQ ID NO: 378720 - DNA, 763 bp, Homo Sapiens
  misc_feature (430)..(430): n is a, c, g, or t
ttcggcacgaggggtaatatcaccttccatgcaggccagttttgaagactgaatgagataatgcctgtagaactacttagactggtacaaaataaacacattcacaatgtcaactattgtgcgtgctgtccctgcgtggtgacagtaccacagagagtgttgtccccattgtatctgtccagtgctttgtgagtgtgtgtttgtttttagtggaatgaattcttttcctcattcatgagcatagaggctgatagaaattccagggcaatctgatctacctcgaggtccctcccctgggcccttcacacaaagccagaaaacagaaatgagtcctttctccctgtctggcttctggaggctggccatagggcctgaaacggcatccctgccaagctaacacaggttcctgggtgcccaaagtgtgcccgcnccctgccagatggcagacagtgcccatagctgccacaccctccaccccagcacactcaggaccatgctcttgttgctactcacccttcagtcaaaaaatcaaacaaaacacaacgggccctggagagctgtcctcaggtttcctccttcccaggaggaagcaaaggtgaaaggaaaaagggtttctgcataaggtgcccacctttggggagtctgaatttctgccctcttattttattaatattatttgctgctatgctgttcagtcgtgaagcccagggccccacacagagtgacgcctctgggtcccgcggtggatggaaaggtcggatct

SEQ ID NO: 378721 - DNA, 440 bp, Homo Sapiens
gatgttagcctggggttttggctggattccacctcgctcagtgatgatagtctgtttccctggaacattcctgtggttttagtagtaatgagatgtgtgcaccactccagtgggaactgaagctcttagtagttacattgtaattaaaaaagaattataaaacaagaaatcagcaagcctgcttacctccagagacacaccgttccacttacagtatctagcttcctcgactcctttgttaaaatcgtggagtatgaaccgtgaccagagaagtaaatatgggagccgttttattggagcagtttcctccagggatgacggctgtcagtgtgtttcctgccagttttccagtccttaactctctgcccttcattctgtaactcttgggcagagtcagtaaccaaccactaataaaattcaaagttgtagtaaagatttaa

SEQ ID NO: 378722 - DNA, 796 bp, Homo Sapiens
  misc_feature (169)..(169): n is a, c, g, or t
  misc_feature (473)..(473): n is a, c, g, or t
cggactgttactgagctgcgccttccctgtgagatcatccagctgacggcgctgagggctcgggatgctggaacatcagttaccgaatggtcaccccagaacagggagtactgccctaagttcctcaaacgctgcgattcataccgggacttcaatccccctccacacnccccacccccgccagctccctgacatttcgccttttaacaagttcaggatttaaacaatcacctgacagcaatggtcccaagagtggatggagcacaaatttttcaaacccaattctcgtgcacacttccaagtcctttatgacctttcatttcaatccaaggaattacacatgacagaagaagcttcaagccctcctaaattacccaaggaaggaggctactgtatcagtttctgcagaccagggacaaacaccgccgctgtcaagacgggaaataaaagtttccctaccttcctcctcaccnatgcccccttgccagcggctgccggcgcgagcggcggctccctcccggctgcagaacgccctctcgttgccggagaaggggctcagcaaaattgactcttccttatttgtttccatccataattgatggggagatgagaacgtaacacatctcagcaccgagctcttgtcgcctggcggagaccctgtccaagacgcttccgtaaagcatttccagtcggggaacaaagcacggaaagttgctgggtagagcggccgggaggagaacaccgggagccgggtgggcggtggggtggcccggtggcctgctccgggcccgggagt

SEQ ID NO: 378723 - DNA, 714 bp, Homo Sapiens
tttgaatgacaaacaaaatcaaaatgtgcatgaaatgttgcacgtaccacactgtatctggcttctggtaggttttcctaatcacactggttccttttaacataataagcttagtgacatccaacttcaacagtggactttattcctaaccacgagtaattttacatggtaccgcatatttaaaacaaagttttctttaatactacattgtctgattggaaatttcatttccaattctttttctgccagttacttaaaacacacagtacaatataaagacacacaacgtatgtttggacatttcaaaaccaatttatagtcaattacaaagaatcacaatatgccaatatattgttttataaacccagtctgaccttgcccagtgatagaaaaactaaaagttgaaatcttttggggtggaatacaggaaatattcaaagacaacagtaggacaggccaatagcaactggagatagaaaaatcttgacatctcgagacaatttagtttctcacatttttccatagctctgagaattcaaaggccatttttagcggtgtgtttttgctactgcttaaaacctatttttcccttaatttgcatttcacggaattctcaaagagaatttaatgctttttcttgcaagagtattttaattgagctctaagtatgacttgcattcaattctgaaaatacaaatacattttgaaatggcc

SEQ ID NO: 378724 - DNA, 536 bp, Homo Sapiens
gtgtgaggaaggatacagtcaggaaactaaggtaacaatgcagcaaaggatgctgtggctgaaaccacagtgacagtaacagaagaggtgagaaggggtcagtttctggataatttattagaaatcagtttctggcgaatccctcatctttctctactttaggaatgggtatatggaaaacacacacatactctgaggtacaagtctttatatttcattttgtaagataaaatgccaggcttagagtcttaaaattgaggggtgataggacctacgcaattaaaggtaactataacattaatggtttggaagaaagtaagtagactaccgtaccgtaacagcaaaacgagatttctgtattctacaactgtatcacaggggagctacgtttccaacagctatagaaaaagcagattcatgactaatgaacacatttaactagccttccactgcaagcaaaaaatgtccctagaagatcttttattatgctaaccaaagattaaataactacttctaatctactgaatgtgtaaaac

SEQ ID NO: 378725 - DNA, 848 bp, Homo Sapiens
gaagtggataaattatagtccgattcttgagtgtttgattaagggagaaaggaacttactttctgacacatataaatattttcagcatacaataacattatgtttgaatgttttcctttagtcttatttgaaaatctttgattctttactgatattggagttacgtatgtttcagctaaatgttacatttaataacagaagaaagtttagtgcctgaaaagatacaaattatcgttgtgtaagatttcacatttaaacagcaatattaaaaaaactgaattaggactatagggaaagtatcacgccattctaaaaaatgtgtaggaatatacttgggaaaatttcttatggcaaagttccacataacagaacgaaaagatcactcgctcgtgtaagttttcagttaaagaagaaagttatgttaatttggtaaaataaaaaacaggccttttcaattaagagatactattaaacccctagttatgatagtgatgatgctgttcataagaagtattgatggagaacttactggtcagagtctatgcaggcaaatgaaacacttcttttacttgggatctttcgttgtgaaagatcttacagcctaaaaacatgacggttcaacatgcagttgaataaatgtttagcgaatcgagtaaatgtagggaaaataaaactagctacattaggatgttaggattgctttcccgtatttaatttgagctggtaacactttcctggttatactggtaattttgcaaacagtaatgcttgtgatcccatacactttgtctagtaaaatgaaatcttccaaatggagaaaataaacctctatagtacggatttttgcc

SEQ ID NO: 378726 - DNA, 295 bp, Homo Sapiens
  misc_feature (25)..(25): n is a, c, g, or t
  misc_feature (29)..(29): n is a, c, g, or t
gggttcagtaagtcaaccaccaggncatnctctgcacaaatttgccagctaagatcagtataggccctcctccaacttatctgcaatgcactgggagaatatatcttcatatctatttagaaacatgcatataagttattttaatactatttatacaattttaggcattttcctagagtaggttttccactttcatcacccacagctacaaaattattcagttattttctacagttttacaaatataccatattacgggctgcttaatatcttccttgtttaagactttaacagt

SEQ ID NO: 378727 - DNA, 381 bp, Homo Sapiens
  misc_feature (204)..(204): n is a, c, g, or t
  misc_feature (219)..(219): n is a, c, g, or t
gggggcaaaaaaacccttgccttttcaaaaccccctgtccagcccagcccactgccttcgtgcccctgtgcacctaccctacccttgcttcctcaaatcagttgggttattttagggagaataagtattttagccaaggccactcagcgcttaagtgatagaagcagattccaactcaagtctgcatggctttaaaccctgtgntctttcctcaaattnccataattgttgggctaaatgaaactttctcactttgtctcactgacagagctatcattccctgggccctctctcttcccacctgcctcagcactggcttgaggactcaagtccgggaactgttggtggaaatagaaggcatttcagtggatgcctcagccc

SEQ ID NO: 378728 - DNA, 441 bp, Homo Sapiens
  misc_feature (27)..(27): n is a, c, g, or t
gacttgagtgggaaacctgcctcctanccacttaaggcgcctgagtggccctgggcctaaaaatacttaatactcccctaaaataaccccaactgatttgaagaagcaaggtaggtaagtgcacagggcacgaagcagtggctggctgacaggcgcttgaaagcaaggatttttgccgcttttgtttactgctgttcacctacccccttgttgccaaggcgacatcgtaaacactccattatttgttgaatgaacgaatgaattggctattttctaccacgaacttaagtgtccatactaattacatgaactaatttttaaagaaacacttcttaaaatcacattttacctgcaagatattattgcttgtaagaaatgccattgatttcatgtttttaatgaccacattaaatatacacattatttgaaaatcatcccaat

SEQ ID NO: 378729 - DNA, 580 bp, Homo Sapiens
  misc_feature (169)..(214): n is a, c, g, or t
gaaatggagtctcacttcatcacccaggctgctcatattactccacgactccacaccctccaccgcccgtaacatggggcaaaacgatcccagccccttgctccacacagggccattatgaacatcacgtgaaataagagataagcaaacctccaaaacgattcatacnnnnnnnnnnnnnnnnnnnnnnnnnnnnnnnnnnnnnnnnnnnnnnctccactcagagaaagacaagaaatcatttacttttgataaattatttcacggccatttcccccatgacttcatattcttaaaattctgattcactaaatatcaatttaaaaattcctaattccttgacatacaagtaaagtaaagtagaaatcaaaatgtaaaatttgtaagaaacctcttcatatagtcacattcctcaatttggtgttcctattttctataatcaaaggaagaaacagagaagagccaaccctatctggaaaattattatagtcaaatgaacaacagcccagcctaccacaaagagaaagctaaggcctttaattccctgggttctcgagacgtcactctgcggcgtatgtcc

SEQ ID NO: 378730 - DNA, 482 bp, Homo Sapiens
ccggaagcttggagttcgctgttgcccagggagctggtgggaccaggaactctactattagagggacgactgccttcaagcatccctgcaactgccacagcaggtgggggcagggctcgtgggaccctctggacagccaccaagatatctgagcaaccaagagtcccagccccaccagtatctgcttctgtagcccacggcaccccaaacttggagggacctgcccactcccctcccccattcccaaggttcgcacctcctggagcagcagcgcctgggcagtcctctgggctggcctcgggaaagccgccacctgtggtggcggtggggctctgacagggagtacagctgaccgcttctggagggtgtttctgttcttaggactccagtccaggctggacggctgcctgagggcccttcgttaaagacacgcttgtgtcctgggcgatggtaataaaaccagctcatgctgactgtgctgt

SEQ ID NO: 378731 - DNA, 400 bp, Homo Sapiens
  misc_feature (307)..(307): n is a, c, g, or t
  misc_feature (320)..(349): n is a, c, g, or t
aattcggcacgatgactccagcccttccagcccaaatctagagcattgagcactttatctcccacgactcagtgaagtttctccagtccctagtcctctcttttcacccaccttcctcagtttgctcacttaccccaggcccagcccttcggacctctagacaggcagcctcctcagctgtggagtccagcagtcactctgtgttctcctggcgctcctcccctaagttattgctgttcgcccgctgtgtgtgctcatcctcaccctcattgactcaggcctgggggcagggggtgggtggagggtngggaagagtcatnnnnnnnnnnnnnnnnnnnnnnnnnnnnnnctgtcttcccttccaaactgttccctttccccccaacaaaaaaaggaaaag

SEQ ID NO: 378732 - DNA, 479 bp, Homo Sapiens
aaagacaaatttgttcaactgcctaaaaccctgaaaaccctaacatcgtgccccaaaatgtggtgggacttcccataaatatgtgttgaaatggttgagatcttaatttctgttagaacggtctcctgagaatgacctcctacccgttgccctcagtaacctcttacgcatggagagcagagctgcaggaaagcaggacacacgtgagtccagccaactcagagcttcaaggaggcgtcccaggagaaacctccctcagccccgtttgcggtgccccctggtcggtaattttccagaagcaatttcttgtttcctccaaatggcctgtagaggtcagaaaagggccttgttttccaatcaccgactgtcctgtctacattagcattcaccccgggtgtctataattaagcaagcctaagctgggcacataggaacggaaatgcattgactttaataaaacagagtgtataaacaacttt

SEQ ID NO: 378733 - DNA, 505 bp, Homo Sapiens
  misc_feature (411)..(411): n is a, c, g, or t
  misc_feature (445)..(445): n is a, c, g, or t
  misc_feature (473)..(473): n is a, c, g, or t
  misc_feature (481)..(481): n is a, c, g, or t
ggggtcttaaggataaaatgcagacaggacctagtgcttgagccttttcagatccagccactacgtaattttctggtctcttctcttgacatcagcccctgttaaagtcataaacttactttcaattctcagaaagcaccttactcttctgttccctcttcttccatccatgtgcctagatctatccattatgtgcttaaatgtaggctcctccaagaagtctcccatgatctgattctgagttcctactgtcatcttggagaaacccagtcacagcttttgttgtatggcattgcctgtggacttttgctgtcccctcttcacctcccccccaccgccccactggcaccaagactgtaatatcttgggagaacaaaggacaattttgtttcactgctacatcctgagagnctagcatcgtgcccaagatgtggtgggacttccntaatgatgtgtttgaatgggtgagatcntaatttcngttagaacggtttcccgaggatga

SEQ ID NO: 378734 - DNA, 584 bp, Homo Sapiens
tacgtgttcaaatatttattttaacagcatcttttggaacatgtttatttcccttaaaaacgacacagaggaaacatgtacactgtaacaacaccttcccctctgtttctccagaagaaaaatgtttctgcatgcctgataacagatggtgcaaccaacagtaaacctggctctctacaccagtgaagaaccattctccaaatgcccagtgtgcctcagaggaaatatacaatttaaaagttgaccctgtagcaaaaattttgagtcaaattattaaaatttagaaaagaactggattcaaatacttacaaactaggcagtttttaaaactagacctttaagaccgtcctgggtcatccataatatatcagagtcactcttaggggtggtaacaacataaatagtatttcacttaacgtaaggctagtccatgaaataataaaatcaaacagttgggataaaaatttaattcaatttactgtagggtatcaacacatatttgagcagaagtcaatttctttgcactcatatataacttcatttccagttttacataaatgcaaataatcctttaaaagattttc

SEQ ID NO: 378735 - DNA, 448 bp, Homo Sapiens
gctttttgcagtagtatatttgagaagatctttctacgcagagactgtgattgcttaaactgtacacaaacacctggaagaaaaataagagatgtagtcaatcacttgggaattttgcctgcaagaagccacacagctatatgcctggcatcatgtaaatgtccagatccaggagcccatgagagaaattcgtaaagttctagatgtgtaggtgtcatgtagataaggattggttcatatcttcccattttaacagtgcttccagtttcctgtcaccattgagtgacgctcattttacagtcagaactgtatgccatggacacattttatgtgtaacccatgtggcaatcgcttcaagtcatttagcaggaggggaaaactccctaagcctctaagtcaggctttcccacccattttggaccagggaattctttgtttgcgggaggct

SEQ ID NO: 378736 - DNA, 481 bp, Homo Sapiens
  misc_feature (19)..(19): n is a, c, g, or t
tcttgctctgtcgcccggncggagtgccaacaagcaagaccccgtctcagggagaaaaaaaagacactaccccagtgaacaacggcaagagcaaacaggtcataatttgttaatgagatggcaactttggtcaaaccttttctgagggtagtttggcagaagtgatcaaaatttaaaatgcacatgaactaggacctagaaatacccattataggaacctgctcaacagaaataccaagtatagaagtataagaattttcacatccacattatttgggaaagcattttcccatttatacattttttcaagaggagactgcctataaattatgctatattcatacttgaaatattatgcagccattaaaaaaatatggaaggttattcatgagataccactgagcgaaaaaaaacaagctactgagtagtgcacaatattccatttttgtgttaaaaaagtaaatttctatgatatggtaat

SEQ ID NO: 378737 - DNA, 523 bp, Homo Sapiens
ttgccatgttgccggcactggtcttcaattctgggctcagacagtccacccacctcaccctcccagagtgctgtgattacaggcatgagccaccatgtccagcctaaggtcttctttttaaaactttgactatattatgatttccagagatttacaaaaatgcattaaagatagggtatttggtaaatagagatagaaatagattttaattaccctttgtcagtcaaatacagatccctattcttaagcatattcttatacaatatctcattattttaaaggaccctaagtgtgaccagaccatatttaaaatgagatgaaatatataagaggtactgatgttgtgatttgtaaaacatcacaattaatatgaggcttttttttagtgtcatgtttttaagttggaaatcttttcagtttataagatagctagataaaatatggatatgtagtcagcactctgtatccatagattatatatccccagattcaaccaactgcaggtcaaaaatattcaagaaaa

SEQ ID NO: 378738 - DNA, 569 bp, Homo Sapiens
  misc_feature (30)..(30): n is a, c, g, or t
ttcggcacgagggggagattttccttcagnacaattttctcagcctgattttgtcaggtatctaagttgaaccactttaaaaatgtagtaggtattaacaaaaaaaagagtggtcagccaagtgaccgaggtctgctattcggcattgctaagtcatgtctgactgtaggaagaataatacacagaggagagcaatctgcatacacgacaaaatagaatgaatacctgaaaaatagcaaatgcctgaaatatcccttctgcagaatgagaaagaagagcaagatgtaagacacaaacatcactttcaaaagataatcaagaacatgaaagatttgtggtattagtggcattattgacaataactttctgtacaaaccatttcttgttcaaattggtttaagtgctagatattaccaaaattatagcatcaggagacattcaaagggatcgtttaagggaaaagaagaaagcaaagcgcattaaaacaaaaaagatgagtatattagtttaattcaatgtaagcactgcttctgtatgataaaagcaacaaacagaaaaagaataacaac

SEQ ID NO: 378739 - DNA, 485 bp, Homo Sapiens
tcttacaagatggagtgagtggggccgggagtggggctcacaggttggtgtgagtggggccgggcatgggctcacaggatggtgggagtggggctgggagtgggactcacaggatggagtgagtggggctgggcacagtcttaacaaagatggtggaagtggggccgggcgtggtctcacaggatggtgtgagaggggccgggtgcggggctcacaggatggtgcatttgcccttttcccacccatgggttgttcttcatcaggtcggggttcaggaaggggtccttggggatcccgtcctcgatccacttcagcagctcggggatggtcttggacgccatctcccgctggaaggccagctggtacttaaggctctccacctctttcttcatctgtggcacgtcccactcctccatggggtcaggggcttctgaagcagccagcctggggcttgaaaaggtgacagcggagggacaatgacaacc

SEQ ID NO: 378740 - DNA, 368 bp, Homo Sapiens
  misc_feature (16)..(16): n is a, c, g, or t
  misc_feature (194)..(194): n is a, c, g, or t
ccccctgaggaaatgnaaaacaccttcctgaaaactccctgccacccccggcccctcacttcccaacgggggaaagattgaatttccttccagatttccggttgcccttttgaaacaccttcctctgtttcactgtgggtgtgtagaagcctatgaactcggaactttcgttgttttccgaggaccggaagaangatgtgcaagaaatcctgtcgagtagaatctcatcacaggggcgtgggcagccccaggagttggcgggtatgtagagagaggtgtcaaaaatagtaattgagagtgagctttgggaggaagatgttggaaataaagatggtggaagaaagaggagtgctgaggaaaggtgctct

SEQ ID NO: 378741 - DNA, 340 bp, Homo Sapiens
  misc_feature (249)..(249): n is a, c, g, or t
ctggacacagggcctggcacgtttctggtgttccgtccctgcttgttgagttgaatatcccctcatgaaccaggcaggtttgatggtagagtgccgtgagagccttgggctggggctaactggcctctgggtggatgtgggttctttagtcttcaatctgtagacacatccctgggatggagggcactgggcagagactcagcaaaccatggttctgccgtgcggagacaccggagccctgatgcagtngcctgggcccaggcttgttcctgggtggagacacttagagttccttgatgttggttggcctggcccagggttttcctggttgaagacaatt

SEQ ID NO: 378742 - DNA, 275 bp, Homo Sapiens
  misc_feature (28)..(28): n is a, c, g, or t
  misc_feature (35)..(35): n is a, c, g, or t
cccccaaaccctggtccctggctgcttncaacccngggctatctcctggcctccaaacacccgcgcccggcttcaaccatgacggtgatgtctggggagaacgtggacgaggcttcggccgccccgggccacccccaggatggcagctacccccggcaggccgaccacgacgaccacgagtgctgcgagcgcgtggtgatcaacatctccgggtgcgcttcgagacgcagctcaagaccctggcgcagttccccaacacgctgctgggcaaccct

SEQ ID NO: 378743 - DNA, 383 bp, Homo Sapiens
  misc_feature (342)..(342): n is a, c, g, or t
  misc_feature (363)..(363): n is a, c, g, or t
caggtgagattaatgaattcatactgttactgtataaatacacaatttttttaaacagcaccatttccaagttatacacaatatgattatgacttggcacaacttttaaaggtggaaaaggctagttgctagttcagtaataaaatacctggtacatagaacgataaggagctgtattctacctgctacacattgtgcattttacacctccagctaggacagaaacaagccacaagcggggaatacccccgcaaattaatactggaaagtttacaaaaccttcacttctcataagggtgatgctaccagcggcttgctttcacctggggtttgggtaactgnattttttaagacaactggggntgttaactcgctttcaaaca

SEQ ID NO: 378744 - DNA, 465 bp, Homo Sapiens
  misc_feature (423)..(423): n is a, c, g, or t
  misc_feature (443)..(443): n is a, c, g, or t
gtggatgcaggatgagtccgcattctagaagtgtgcagaggtacagaagtggccctgctccctgtccagcacccagtcatcagctttccctggcttcccgaggcaccctgacgttcacactccaaacacaaagtcttctctcaggaatctcgagtgagctgcagtctgggttctagccctgccctagcaggattctgcttcagtgactgggctgctctcttcctgctttaggccaatgcgggggagaggagaccactgtgactctccccagtgcccttgggagcgcagaatgaagtgaggggaggaggagggtcacgagccctgggagcgctggggaagacaggctgtagggccgcaccccggattccttgccttggggacgaggtttcaacagaagtaaggatggttttcatcattgacttnggcaggaaaaccaccagacntggaattttttgtttttacaat

SEQ ID NO: 378745 - DNA, 152 bp, Homo Sapiens
gaaacaaggtctcactctgtcaagcagactgacgtacagtgggtgtgatcatagctcaccgcagccccaacctcccgggctcgagcaatccccctgcctcagcctcccaagcagcatggaccacaggcacgtgccacctaccatgcctggcc

SEQ ID NO: 378746 - DNA, 595 bp, Homo Sapiens
aaagcacagtaagtcagattttattccggaccatcaggataggtatagcaaccatggcaatgggattctgaattaggagagagagagtgggctcaactctaaatacagcatgggcaagtgggaatttatagccaaggaacaaaaagcttggggtcactggataaaaaattactaagaaggaacttcaggagtaaaggggtttcttgctgaaaataggtcaaggtgatcagacatcaccttggatggtagaggatgaggaacctgatcagatattgagggtagagggttctaactggattttccaaggaaatgcacagataaacctacgagaaggttgaggagtctgactaaagtttggccaagcaaagaatctttgtcaccttccatcggtgtattaaaaaacttaagactcaagctgctcattactatctttaggctctaaaaagaaaagaaaaacaaaaacaatcaagggacatggcattatacttttacattagtaaatccaaagtcattttctcaatctcagcagtgaataataaaatgatcctcattagtatagtggctagattttataaaataagaaaaaattttttta

SEQ ID NO: 378747 - DNA, 328 bp, Homo Sapiens
  misc_feature (22)..(22): n is a, c, g, or t
  misc_feature (44)..(44): n is a, c, g, or t
  misc_feature (50)..(50): n is a, c, g, or t
  misc_feature (87)..(87): n is a, c, g, or t
  misc_feature (110)..(152): n is a, c, g, or t
  misc_feature (163)..(163): n is a, c, g, or t
tcctcagaagcccatcccgaanaccctctgtttttttctaaacngggctngaatgctgtggtgggcccctagaggtgaggtagagantgtgacacatcaggtagtgtgcnnnnnnnnnnnnnnnnnnnnnnnnnnnnnnnnnnnnnnnnnnnataaactgttnaagttatctcatttatatgaacatcaatctggagaacaggcatggggatggatattaattgtatgagattatggtgtaaggaacatagagttgtatcaggctgaatttactgattaggaccatcaaggtagtgactttgtgtttaatataacagcttggcgagtt

SEQ ID NO: 378748 - DNA, 422 bp, Homo Sapiens
  misc_feature (157)..(374): n is a, c, g, or t
  misc_feature (403)..(403): n is a, c, g, or t
ccaatccctggccaaacatggtgaaacccccatctcctattacaaatacaaaaattagcccaggtgtggtgatggtgcatgtcatttcatttcacacacaaaattgttgtggatgcttcaaccttaaaaatccctggcccaggcgccgtggctcatnnnnnnnnnnnnnnnnnnnnnnnnnnnnnnnnnnnnnnnnnnnnnnnnnnnnnnnnnnnnnnnnnnnnnnnnnnnnnnnnnnnnnnnnnnnnnnnnnnnnnnnnnnnnnnnnnnnnnnnnnnnnnnnnnnnnnnnnnnnnnnnnnnnnnnnnnnnnnnnnnnnnnnnnnnnnnnnnnnnnnnnnnnnnnnnnnnnnnnnnnnnnnnnnnnnnnnnnnntcgtgccattgcacttcagcctgagtganaaaagcaaaacttcatctc

SEQ ID NO: 378749 - DNA, 457 bp, Homo Sapiens
acgctgtcacctctcaatcccactcaaactgtgtttacagagcatcagagaaaaaaagacaacctgtattcgccctgggaaaaactaatgtaagaaatattttctcctttcaataattttttctgatgcagtaagaaattccccataaaatgcttaagattttacttccagtcttagaaatatgtgaacctataaatatatttgagaccaccaaattaattcaagacatctttcaagaaactattgaactgataaaagatatgatatgtgatgaatactcctgccctcaaggtggctaaaagctggtaaagacagacatataactgaatattgcatgccaaaatatgcaaacacatgtgcatatgaatgtgcacacacacacaactgcagtactgtgaaatcagtggcaacatagagattttcatgggggaacaactcaaaaccattagtgacagta

SEQ ID NO: 378750 - DNA, 353 bp, Homo Sapiens
ggttgaggagaaagcaagcaacattagtttactgcgcggccaaaggactactccaggcaccagtgaggaagggtaatttagatttctagtgggcaccctgccggcccatttcataacaatcagggggcctggagtgggggggcttgcgggtagttgatatcaaatcccggtctctctcacttccgctcaatcggcttttggccaaagacgagtatcttcttcctggactgccttctcccaccccaacccagacaccaaggggacgcgacagcggttttgggacgctggctgatcatctgagaggaggcgatcccggcccgctgggcgttcaggatcccgatctggatgccgtc

SEQ ID NO: 378751 - DNA, 393 bp, Homo Sapiens
  misc_feature (81)..(81): n is a, c, g, or t
  misc_feature (90)..(90): n is a, c, g, or t
  misc_feature (109)..(109): n is a, c, g, or t
  misc_feature (272)..(272): n is a, c, g, or t
  misc_feature (314)..(314): n is a, c, g, or t
  misc_feature (332)..(332): n is a, c, g, or t
ttgcgcccatcccaggggctggatcttgacatggaccgtatgcctccagaattctctccccggtcaaggctgaaatttacncctggctanacatcactcacgtttactncattcacgcactagaaattaactgcaagattggctgaagttcatttgtaaccctggtcaggcccaggatggcactggccccttcaccaaagggaacaataattcaagataagctgttggagtggattgcaccactgacccctcctagcccccttcctctccantccaaacccctctctctttaaaaacccctgcattccccccanaaattgaagggtggaaanttttggaaagaatctcacccactccttcccttattagcatggataataaaatctccttatc

SEQ ID NO: 378752 - DNA, 437 bp, Homo Sapiens
  misc_feature (12)..(12): n is a, c, g, or t
  misc_feature (254)..(254): n is a, c, g, or t
cgatcgtggaanaaatacgaagacaatcccacgttgctaattgtctgcgacggaaaacaatgcccagccgggatgtcgtcaccctggtcaaatccgtcctgttccatagacggaaccctctgcacttccaccttattgctgactccattgcggagcagatcctggccacgctcttccagacctggatggtgaccgctgtgcgtgtggacttctacaatgcagacgagctcaaggtatgggcaggaggggaggcnacttccgtgatctcctctagctggaagcgttattacttgtggttgagcagactgtagcaatgccagaaatctcagctcctaactgaaaatgtgtagggcgtaaggaagttgtttgccagcagaatctgattttattatcgaagtattaaagtaacccctttgagtgcacaaaatccactttgg

SEQ ID NO: 378753 - DNA, 436 bp, Homo Sapiens
  misc_feature (89)..(89): n is a, c, g, or t
  misc_feature (171)..(270): n is a, c, g, or t
  misc_feature (423)..(423): n is a, c, g, or t
tatcgcaatacagtcagtcagatggccagtcaggtggcaagtccatctacttcattacataccacatcctcatctaccacactatcaanaccagccctttcacccatcttccccatcacagttgagtccagacgacttagaactccctggctaaactggaagaacagaatnnnnnnnnnnnnnnnnnnnnnnnnnnnnnnnnnnnnnnnnnnnnnnnnnnnnnnnnnnnnnnnnnnnnnnnnnnnnnnnnnnnnnnnnnnnnnnnnnnnnattgttagaaacggatagtaagtctttaagatctgtaaatgggtcaagaagaaacagtggctcttctcttgtgtcgagttcatcagcctctagcaacctcagtcaccttgaagaagattcttggattctttggggaagaattgttaaaaaaanggaagatgtacgc

SEQ ID NO: 378754 - DNA, 441 bp, Homo Sapiens
  misc_feature (390)..(390): n is a, c, g, or t
taactaacccgtttccctaaaaaaacctggtaaatcccccaacccaacttggggaaggcaaaaggtccaaaggaatcaccctgaaccccaaggaggtcaaaacctgcaagtgaagcccgtggtcaacgcccactgtacctcaaaccctattctgttccttcccagtttagcccaggagttcctaagtcgtctggactcaactgtgatggggaagatggtgaaagggctggtgttgatagtgtggtagatgaggatgtggtatgtaatgaagtagatggacttgccacctgactggccatctgactgactgtatgcgatactgtgttcttcacccatgagagagtagagctcagcttttctgcaactttgtctgtcgccacctgtaatccnagctactcaggaggctgaggtgggaggattgcttgagcccaggaggtcaac

SEQ ID NO: 378755 - DNA, 478 bp, Homo Sapiens
tcagggggtgtgggttgagcgagcagcccatgaggaagggatcctgcagtgccagcttccagcagcccctgcacacgtggtgtctgggaagggcctgcagtggggccatgggaacaagcaagggatcctttgccagggaggaggaagggccagatctgttgatacagagtcctgaggggcctggggaggacgggcaggacctcatcgccatccctgccccacagcagatcctcatcgccaccttcgacgagccgagaacggtcgtgagtactgtggagttttgagggatggcaccgtccaggccgccgagagcccctctgcctgtgtcgtgtggcctggccagcctcccggtggacaccagccctgcgtggacgtggcctgtgcttcgcccgcactgcgcgcatccccaacctctgtccgcatgcctggggccttcgcccccacgtgctcgacaggggaacccgcccggacggcatcg

SEQ ID NO: 378756 - DNA, 416 bp, Homo Sapiens
  misc_feature (257)..(272): n is a, c, g, or t
ccaagtgctcgttcagctgtgaacacaggctacaaagtgctgaaggtgcagagccttgcccgggaaaggggagtgacccaggcccacagaaactctccgaaaccctgcccctcccccagggcagatgggctgcccagaacttgtcatagttccagcacagaatttcctagctgcccatcaacttctcaaatgctccagaaattccaaagcatgcgtcccaggcggtctcacactctgaaagtggcacaaaagtttgnnnnnnnnnnnnnnnnaatcagagcatgagctggtttgaatttttaaaatatggatccatacagctctataatcaaggctgagaactgtaacaaagttcatcgggcttatagaggggagtggagtgggatcccaggaaaggaagtaaacagtttaaaagt

SEQ ID NO: 378757 - DNA, 486 bp, Homo Sapiens
tagatgccataacttcatttaatattgatagcagctcaatttaaattttgaaaaagcaaatacatttaataaaattggtgtgaattattacatattttgatggaactactgtacagaatgtatacatatataaatctatagatagaattatatacatttgagtatataccacatacatattttttccactcacatttttctctttagtaaaacaaagcagttttactgtacacagaagtgcaatgctacattaagtcctgagtaatttaaggtatcattaataaactgctataaattctagttttccagccaaagatccaataggattctgtaacaaaaaatgtgaataatacttaaaaatatgcatttagctttgcgttcattttgtgcttagcagaaaaagctcaagaatgcacagtagccatttagatttgggagaatgttcttgaatattcaaggttaaataaatatcctaattgtagggat

SEQ ID NO: 378758 - DNA, 403 bp, Homo Sapiens
gactgtgctgagctgggctggaggacaggggcagcttttatccctaaagctgggcagaacatgcaccaaggttggcagcctctgctctccttctcctccacccaggaccatacttgaggttgaaatcttgaaaccttgtaggcagctccataaaagcatgagccctagccagaggttgttactgaccctcctctctaggaaatgtagctcctgccagaattgaccgatcagattaaaaaacccttgggggctggagagggtggaatggaacagagtccaaggaaagaggcattaagagctgtggccctaatggctcttcttaacaaacagaaagcatgtgctaaataacattttaaaaatatgtgtaatttattcatataactttttttcccctgaaaaaaaa

SEQ ID NO: 378759 - DNA, 119 bp, Homo Sapiens
  misc_feature (94)..(94): n is a, c, g, or t
ttttttggcttagtatgttgaaataaactatggtatcttcatcattttgtacatttcctttttgaggaaggtttctttataagtgcaagggctnccctaataaaggaatgtatatactt

SEQ ID NO: 378760 - DNA, 403 bp, Homo Sapiens
  misc_feature (345)..(345): n is a, c, g, or t
  misc_feature (391)..(391): n is a, c, g, or t
aaagtcataggcagaatactggctgtcaaaatcaggcaagggaaagcattgataattcaggaggtgacagatgagggaaagtgtcagatgtatagacaggaaaatggataacataattccctttgggaccaattaacgtaagacctattttccatactttcaatcagaaaggtgtcagtcttgtcagaagtgaaatttttccctgatgaaagttaacatgacacattcttgtattaatgaaacacattctgaattatttcacaggaaagaggagaaaaagcactttaagtacaaataccatcacaagggcaagacttgggggacataaatattcatgacatattnccacatgttttaattaaggcctctgtttcctggattttccttttcnggggtttttttt

SEQ ID NO: 378761 - DNA, 425 bp, Homo Sapiens
cggttgtttaaaaaaccccatactgttttagttattgggggcctttatgatgttcctttcctgattttcattgttaatttattcagtgaatttagtaacctgagcaaaagcctatttatttttctgtgcaaaatcaattttaattccatggtctgctagtcactcacatattacatttctctattagttataaagtaaaataattgcagtaatgatttaagaagcaactggagctcaaacgaaattttaatcctagtggattttcccatttggaattaataatgtattgaatagagaaattgcctagatccaattgccatagacatgcatccattattgtaaatacagctggctctctgtatccactgattccatatccacaggttcaaccaaccacagattgaaaagactgggggaaaaaactc

SEQ ID NO: 378762 - DNA, 479 bp, Homo Sapiens
  misc_feature (99)..(99): n is a, c, g, or t
gtgcaaggctgcccagcctaacccacaacagtttgatgctgccccctagcgtttgattcccttcaccttttgctaaaataaggtaatgtttaaattacnaattagatttacttactgctgtaaatctggtctattttagtttcctctgggtagttagtgttgctaaataagatggacgtaagtgtttttgaactggtgaattctgattgcttttagcccccagttttccaaataggggtgaattctgggtagagatagaacaatcaccaagttaccttgctccaaaaaagaaatttacgtatgggattgttttcaaagcgggaagttagctgtgtaaataacaacaattttatatatttaatctgggcttctccttatcttgaatgatataaaaatctactttctagattaatttagttccatataactttgtattgctttgactgtactgataataaagtttgaaagtgttaaattta

SEQ ID NO: 378763 - DNA, 421 bp, Homo Sapiens
ctgactgacataggacatagattcagtaaagcaaatatataacaatagcagcggagatgaagttaggccaatttgtcaagttctatctaggtaggcctggtgaatatcaaggcaagaaaggagtttccttcttggatgactacgtgggcgcaagaggggagacactttgcaacttcaaactagtttcattttgtttgcatagcatgaaatagccaattttactgtacattctttctgaaggaatgacacccatagataacagtggattctctgtactgggtcctattctgagtcaatacaaatgcagaaagaaaccctttgtgaatcacatgaggttgagcttgctaagtctttccccttccttgggacttagggggcaatgctgacccataaatccctggtacttcaatgtgatttgggc

SEQ ID NO: 378764 - DNA, 539 bp, Homo Sapiens
  misc_feature (29)..(29): n is a, c, g, or t
  misc_feature (459)..(460): n is a, c, g, or t
acccaaccctgagtgaacatggccgaaancccccatcctcctacaaaaaacattccaaaaagtgaacccaggcatggtggaaagtgtatatagtccccagctgggaagctgggagtgtggaaggtggaaggatcgcttgagcccagggaggtcaaggctgcagtgagctgaaattcgtgccactgcactctagcctgggtgacagcaagaccctgtatcaaaaaacaaaagtactttttaaatgattttccttgttaaattacccttttccccatgataggcaaatgtagtttatattggtttcccttgtagtcattggtatctcgccctacccatttgctaatagcctgagttgaaggtgctaaaaactctcagctgtattaatctactcttgctttcagaaagtaatatctaaatgaaaagcactactgcttgaataaagagtatccttagctaaanncctggagtagtttgttgagctgggggcatgccagagctgtgttaaactacaaaaatgtctgaataaactgatactcaag

SEQ ID NO: 378765 - DNA, 466 bp, Homo Sapiens
  misc_feature (328)..(369): n is a, c, g, or t
  misc_feature (386)..(386): n is a, c, g, or t
  misc_feature (444)..(444): n is a, c, g, or t
agtagtataaactccatatggtcagatttccctttatagggattgtaccaattttgcattcccattagcgatgtgttagagtgcctgttttcctacagcctaaacagcgtgtggccttcttagattcttttttctgatagatttcccaagaaaaagaattaaccgtaattttaatgtacgtttctcttacattgagtgaagttgaacatcttttcatttatttatatttatttttctatgaccttttcatgtacttttttgtctattcggtacattatgcagattttaaaaattaaattaattttgtgataatatattcacagggagnnnnnnnnnnnnnnnnnnnnnnnnnnnnnnnnnnnnnnnnnngaaatgggagtcttccnctgcaggctgggagtgccagtgggtgccaattcttgggctcactgcaacctctggccncccgggtttcaagcaattatcc

SEQ ID NO: 378766 - DNA, 406 bp, Homo Sapiens
  misc_feature (16)..(16): n is a, c, g, or t
  misc_feature (32)..(32): n is a, c, g, or t
  misc_feature (47)..(47): n is a, c, g, or t
  misc_feature (71)..(71): n is a, c, g, or t
acagtatttcctaccnatacagacataacggncatacattacctcangggcacagataatggtaaaatgtnagtaaaataagtagaaagtgcatgaagctttgactaatatgttgcctttgcttttagctataatttatctaatcttatttaattttttagtaatagctatgttttctcaactgactctcaaaagttctgaaggtttaacaatcagttcggatgaaccggttcaaagctattccagctcatcactagctttagatgactccagcccctgtgagcaggctgcctagtcactccccaggcaccacaaagctgttttggactttgcacccctgctgctggggtagattacccgcttgagttgaaacccgtctgagtctgaacaaagggttgaaaactgc

SEQ ID NO: 378767 - DNA, 386 bp, Homo Sapiens
  misc_feature (193)..(341): n is a, c, g, or t
gcttggagaggctcttcctggggtgtgtctagttggccctcttttccctcctcttcttaggatactttttatttctttgctatcagttgtaacgtttcctctttcatttctgatttttgttattcgaatcttctttcttttttcttagtctggttaagaatttgctgaatttacctttaaaaaaccgaacttnnnnnnnnnnnnnnnnnnnnnnnnnnnnnnnnnnnnnnnnnnnnnnnnnnnnnnnnnnnnnnnnnnnnnnnnnnnnnnnnnnnnnnnnnnnnnnnnnnnnnnnnnnnnnnnnnnnnnnnnnnnnnnnnnnnnnnnnnnnnnnnnnnnnnaataatgccgcaatgaaacatgatgtgtggcatgtgtccaaaaaa

SEQ ID NO: 378768 - DNA, 631 bp, Homo Sapiens
ggaaggtggagaaggggtaccactgaagatatgacagaaaaattttagaagaccaaaactaaaagcagttcatgagaaaacaatgtacccttcaatgatgaagttactctggatgatataattttctagaatattttgctattttaggaaaataccaacatatttgttgatattggcttataacaataaatttattaacagctactcacaaattaaagaaatgaaagaagtacgaaaaacttcacagagctaattctaatatgtcttgtattcctgtttttgcctaaatgtaagaatcaatctatataaaatcacataagttctttataaaatggactccacgagtcagtaagttctaagttacatcatcaaagttatcacacagctttgacataacatttggtaacaaaactactccaataattagcaaacagataatttatagttaatctgtacatatatacgtcaatatatatgcagtaaatgcagtgtaaaattgtatataacttaaagtgttttttttaattttacctgtaactaaaataataaatgacattgcacatccaacagagatttgaatttgacagctgctggacataatttagtaaaattcaaagtaacaaactgggaa

SEQ ID NO: 378769 - DNA, 443 bp, Homo Sapiens
  misc_feature (220)..(220): n is a, c, g, or t
  misc_feature (390)..(390): n is a, c, g, or t
  misc_feature (400)..(400): n is a, c, g, or t
  misc_feature (409)..(409): n is a, c, g, or t
  misc_feature (427)..(427): n is a, c, g, or t
tacatgttatatcaagggagggggtataaaagaaatacaaaaattgcagaggtatctggaatgtacctatttgttaattctatttgtcatttcttttgtttcatcttttgagtaataagctgcttggaaaagtttctgttctttagctgattttttagctataaaaatgtatttgaaaagctcataaatttcaggattgaaaagataattgaaagtttanaaaaaacctaattcattgaagtaataaccaaataattttcaatcttgattcaactgtgattcaaatcttacaccatttgcccacttctatggaattttatgtattaaattttttaagggtcagagttttttttcttggattaattggggtgtatttcacagaatttcccnctgctcacgntaggtttcntccctttaggggtggtcnctctatgtattaggtc

SEQ ID NO: 378770 - DNA, 470 bp, Homo Sapiens
  misc_feature (411)..(411): n is a, c, g, or t
  misc_feature (418)..(418): n is a, c, g, or t
  misc_feature (446)..(446): n is a, c, g, or t
gcaatttccattaaccatggtcaactgtactttaaagttattaaatggatccagaaataaacaattcctacattttaaactgcacccgattctgagtagtgggatgaagtctcatgccctcctgctctcccatgagggttattgaatcattccttagtctagcatatccacagtgtatacactatctgccagttagtcacttacttgacattttagttatcagatcacctgtcagggtatgacagtgcttgtattcaagtaacccttgttttactaaataatgggcctgaaattgcaagagcatttctgggcatgttgttgtaattattccattattagtccctaaatttataaattaggggcacaggcaagaggattaaactatcatagggcatgtgtatatgtaggggnaaaaatnttggtatatacggggttcagtatacccntgggttttcaaacatccactgggg

SEQ ID NO: 378771 - DNA, 567 bp, Homo Sapiens
  misc_feature (398)..(398): n is a, c, g, or t
  misc_feature (454)..(454): n is a, c, g, or t
  misc_feature (459)..(459): n is a, c, g, or t
  misc_feature (496)..(496): n is a, c, g, or t
  misc_feature (507)..(507): n is a, c, g, or t
  misc_feature (529)..(529): n is a, c, g, or t
  misc_feature (539)..(539): n is a, c, g, or t
caagtttccctcccctctgtgaccgagactaagtctagcacacagcacttgggccagcaaatcctggaaggcagacaaaaatgagaacctgaagcaatgcttacagtagatgtctcacacagaacaatacaaacatgtaaaaaatctttcaccacatattcttgccaattaattggatcatataagtaaaatcattacaaatataagtatttacaggatttaaaagttagaatatatttgaatgcataggtagaaaagtatcatattttaaaactatgtatatttaaatttagtaattttctaatctctagaaatctctgctgttcaaaaggtgggcagcactggaaagttgttttcctgttaggtgggcaagagcacaatgcccaaaacaggaaggntacagttaggggttaagggggccttggaatgtcctggaagggctttgaggtccggnttacnggttaaccgggttttttaaaaaaggtggattttccanttcccaagtcnttcctttggccggtcctgggtngcccttattntgttcaccctgggggggtccaccttttg

SEQ ID NO: 378772 - DNA, 480 bp, Homo Sapiens
  misc_feature (39)..(39): n is a, c, g, or t
  misc_feature (44)..(44): n is a, c, g, or t
  misc_feature (55)..(55): n is a, c, g, or t
tcctgggaaccagttgagaacagtagtccccggttgtancccanttaaggggaantcccctctggccttaggtgaaccctgggacccacatgtccagccctcgtgaagcctaaagggagaaagaaaaaaacacgcacatcttgatctgaggcataaagacacaagtaactactgatgtcaaatgagttctacacaatccccagatcccacagctttgttcccaagctgctgacaaggatggaatcgctttactaattcctttcaagcatgtattaatacaaacagaaaatgattatcatatcctagaaagaaaagaaaataggacttaaaaaatgtcttcagggtagtcacttcagcatacatactgcatggagtattatcatttacatgttttcaccactaactataatatcaagaaaaaggatggggcagccgggcatagtggctcacacctgtaatcccagcacttagggaggctga

SEQ ID NO: 378773 - DNA, 427 bp, Homo Sapiens
  misc_feature (26)..(26): n is a, c, g, or t
  misc_feature (213)..(213): n is a, c, g, or t
ccctcaacctaaaaaaagaaagtttnactgttggtaccgtcctcccctgaaggtgaaacgttgttggggttgccctagcaagggcagtagccttaaaatacttttgttgccctactctgaaagctcatcaaatgagagccccttttatttcccaagcagaatttagtccagataattttgccttcctaggatatagtatgttgtatatgatgnctgtgattgcccctggagttccctgcccatgacatggaaacctggtggtatggaagcatgtactcaaaatatagacgtgcacgatggtggtgtggcttacccaggatggaaacactgcagttcttacttgcattcccactgcctttcatggggggtgactgggtagaggccaggagaaaggaaagagttgtaaaataaaaaactgctagttcat

SEQ ID NO: 378774 - DNA, 2171 bp, Homo Sapiens
agggcccagggacaaccctggacgaggaccctaggttcgaaatcgtggagcactttggcattgcctggttcacatttgagctggtggccaggtttgctgtggcccctgacttcctcaagttcttcaagaatgccctaaaccttattgacctcatgtccatcgtccccttttacatcactctggtggtgaacctggtggtggagagcacacctactttagccaacttgggcagggtggcccaggtcctgaggctgatgcggatcttccgatcttaaagctggccaggcactccactggcctccgctccctgggggccactttgaaatacagctacaaagaagtagggctgctcttgctctacctctccgtggggatttccatcttctccgtggtggcctacaccattgaaaaggaggagaacggagggcctggccaccatccctgcctgctggtggtgggctaccgtcagtatgaccacagtggggtacggggatgtggtcccagggaccacggcaggaaagctgactgcctctgcctgcatcttggcaggcatcctcgtggtggtcctgcccatcaccttgatcttcaataagttctcccacttttaccggcgccaaaagcaacttgagagtgccatgcgcagctgtgactttggagatggaatgaaggaggtcccttcggtcaatttaagggactattatgcccataaagttaaatcccttatggcaagcctgacgaacatgagcaggagctcaccaagtgaactcagtttaaatgattccctacgttagccgggaggacttgtcaccctccaccccacattgctgagctgcctcttgtgcctctggcacagcccaggcaccttatggttatggtgtaaggagtatgcccagcccctgaggggagagatgcatgggatatgcacccaggtttcttttacagtttttagaatcgtttttagagggtggtgtgtctgacaccatgcctttgcacctttccatgaaatgacactcactggtctttgcatcgtgggcataaaatgttcaccttttttccagatgagtacacccagaatgctaatttttctgtccatcgtgtacgctattctagtgcttgtggcccagtactgtctatgagttgtcgtgctcctgtttctgaggttgtcgtgtgagttctgtacaaaaagcccccacaagtcgtccagtagaaatgcatctatgaggtcagcaaggatatgatgagattttgctcacagtcatgtgaaaacaaaatctcagctctttatccattgctttcacttagttttagtaccaaaacaaagagaatgcaaagttaagcagacttgaccaatgcaagtctctaagttgtttttataaatgatctgtagttccgtggcttgcatgggtgcaccaatcatctttagaacgatgtacactgatgttcatctcataaatgtcactctttagagaatgttacttagttaaacatgcagtgaagatcgaatttttttcccaagaacagatgtgttagggagaggggcttcagctaaatagtccaaaccctagggtgcttaaagccaagttagtgcaggctgagccccctggttcacagtcaagcctccttgtttcctagggtgactgtagagaaatgtatttccggatgaggtttctgatttaggccatttgaccaaactttgctgtgtctaagatattagcatgtttttgaaatatttattttttaagatgtttaggagtaaggtcgtgttgtcttcctcaactaaaaagaagtttactgttgtatcgtctccctgaggtgaacgttgttgggttgctagcaagggcagtagcttaaatacttttgttgcctactctgaaagctcatcaaatgagagcccttttatttccaagcagaatttagtcagataattttgcttctaggatatagtatgttgtatatgatgctgtgattgccctggagttcctgccatgacatggaaacctggtggtatggaagcatgtactcaaaatatagacgtgcacgatggtggtgtggcttacccaggatggaaacactgcagttcttacttgcattcccactgcctttcatggggggtgactgggtagaggccaggagaaaggaaagagttgtaaaataaaaaactgctagttcat

SEQ ID NO: 378775 - DNA, 246 bp, Homo Sapiens
gtgtcacattttgttaattctctcaatattttaaacttttcagtctattacggtgttctgtggtcagtgatctttgatgttactattgtaattgttttgggatgctatgaactatgctcatataagatggctaacttaaattatcaatgttgtgtgtattctgactgcttgagcaagtgggcattcccccatctctgttgctctcttcaggcctccctgttccctaaggaccatatgggatgttag

SEQ ID NO: 378776 - DNA, 346 bp, Homo Sapiens
aaaatacatgacaatactcaaacgacctttaatgtgcttaaaacgaatcactttacaaaaagcatgaacacttctaaaaatgtaacattggacacagtacacacacttaaaagaaacaacacccacctatggtctgatcttacaaaatggacttgaggaaactcagagcaatttattaacattctaaataatcataaaatgtgcctagttatgtttccacagatttgaaggttacactgagaacagatgctcaaaagtgagtctcctttgtcaatctccacagaattttccaacttcaagtgacccatgaggcccgttttttgcctctttccttaagacttcctat

SEQ ID NO: 378777 - DNA, 374 bp, Homo Sapiens
  misc_feature (19)..(19): n is a, c, g, or t
gtccccttgttcctacccnaaaaatgttctgcaaaaaaagcccacctgctttcttgctttcctaatgaggctgaaagactagaacaggcaggagtttaattaatacagacctgcccataatacttgaaagtagtgtgttaaagtcaaacccagaggcccaagttcttgaaatgcctttcctcctgtttggattatttcccacgctgtctggcctgctctgcccctggacaggtcccctgctctgcacatctctcaaggctgagaagccccaactagggtaactgtcccatcagaaggtgagttcactgggtaatgggagcaactgctcattgtgaaggtgacatgatgttaaaaggcttgaaaggggctgcatg

SEQ ID NO: 378778 - DNA, 531 bp, Homo Sapiens
  misc_feature (36)..(36): n is a, c, g, or t
  misc_feature (93)..(93): n is a, c, g, or t
aaactaaagaacatattttatttttaataaaatagnggagcatgaaaaatatcatatattacaaatatacacacgcagaaaccactctttccnggcactgtgaagagaatacactagacaaagtgtctctgccaaccctagtgccttccctgatctgtttgtggaaatccatttgtttaaacaatagaaagagtcaaataaagccctttgggtaacttttgaatgatccttctccctcttcccccctcctttcccacaaatcagtccaaacgtctataacattggcttggtttccattaaaaagccacaaaatgtagcactgaagggtttctgagggctgggcctcttagttcttttgttaggagatttcttttgttgtctttatatatagcaaaatacttgtttctctttttattttcaaggaaagagaaaaaaatgtattgcacatcgtttgagttcacaaatgtgaggtttgatggaggtttctgtcttgcagagagactattggtgaaggccggagtctattttaag

SEQ ID NO: 378779 - DNA, 437 bp, Homo Sapiens
  misc_feature (12)..(12): n is a, c, g, or t
  misc_feature (44)..(44): n is a, c, g, or t
  misc_feature (57)..(57): n is a, c, g, or t
aggaaaaacggnaatgggaaaacaaaatggccctgtccccccgncaaggccccgcgnctcaaccctcggcccgttctgccctgcaactacccaaggcccgacccactaaaaggtccaacgtcgcgccgcactcttcacccgcatgtcccaaagggcggccgggatgtggagggtgaaacgctgtgggcagctcgggggctgaaagctgggaagagaaatctgaagaacagccccatctctttcgcctgcacacttggaactcagcaagaagggactgtttctaggtgggctgggcgcgagcagggactgtcccgagcggtataggtgagaatggagttggggggggacactaggtctccggggttcacccacctggagctggaattatcacttccgaaataaagcgcgtgtccttgccccctcacgctccaggctat

SEQ ID NO: 378780 - DNA, 399 bp, Homo Sapiens
  misc_feature (14)..(14): n is a, c, g, or t
tggtttggtttttngctttttggaagcaaaatgatgttcaaagctaaagtcccaaagggttttcaacaagtaagaaaatcaaactgtgggaaaagaaggttgtttgtcccactaaaatccctggctcctcctccagagaatagcgtttgttctaggaagtggctgcctccctgtgactggaatgtgagccaatgtaatgtgtaacactgcaagaagcttctaagaagctaagcaagtatgctttctccatactttctccttgcctttctgctgactggatttagacaagagtgaagtgctgacgaatggcagagtctgggtccttctacccaagtgaaagcaagccgtttgctgaccagggacgcctaccttgaaattgttatgtgagcaagaaataac

SEQ ID NO: 378781 - DNA, 448 bp, Homo Sapiens
  misc_feature (403)..(403): n is a, c, g, or t
  misc_feature (417)..(417): n is a, c, g, or t
  misc_feature (435)..(435): n is a, c, g, or t
gcacaggggatcctctgtccaccctccctcgagctcagaggcgccctgcagaaggtggtgccagcactgccaccgaactgagaaaggcacagagtacaagcgcctgcagccacagctcaccgccacagactccagggcggggcctctcctatccaccaccgccctctccagacaccaagggcagacaaagggcaagtcaaaccataaagctgggggcacgccctgcaagccatgcacaatggtggcagcatgtgctaggcatggtgctcttgggtgcaaagcagggtgcaaagtgttgtgtactggggatgttgggggcactcggctcttagggtcttggggattaacaggtgacttcaagtggggttttcttttatggcatcttcaaacatgtttcttaatncctccctgttaatntaggcagatattttcccngttaacatttttt

SEQ ID NO: 378782 - DNA, 464 bp, Homo Sapiens
  misc_feature (13)..(13): n is a, c, g, or t
  misc_feature (27)..(27): n is a, c, g, or t
  misc_feature (37)..(37): n is a, c, g, or t
  misc_feature (53)..(53): n is a, c, g, or t
  misc_feature (58)..(58): n is a, c, g, or t
  misc_feature (65)..(65): n is a, c, g, or t
  misc_feature (74)..(74): n is a, c, g, or t
  misc_feature (160)..(160): n is a, c, g, or t
ggggaaatcctgncgcgctcagccaancacggaaaangggctttccacaaccnaacanggaacanccccgaggncgaccttgaatcgcccggcccgcgacggctacgatgcggagcgcgcgcaggaccccgaggacgagagcgcctatgctgtgcagtcnaggcccgaggccgaggagtacacggagcaggcagaggccgagcacgccgaggcccacgcaccgccgcgcgctgcccaaccacctgcacttccactcgctggagcacgaggaagccatgaatgcggcctactcaggctacgtctacacgcaccggctcttccaccgcggtgaggacgagccctactccgagccctaatccgactacggcggcctccaggagcacgtgtacgaggagataggggacgcgcccgagctggaccacgcgacgcgtgcgtgtacgagcaggagcgcgacgaggcggccc

SEQ ID NO: 378783 - DNA, 478 bp, Homo Sapiens
cctgtttcagctgctacttcagccaaaattcttcagcttcatattgtcttgaaaacctatgattgtctctaacaaacaggctacttgctagttagaaattcttatcaatttggcaagctacttatcaaccagactgaccacaagaactgtcatctcatcaatgaaggagtaactgatcaatgaagccagcaatgcttttttcttggcatcatcaaagctgacatttagaagagatgctggtgatagtcatctcatcctactcaatttttcaaaggcagaaaccaaccctgggagcaattgagaggactgtttaaacacagagcttaacaatgggcagaattgtatatctcgtggcttaacagattttggttggaacttttaccctaggtcaggggttcagcaaactactgcctgtggggcccaaatttggcccaccacctgtattctgtaaataagggtttcttgggaacacagctgt

SEQ ID NO: 378784 - DNA, 419 bp, Homo Sapiens
  misc_feature (16)..(16): n is a, c, g, or t
  misc_feature (135)..(147): n is a, c, g, or t
ctacccataaaaatanggaaaccctgtcatttgcaacaacatggatggaactagaggacattatgtttaagtaaaatatccccagacacagaaagacaaatattgtatattcctcacacatgtgtgggagccttnnnnnnnnnnnnntttaactcttggagatagtagaatgatggataccagaggctgtgaagggtggcaagaagtgggtggataaagtggggatgattaatgggtacaaaaatacagttagataggatgaataagatctagtatttggtagcacaatagggtgactatagttaacactaatttattttatattctaagataactaaaagagtggaattggaatatttctaacacaaaaaaatgataaatgcttgaggtgatggatactccatttaccctgatttgat

SEQ ID NO: 378785 - DNA, 435 bp, Homo Sapiens
  misc_feature (61)..(223): n is a, c, g, or t
gctcaagcacttctctcacctcagcctcccgagtagttgggattacaggcatgcgccaccnnnnnnnnnnnnnnnnnnnnnnnnnnnnnnnnnnnnnnnnnnnnnnnnnnnnnnnnnnnnnnnnnnnnnnnnnnnnnnnnnnnnnnnnnnnnnnnnnnnnnnnnnnnnnnnnnnnnnnnnnnnnnnnnnnnnnnnnnnnnnnnnnnnnnnnnnnnnnnnnnnnctctactgctctatggactccacttaatagaagatcactcgcaaatttagcaaaatttagcaaaattagcaaatttagcaaaatagaagatcattcacaaaattattcctattagtttgctggtatgaaatgatacccaagcaaatgggtatgttacataaacatatgtgatcctaaataatgaatatatacaaattataaaattaatattt

SEQ ID NO: 378786 - DNA, 402 bp, Homo Sapiens
  misc_feature (61)..(61): n is a, c, g, or t
  misc_feature (83)..(100): n is a, c, g, or t
aatcagtgtggttgtggtcagggaaggcaacttcccctgaagctgacagttttaatggagncctaaagtgatggagagagccnnnnnnnnnnnnnnnnnnctggaggaagagtgttgcaggcagagggaagggcaagtatgaagaccctgagagcagaactcatttagtataactgagaaacagcccaggcatccagcttggctagaatagacaaaatagtcacaagtaacatttctagtactcttgtcatgtattgttaataaatagcattgtaaaaattttcatggatttatatcctatcttttcaacagcatgtaagcccaatgagggcatgatctatgtttaaacttcatatccccacagtatctagaacaatgctgtgcacatactaggtgctcttc

SEQ ID NO: 378787 - DNA, 486 bp, Homo Sapiens
  misc_feature (15)..(15): n is a, c, g, or t
  misc_feature (26)..(26): n is a, c, g, or t
  misc_feature (33)..(33): n is a, c, g, or t
  misc_feature (41)..(41): n is a, c, g, or t
  misc_feature (63)..(63): n is a, c, g, or t
  misc_feature (131)..(131): n is a, c, g, or t
  misc_feature (286)..(303): n is a, c, g, or t
  misc_feature (436)..(436): n is a, c, g, or t
  misc_feature (453)..(453): n is a, c, g, or t
actgtggggatatgnaagtttaaaanccatagnatccatgnccctccattgggcttaacatgnctgttgaaaaggatagggatataaatccatggaaaatttttacaatgctatttattaacaatacatgnacaaggaggtactaggaaatgttacttgtgactattttgatctattctaggccaagctgggatgcctgggctgtttctcagttatactaaatgagttctgctctcagggtcttcatacttgcccttccctctgcctgcaacactcttcctccagnnnnnnnnnnnnnnnnnngggctctctccatcactttaggtctccattaaaactgtcagccttcagggaagttgccttccctgaccacaaccacactaattcaaataccaatccttccccgcctccgtttggtaactctctaggctctaancccttaattttcttcantcggtaattactgacatagatttaattatttgg

SEQ ID NO: 378788 - DNA, 419 bp, Homo Sapiens
  misc_feature (317)..(317): n is a, c, g, or t
  misc_feature (333)..(333): n is a, c, g, or t
  misc_feature (349)..(349): n is a, c, g, or t
  misc_feature (354)..(354): n is a, c, g, or t
  misc_feature (365)..(365): n is a, c, g, or t
  misc_feature (391)..(391): n is a, c, g, or t
  misc_feature (396)..(396): n is a, c, g, or t
atattccatttgtcttctgggtttcattatttctctggagaatccagtcagtaagtctagtggttgctcttttgatggtgatgtctttttttctctagctattttataagattttatctttggttatcaattactatgaatgtgcctgggttttttgtgtattttaaattctgcttgggttttttaatctgccacaatgcttttcaccagttttgaaagtcctcagctattatcttttcaaaagttgcttctagggctggggcacagtgggctcatgcctgaaggatgtctttagcattttttttaatggcagtccnacttgtgataaattcnttttgtcccgaaatgnccttnatttccccttnaaatttggaagggccattttggccanggggnagcaattccaggacaatggggga

SEQ ID NO: 378789 - DNA, 508 bp, Homo Sapiens
  misc_feature (13)..(13): n is a, c, g, or t
  misc_feature (33)..(33): n is a, c, g, or t
  misc_feature (178)..(178): n is a, c, g, or t
  misc_feature (421)..(421): n is a, c, g, or t
acccctgaaaaanaggcagggaaaaaatttggncccaggggtctttaaacccccagaaatgaccccaaacttgcctaaaatcgtccctgcctgccctaccctctattcttgagaagtggaatacgttgtcccacttgagccagttgacttgtaaagcaaagtgccttctgagcgccanaccgagcccactcactgtccgaatctggttgcctagagagcccagggtgtgcccttacctctccgtcgggacgtttcagggtgtcagcgtcttagctgctctcactgaccttcatcataagaggtcataataaaccagtgaagtcgtgaaaaacatgacaggcaattgcacagcctctgtgttgctgcttttggaattcacgcagcttgttttagagcaattctccttcaaatcagaataatnccaggagccttagctaatcagctgtatttaaggtttctgaatcaaaactgcttaaaagatgaataaacctaccattgcttatgctag

SEQ ID NO: 378790 - DNA, 290 bp, Homo Sapiens
tcatatgtaatacaaaacttcctaaggttttagtggagaagagatagagtaaaaggatttctatagacagaagaaacagttggtcatcaactctttcccttgtggcttcacatctcccctaaggacttcttatgttggtttggtcttacagtatagtcagtggcagtttccctcttcccattccttcctctgtctgatttaaaatgctgtttcaagtatcgatataagtattttgcctgtttcttttaacgtggctgtgaagggctgacatttaaagaaggcacttactg

SEQ ID NO: 378791 - DNA, 524 bp, Homo Sapiens
  misc_feature (499)..(499): n is a, c, g, or t
cgctcggcagccaaagctgtgaatccttggataacaggtagagagacggcagaatcaaaagacactgtcagatcagaataacacaggctgagtgtgttggcctggggcagcgtagggcctcccagagtccggccattcttccctccctgggcctggccattgtgtcctggggctccgtgcagatcaacagctgctaccgttcaccccagaggtggcctgccttgcagggattggcgagaggcgccttctagttagcgtgtgtattagtttgttgcgtttgtaaagccctgtgggatcccatgcagtgaatgcgatggtgctttgtaaatatgagttattatgaccatttgatgcttttaagggatgtgcaggggataattttagaacagcagctctggtgggctgacctccatctggggaagcaggacctccccctcagcagagcctgcacaaaacatctatctaattaatgcttcaaggatgggggaaggcaaggctncatttaggacgattggagacccatg

SEQ ID NO: 378792 - DNA, 440 bp, Homo Sapiens
aaattcggcccgaggaggtagtatgcattgtacccaatgtgtagttttttatccctagacccgttcccatcctcccacttctgagtctccaaagtccatgatatcactctgtatgcctttgcatacacatagcttagctcccacttacaagtgagaacatacggtatttggttttctgttcctgagttactttgcttagaataatggcctctggttccatcatagttgctgcaaaaagacattgtttctttttttatggctgaacagtattccgtggtgtgtatatataccacactttctttgtccactcattggtcagtggggcacttaggttggttccatatctttgcagttatgaattgtgctgcaataaatatacacatgcagattttttttgatatattgaacttcccttggggtagataccccagtagtagggg

SEQ ID NO: 378793 - DNA, 402 bp, Homo Sapiens
  misc_feature (310)..(310): n is a, c, g, or t
  misc_feature (366)..(366): n is a, c, g, or t
  misc_feature (380)..(380): n is a, c, g, or t
cgttgggcaagaccagagcccgcagctcaggccccacccaagtcccacttccctcctcatccttcaggtccaagcagaacggcaagtttgcagcttcggtgaaatccaaaaaaccaagctcctcctctttaaggaactccagcccgataagaatggccaaaataactcatgttgaggggaaaaaacctaaagctgtggccaagaatcattctgctcagctttccagcaaaacatcacggagcctgcacgtgagggtacagaaaagcaaagctgttttacaaaggcaaatccaccttgggcgagtaagganaagaacagaccggtttcaatattaaaatcttaggaggagcgggagttggggggggncagtttacccgggngcctttcaggttgggcaggttg

SEQ ID NO: 378794 - DNA, 486 bp, Homo Sapiens
aaacaaccaagtttttaaaaagatattctctgataacaaatggaagtgtgcaattaaaaatataaaaagtaaatcagactcactggtagtcaagatacacgggatcttttctgtggagtccctaatgatggaaaaggagcccaggttggttggaccaagggaaagcaaaaagagaaggcagatgaactacaagtctgcctttcttccctggtgcaggacttagccctcctatgcaaataactcacataactcacaatcttcctgcactcaacttatgacctcagttgatagaaaaatgcaaattagctcactgaaaccttggcattatcagcactgcatgtaaccctctccggcacaagcaccatcctataaaatccccagcaagcctttgtctcctggcagccagctcctcccttgctgacctgccctttccattcttgcaacgtattttcctacattctctaataaatctgcctttccttacct

SEQ ID NO: 378795 - DNA, 666 bp, Homo Sapiens
agattcggcactagggggaatgttatcattggagctaaaatttgaagaacaagtaggagtagggcaagtagaatatcttgggcagaaagaacgttagcattataccaataaaagtagtcagatattaacaaactaagttaaagaaaaataaagcaaaaggcagcagctaactgtattctgtgaagagacatgtttaaaacaaagataggagaaggttgaaaggaaaagctctatcatgcaaacacaaccaaaagagctggtacggctacaaaaattagacttttaaggcaaaaaccatattattagagatagaggaaacttaataatggtaaatatacctaataacatagtcttgaaatatataaatcatatggagaatttaacaactgtatagtcttagtgggcagtcttaacatgtctctctgatagaccagtagacaaaactcagtaaagctatagaagatgtaggtacattagcagatgtaactaatggacatacgtagaccactgcaaccaccaataacaaaatgtatattctttttcagtatccctggaatgtttacaaaaattgactattttggacaataaagtgtaaatacattttaaaaggatgaagtgatacaaagtgtattttctgaccacaaagtccttaatctagaaattaat

SEQ ID NO: 378796 - DNA, 523 bp, Homo Sapiens
attcggaacgaggaggagtggcaggagaggatccccgaccaccctagggaaacttcgtgcgataattgctgcttatgcccgtgttgcgtgaagacacggaacttcaccttttctgggaccttctttgggggagaatggtggacagtgggattctggaaacttgtttgggacccccaagggttaaagccacccagcattcacgaagagcacctgaagtatggaagctgagaagagttattggaatcacccccaccgttgacagaggaaggcagggggtgagaattaactgcttgagggtaggagagtctgagatgtgggggccctattccgctccccgccctgggacagttttcctttctagttttctttcccctgcttcagaggagcatctctgagggttctagctcttttaacaccccttttccccctgctggcccagagggagacccaggactgaactctccaggcctcctcccctgagccctgcagctggctggagtcttgcttccaataaaacaagcac

SEQ ID NO: 378797 - DNA, 561 bp, Homo Sapiens
  misc_feature (281)..(281): n is a, c, g, or t
  misc_feature (482)..(482): n is a, c, g, or t
  misc_feature (547)..(547): n is a, c, g, or t
cagcgcccctcactgccccatctcccagggcttacagtccccaccccctgcatcgcccagcgcctgagaggctgggctccgggtacctcccaagagacaagaggtgtgtcccacgccctgtgcagtgagaagccctggaactccaggaccctgcttttttaggcagaatgctatggatgggccactccaaagagaaacgcggctggggccttctcactggggttgcaggccgtgggatggtgtgaacactccatgtttattcacatcttggaacccccaancccccccaagggaggggtggccttgtctttgcaagaaggcttctgagtccttagaggtgaagctgtgtcctcattccactccccactgatacccaagccaacaaggagatgccctgacccactcatggccaaggacactcatggaaaaggccttcgtcctctcagtacagactgtgccaggcaggccaggaaaagccaagnaaatatggatggaacagataggttcctagcaaaatactaaagctgagccaaagtagaaaacttanattaactaattgcc

SEQ ID NO: 378798 - DNA, 472 bp, Homo Sapiens
  misc_feature (190)..(190): n is a, c, g, or t
cactatggaggctggacaccaagacccagctgtgtctctcaaagaccctcatgcctgctggacgcctcctccctcccacacccgcaccctccagggcctccctgcgctctggggaacgtgtcccactgcagctggtgtgtggccgagcaacccgaaggccgggctgcctgccctccaccccgacgggggncagcaccaaggaagcctgggctctgtgcacacggcagccacgctttcctcactcaatagtttttcccaaagaaacgatcaggctgggcatggtgtgaggaagggtaataacttttttaatgaattaatcatcattggaagagaatggagaaccaatgtgtggttttcaaaaatgggcatgaaaaggggaaagaagcatttatcctacttttcttttacagatgataccacgagtcaacccaaaagttgctgggggagaagtttgctctttaatgaatttgtt

SEQ ID NO: 378799 - DNA, 362 bp, Homo Sapiens
ctaacagtatttgtttcctgatttcaaactcaatgctacagagcactttgaatacatcacaccttataggaaagatagtaaatgtattaatccccattgaaaaattagttttgtacaatgtgcctaaatagtattgcattggattacttttatatttaacacactccatcaaaacatcccataacataattttacaatctgcatgtgaatttaactgtgaaattcagtattgtgatattttgaataagtgaattctttctctgcaaatactatgttgataaaattacttgtatgttcccctgaaatggtttgtttcctgtttcttcattattaaaacataaatcaatcatatgtttacagat

SEQ ID NO: 378800 - DNA, 485 bp, Homo Sapiens
  misc_feature (20)..(20): n is a, c, g, or t
catcaccttaataaatcacncctccccccggaaagaagccgggttattttggccccggcccaaaaatggaaccccaagatgaaagagaccttcctgacctttccagattaccccccttagtttcccccaatatacatttgacctcagatgacctaaaaaataatcagttttcattgtctttagtagtgtgcaacaaaaaatgttattgctcgaaagaagtacgcacagtgccccaaatcatggttgacatagtaatttccttgaacatcctaaataagatctcatttgttaatgacttatcttttccaccctccttactttttatcttttctagcgacatattagtatatattctaaaaagcatttgtgtgtattgagaaaattcagttacaaaaaaaggtgactatttccgcttctgtatttgaaactgtggtggtgggctatggggaaagagagaataagaaggtgaaattttatacatgttt

SEQ ID NO: 378801 - DNA, 697 bp, Homo Sapiens
  misc_feature (69)..(69): n is a, c, g, or t
  misc_feature (78)..(78): n is a, c, g, or t
  misc_feature (98)..(210): n is a, c, g, or t
  misc_feature (223)..(238): n is a, c, g, or t
  misc_feature (661)..(661): n is a, c, g, or t
  misc_feature (677)..(677): n is a, c, g, or t
tcacttgagccccaggagttcaaggtcaacctaggtaacgtggtgaaaaaccatctctacaaaaaatanaaacattanccaggtattggctgtgcacnnnnnnnnnnnnnnnnnnnnnnnnnnnnnnnnnnnnnnnnnnnnnnnnnnnnnnnnnnnnnnnnnnnnnnnnnnnnnnnnnnnnnnnnnnnnnnnnnnnnnnnnnnnnnnnnnagaccctatatcnnnnnnnnnnnnnnnntctagccccaaatgttcaatgttcatgaggtcgttgataaaccgtgcattaaacaatctcacagtaattaccatagtgactaatgctgtaaagaagatatgtggggtgctgtaagagcagaataaagatcttgccctaggccccagggacaggggtatgcttccttgaggtgaagtttgaaggtgggctctcacaaatgagtgagctttattcaggccgagagaagagcttgacgtgactttttggtatttgcttcacgattcatttgctcaaagcaaagaacagaggcttcagggtgtctcccttatcacctgggccctctgtaccctgcactcaggagcctcatttcaggacgtatttatttgagtgcctagtgtgttgcccaaagctaaggataccattgaaagaagtgctgctgggccntcaggttgcttaggcntagtgcaaggttgaccattt

SEQ ID NO: 378802 - DNA, 415 bp, Homo Sapiens
cctttctaaaaacaatccatattccttctgttaagaatgccagcaatattgaacccaagcaggcaaacatagttatgccagctcagagagacaaattcctgaatgataatcaggagaattgactcacaggctggacatcttgtgtgcagatgtcttttggcaaaacattcgctggctcccatccagaaacagccttaatatattcagtacaagagttgatttttaagatacattaaatagtacttctggagagaagttataaaatgcacatttatttggctatgtgttatagatagatagcaatttcttagtttcaggatgaagcaaatatattttcacaaaagagactatagaaattgggtgtggttacagcataaactttttcattgatgtctaaaaacctcatgccgaaatt

SEQ ID NO: 378803 - DNA, 379 bp, Homo Sapiens
  misc_feature (14)..(14): n is a, c, g, or t
  misc_feature (39)..(39): n is a, c, g, or t
  misc_feature (109)..(109): n is a, c, g, or t
  misc_feature (123)..(123): n is a, c, g, or t
  misc_feature (329)..(329): n is a, c, g, or t
  misc_feature (354)..(354): n is a, c, g, or t
gattcggaacgagngaaggacttaaaagtggaaacgtgnatttcaaatatgggagagataaaaagaatttgaaagagttagtggagtatagaaaggtgaatgccaagtnccaaaagggagccntccctggcaatcccagatgggctcattacctgaatgtgccccttactacaaaggagagtggaaggggctcttgtgttcattcctgaaagcatgtatgttgcactccatattctctctacattctggaacaccatggtgccttccctagcctgttctagcagaagcagaaaatgctccagattcatgggacaccagaaacatggganaggaagaaaagagatgcttaagttnaaaattggggggttaattttaaaag

SEQ ID NO: 378804 - DNA, 573 bp, Homo Sapiens
gttgtctactaaacaaattaaaaaataaaagactgtatccaaccagataaggactcaaacaagcacactcttccatgatcagttctcatgggaggactctgtaaccgtaaaagagcaggccttcagcagctcgaaatagccatgttaactgatgccatcttgcagtcactggtgatgaaaacttggcatctgctgctgaagtctctgcccacctcagagactctttccttgcaagaccaatggacccacccggccctggacccaggaccgcttttctcttcttctctccccttggactggtttgtgatcctttctcctatcccttttccttcttgtgttaaatgttagtttgtttgttgtgaaatgttaaacctatgaacatttgacatattgattaagtatactattatgtatggtttgcaatattgactgacttgtggagtggcttgagtctgtgtgcccacaacgctgactaccaagtgaatgaaaagtactaaggagagttgcccccttgggaactctatgtagctcatggtggcttttgtgattgaaacagcatcaataaaatcctga

SEQ ID NO: 378805 - DNA, 466 bp, Homo Sapiens
  misc_feature (421)..(421): n is a, c, g, or t
gaaatgacccaacaccaagtatgaaggtgtctaaatgagaaacggttaggataaccttcttatatcaactacttcttttgtttctcctactcaagctgatgtttccacctcataaaacaatactaggttccctctatcatcacctacatgcctcctaccctccagaaagatgttaagtagaagatggtgctaaagcccatgggaactcatcaagttttataaattcttctcagagtcctcggaagtctcagcaggttctagtttagttcacaggccagtctactttgtaacaaaaagttgtttgctgttgctattgtttttaaaaggttagaggtgtagggactgggaaaagacgtataaccctggaaaatatttccaaaaatgttttaggctaaggaaaagtggaggtaacaacttgggnatattaagggtatgtatttatgtgtgtgtatgtatgtgtttgcac

SEQ ID NO: 378806 - DNA, 469 bp, Homo Sapiens
  misc_feature (45)..(299): n is a, c, g, or t
ttttttgaaaaaagtttcggctcttggttgccccgggctgggaannnnnnnnnnnnnnnnnnnnnnnnnnnnnnnnnnnnnnnnnnnnnnnnnnnnnnnnnnnnnnnnnnnnnnnnnnnnnnnnnnnnnnnnnnnnnnnnnnnnnnnnnnnnnnnnnnnnnnnnnnnnnnnnnnnnnnnnnnnnnnnnnnnnnnnnnnnnnnnnnnnnnnnnnnnnnnnnnnnnnnnnnnnnnnnnnnnnnnnnnnnnnnnnnnnnnnnnnnnnnnnnnnnnnnnnnnnnnnnnnnnnnnnnnnnnnnntgaacctgtacttttcttttaaaaagtggaatagaatagaaactttcagtgtgtttacatagtaagggtaagtattgtttcatgtgatttgtttgagttatgtgtgtatgagattatgatgtaaaatagattttgtacatctcaaagtgtaagaagcaaaatgtacttaa

SEQ ID NO: 378807 - DNA, 277 bp, Homo Sapiens
ctttgacactttgaaggtgaaaaagaaagttctggtttggcagacatttttggaaaacccaaggattaaatgctgtggacacagtatttctgacaccgtattttcatccttaaataatattacaggagtggagcagtgagacttctcagcccccatcaatttttgcgggtatttgaaccctgagattagttttggtaatacttccagtacacacatttccctgtgaaaactgcttatttgacacatgaaacagaaattggccatatgaattgaggat

SEQ ID NO: 378808 - DNA, 478 bp, Homo Sapiens
  misc_feature (49)..(49): n is a, c, g, or t
  misc_feature (59)..(59): n is a, c, g, or t
  misc_feature (76)..(76): n is a, c, g, or t
  misc_feature (95)..(95): n is a, c, g, or t
  misc_feature (105)..(105): n is a, c, g, or t
  misc_feature (124)..(124): n is a, c, g, or t
  misc_feature (237)..(237): n is a, c, g, or t
  misc_feature (259)..(259): n is a, c, g, or t
ctgacagtttcaaatgcaaacaattaatactacccattaaacgaattcnacctttacgnatttgctcggctttacnggttcaaaaaacatgaacntgtaatagtnaacaggttccacccaagtnacaagaaataaaatcaaaccaccttcttttcttaatacacgaccaaccacaagaattctagatcctaagattaacacttcaacttcagtaagcagagttctgatgacataagnggaataacagggcactttgttntcaggcaatgccaggcaacattaaaacaataacaaaacatttgttgatcccaaaccaaggaatataattctattttccacagaacccagtctctggttagagtacctgctgaagaaagacaactatggctgacctccacacttcacttacactactatggactgaacaattaacttctcaatactattttagaaataatatattctatcatagcttcag

SEQ ID NO: 378809 - DNA, 377 bp, Homo Sapiens
tacaaagaccgttgtaaagattgggaaatgaggaaggtgaccttgatcgggtatccacagaccttacaaaatccttgtatgtaattagagttatgttaatggcacatttataagcaaagtaatgtcatggaatggaagaccccataagttgacatgagaaacagaaagtgtattaaagttaatctgcattcatgggggcagattgttagccaaatgaataaagaattagattcatcttcatggtatgtagcatgaagaatttaaaatgaatcagaggtttaaattaactgcagaaattatagagtttcagaaaacgaatttctctccaattttgaggaaattactgatgatacacattgtagaagcaacaagaaaaa

SEQ ID NO: 378810 - DNA, 302 bp, Homo Sapiens
  misc_feature (11)..(11): n is a, c, g, or t
  misc_feature (83)..(83): n is a, c, g, or t
  misc_feature (126)..(126): n is a, c, g, or t
  misc_feature (209)..(209): n is a, c, g, or t
  misc_feature (235)..(235): n is a, c, g, or t
  misc_feature (247)..(247): n is a, c, g, or t
  misc_feature (259)..(259): n is a, c, g, or t
  misc_feature (270)..(270): n is a, c, g, or t
acaattgtgancaataaataactgtgacctccagtgtccctgtgtggccccagggacaagcgttggccacggcccgtgggggnctatccacatgcatgcggaggcggggcaggtcccaggcaggtnaggggcaggggctgcaggagaggggccggcatgctgcaggcagagacagtcagacctcaggcgctgcaggtcagacctcggcnccctggggctcctgcaggccacaganagcctcaggggnctgggaactccncgtcgcaacanaggggccccagccactgccagggaatgacagg

SEQ ID NO: 378811 - DNA, 470 bp, Homo Sapiens
  misc_feature (19)..(19): n is a, c, g, or t
ttctcctgcccctcagaangagcccaaacctttgagttttatgtctgtctggtcattggataaatttccaaataaacctttttataccaatttttttggggatggccttccttggagtcccaacaggcccattgatctttttcaaagatgcattccaagatgaactgcctaggtgagggggaagcttcatttttgttacctgataggaatagcttttcttatgagatatatataatgtgatactatgtttggatatttttggtcttaaagcaagactcaagtggtgtatcttcattaaaagcttcctttaaaaaagttacagagttactaaaaaaacaagtacccaaacaatcaagttgggccaaccttggaaccttgttttgaatatctttcattgttttgtttgtcgtattgtaaaaagaatgtatggttgaaaactcaggaatgtttataaaacaaattatttcaca

SEQ ID NO: 378812 - DNA, 353 bp, Homo Sapiens
  misc_feature (303)..(303): n is a, c, g, or t
gattcatgtctatcctgactgatttctgtcacagagagaaatttagatattttattaaacttggaagtcattaatgccatataaagcaatgctaagagagtcagcatgtgttactgatgtgttgctgaagattaaagtatttttaagtctcaccaaaaaggtggaaggagccaactgagacacaaaaaaggggctgaggttctattcacggtgagtttctttttttgtttcttccagctctaactaacgtgggtatccaactgcgtggcttttcggtgagccccaatataaaatgtaataatnttttttctattcttaggctttatctaccaagaaatggaattgggattaat

SEQ ID NO: 378813 - DNA, 511 bp, Homo Sapiens
gtattttcccagacaggaaggaagaattaaaactagttacaagtttacaagttagaaagaaaacttgtaaaaacttcctctggtatatactaagcaaaattttataatctgttagtttttgaaaaacacatttttcatttttacatcatttaagtgtaattgctctccaagtcccgtcccccagttccagggcataattacaagttttcattctgtttatttagcgcgtggaaaagacacatttccttagaaagatttatcatcatctttgacactccaataagacataaatatgttgggaacaggcccccccaaaatctcgccatcaactggccccaaaactggccatgaaacaaaatctttggcaccactgtgaacatgttcgtgatgggccgtgtacggcccacgctgggaagggttgtggggttttaccagaatgagggcaagggaacaccggggccacccgggcggaaaaccgtttaaaggcgtttcttaaaccacaaacggttgt

SEQ ID NO: 378814 - DNA, 416 bp, Homo Sapiens
  misc_feature (135)..(135): n is a, c, g, or t
  misc_feature (188)..(188): n is a, c, g, or t
  misc_feature (199)..(199): n is a, c, g, or t
ttttaaataccatcttgaatgcctaataattaaactggatgaaagtggcatatcattgttcctaacatttatggaacccccataaagatgtttcctgatcctttaaaactcattaatctgagtattaagtagaanacagaattttccaaagcattagacatcactttctcagttttatctggaggtgnacttcgtgtancatctgtttctaatatatttgactaattttcaatatcttcagattgtgaggtaaatgtaatctggaataataagtgtcttttacctagattacatctctcatttggagtttggcaatgaaactgctatgaagaatgactgtactctcctatctgtccctggatgacataaatatcatttgctttgttgtttaaactgaaataaagttttccaagaac

SEQ ID NO: 378815 - DNA, 460 bp, Homo Sapiens
  misc_feature (11)..(11): n is a, c, g, or t
  misc_feature (25)..(25): n is a, c, g, or t
  misc_feature (59)..(59): n is a, c, g, or t
  misc_feature (80)..(80): n is a, c, g, or t
  misc_feature (93)..(93): n is a, c, g, or t
  misc_feature (101)..(101): n is a, c, g, or t
aaaacaccatnattaatggggggtnaataagggctggttaaacaacatatctcctaccntcctcatgatgtctgccctcnggaaaagagtttnaaattacncttgagatttcttgaaagtatgtgaggtgtgttaaaaggttcagcagaagctgatttaaacatgctctacatagagattattagatatggctttcagtgtgtacactatggttttataaaacaccttgcagaatgaaatgacatgtgcagatgctacctagaaatacccacacccacgtgcgcttaaatgaggaaattctaacccctcatgtgcctggaaagaaaaatatcttttccttctcgcatagcaaatagattccttcactcaaattctcccggaccctccccattcagtgttctttcttgaaataagggaggtgggtgaaaataggaagcacaaaaactgaaaacaagaaatc

SEQ ID NO: 378816 - DNA, 502 bp, Homo Sapiens
  misc_feature (24)..(24): n is a, c, g, or t
  misc_feature (166)..(166): n is a, c, g, or t
  misc_feature (197)..(197): n is a, c, g, or t
  misc_feature (218)..(218): n is a, c, g, or t
ccaaaattgtacatataaaggtgnccactggatgacgcaactagcagccgtggcaacttctggatcctagggccaaggaaaacataaaccgtgatgaacaacgaagaatgggcgatggattcgcttcccaatgacaaagcccccctcaccctagctgtcaccagantctgcctttgacaaacccttagcccactganctggtctgggcttctggctantcctttgcaatctggccttgggatctactttccaggattatttcttgtctttgaacgtgacagtgtggatgaggcaagtgagtgtagatgctgcgaccctgcgagaagcaatagctagtgaacacattagctccctacatgggacgcagtctccctctgacatgtgtctctgcccttaaccaagacagaaagggggtaaatggaggattggcttactgtctttgctggttagttttgtgaaattttaaaaatgttcaacttttgaataaactcctttaaacttc

SEQ ID NO: 378817 - DNA, 513 bp, Homo Sapiens
  misc_feature (24)..(24): n is a, c, g, or t
  misc_feature (43)..(43): n is a, c, g, or t
  misc_feature (57)..(57): n is a, c, g, or t
  misc_feature (72)..(72): n is a, c, g, or t
  misc_feature (93)..(93): n is a, c, g, or t
  misc_feature (106)..(106): n is a, c, g, or t
aacctcccttggctgtttaaatgnatatgagaatctaaaacangtgcccagtgtagnaagccttctaccacnagctaaaaacattccccagtncccactgaatcanccacttttaatcacatgatgaggaaaagaaattaactgcagatgggtggcattttatattgatggccatccaaaaaatttagaaagacaagtctcagatgaagatctcctcctggttcaaagatctcattttaaatctagaaagacagcaatagggcatcctaaattctacataacggagatctgttcaaagcagcgcaaccactgctgcagaaatgtactgattcccttctccgtggccatttcaccacttttgtacctatgaaaactagctgctcctccaggatcctttaattttctatgcctaaaccttaatcttaatttctgtttttctgactccagtgtgccctcaaaagtcactaattatttctagccctgattgttctcatcttccctgctgaaattcac

SEQ ID NO: 378818 - DNA, 204 bp, Homo Sapiens
  misc_feature (36)..(36): n is a, c, g, or t
  misc_feature (47)..(47): n is a, c, g, or t
  misc_feature (55)..(55): n is a, c, g, or t
ttgcccccaccaccctctttctgtacttcaattttngtttgtttttngttttttngtccctgtcataaaatattttggtgcttcaaaacttgtaccttcattgtacatccttttcttttctccccttgggtcttattataaaagaagacaatgtacgttgtaattaccaaaaagaatagggaaaaacaagaatttcatgattct

SEQ ID NO: 378819 - DNA, 252 bp, Homo Sapiens
  misc_feature (77)..(77): n is a, c, g, or t
  misc_feature (145)..(145): n is a, c, g, or t
  misc_feature (177)..(177): n is a, c, g, or t
gcctggaactggctcctggggctccccaccctggccctgggacagaaatggtgggtgggctggatggagggttgagnccagtccctgtagggccttagttttgagggggcctgtttgggattggaggtttgcagctctggaaacnccctttccagggcagctgttctagcatgggtnccaggtacttaacatattgttcagactttgttattagagatacgcatttttgtaattttaataaaaacacatcta

SEQ ID NO: 378820 - DNA, 630 bp, Homo Sapiens
  misc_feature (51)..(51): n is a, c, g, or t
  misc_feature (97)..(97): n is a, c, g, or t
  misc_feature (106)..(106): n is a, c, g, or t
  misc_feature (159)..(209): n is a, c, g, or t
  misc_feature (577)..(577): n is a, c, g, or t
tggagagcccaaataaattctgctcttttttcaactagaataatgagaaancccagctattttctcaatctcaaagcccctggatgggaaaattcangggcagganagagagggaaataattattcctttggcatgggaattttattttatttagtatnnnnnnnnnnnnnnnnnnnnnnnnnnnnnnnnnnnnnnnnnnnnnnnnnnnaagtaatgataataaagcatatattccatgtgtttaggacagaagtggcccatcccagccatttgttaaataatacttaattttctaagatgaataaatgggatagttttattttctatggagtccccagaaaagtggtagacaattttcagtgctgtacctacccctgcacatcaattctcttgagccccattcttcagagattcactaatatagtgctagccagtcagaaccatattcaaatcactgaaagatgctagggattcaggatgaggagatccatgcctcagtggcctactgcaaatataagggcttccaagtcttttgtataaaccagaaccagcatcatattcctcagagctccttgnctgaattccatacttaccctaaatggctatactttgacattttcaacaagaca

SEQ ID NO: 378821 - DNA, 628 bp, Homo Sapiens
  misc_feature (29)..(29): n is a, c, g, or t
  misc_feature (56)..(56): n is a, c, g, or t
  misc_feature (110)..(110): n is a, c, g, or t
  misc_feature (169)..(169): n is a, c, g, or t
agggaaatgtaaccaccatttaagatggncctgtgtgtttccagaaacccaaatanccctccaatggaccaatgccaggaaattaccagttatccaaccatagttaaaangatcccattcaaaaatgccagacagacccaatgccattttaaatgtaaataaagtatgnaaaaattccactgaatacagtttccagaattcccagaattgttaactgaggtttcccaaagggacccactccatcctagttcccactgtggtatcaaaatggaatgaaatactgcctcagcaataaaaaaggaatgaactatttatacctgcaaaaacaaggatgaatctcaaagagtttgtgctgagcaaaagaggccagtttcaaaaggtagcatacggtatgattccatatatgtaacattctggaaaaggtaaaactatagtggtggagaagagcatagttgttgccaagggtgagggatggagagacagtgtaagtaagtacaagggtataggacaaaataagtttttagagtgatggaactgtttgaatggtgactgtggtggcagtttcatgaatctctctctatatatatgtatcaaaactcctagttcaaaaaagttcattttattgttt

SEQ ID NO: 378822 - DNA, 393 bp, Homo Sapiens
  misc_feature (221)..(221): n is a, c, g, or t
  misc_feature (224)..(224): n is a, c, g, or t
  misc_feature (227)..(227): n is a, c, g, or t
  misc_feature (356)..(356): n is a, c, g, or t
  misc_feature (369)..(369): n is a, c, g, or t
  misc_feature (379)..(379): n is a, c, g, or t
ggtctgccggaaggaatccgcttcagcttccgaaggtagcatctccccctgctcccgggaaccccccaggcagggccccagtgctcggaagagagggagcttcaccaccagcacttccagcatcttctttatgctcttcctgcagatggctccatcctcgttccgcctccaccgcgtgaccatggggtacagcgtgtggttgggtccgaagcagctgaagntcnccngcccacgcagtcctgtgcggcccatggggttcaggggcaacccggcctgcactgtgtacggcccgtggaagctccggcggtccctcaggccatccaaccacgttgtactggatcgtggaacagtggctnccagggtgtcctnccatggggtnccatggcggtccgt

SEQ ID NO: 378823 - DNA, 438 bp, Homo Sapiens
  misc_feature (13)..(13): n is a, c, g, or t
  misc_feature (36)..(36): n is a, c, g, or t
  misc_feature (42)..(42): n is a, c, g, or t
  misc_feature (47)..(47): n is a, c, g, or t
  misc_feature (70)..(70): n is a, c, g, or t
aatcaaacctcgntgaaaactgaatcaatgaccctnaccctnctaancctgtgtggtgttggggagcccnggttcaaaggaatgtggaggcagcaggacatccctggagagaatgaagacttcagagtcagacagagctagatttgaagccagctggcgaaacctctgttttctccttctgtaaaaggggtaactatagcaccctacctgacaggttagcatctacatgatggataggtttctgtgccatggtacatggctggagtcccaacaagaatttatttcaagtctgtctttttccactggagatcatcactgagttgcggtctcctgagcagaaagggggttggcagccggagcatgtgtctctcttggaacaccctaggctctggcagcacacaggttatgcaaggcacaaccggaggaggaagtaacagg

SEQ ID NO: 378824 - DNA, 477 bp, Homo Sapiens
  misc_feature (41)..(41): n is a, c, g, or t
  misc_feature (50)..(50): n is a, c, g, or t
  misc_feature (84)..(84): n is a, c, g, or t
  misc_feature (170)..(170): n is a, c, g, or t
  misc_feature (321)..(321): n is a, c, g, or t
  misc_feature (422)..(422): n is a, c, g, or t
gggccacgggaacttccttactgctagaaagtcattcgttnagtctctgnagacagtgacggagccctgctgcggactggacgnttggggaccaagtaggtccccgctctcccaggcaatctggggaacccagggaacaagcgagtgatagagccacaaaactccccgcnaaagagtatttcagagggggaagcgccataaagacaaaacagggccaaggtggcagagggtggcggtggcaggcgcgagtctgcagctcagcccgggtcgcgctggacgacagacacgtcgactctcctaaagaagcaaccacaggtcagncttagacttcttttatttcaataaaagagcgttttcctccatcttaaaccgcccgtggtgggagaaaaggtttccaacctcttctctggctcccctcggtnaattccgagcttttccaaagtccctccgccgtccaggggctcgcctgtgccgaat

SEQ ID NO: 378825 - DNA, 208 bp, Homo Sapiens
  misc_feature (98)..(98): n is a, c, g, or t
  misc_feature (164)..(164): n is a, c, g, or t
ggtgggggacatttctttgaaaatgatttcctcccaaaaagtcagaggctgaatgatcatgaggtgcattttttccgctgtctgattttcaagggccnaaattaattcctacccatattgaccagtaggataatgactaaagatcagttaggcccaaatatttnccagcatttcctgttaaaaagcaccaaaaggaatacgttggttc

SEQ ID NO: 378826 - DNA, 295 bp, Homo Sapiens
  misc_feature (29)..(29): n is a, c, g, or t
  misc_feature (220)..(220): n is a, c, g, or t
  misc_feature (236)..(236): n is a, c, g, or t
  misc_feature (248)..(249): n is a, c, g, or t
  misc_feature (262)..(262): n is a, c, g, or t
ctatagttgtttaggagaattataacagnaaacgaatatggaaatacactgtataacccttaaagataacttggagtcttgtacacataaattaactatcaattgctaactgataagatgtatgttaaagtgtagcctgaaagagcaataagcctgtatccctgtaagttaggaaattgaacattgaacctgactgattaaattggggaaggaggcaggnggggtaggggtatatntattatatttgnngatttatatatgnttatatgtgtatatcttttctcaatatatacat

SEQ ID NO: 378827 - DNA, 519 bp, Homo Sapiens
  misc_feature (12)..(12): n is a, c, g, or t
  misc_feature (22)..(22): n is a, c, g, or t
  misc_feature (91)..(91): n is a, c, g, or t
atagcagtaacngtaagcctangagaggtatcccagccctacaggaactggactgagctttgacatggcctacctggataaataatccagnccttcattagtatggcggcaagtttaatgcagaaccctcaagttcaacagcctaatgtcaggaatgatgacaaatgcccattgggggacctgctgctggagttgggggcctaactgacctgtcaagcctcatccaagcgggacagcagtttgctcagcagatacagcaacaaaatcctgaacttatagagcaactgagaaatcacatccggagcagatcattcagcagcagcgctgaagagcattcctgatttaaccaagggctcaagcccaagatacaaatggtttatggctatgaatgaagtatttgttgtagatagtaccccctccctccctcaaaaaaccaaacaccatatctgatgcgtgaaaataatggaggaaaacctcttgtgtatattcttaaagaataaatctgtttagacaataggt

SEQ ID NO: 378828 - DNA, 525 bp, Homo Sapiens
  misc_feature (26)..(26): n is a, c, g, or t
  misc_feature (38)..(38): n is a, c, g, or t
  misc_feature (54)..(54): n is a, c, g, or t
aagtagctctatgtatgtgcagatgnacttggaacagngcctggcatctaatanatatgactatataagtctttgtttttattgtgattaggaatattattattatgactccttgaggaagtcatatagtcctcagagaatttacttaggggaattacagagaaggaaagcatgctttcagataatcaacagctgttcttcatttcaccgtacacggtgacctgtagtccttttctacctgacagaggtgatattttccaacaccatccatctaattgtgatgcacagctggggactgagttccattatgctccagaaccccttcctaaaacatccattgctctgcaaccaaggataaagggtaactcatgaactcattccttgtctccaaaagttgatttattactgtcaaggtcaatacaatactaaaatacctggccttgaaccaccattgggagtatttgagcaaccatgtagctgagaccacaccagcacaggggagccaactgctcctttattgagtag

SEQ ID NO: 378829 - DNA, 492 bp, Homo Sapiens
  misc_feature (63)..(63): n is a, c, g, or t
  misc_feature (65)..(65): n is a, c, g, or t
  misc_feature (68)..(68): n is a, c, g, or t
  misc_feature (97)..(97): n is a, c, g, or t
  misc_feature (101)..(101): n is a, c, g, or t
  misc_feature (109)..(109): n is a, c, g, or t
  misc_feature (124)..(124): n is a, c, g, or t
  misc_feature (126)..(126): n is a, c, g, or t
  misc_feature (156)..(156): n is a, c, g, or t
  misc_feature (441)..(442): n is a, c, g, or t
  misc_feature (448)..(448): n is a, c, g, or t
tctacccacgtttcccccccaaatcctggagagggaaccagaaccagcgccccgttgcggggncncgngccagcgcacctcctgggggtgaggcctntggntccccatntcgcggcgaccaatntntttctagacgcgcgcctgccaccgttgggnaacggcggaggtggggaagacaagcaacctctcggctagctccggcctcccggggcttctgggtttggagagtttggggagcggagacacctcccgaggctcctccgcgttggaccctatttgcgagggcgggagcggggtgggccgacggcgaagctccagaggtgggaccctctcccttcagcagctcttcctgacttcatgattctgcccctcttctcattgcaggtcacaccgacaaatctgaagcgggtttgccaggggagtgtacccgtctccccagcnntgggcnacccggtccacagggattccatttccggccttacactccgctcc

SEQ ID NO: 378830 - DNA, 395 bp, Homo Sapiens
  misc_feature (160)..(172): n is a, c, g, or t
  misc_feature (297)..(297): n is a, c, g, or t
gaaatccagcttgaagaagtttagtaacttattcaaagttccaggctagtaagtgatatgagtggctcataagcgaggggctgttagattccaaaagctacaactgagagtaataactaagaaagttttgcaacaagaacttaattaagcagactaaacnnnnnnnnnnnnnctttaacttcagagactcagggctgctcctggaaatggtagctcactgagggaaaaacttgtgcaagagggacaaactagtattttctcagaatggcaataagaagggaaaggggccgggtgtgngtgtgacgcctgtaatgccagcactttgagaggctgaagtggacggatcacctgaggtcaggagttcgagattagcatggtgaaacctcgtctccact

SEQ ID NO: 378831 - DNA, 204 bp, Homo Sapiens
  misc_feature (186)..(186): n is a, c, g, or t
cctaaaaaagccatttgtggaaaaaaattttctgatatattttttagagcagtggcacgttttatatctcatgccagaaactagagcataaaatatcaacttttcaaataaattaactagaaataaagaacaatttattcagtgctaatttgttgatacttttttatagtaaactatgttttaaanctttaactttgggaaaaa

SEQ ID NO: 378832 - DNA, 607 bp, Homo Sapiens
  misc_feature (138)..(154): n is a, c, g, or t
  misc_feature (158)..(254): n is a, c, g, or t
  misc_feature (257)..(257): n is a, c, g, or t
tgtcgcctttcctgggagtgcagcagcagaatcacagctcactgcagtcttgaattcctgggctcaatcaagtctcccaccccagcctcctgagtgctaggactacaggtatgtacaaccacacccagctacttaaannnnnnnnnnnnnnnnngcannnnnnnnnnnnnnnnnnnnnnnnnnnnnnnnnnnnnnnnnnnnnnnnnnnnnnnnnnnnnnnnnnnnnnnnnnnnnnnnnnnnnnnnnnnnnnnnngtntatgctatcacatctggtctagatttaaaatattctctaatttcccttgtaaattctcctctgatccattaggtgattaacaagtttacttgataccaaattatctgggggatttttcaagttaactttattaatttcaagtttattttgtggtttaacaatataccatgtatgattttattccttttggaatttagtgtgacttattttatggtccagcatttggtctatattgttgagcagttcatgtctacttaaaacaatattctgcaattgttgggtatactgttttataaaagttacacatttaggactgttgtatcttcttgatgaactgatccctgtgccga

SEQ ID NO: 378833 - DNA, 500 bp, Homo Sapiens
gagaacccctcacaagaggcatatgcatagtgaaaggagtgagggctgcaagttcatggatgcattattttctcgttttcgtttgtagggaaatacatgctctgtcattgacttgcaaggattttctttttattcttaattgcctccctaatcctttctccactcagctgtggtactcaatgcactcaggattaaatgtgtgtgttcttctgggccagggaaggaatagatagcattgatgtggaccctcaactgtattacagaatagggtggtaaacactcaggagaaacattctccctggtaaagtgctaagcaattgttaaacagcattttaaagcatgaatgaacgtcttgcttgtacattccaaagttccacaaacaaaaggaaaggtcttattctaaaggagcaggagatgaatcctgccgataatggtttttataatgtggctgtgaatattttttcccagaggttgggaatcccaaatcacctcaaacaagt

SEQ ID NO: 378834 - DNA, 475 bp, Homo Sapiens
ggtacagaaatagattacattatgatgaccacagtagtattctacatgacaaaaataaaaacagatttaagtaaatgtaccggcactgaaacaagcatttacttaacatcccaacccaggctgcatatgcacaaaaaggatctgaccacatgcttatgcaaaataaagtttttcttagaaagccaaaattccaaccattctgactgtccgctgcctattcccctgttgagtattttgagcgaacttctatagaatataagaacaattggcatggcacttaaagactgcaaaaaacagaacacaattaaaaacatttataatgcatttctgtataaaattacacaccgtaaatcttattagttaaaaaaagatttaaaaacaaaagaccaccctggaataatggttaaaacctcatcatagaaaaatgctcatcattttgtacactgaaagaaactactgagaggttttttggggg

SEQ ID NO: 378835 - DNA, 186 bp, Homo Sapiens
tcggcacaggtgaacgcatttaaagaaattttgctctagaatcagcactgattttcaactctgctgtcttctgtgaacattgcataataaactaacactaagtcaaacacagaccatgttcccacccaagtcagccttggttcccaagcacaagtcgctttcagaatagcttgttgttgaagcagg

SEQ ID NO: 378836 - DNA, 409 bp, Homo Sapiens
  misc_feature (45)..(45): n is a, c, g, or t
  misc_feature (79)..(79): n is a, c, g, or t
tcgggaggtgaaataagtcctcacgaaaagctgatggttttcgantgtggcacttccccctgctccccgcctcctgacnaccatgtaagatgtgcctgcctccacttccacccatgatgattcactgagctacactaaggactcagggaaaggctaatcagagactcagaagaatgcaactgcttgtctcttatctacctgcgaccctggaagcctcttacttcgagttgctctgcctgactggactgaaccaatgttcatcttacatatattgactgatgtcttacgtatccctagaatgtataaagcccagctgtgtcctgaaaaccttgggcacatgttatcaggacctcctgaggctgtgtcacaggtgtgtccttaatcttggcaaaaaaaactttctaaattg

SEQ ID NO: 378837 - DNA, 438 bp, Homo Sapiens
  misc_feature (407)..(407): n is a, c, g, or t
  misc_feature (417)..(417): n is a, c, g, or t
gagcaacaacctaagcaccgttatcagtgcctaggaatgttcaaggcccaggctggggttcagacctgcagaggaaaacatcagctggctgggtcaaggcaccatgtgttacttggtcaggacagagacaaaaatgaggaaaactaggggaccccacacacatgtggctaccatactcctgaacaggtctagctagttatttgtttttttggaagttaatctggggtagaaatgtatggtgatttttattttctctgtctgaagaaccagccatttttaaaaaggttattattgacatcccaatattttgtcttggtggggcttacttcataagtccaaacattttatttctcaacaggtgtaaaacaggcagagattctaaagccacatggtagtgctttggtggnggactgcttncacttagaaacaaactctgag

SEQ ID NO: 378838 - DNA, 355 bp, Homo Sapiens
  misc_feature (20)..(20): n is a, c, g, or t
tttactttaatattcatttnatgtattctgccatgtaaagaacctttccaaattatgtatcagtctatttgcatcatgtcaaattttcaaatctccatattttcacaagatatatattctcctttggaatctttctgcacatttatatgaataaattaaatagtatctctacaaacatattcaagtaattatttgttttgggttattatgtaacatgaaataattatatatcaatgcaggtatttttttcatatgtgacagtgaaacaagggtttttaaacaaaaaactggattttattaaaataaaatttacataaattatggaacggtctatttgtatggaaggcccctcttc

SEQ ID NO: 378839 - DNA, 394 bp, Homo Sapiens
  misc_feature (42)..(42): n is a, c, g, or t
  misc_feature (57)..(57): n is a, c, g, or t
  misc_feature (73)..(73): n is a, c, g, or t
  misc_feature (294)..(294): n is a, c, g, or t
  misc_feature (306)..(306): n is a, c, g, or t
  misc_feature (330)..(330): n is a, c, g, or t
  misc_feature (338)..(338): n is a, c, g, or t
  misc_feature (358)..(358): n is a, c, g, or t
  misc_feature (377)..(377): n is a, c, g, or t
attcggcacaggattctagaagcctgtaatctttcgaatttncccagtcaaccaagncctggggtttaaatgnaattttcaacacctttctgctgacagtcacacatgttaaaccttgatttgcttaaaagtattattaaggatgagaatgtaatactgccagtgggtatgtggtgatattattgtgggcgctggggggatgaaactaacgtctttcagtaaatgtttaattttacacaccatataatcagttgtattattgcaagtgcacagcaggtatgtagaaaaatagantgcatatatttnacatattagaaataactttattantattcctntttcatgttctcatgagatnttaatcatttgcatttttnagcttcaaacattttta

SEQ ID NO: 378840 - DNA, 356 bp, Homo Sapiens
  misc_feature (293)..(293): n is a, c, g, or t
tcaaagtctttcctcacagtcccttaccatgcacaagtactctgaaaccagagaacagcacggtgggtgaattcaaaaaacagaatttagaattcttgtttaattgctaactttctgaaagccctcagaaaaagacccaagttcatttcatatcagccccaaaactaagagacaatgaaaacttgacctgtgacagtctggcactgtcaatgtccacagcacttctctcaaaatgatccctctgaatacttacaataatcccaccaggggcaaaaggttcacaacagcagttnctcagccaagtcgtgggggaaggctgtatcacattcccggtctttctggctttccccagtttt

SEQ ID NO: 378841 - DNA, 277 bp, Homo Sapiens
  misc_feature (105)..(105): n is a, c, g, or t
agtgtgatactactttaaattatatttttaagattcacttttgaaatttttatggctggaatacagagatatcattgatttgcagatattgactgtgtttagagnactttgataaattgagtcgtaaattataatagttaacccctagattgactgtagggaggtctatataaaataggcatttctgtcttacaaatcttgagtttcttactcccttttatttccccattaaataattgtctgttaatttccggtacagaagtgggtgatactgatc

SEQ ID NO: 378842 - DNA, 500 bp, Homo Sapiens
  misc_feature (409)..(409): n is a, c, g, or t
  misc_feature (427)..(427): n is a, c, g, or t
taatccattcttgacattcagttagtccagatctgccccataatttgctttagtaaagtcactttatggatttttggctatgttttagtttgtgtgtataaaagttctaagaaaacatttttgctattttaagtatgtaagggaagagaggagtgtttttaactttttaaagttgatgactttagggtagcacaaacaaaactcctttgtatcctaacttttctcaatcctctcttgaggtgctttacctaatgggaatgatttctgtatgttcccttggtaccaagaggtacttatgcaaagtaacctattacaccaagttacttgctttgctttcctctctatgatgtgataatacagtaaaagctttcttacccagcatagtgggagagtggagattaattaaaantgttaattaagagttaantcctattgacccaggtgatatttctcttctgatttccctccccttcccctctcttatcttaccactgtgaaaa

SEQ ID NO: 378843 - DNA, 425 bp, Homo Sapiens
  misc_feature (27)..(27): n is a, c, g, or t
  misc_feature (38)..(38): n is a, c, g, or t
  misc_feature (43)..(43): n is a, c, g, or t
  misc_feature (58)..(58): n is a, c, g, or t
  misc_feature (88)..(88): n is a, c, g, or t
aactttaaaaggcccctggaacccacngcccttcctanccccncaagtttggcccaangaagaaaaacggatcccagttttccattcnccccgccagattaaccagtttaacctttcctgaaaaaggttcctcctttcaactttccgaattaatacagcaagtatcccaggtcaatctctgtttttgttgtcctgttgacagtcagttgcccctatctatctgaaggctggtttttgtttaacacaggaaaattttcctgtattatgtctgtgaatacatcttccctctatttttgtttgcttctttattaaacagaagttggaacttttgctctctccatgtctcttatcttttttctcatatttgcccactttatctcatatcttaaaaggtatgtctttagctttactttccaaaatacttc

SEQ ID NO: 378844 - DNA, 288 bp, Homo Sapiens
atttggaatgatcaaaaagtttaataacacatggtatcgttgaaggcacaggaggaaaaaacagtctcttacagagcctgtaagattataaattagcaaacacacctttctctagagggaaatttggcaacatctacaaaaaatatttagatgcactttctatttctaggaattataaaactactggctatatttagacaagtgcatagtgatatatatcacagaatattctctacaggcaatgttttcaacagcaagaaactacccaaatgttgaccaacaggggaa

SEQ ID NO: 378845 - DNA, 441 bp, Homo Sapiens
  misc_feature (28)..(28): n is a, c, g, or t
  misc_feature (33)..(33): n is a, c, g, or t
  misc_feature (52)..(52): n is a, c, g, or t
  misc_feature (196)..(196): n is a, c, g, or t
  misc_feature (207)..(207): n is a, c, g, or t
  misc_feature (338)..(338): n is a, c, g, or t
  misc_feature (346)..(346): n is a, c, g, or t
ccaagttcaccaacccccaaatacaggngtacnaaatccccacaaaactccnaccaaagcatttacctttgtgcatccatgttggcacccgaaaaggttttggattttggaacatgttggatttcagattttccagattagggatactcaacttgtatattttcacaggggcccagtgctcaagaacatttttttntccatgagctnaacatagataacattaaggaaaatgacatttatttaactaaattctaattacagtgagcaaaaacttgtcatgcaaattaagtaccaaagaactagactttgctctttggtaacaacattacctcctcttnctcattanctagttaaaaactaaaaagtcaggagggaaacaaaaaggaggggaggacaagtattatgattataaagaaatgatcttacatattagaaacaatt

SEQ ID NO: 378846 - DNA, 426 bp, Homo Sapiens
ttcccgcagtccctggggcagcgctttgccggggaacacgaagagctccctccctcaggggcccggcactcaccttcctaatctgtatgatgtatttggttaaacactgtcaaataatagagatgtgcccagatttagattttcttaccctaatctgtttaatattgtaactttattccatttgaaagtgtcaagcccattcagataagctataatctggtctttaaggaacacaactttaaaactgcagctttcttttatataaatcaagcctctgttaacttgaattccttatagtacatattttcccatctgtaatgacgaaattttgattctaatattttttctattatttataagtgcaaattttttaaaaaagtgtacagctttctaaaagtaataaaggtttagcataaatacagaata

SEQ ID NO: 378847 - DNA, 386 bp, Homo Sapiens
  misc_feature (354)..(354): n is a, c, g, or t
gaaaaatactacagttttcattttagaaaaaatagaaaaggtattacatctaacattccttcatctgttccaactattggcaaaaacgaaactaattttttgtgtacttatgagcctatgttcttcattttcagagaaatacaagtatgcagcatacaagtatgcagcatgcaatattggcagtggaacacacaaaacatgaatgctgtgaacttatatttctataaagcaactttctcccactcaccctttttaaatctaaggatcatgcacatgaggaatgcagagtatggaacatctcaggggatccctggttcatggacaggatggggaaggtacagggtgaaaaggcanttcatggaaccccaaaaggcaaggtttttatg

SEQ ID NO: 378848 - DNA, 395 bp, Homo Sapiens
  misc_feature (21)..(21): n is a, c, g, or t
ggccctatcccaaccccgggnaggcctcctcccttccccttcaaaacatctcccatagaagtcccccacaagttgcaggccatgtccctaaaagaccttttccccactttggttaggctgactctcgaacccttcactcccctaaacattgcttctctgcacatggaaagacagctgctttcccctgccttcaggccactgtggcttggcccagtagctttttgtcccgttttataacatttattgccttttcctctggttacagaagcaatacgtgcttctgagattttctgatttctcaaagaggagattctatattcttccttggttcaaccctattgagggagaactgaacctgtttggatatttctatgatacgcttgagagaataaagg

SEQ ID NO: 378849 - DNA, 275 bp, Homo Sapiens
  misc_feature (187)..(202): n is a, c, g, or t
ggaccaggaggtttttttccccagtttgctgctattacaaacaatgccacaatgaatgatctgaaacataaaactttgcgttgtgtggtagcattttggggaatagatccctggaagtgcaatttcaagatccaatagtgggaatatttttaaaatttgaataaatatagccacatttccttttgtnnnnnnnnnnnnnnnnctgcatcagatacaaataagatagatataatagtatttgctttcctctccctcataacgttgtattatcatta

SEQ ID NO: 378850 - DNA, 480 bp, Homo Sapiens
  misc_feature (457)..(457): n is a, c, g, or t
tattctgattggtaaaattaaagaggaaattaatctttatatattatttcttgcagaaacattcattattttattaatattgccctaagtacaactaggcaagtgattgccacctaaatcagaagacgttctaaagtcagtaagaaagtgtgaaatgctagtataaaggttattttttttctttcctaaataactaaagtgaggtgtagattgagccttgatattatttagttaatgttttttattaattaattttggctggactttatttagcttgattaggttattatctgtcaaaccttttaagttgacaacatgactcatatatatacatgtgtataagatgagcatgtgtcgaagcttattcgactcattaatgagggaaaccagcagatagtaaacctgggttcaaagtacaatttcaaagaaactgagtatttatggggcctttgaaggnaaaaatgttggggttaaaattgc

SEQ ID NO: 378851 - DNA, 412 bp, Homo Sapiens
  misc_feature (314)..(314): n is a, c, g, or t
  misc_feature (332)..(332): n is a, c, g, or t
cctcggcgacgacagtgggatttagcagatagaatgcattctcttgtcctgtgtagtccaataagacatttactgaacacctggtactatctatgctaaatgctctgaatagctctctaggtgcaaagagaagagtaaggcatggtcccagatcagtggaacttaggttttaagaatgttcatttactatacattctgtgacgaagcctaaaataaacttagcctaccatctctataggttttataaaatttgcaaaagtaatcctttctcagtaaattcaagtaatggaaatgtatatgaaaaaagtaaactnctttgttcttcaccagtnccactgcgtggagctgaactgccatgaaacagtttgctttatatggtcccaggtttttgccattcctgggatgatgatgt

SEQ ID NO: 378852 - DNA, 255 bp, Homo Sapiens
  misc_feature (37)..(37): n is a, c, g, or t
  misc_feature (51)..(51): n is a, c, g, or t
  misc_feature (206)..(206): n is a, c, g, or t
  misc_feature (218)..(218): n is a, c, g, or t
  misc_feature (226)..(227): n is a, c, g, or t
tgaaacaatgtgttcctttaaaagtgaataaaattgnaatcctctagcaanactgacagaaaagagagaagaccataaattagtaacatcaggaatgaaacatgggatagcactaaagaccatgcagacatccaaagaataatttgaaatattaggagtaattctacacaaataaatttgacaacttaaatgaaatggaacaattncctgaatccaanttcaaagnnacagtaactccacacaatcatgaaacag

SEQ ID NO: 378853 - DNA, 381 bp, Homo Sapiens
ctatgcagaagaacggcagtcagcggaagactacgagaaggaagagaccatcggcagaggaggctgaaggagagagagaggattggggaattgggagcgcctgaagtgtgggggccgtctccaaaggttccctcagctagattctgacgaacataccccagttgaggagtgaagaagaggtaacgcatcagaaaagcagcagttcagattccaactcggaagaacataggaaaaagaagaccaggcgttcaagaaacaagaaaaaaagaaagaataagtcgtctaaaagaaagcagaggaaagtattctgatagtgacagtaactcagagtctgacacaaattctgactctgatgatgataaaaagagagttaaagccaag

SEQ ID NO: 378854 - DNA, 483 bp, Homo Sapiens
  misc_feature (12)..(12): n is a, c, g, or t
  misc_feature (28)..(28): n is a, c, g, or t
  misc_feature (452)..(452): n is a, c, g, or t
gcaatggtaggnaacagctataattgcnactaacatacagtgacgcttcacagggctcctggatttggatttggaattgcaatatctggtggacgagataatcctcattttcagagtggggaaacgtcaatagtgatttcagatgtgctgaaaggaggaccagctgaaggacagctacaggaaaatgaccgagttgcaatggttaacggagtttcaatggataatgttgaacatgcttttgctgttcagcaactaaggaaaagtggggaaaaatgcaaaaattacaattagaaggaagaagaaagttcaaataccagtaagtcgtcctgatcctgaaccagtatctgataatgaagaagatagttatgatgagggaaatacatgatcccagaagtgggccccgagtgggtgtgggtttaacaggaagggagttgaggaaggttttgggcccnaggggttaggaagttgcaagtaggagagagg

SEQ ID NO: 378855 - DNA, 504 bp, Homo Sapiens
  misc_feature (437)..(437): n is a, c, g, or t
  misc_feature (489)..(489): n is a, c, g, or t
agggccatcatcttcttgaatattgccatctcttgctgccaaactatcttgtgaaatttccttaacaaatatatggcttgcaatcgaagaccatattcttcatttttccgggatttcaccagtgtgactttagtaggtttagcaggctggctggaagcactgaaccgcctgtctgaccgcggggacaagctcctctctctacttgcacttctatccctcggccaaatcttctcactccttctgttaaccacaccactccggccacttcttggatcatgtatttcctcatcataactatcttcttcattatcagatactggttcaggatcaggacgacttactggtatttgaactttcttcttccttctaattgtaatttttgcatttttcccactttttccttagttgctgaacagcaaaagcatgttcaacatatncattgaaacttcgttaaccattgcaatcgggcaattttcctgtagctgtctnagctggtctctttag

SEQ ID NO: 378856 - DNA, 162 bp, Homo Sapiens
gtgtgagccactgcgcctggcctatctttggactttagtagtgcgactattatatgtctagatttgattttctttgcatttattctacttgggagtttactgaccttcattctgtgagttatgtttttgcccaatatgggaaatttttagcacttatttctt

SEQ ID NO: 378857 - DNA, 414 bp, Homo Sapiens
  misc_feature (81)..(81): n is a, c, g, or t
  misc_feature (326)..(326): n is a, c, g, or t
  misc_feature (334)..(334): n is a, c, g, or t
  misc_feature (341)..(341): n is a, c, g, or t
  misc_feature (354)..(354): n is a, c, g, or t
  misc_feature (366)..(366): n is a, c, g, or t
  misc_feature (393)..(393): n is a, c, g, or t
ctcctccgctgcctgaaacaggcaagaacagagtggtctgcactagtcaccaggtgaggtgggaccaagaggccaggccgngaccgccatgtgctggaacctaacccaaccgtggtggtatcctacagtggggatgtgtgactatggctcagtcatgccacctgaacctcaggtgtgccaccccaggaatttggaggtattgggcaaactaagagaggttgtatttgtaaactgtacccaagcacattagaatcccatcacctcccactttccatgagcccaaggccacaggtaccttttcaccttgcacagattttgccagcttncttccctnattcccntgccttaaacaantgctgttccttnacaaggttgaacgtgttgttgggttgntttcagcaaattcattaacca

SEQ ID NO: 378858 - DNA, 302 bp, Homo Sapiens
  misc_feature (227)..(227): n is a, c, g, or t
  misc_feature (271)..(271): n is a, c, g, or t
  misc_feature (282)..(282): n is a, c, g, or t
  misc_feature (290)..(290): n is a, c, g, or t
atgttactgatttttgtaattcagacatagaattgtatatttctatcagctaaatttcttcatgatacatttgggcccattctcctaacctcctgacataaaatgagttgttaggtcctctcgggtttctactattgggcaaatttcatagggttgtttatgtgtccttatacaagtcattgggttctaaatatttaatagggtcaaggccttaacatagggatccngtgggcatttcattcaaggcttcaccgaggggtccctaagttcngggcaatacgncagggcancgggggacagga

SEQ ID NO: 378859 - DNA, 396 bp, Homo Sapiens
  misc_feature (12)..(12): n is a, c, g, or t
  misc_feature (25)..(25): n is a, c, g, or t
  misc_feature (31)..(31): n is a, c, g, or t
  misc_feature (47)..(47): n is a, c, g, or t
  misc_feature (153)..(213): n is a, c, g, or t
  misc_feature (223)..(223): n is a, c, g, or t
atgaatcaaaanggactgttgtttncccttnagtcactatgccttgncctaattttggctttcataaagtgagctaaaagaatggttgcattttattttcctaggatactttttataagaatgggatgttatcccttgaaagtttaatagaannnnnnnnnnnnnnnnnnnnnnnnnnnnnnnnnnnnnnnnnnnnnnnnnnnnnnnnnnnnncctgttgttnctgttgcctaacatcttaatgtggataccttaatttttcatctttttattttgaaatataaccatttagaaactttaaaaaagttttatatttagattttcaaaatagttaaaaaatttttttagttcctacttactctgataaagaagttgaataactcataacactaattg

SEQ ID NO: 378860 - DNA, 357 bp, Homo Sapiens
  misc_feature (20)..(20): n is a, c, g, or t
  misc_feature (49)..(49): n is a, c, g, or t
ggtcccctaagagtgacccntacagtgtggcagttatagattccagacnggactgggatggcaattccactgaaagcaacactaaataaactccctgagcagaacaccccagaagatgtacactcccaaacaaaactgcagccatgaccaaaaacagatcccaggaagtaaacgtcattctaccacctctacaatttaaaataaaaaatgacccttcatactccctacagatttctaaaatatttccttatatttccaaaggtcaaattttaatgttaacaactttgtgaataaataaaaaccactgatttggtattctttaaaatggtgaatctcacagcatgtgaattctatcta

SEQ ID NO: 378861 - DNA, 315 bp, Homo Sapiens
gcggaacattggccccaaatttcccacccttttgaaagaaattttaattgaaatgtttgaaaccccctgtaagtgtccaggcactgccacctagaaacctaaagtccctcccttttacgtccctctttccctttttgccctgccctccttttgttagcttggctgttcattcctagttaagaggatttagtctgtggttctgaataaacagaagtgacattaattatgattttatacatataaatgagcaaagtggaaataaatccaaggcattaatgggcccataaatgttgtgtttaggtggaagaagagccc

SEQ ID NO: 378862 - DNA, 476 bp, Homo Sapiens
  misc_feature (35)..(35): n is a, c, g, or t
  misc_feature (393)..(393): n is a, c, g, or t
  misc_feature (407)..(407): n is a, c, g, or t
  misc_feature (418)..(418): n is a, c, g, or t
  misc_feature (435)..(435): n is a, c, g, or t
  misc_feature (454)..(454): n is a, c, g, or t
caggggacatgcctggctccgtctgggtgccaggnccagagccgggcattttcccatagtcatcggccccctgcccgcccccagcatgtcgaggaagggaggagtatttttagttccatcttgaagacgggcacaggaacggagaataactgcctgaaagcactgtccctggtctgagcggcccttggaaaggctcagcctgggcccaggccttgctgcttcccataacagttacaagcactggctctgcattcggagatgaaagggtacacgtggggttctccgaccttccagccgtgtgacctcggacttagacctctgtttgcttagctccctccactttgcctttccttcgaatgtggggaaccccggaatttgtcttgggaaaagacnggggcttttccttnttttggggttngggttccatcctggggnttcccgcagaaggcttttnggtttgcagagaaccgaagttg

SEQ ID NO: 378863 - DNA, 505 bp, Homo Sapiens
  misc_feature (30)..(30): n is a, c, g, or t
  misc_feature (34)..(34): n is a, c, g, or t
  misc_feature (286)..(387): n is a, c, g, or t
  misc_feature (405)..(405): n is a, c, g, or t
  misc_feature (454)..(454): n is a, c, g, or t
ccctgcttggggaaaggggccacaggaagnaatntatagtgcagctggggccaacaggaacagcaggacaccctccagaggtggccccagcctcctctgcccagcccttcctgaactctccatcatccctgtctccagtcactcagtcagcatggctgtgatggacactggaccacagggctgaaaagatccagagaacacacagaggaataggccaccttacacaccgatgggccccctcctctgggaagggagcactttgtcaacagaagtttgagggggaggnnnnnnnnnnnnnnnnnnnnnnnnnnnnnnnnnnnnnnnnnnnnnnnnnnnnnnnnnnnnnnnnnnnnnnnnnnnnnnnnnnnnnnnnnnnnnnnnnnnnnnaagggagatccccatctntaacaaaaaaattttaaaaattgggccagggagtggtgggcgcatgctngttggtcccagttattcaggtcccaggttgaggcagggaggcaggagattt

SEQ ID NO: 378864 - DNA, 310 bp, Homo Sapiens
  misc_feature (22)..(22): n is a, c, g, or t
  misc_feature (35)..(35): n is a, c, g, or t
  misc_feature (47)..(47): n is a, c, g, or t
atagcccaccctttaaacacgnatgggccccctcntctgggaagggnaacactttgttgccacaaaaaatttgagggggaggaaactgggtgtggtgcctccatgccctgtaaaccccagcacttttggagtccccaggtgggaggatcgcttgagccccaagagttcaagactggccctggacaacataaggagatccccatctctacaaaaaaattttaaaaattggcccaggagtggtggcgcatgcctgtggtcccagctactcaggtcccaggctgaggcagggaggcaggagaatcgctggagc

SEQ ID NO: 378865 - DNA, 814 bp, Homo Sapiens
  misc_feature (49)..(49): n is a, c, g, or t
  misc_feature (73)..(73): n is a, c, g, or t
  misc_feature (742)..(742): n is a, c, g, or t
  misc_feature (747)..(747): n is a, c, g, or t
  misc_feature (791)..(791): n is a, c, g, or t
ggggatgcccgtgaaatccaaggcacctaatgtcccttgttccatttangaaaattggcacaaatagcctgangaccccagagatatactgaagccatctttgaaaggttataatcaaatagaccttgaacagtgtgatctgacattactgacttctcttgggtaaacagtaatggttgcaaaagataaattcagatgaatattatatagccaaatgacatttatgtaattctcttaagttctctatatcaaaaacagtttcagacctgacagtttcccccagtgcatatcaaatgtaagattcaccccaccataaaaactagagaggcaaaagtactgtatcaattcccatttgttcatttgttcccttcaaataaatgagttctaactctgtcccagcccccacgtgtgcaatgatgagtaaaagtatacttctctgccactggcagagcccaggactggagagtctataaaatcaaataatgctaatcttttaaactgaagcctgaggtgctttgagagcatatgatagcagggatttgtcctgggggaacagaccactgagttgatatttgaagggattaggggctaatcctagggaagagagcaaagagtttgttgtgtgcaaggccccaggggtagcaggagaacggcaagtactgtttaggaagaaggtcaacatataataggtgggaaataagaggacgcatgtagatgcagatggaattggggaggtaagggnccagntcacagagttgtgtaggttatgtaaagaaatttagttctgattnccaaggtcagtgggaggagttgt

SEQ ID NO: 378866 - DNA, 601 bp, Homo Sapiens
  misc_feature (63)..(63): n is a, c, g, or t
  misc_feature (345)..(345): n is a, c, g, or t
  misc_feature (365)..(365): n is a, c, g, or t
  misc_feature (565)..(565): n is a, c, g, or t
  misc_feature (590)..(590): n is a, c, g, or t
ggctgatatctcctcctcttccctttcccctcagcttacttactccgcagatgcggcctgggnatgaagtaggcctttcctgagtggctcccaatccagtcctccaagtactcagaggggaagcccgtgaagccgtcatctaagtcctgctccctcacatgaagctgagggccagatagatggagcgactgccaacttcatttcccgacatcattgtgttcagaagagagtgatgggttttgagttagacagcccctgggcttgagacaggctttgtcactactgtgtgagtgtagccacctaatctctctgagactgtgtaaaacaaagatgattaaaatctcnaccctgttgttgagatattnaaattgagccaaagtggcctagcattgatggtgctggctcatatagtgtagtccctggaatggcaaattaacatcacccaggaacttgttagaaaggcaaattcttggacacaaccctcctgatttatggaatcagaaactctggctgtggggcccagcaacctgagtttaaacaatttctctgggtggttctgcggcanactaaggtttgaaaatcactacaanaaatgctaacc

SEQ ID NO: 378867 - DNA, 395 bp, Homo Sapiens
  misc_feature (39)..(39): n is a, c, g, or t
  misc_feature (225)..(225): n is a, c, g, or t
  misc_feature (379)..(379): n is a, c, g, or t
cctaatagacacttataattcactcccatttaataacangcagaatacacatttttttcaagcatatatggaaaattatcccagaatacccccatacactaggcccataaaacaagcctgaataaatttcaaaggattgaactcatcctttaaaatgaacaaagtacattctctggccacgtgaaatgtaattgaaccaataacagcaggaaatctagaaaattnaaaaatacatggatattagataacatactcctaaataaccaagggatagaagaagaaaagggaaattgcacactattttgaggtgaatgaaaatgaaaacacaacatacaaaacttatgcagataaagtagtatttaaagggaaatgtataacnaaaaatgtctatattg

SEQ ID NO: 378868 - DNA, 385 bp, Homo Sapiens
  misc_feature (82)..(82): n is a, c, g, or t
  misc_feature (87)..(87): n is a, c, g, or t
  misc_feature (373)..(373): n is a, c, g, or t
cctggggaaactccccgaaagtgcacatggaattaaaccctggaccctggcctcctgaagttgggaagtgaggggcttgganaagancccttgcccctgggcaaagtgtgtcccccttcgtggctcccccacccagcagcccgcagccccagatggaagcttcagggtgcttggaacccctggtgctgctcccagccctgaccgttctgcatatgaacatgggccttggtttccccatctgtatgaagaagggagtagggctgggtgattcgcaagccctcctgatcttacctctacagaggttgtccccgtgacagcatctgtccccccacctcagccacatcatgctcagcccacctgccttggtgaggancacagaggtaat

SEQ ID NO: 378869 - DNA, 439 bp, Homo Sapiens
  misc_feature (388)..(388): n is a, c, g, or t
  misc_feature (428)..(428): n is a, c, g, or t
gattatctgacatgtctttcctgctacctctttgcagtcctggcggtcgtgatttttattgtagatgtatgctgtaaatttatagcaagtcaaaagtgcaaaatttaatattaattacaaagggaaggggaaaggaaaatgctttttgcagcacaatttaatacgagctcctgacaatattaaactttggtgaggaaaggatactcagagcttgatacatttgagaatggtgagattgaaaggaatacaatcataaaatggcttaaggaagtgcttatctcatacagatcataattgctgtatcatgaaaacatacattgttctctcagagggaaaactgtcctttatccataaaagggacaaatattttacaaagtactccagtttnaatgtgttccccaatttggacaaagggccaaaaagctttnaaaatattatt

SEQ ID NO: 378870 - DNA, 491 bp, Homo Sapiens
  misc_feature (17)..(17): n is a, c, g, or t
  misc_feature (25)..(25): n is a, c, g, or t
  misc_feature (42)..(54): n is a, c, g, or t
  misc_feature (66)..(66): n is a, c, g, or t
  misc_feature (75)..(199): n is a, c, g, or t
  misc_feature (201)..(311): n is a, c, g, or t
  misc_feature (330)..(377): n is a, c, g, or t
taaagtccgtttaattnaaaaaacngctttgttttaattaannnnnnnnnnnnngcccaagccacnagttgtcannnnnnnnnnnnnnnnnnnnnnnnnnnnnnnnnnnnnnnnnnnnnnnnnnnnnnnnnnnnnnnnnnnnnnnnnnnnnnnnnnnnnnnnnnnnnnnnnnnnnnnnnnnnnnnnnnnnnnnnnnnnncnnnnnnnnnnnnnnnnnnnnnnnnnnnnnnnnnnnnnnnnnnnnnnnnnnnnnnnnnnnnnnnnnnnnnnnnnnnnnnnnnnnnnnnnnnnnnnnnnnnnnnnnnnnnnnnaaagcaaaactccatctcnnnnnnnnnnnnnnnnnnnnnnnnnnnnnnnnnnnnnnnnnnnnnnnngaagacaggtacagtgactcacgcctgtagccctagctattcggaggctggggcagaggatcgcttgagcccgggagttcaagtccagcctgagcaacatagcacacccaatct

SEQ ID NO: 378871 - DNA, 501 bp, Homo Sapiens
  misc_feature (383)..(383): n is a, c, g, or t
  misc_feature (407)..(407): n is a, c, g, or t
  misc_feature (412)..(412): n is a, c, g, or t
  misc_feature (449)..(449): n is a, c, g, or t
  misc_feature (491)..(491): n is a, c, g, or t
ccagctttgtatttgtgataacatggatcaggatagtataattgcagtgaagaggcccctgagcctgcagtaataggatggttcatctgatgtgtactgcccattagaaaatgaccccatgcatgaatgttcctcaggggacagtaaagaggcttttaagaattacattctgtgtagtatgaaagctaatgagcaaaagaggaagtacgaagaaaaactactgcttcaggaagcatggttccacttaggtagggcctgtcacagctcccctcaaattcatttgggatagacaggccattactagggatgactactattattacccccatgcccatgcacactccctgcaggtcatcctgtaccaagttcctaaggaattaaanccagcgagtaataaatggtgaggnaaagnaagaggatggatacagcaactgccaataaataagttnaaaaaagacatttacgtcaaagatgaaagaagtcgtaatgancttcaacagc

SEQ ID NO: 378872 - DNA, 319 bp, Homo Sapiens
  misc_feature (287)..(287): n is a, c, g, or t
gaaacagaattgtatgtaggcaatacaaaaacagacagtgggctagctttgacacacagactgtagcttaactgaaccctgatctaaaccataaaccaaactttataatatacttcaattcgtaatcaaaatgtcaacagtatttcccaattttacaaagatgcaaggaattaaagagacttaacaattgtaatacaggaagtaaatggatgagttataactcaagcttagctcctcactcaggtaattattattatctcatgaagacaagaagtctattataatgnggcattatgatgtatgacatggaattgtaggg

SEQ ID NO: 378873 - DNA, 355 bp, Homo Sapiens
  misc_feature (197)..(206): n is a, c, g, or t
  misc_feature (313)..(313): n is a, c, g, or t
  misc_feature (322)..(322): n is a, c, g, or t
  misc_feature (334)..(334): n is a, c, g, or t
aagtaggccttaatacctaatcacttgcattcggtggctagatttgagtggataagaacacctaccaaagtacaacttccaatttttatttcagaaggaaaccatccttgagagatgagaaaataacttactttaagctttattcatttttgtatttgggctgccataaaatatcttttactaagtagctttagggnnnnnnnnnnaatctaatcctgattaaattaaaagaaaaacctgggtaagttaattgtaagctttcccataaaaggagaggaaggcacaaaatgccatgggaattattatcccaggnaacataacntaaacctggggnctttaccatggcaccatttaa

SEQ ID NO: 378874 - DNA, 378 bp, Homo Sapiens
  misc_feature (287)..(287): n is a, c, g, or t
  misc_feature (325)..(325): n is a, c, g, or t
  misc_feature (368)..(368): n is a, c, g, or t
agtttgaggtggaaggtgagggatattttaagtttcggactgtaggaaatcagtcagggtggtaggagaagctataaggaaagacgcaaaccttcttggaaggctgggaggttttgcaaagcttcagagagaataaagctgaaggcagctaattctcttaccccgaggctgagggcgaagagtaggtaacaaggtagtgtaaagaaatttatctagataagtttgtttacatatgtcctccagaaaccaacccttgatcagtgcaagactgctccctgcaaaggggngggcgacaatgttcattactcacaaattgtgttgggcnttcaggcctttggcgtttctgttctgtaccgaattaaatacangcggctccag

SEQ ID NO: 378875 - DNA, 594 bp, Homo Sapiens
  misc_feature (38)..(38): n is a, c, g, or t
  misc_feature (91)..(91): n is a, c, g, or t
  misc_feature (116)..(116): n is a, c, g, or t
  misc_feature (146)..(146): n is a, c, g, or t
  misc_feature (163)..(163): n is a, c, g, or t
  misc_feature (220)..(220): n is a, c, g, or t
  misc_feature (489)..(489): n is a, c, g, or t
  misc_feature (534)..(534): n is a, c, g, or t
  misc_feature (550)..(550): n is a, c, g, or t
  misc_feature (565)..(565): n is a, c, g, or t
  misc_feature (584)..(584): n is a, c, g, or t
ataaggtcgttgatgcaaatggtaaggttaactgttantccacattaaatccaacacccaaataagtatataaatgtttcctccccatgantgttgagttaacccagaatccgccngatcttcatgaggtccactgtaaataaatnaccgttgggcccacttncactccgtaaagttgaatatcctgaatactcgggaatggacctcactgcttcccacnacagccacggacatcagatgctggacaaacgggatcctctgtcccagctgggatctcagtggaatggagatgagcagagtagaaagagcacatccaacagggctcagccacacattccctccccgtcctttgccctcggtctgccgggccgcgatcactattaagccccatttcctgcggtgtctgaaacatcagccccatccaggagacgcatcgttgtgggggttcacttcggcaaacaaaattactttccccaaactgccttggtnctgacagaattttggcgaatagaatctcctaagttgaaaatgttnctgaatgaagaaaggncctcccatgttggtncaccacaggtaataacaanatggggttaa

SEQ ID NO: 378876 - DNA, 248 bp, Homo Sapiens
gcatcagccaccgtgcctgggcccaaaattatggactttaaggaaactgttgggagatatttttctgtggtttcatgataatctgggctatactctgggtaggaatacccacgaattttccacatcaagggcagtaataataacagtttttagaagtgtaaacatcaacaccggactctcaggttaatgtctaggtaaaggaacccgcagggtgcctccattccttattacactgtgggcatctcttt

SEQ ID NO: 378877 - DNA, 317 bp, Homo Sapiens
  misc_feature (196)..(196): n is a, c, g, or t
  misc_feature (205)..(205): n is a, c, g, or t
  misc_feature (213)..(213): n is a, c, g, or t
  misc_feature (220)..(220): n is a, c, g, or t
tttgaacatttaataaaaatgtttaggttgatatcttaaagttgtcagtgaaatctcagatttacataacagtttgcatccagtagtttttttgagtaacacaaacatcagtatagccaaatgttaactcttatcactttttgtgttaataacaaagtaatatttgtaatatagtgtccctgaataactataaaancttcttggnattatttngtttttnaaataaaacactatttaataactggtatcatagcccttcaaaagacacattctgaaatgctatcagtcagggggcaaaagttgttttagttcagttt

SEQ ID NO: 378878 - DNA, 432 bp, Homo Sapiens
  misc_feature (40)..(40): n is a, c, g, or t
  misc_feature (46)..(46): n is a, c, g, or t
  misc_feature (98)..(98): n is a, c, g, or t
ctattgaccaaagtataccccgggaaataatccatcctcnaatatntgcctggaatcctgaaactttaaagttaaaacaatgattacctgaagtagtnacaaatggtaacccaggtactgaagaaaacagacaatgagccttggataagaatatttttttagatcctcacagtataactggagtgggatgaaaaaggaaaatataagatagtttcattcatataggaagttatcctgatagcctgtacccaaagtagtaacttcttcccaacaggttatgaaagctacaaataaaatcatcaccatgaaaaatgacagccagtaactctgaatgctgacatagaaaggacagtgacgagaataagcattctgtgccttcaggctttggtagatggctgggtctcccaaaacataagcaaggactgaaatcca

SEQ ID NO: 378879 - DNA, 379 bp, Homo Sapiens
  misc_feature (15)..(15): n is a, c, g, or t
  misc_feature (127)..(127): n is a, c, g, or t
  misc_feature (215)..(215): n is a, c, g, or t
  misc_feature (334)..(334): n is a, c, g, or t
  misc_feature (358)..(358): n is a, c, g, or t
ccctgctcctgcagnctctctccatccaggacgccacaaccccccgccccagcccccgtcaccagctcagtccagagacccagattccttctcgggaaggaggggagccccgtgccgcgccggctgnctggccgccccgccccctcccccatcgaccctgggacgcaaagcctcagctgcggaggcctcttctggggtcccgtgggctctgcctncccccagggctcagacgatgtagcctgtggtttgagggagcgggcattagtcattcgttcattcatccagcccgacgttcattcactaggcatctgcttcagtgccggaccatgagctngggcaccggggcctcagggcgganttcagcccccctgctgcgccc

SEQ ID NO: 378880 - DNA, 444 bp, Homo Sapiens
  misc_feature (309)..(309): n is a, c, g, or t
  misc_feature (392)..(392): n is a, c, g, or t
cggataccctgggggcctctgctcctctctttgtggagacgtcgtttcaccggcggcgcgtgaccccggcagctgtccagagacccagagatgtccaatcacaggcgcacggtgcacaggcgcgcagggctgcctggaacgggcccaggcaggcagtgaccgggacctctccggagggagaggacggtgccctcccgggcaggagctggccaggcaggcgctgcccagggcggcctccctgctggactacggcattgccactgagttatataaagacactatttggggaaggacagcgggtaaggactnggcgcggcggcacacgcctttgcctgttgtctcagctcttctgggggccaaggccagggagttccagggtttacagtgagccntgatggccaatgcctttccaaaagagagaaacagagagaaagggaatcaggc

SEQ ID NO: 378881 - DNA, 453 bp, Homo Sapiens
  misc_feature (205)..(205): n is a, c, g, or t
cctccgggaatccctggggcccttctgctcctctctttgtgaaaaacttcgtttcaaccggcggccccttaaccccggcaagctgtccaagagaccccaaagatgtccaaatcacaggcgcacggtgcaacaggcgcgcagggctgccctggaacgggccccaggcaggcagtgaccgggacctctccggaggggagaggaacgngtctcccgggcaggagctggcccaggcagcgctgcccagggcggcctccctgctggactacggcattgccactgagttatataaagacactatttggggaaggacagcgggtgaggactggcgcggcggcacacgccttgcctgttgtctcagctcttctggggccaaggccaggagtccagggttacagtgagccgtgatggccagtgcgttccaaaagagagaaacagagagaaagggaatcaggc

SEQ ID NO: 378882 - DNA, 429 bp, Homo Sapiens
  misc_feature (378)..(378): n is a, c, g, or t
ggttccctgctggtgcagaatattatgagagttccagaaggaagcagggcataaactgcctggggctgagcagacgcacctgtggtctctatcaccccctggagttctgacctctaagtgaaaagaaaaggaggcagaggtggagaccagacccaacagctccttccaaacaatggttctgcctgtctccttgggctccccaatttcccaggaagcctttcctgcgtgggggggcaactaccctcaggtctctgctctgtggttaactattttcctccattcatccattcatttagtcacttatttaataattcattggttccctacttacgtggccgagcatttgctagattctaaagatacgggagaaaaccccantattgtcagaggcaaacaataaggaccaatgttacacaattatttacagta

SEQ ID NO: 378883 - DNA, 548 bp, Homo Sapiens
  misc_feature (24)..(24): n is a, c, g, or t
  misc_feature (47)..(47): n is a, c, g, or t
ctgtgcctggggaacccattaggnggagttttaaaaaacccatcccntcatagccccacaattttgggtcaaactctcaaaattgggaataagaaaactggccactgttgggagaaaaatcgttcttactgaaacatgaactggctcaggcaagcaaatagcgggagtcggcacaggaaggagtgtgtgctgcggggatgcgtggtggcgtcaccttcaaaactaaagtggtgccaggcggacagatgagtccttgatcttgtttcctgatcttgtttccatttgactgaattctgaaccttcattgtcttcacagtcttgccacttgcctagtgaggcttttccgaacctggaaggagacgtctagaaatcccaactttgctgtgtaaggaccattagctgcaagtcagtggaagtctatagaaagcagtgtgaattccatagtggtcttgacttcttagcaaggatttgggataagtctaaaacttcagacttaaagctttgaagcatgttaactgcatgaaatattaaacatttcgaacttcttt

SEQ ID NO: 378884 - DNA, 347 bp, Homo Sapiens
  misc_feature (125)..(140): n is a, c, g, or t
  misc_feature (331)..(331): n is a, c, g, or t
atcttgacaggttggaagtagcttctcatggtgcaaagcgataattccagattacaggtgtgtctggtgcattgggcaccctggagatgaaatcaaagggtgatgatcctgggaaatgtgtggtnnnnnnnnnnnnnnnnaaggccaatcaagacctttctccagattcctccaccccttccagacaaggagaagagagtcggactagtctctagggaaactggactgtgtagacaagcaatctgaaccatatgccaacttatccgtcaggcagagtagacatagtgccaagggcccatggtacttgtagaggtccactaaaatgttttantttcttttaaaattca

SEQ ID NO: 378885 - DNA, 484 bp, Homo Sapiens
  misc_feature (18)..(18): n is a, c, g, or t
  misc_feature (235)..(235): n is a, c, g, or t
aatcggggcaaaccaatnagcccccttgtaccccaattatttccggtaatgtccctgtaatataaagtgccaaaaagaaaaccctgtgtgtgccacaggtttagcctggggccatggaaaaggatatgattaccttgtcctctggaagccctcagaacaagggggtcctgatttctcccaaagagacaaggtgtcaatggatcttccccagcagagagaagcgcacgcacaaganccctggatggagaaggagcaatggaaacagaagtgagagaactgattgaaagagaggcattgttatagctgggtagcaggcaatcgacatgagctcatctgagcgtaggaataatcgtgctaccatttctatgaggttgttgagaatattaaatgagttatctaacccttagcacagtacgtagcacaaggtaatcacaatgttaaccactactactcattaaagcattgcatgagaataaaaaaataa

SEQ ID NO: 378886 - DNA, 253 bp, Homo Sapiens
  misc_feature (50)..(50): n is a, c, g, or t
  misc_feature (186)..(186): n is a, c, g, or t
agatttattatttggaaattcagccccaatctttagaaactcacatattnctatttatggcaacatattttataatagcaatgtactagaaaaaatgaaaccatccactaatggggtattgattaagtaaatcagataactttgttttgtattatatagatattaagatgataaaacataaaaggnactcaatataggaaaaacaaagtcaaactttataggcactatatttattaattatgtagccttattt

SEQ ID NO: 378887 - DNA, 461 bp, Homo Sapiens
ctcaacacggtgaacacgtgttaaagaaaattggaaccccaaccccggaaaagaattgccttcccaaatgtggggtaaagcccttaaaacaccaggtgtgttaaacgttggatcaaaaccctgtgttaacctatggctgtaaatttttgttactgtgcaataatgtaaaatgtttaccttacataagccgagggcccaagtgaaattatatcaccttcccacagtgttctaactccaaggacccttttctacatggaacttcaagggcagaaacattacctttgaataaaatgaacctgaatgttcactctaattacattaagcctaattgttttctgtgaatacagatatgttttcattatatttctgccatggctgtttttccttctgggcccagagtccttgggccaggcttgatgtggtaatgtgcattataaatcaatggtagctttgtggtgact

SEQ ID NO: 378888 - DNA, 388 bp, Homo Sapiens
  misc_feature (197)..(197): n is a, c, g, or t
gtcttttagccgaatgttatggtttttattgcggagcttttttggtggttcgagaatgtcaagccagattttgttcagcccagggatgttcaggagctgaaagacggtgaagtgacagatattccccaggttggcaatggtttcccttgagagccctagagtatcagaaagcactctcccagtggttcccatgtttnctcgcacagcagagttcttggaagagcctgtggagtcagaatcccagggacgggcgtgagagtttggggaaaggctttctaagtgattttgatgaactattcggttacgaatcacagctctaaaaattgcacaactctaaaagtcccaggatggctgttctcacctccagaatgaacaaactgaaaaaaaa

SEQ ID NO: 378889 - DNA, 354 bp, Homo Sapiens
  misc_feature (334)..(334): n is a, c, g, or t
atttccctaggtccagcccctagaaccaccacacagattccacccagaacaaaatgctctacaaataagaaatgctattgcttacattattttatgagaaagcactgacatatcctgaggatatatccaagacatttcaccgtcttttaacagaaaacataattcagtttgaatgttagatctgcgtctagaattctgtttaaaatgaacattaaagcaaaaatcccaccatcctattgtactcaggaatgaaccaatctccacaaaccatggaaataggttaagggctgattcattcacaactaattcaggtaaacttaatggaaaggcgggncaggaatgtggggtttgaag

SEQ ID NO: 378890 - DNA, 581 bp, Homo Sapiens
  misc_feature (43)..(43): n is a, c, g, or t
  misc_feature (57)..(57): n is a, c, g, or t
  misc_feature (71)..(71): n is a, c, g, or t
  misc_feature (539)..(539): n is a, c, g, or t
accagcccatccaaaacaccttaccatccaacaaacacagcantttgaacctattgnaaaccataagcganttaaccttgaaaaggttaatatttgtaggtggatgccaagtatattggagaaatatttcctatcaaaatcactggttttgttaggagtattttgatttttctatttttacgctgggaaaaaaattaaaacaagtatgtcagtgttcattttatgggatagttggcttcactgtgtttgtcatgtttgtccgaattacagctgtttatcttgcaactttaagattaattaaatgcaaatgtaactctgtgaatcatgggaatacctgccagaccctcttattaataccttcacttaaaaccccctgtgcctgagagtcattaatttgcaaaaagaaaagtctaaagcagccctttgcccacaaacaattctgcgatggctgcccaattaatcccaaagcattctgatcctcctttcagcctcgtggccctttgaggacacaagaaggctccgatgataacctggcaacntaggtagaaacccagccaagtgtgagcgtttgaagctgcagt

SEQ ID NO: 378891 - DNA, 465 bp, Homo Sapiens
  misc_feature (348)..(348): n is a, c, g, or t
agtttcagcgagagagtgagtgacagtgaatggcagccacgtgagagtcacagctgggcagcttggccaccccagactgacggggtcaagagggggaccccccccaccgcacttgacacaaaagagcccagagccccggcaagatgaagggggtggaagccgggggttatctggttccccagacactcttctctccgctccccaatccgaatggactgctgtccctgcacaggctgggggagcgaggggacgagctcctgccttattccagggaagtggtctgcgtggactgtggccaccacctgcccctactcatcagcagcccacaaacattcacaagacccctcncctcgcgtgccaccgaatgcccctcagttggcgggcacctaagtctccgcgggtggaggggggtccgatgacaccgtccccactctgcctgtccaagtcctgagcggagggggcagg

SEQ ID NO: 378892 - DNA, 720 bp, Homo Sapiens
tagttcctatcctgaactacacactgaagttccactgtctgtcttaattctgggattgcttgttgttttcatcttatctgtctgttttggggctggtttattcgtctttgtcttgaaacgccgaaaggagtgccgagcgttcccaggaataccaacaacttagacgtaagctcctttcaattacagtatgggtcttacaacactgagactcacgataaaacagacggccatgtctacaactatatccccccacctgtggtacagatgtgccaaaaccccatctacatgcagaaggaaggagacccagtagcctattaccgaaacctgcaagagttcagctatagcaacctggaggagaaaaaagaagagccagccacacctgcttacacaataagtgccactgagctgctagaaaagcaggccacaccaagagagcctgagctgctgtattaaaatattgctgagcgagtcaaggaacttcccagcgcaggccttagtccactataacttttgtaccttacctaaaagggcagtttgccccttcctatgaatctcgacgccaaaaccaagacagaatcaataaaaccgttttatatggaactcccaggaaatgctttgtggggcagtcaaaacccaaccaccctttactgcaagctaagccgcaatcagaaccggactacctcgaagttctggaaaaacaaactgcaatcagtcagctgt

SEQ ID NO: 378893 - DNA, 485 bp, Homo Sapiens
  misc_feature (222)..(222): n is a, c, g, or t
  misc_feature (453)..(453): n is a, c, g, or t
  misc_feature (475)..(475): n is a, c, g, or t
gacaaaatggattatactattttaataacagtggaaactttcaaactacatgtgtttacaccaaattcttggcttctcaaagcaacatgaattaaagcacagtatcaaggtgatgccctatgacaatgtttcaacacacacttgaaattttaagagaaatttcagttcttcactcaggaaatgtgctgtattctctaatgtactttcatgctgcagcagggnagcctctttaaacagctttggggataattataggcagcacaaggaagtttatctggcaaaatatttcaatgcatcttgggtacaataggatgactttttacatcatgtatattagccttatgtgatataaaatgtattacttaggaaaatatacttaaagggaattatttctattattaaatgggtattcatgattgactacttaattaatggcacattaggatttctccnaatattaaaatggaatggtgcngtttaggttc

SEQ ID NO: 378894 - DNA, 443 bp, Homo Sapiens
  misc_feature (392)..(392): n is a, c, g, or t
  misc_feature (408)..(408): n is a, c, g, or t
  misc_feature (420)..(420): n is a, c, g, or t
gcaaatacagtgaacaaagcaaagaaacaaatggaagtgagcctctaggtgttttccctacccaaggtactccagtagcatctcttgacttagaacaagaacagctcacaattaaggctcttaaagaattaggtgaaagacaggttgagaagtcaacttctgcacagcgtgacgcagaattgccttctgaagaagtactgaagcaaactttcacatttgctccagaatcttgggccacagagatcatatgacatcctaggaacgtaatgttcaaggaatggatctgatcttggggatttcccaggaagcccatcactattcagaggaaactactaggggtaggatgctgttttccagcctttaggcaagaattgaattgggttaaaaaagcntgtcctaggcaagganttcttgacaganttcttcagtggcacgatcttgat

SEQ ID NO: 378895 - DNA, 440 bp, Homo Sapiens
cttggtgttctgggttccggacaaacaagctgctgccaatgcaagtggatggagaaccctggatgcagccatgttgcacggtgagtcttgccaatctttgagatggggatgagaagccttatttttgagcccttttggacactgacttaatatgaaatcactgaatctcagagtcgcagggactgtggaagattatctagtgcaacccctcttccactttattatccatccactcatttacctgggcaactcttaatgaaaacctgctatatgccagacactgtgaagcgccggtcacaaaattgaatgagacatagaaccaacttcgaggagttcacagttctagtcagtgaattctgagacttcatctactgtatcctggacagcctcagctttgaattcattgtccaatgggcaagggattttacttacctccaaaa

SEQ ID NO: 378896 - DNA, 380 bp, Homo Sapiens
ataagttcctaagatctccctagaaagccccaggctcctggctgcagagataaaaggctgtcccaaggaagaatctccctactagatagtttggccttgagtcccccttggctaacggccagcagggaggaaaaagtaggctgtgtatgcttgtcagagagagcctgtgtctctccctgactaggcccagcctccacccccacagggagggcttcaaggccccacttttattggccatggtcaacaacagcctaatatcacattcttaggacaatgatatctgagaaggttaaataaagaaacttagactctcaaggtcacagaattttaggagctggatatagtgtggagattgtgaacaaaggtcatggaatcaaatg

SEQ ID NO: 378897 - DNA, 399 bp, Homo Sapiens
  misc_feature (17)..(17): n is a, c, g, or t
  misc_feature (25)..(25): n is a, c, g, or t
  misc_feature (44)..(44): n is a, c, g, or t
  misc_feature (91)..(91): n is a, c, g, or t
  misc_feature (103)..(103): n is a, c, g, or t
  misc_feature (138)..(138): n is a, c, g, or t
  misc_feature (357)..(357): n is a, c, g, or t
ccggaaaaggcatccanaaaccctnggggtccttgggcaaattnctggtggcttcctttcacagtgatataaaagaatagacataaaatgnatggatattcantttacatggtctattttttgttaacatggaatgcnaagttaaaattcagagtgggaaaaaatccctagaatcttccttatatagtaacaatttaaaaactggctctctccttcccctagtcccttctgtttctcaatatcccaaggtatatcagtttaaatgtcaggcaatatggcattgaaactattgtcctttcagtggcactagaagataatgacagcttaaccattctatctcctcctgagaaagacatnaggcagccttgaatggctgtctgagagatgggttagatgact

SEQ ID NO: 378898 - DNA, 415 bp, Homo Sapiens
  misc_feature (382)..(382): n is a, c, g, or t
ttataaactcatttagactaataatgaatgagttaatagataaaaagatcaagaactgaccactcatgagactgtgttataaagccaggaatgagaagaagctgattctgtaaagcaaagctaacttgcagagaatagcaagacgattacatgtttgagtggcggcactggggccaatatgtcccatagtcagatgtttttcttaatgcaggtgatggattcaagaatgttcactattgatgtaaaattcataacttaaataattcaataaataaaaggagagtggaatctaattctaagggatgggggagttgattcaagcatttgtcatctccccctcccgggggtaccctcctcttcaaacagactaggcgtggatacnggaacttctttaccacccccaggagtttccctt

SEQ ID NO: 378899 - DNA, 374 bp, Homo Sapiens
gtgttgttgaaaatggttgccttgcgcaggcccccgacccccggcaaaaacgggggtggccgtgccactggaacctaatgggggtggggaggatgcctcgggtctccccccacttgccagaggcgtggggtccgaagcatccggatgacagatacacaaaagggacagcaatatgccctagaaatcacctcccctgcgacccacgcatctcagctataggacagccgcaggggtgatgacatggccatttccaagttaatgttatgccctaacttaatctggtggagtgtcacaatttcatggactgtggattgatttcaatttcatcatgtcacagagaggccagacagcttatgtcagggccagaaacgcat

SEQ ID NO: 378900 - DNA, 520 bp, Homo Sapiens
  misc_feature (270)..(343): n is a, c, g, or t
tgaaaagagtgatgtctaatttatctatgattactttagcagtgttcacactgaattattgttatccatttatctgtgtctatcactaaactgtaatcatcctgagagttgggacttcattcttggatataatagtttctcagtctatgtgagatgaatgaatgaatgatcaaatggacaaatgaaatgtgatctaagatcatgggctttggtatcaaaaagatctaggatttgaattctcgctctatcacttattctctgggtggcatnnnnnnnnnnnnnnnnnnnnnnnnnnnnnnnnnnnnnnnnnnnnnnnnnnnnnnnnnnnnnnnnnnnnnnnnnncttcaagaatatcattagaattaagtgagagatgtacaaataaatgcccactacctagaagagctctgtaaatggtagctttaaaagggagggaggcatggaaagacttaaagataagtggagacgactcattgatcaccacaagggagagaattggtcaccttggatctctgggaa

SEQ ID NO: 378901 - DNA, 280 bp, Homo Sapiens
  misc_feature (218)..(218): n is a, c, g, or t
ggatgaatgagaggaaggtaagtcaggaggataagggaaacaggaggctttttgtatagtcgtgcaccatatgatgacattttggtcaataacagaacatatcaaccatggtggtcccatacgattataatggagctagaaaattcctttcacttggtgacgtcgtagctgttgtaatctcatagtgcaaatactttatttttcataaatttagggtnagcctaagtgtataggatttataaagtctacagtaggtacagtaatatcctaggtctttcag

SEQ ID NO: 378902 - DNA, 513 bp, Homo Sapiens
  misc_feature (15)..(15): n is a, c, g, or t
  misc_feature (31)..(31): n is a, c, g, or t
  misc_feature (42)..(42): n is a, c, g, or t
  misc_feature (50)..(50): n is a, c, g, or t
  misc_feature (57)..(57): n is a, c, g, or t
  misc_feature (74)..(74): n is a, c, g, or t
  misc_feature (79)..(79): n is a, c, g, or t
cccacaaaagaaaancgggggtaatcccccnaagccagttcnccctgccnttttggnccccccccacctggtgnatatnaactggacccctaagactatccccaaaagaatgtccacctaaagcccctgatggtccaccccaaaaagaagagttacccccaaatgtttaagggaaggtccacgtcacctagaatagagacaccacccttccgaagggactaatttccacaggagcagccatacattggataaacatactttggtatgtcccatttaaaaagcatatatatatgccagcaaataagatgtaaaaacaattcgacattattagtaaaatgaatgccaattaaaattgtattctcaattagaagagattaaaaaaatttttttggtagaggctgtcacaggaacggcagtgttacacactcctgagggaagagatttgtaaattattataaattttcagaagggcagtttgttcacatggttatagaatatggattctctaaaatg

SEQ ID NO: 378903 - DNA, 425 bp, Homo Sapiens
  misc_feature (305)..(305): n is a, c, g, or t
  misc_feature (336)..(336): n is a, c, g, or t
  misc_feature (398)..(398): n is a, c, g, or t
  misc_feature (413)..(413): n is a, c, g, or t
accaacattatgtattgagcatcgtatctttcctactgagcctagacacagcctcagaacctctcaacatagcacttggagcaacaattgccgcttgattggaattgccatttgagcttgagttagccccaatggcagaacgacaggctcgcactagtgtccacctgtggctgtcaggggcggtaccacagaaaggggaaaggccacttgcctctacccactgcccttttggacaacaattccaattgaaggaacaccaatcactgatggatcccattccaaaatgtcttctttcattgcacatncattttaattctgttgaatggaatcatgttncctccctcacctttttattagacaggaaaatttaatattaagtgcccagtttacttggcttntttaggattctgtgnggacttcatgtt

SEQ ID NO: 378904 - DNA, 466 bp, Homo Sapiens
  misc_feature (125)..(134): n is a, c, g, or t
  misc_feature (324)..(324): n is a, c, g, or t
  misc_feature (364)..(364): n is a, c, g, or t
  misc_feature (415)..(415): n is a, c, g, or t
  misc_feature (420)..(420): n is a, c, g, or t
  misc_feature (431)..(431): n is a, c, g, or t
  misc_feature (442)..(442): n is a, c, g, or t
taggaaacactatgtactcccaaccaataatagcaagtcttggttaaaaaacaattactaagtacaaaaatttgtatcatttaaaactttagacaaatgataaggaagataccttagggaagttnnnnnnnnnnatgagtatttagtttaatttatatataactttaagtaatcaaaataccctaaattccaggtgaatagttttctaccttctatcattttacatcattgatattctcaggaatatatggcacaccaaactaaggacatttcaaagtatgtctgtgtgttttggatccagggcatttaaaatgtgtgtagganatggaaacaggtacataaatatcactgctgaaggtaaaantatagacatatttacaggttaacacttaaccgtggtatataatttactttncaacnctaataagganagttaaaggtnaaaatgtgttaatgggtacataat

SEQ ID NO: 378905 - DNA, 716 bp, Homo Sapiens
  misc_feature (27)..(27): n is a, c, g, or t
  misc_feature (509)..(629): n is a, c, g, or t
ccatactccacaatgtatttccccaantatccccttgttactaaaaggcagtctgttccccccgtaagtactcctcctgagaacagcccacccccaggtacccttgaaaagccaaatgaagagctgagcatggcaaacacacgaggtcccagctgtgtacaaatcatcagtagatggcacacacatgcatgtatgtgccctaacatgaaaccagatgtcctttctcagatgacagatgtcaaggctgcagttttcttctcttgcctcttactttgctgaatataaactaagatgagatttctatttaatacttacaatcaccttgcttttcttttaagatacttctagaagggggtagggattgattataggaggactttcagttagggaagtagaagactaagtgctttgaaaagctttatgaataagactacgagaaaagctgtaggtctgcaaacacccaatagaaaactgtttaaaaaagaaacaggccaggcgcagtgctcatnnnnnnnnnnnnnnnnnnnnnnnnnnnnnnnnnnnnnnnnnnnnnnnnnnnnnnnnnnnnnnnnnnnnnnnnnnnnnnnnnnnnnnnnnnnnnnnnnnnnnnnnnnnnnnnnnnnnnnnnncatggtggcgcatgtccataatcccagctacttgggaggctgaggtacaagaattgcttgaacccgggagatggaggttgcagtgag

SEQ ID NO: 378906 - DNA, 403 bp, Homo Sapiens
ggaaatgtaagtgagtccacttgcttctggaccaattctgtttcatgtatgttagcatcctagaaacacctagcaatggacctagttcacagtaataggtgcaaagaaagaccaaatggactttgcagtattaaccctttgcagtcgtcatacttagctgctgcctgtaatgctaaaatgattttaatggttgtctggaggcaaagggctgttttttagtatattgccactaaaggacatttatttatatcaaacttttatttttaggatattataaggcatacagtacataattggatggaaattggatatttactaggagatttatgggtaggagaatgggacggacattcaattaactgggagccccgaggattgtccacttttatttttaaaaaggccc

SEQ ID NO: 378907 - DNA, 437 bp, Homo Sapiens
  misc_feature (381)..(381): n is a, c, g, or t
  misc_feature (392)..(392): n is a, c, g, or t
  misc_feature (412)..(412): n is a, c, g, or t
tcagctctgcacacccacaggcacttcaagacctggaggccactcctgggacccaaggtctgccccctcctctcctgtgtcctcaccttgaccccctctgctagactctgtctccctctgggtgtcccactctccacccagaggcagaggaggctgggtggcagggggcaggggctggttgagggccgcccagggccagggtgggctggggggccgttaaaatgtggagctctgcccagccgaggggggctccgtggaggcagacgcagcgtgtgcccagctggggggagtatgggcaggcctgcgcaacgtggtaaacgatgaacatttcggggcgccccggaccttcgggcagcccagttgacgaccccagcagtggtngtgagcgggangcagtttcgacagggcatgnaagatggttcattcgggcagtttga

SEQ ID NO: 378908 - DNA, 489 bp, Homo Sapiens
  misc_feature (52)..(81): n is a, c, g, or t
acccgggaagcccaaaaaaccaatcctgtaaggctgtaaagatccacgttgnnnnnnnnnnnnnnnnnnnnnnnnnnnnnntttttgtaagttgtcccaaaagggagcaccctgggtaagcaaatgtgaccttctgacccacagttaagtctcactttggactcttctttctgttctatgggtggtcagaggctgtcaccaactcaaaccactgtctgagggcatcgcctgagtgtcctcaggaagtgcgtttacatcctcgaagaatgatatagtaatgggaatgggaactcttcccatgtaggatcggatttcaggcatctctcccaggtcctttaaatatcggtactttaatgtccaagatagaatcccgtgaactgggattgtccaatacaacaaagatgacaaagatatttgcattccggcagcctgaactgctgcccaggactctttctttgccctcaaggaaaagcctcgcccatcagagac

SEQ ID NO: 378909 - DNA, 440 bp, Homo Sapiens
  misc_feature (347)..(347): n is a, c, g, or t
  misc_feature (354)..(354): n is a, c, g, or t
  misc_feature (384)..(384): n is a, c, g, or t
  misc_feature (399)..(399): n is a, c, g, or t
  misc_feature (410)..(410): n is a, c, g, or t
  misc_feature (425)..(425): n is a, c, g, or t
atgtttaaagtccaccctgagatcccagagtccatgtctgcagaggccaaggcattcatactgaaatgttttgaaccagatcctgacaagagagcctgtgctaacgacttgcttgttgatgagtttttaaaagtttcaagcaaaaagaaaaagacacaacctaagctttcagctctttcagctggatcaaatgaatatctcagggagtatatccttgccggtacctgtgctggtgggagggacaccagcaggcagcagtgaggtacgggctcagttttcacccgacacgggagttggaaagtgggaccccttcttctttttcaaaacaaggaggccaagttcctgtnggagganaggaggtgttcaaggggatttcggggacantcttttttgggggcnttcccaggatngaggaatttttgganggttccacagtggct

SEQ ID NO: 378910 - DNA, 279 bp, Homo Sapiens
agatctgccccatcgcttctctgccctcatctcctagcgctctcttctctgcttcctcccctctaaacactctagctccctgaagctcctcagacttaccggacaaactcctgtctcagggccttgcactggctgttcccctttactttaaaatacccttccctgcagacatccccagaactccctcacctccgtcaggggctttgttcaaatgccagctcctggctaggcacagtggctcacacctgtaatcacttgggagatttccacctggaatca

SEQ ID NO: 378911 - DNA, 385 bp, Homo Sapiens
ctgggcagggatatggaaggaacgtccctgaatcgcgagaacctacaccccaacaggaagccgagtacggactctcaggtcaggctctgaggccctcactccagctggtcagcaacaacactctattgagaagcccaacactccatggagaagggggctttaagcaaaaaagaactctcctcaacttgaagaagagtgtggcaagctccctggctggggatgtgtgagccaggaagcaggttcaagctgaaatgcacactccagagcattggagaagcccctgagagcagcagcaaagaccacaaggacattggtcccaccctcccaggtgacaggcagggttgcgaggggtccccactgacaagcacacaggagagaaaaggaa

SEQ ID NO: 378912 - DNA, 522 bp, Homo Sapiens
  misc_feature (344)..(344): n is a, c, g, or t
  misc_feature (375)..(375): n is a, c, g, or t
  misc_feature (390)..(432): n is a, c, g, or t
  misc_feature (472)..(472): n is a, c, g, or t
  misc_feature (480)..(480): n is a, c, g, or t
  misc_feature (507)..(507): n is a, c, g, or t
agcagagccagttagctatctgcaaagccctttgctccaccaatgtcacattgcctagtcctttcgttttatgaagtctcatcttaagacatgataagtggaggaggatagggaaagacatttttcttaatttgcacaagagggaagtgaggttctaaagaacaaagcaagtcttagctcactcagctagtcagcagagcttggtgtttggggaccactatgggcttatcccttttttatacccatccctttagggcccagctctggaaatcccacattacaccttaaagttaaactagggctcctggggtggggggcaggatgttacatattagtttttccantcatgggggaatggatggactttttattttncaagggtttgctccnnnnnnnnnnnnnnnnnnnnnnnnnnnnnnnnnnnnnnnnnnntgttcacttgggccagcccacatgttgccccttcagtccntacccctnctggcatgttaccacccagcccaattncccacttgggcacct

SEQ ID NO: 378913 - DNA, 489 bp, Homo Sapiens
  misc_feature (26)..(26): n is a, c, g, or t
  misc_feature (38)..(38): n is a, c, g, or t
  misc_feature (48)..(48): n is a, c, g, or t
  misc_feature (55)..(55): n is a, c, g, or t
taacccctaatttgggtcccgattanggcccccccgtnaattaaactncccaaangcaaaggaatggtggttaaaaaaaacaacatgagttccggcagcatttacctttcacttgacgtttataagcttgtgccccccttatctgtttttccatcaagggcactgtcacctaagagatcaatgcctaaagtgaactcaaagataaaaagttaatctttaatcttgacaattacagcttcaaacagaagagttaattttcagtgcatgctaccaaggcatcaaagacaatgcagagactaaaaaaaaggaataacaggtttctaagatatggaaggtcagatgtcatattctgaagttaaattctaaaatcaatgaaactgaaaactttcaatcagaaaccaatagaaaactagttatcaaggcagcttcctggggaaagagctaggtttgtatcactcctctttgtatctccaaaatctaaggcttaga

SEQ ID NO: 378914 - DNA, 530 bp, Homo Sapiens
  misc_feature (403)..(403): n is a, c, g, or t
  misc_feature (409)..(409): n is a, c, g, or t
  misc_feature (420)..(420): n is a, c, g, or t
  misc_feature (433)..(433): n is a, c, g, or t
  misc_feature (439)..(439): n is a, c, g, or t
  misc_feature (451)..(451): n is a, c, g, or t
  misc_feature (477)..(477): n is a, c, g, or t
  misc_feature (488)..(488): n is a, c, g, or t
ttcttttaaattattgaattttttgccttgtggggtttcttaaccacaaaacctatctattaggattaatggaggctattttttctttaccaattgctatataactacttaagacttcatgtaatcagctgagatgctacaaatgtattgcctgtcaactccagtaaaaaagcgggcagttaattaaagggatgtcttgctgttaaacaaacttgcagtcaattgcttgtaagtaacatttagtttgatatgtagtcaaagggcaggaaaataagtgtttagggcaggactgggctttttgcaacgtaaaaagaggaagtgattatattgggggtcaagatgagtaacctttccaactgggcatattttcccttcttaaaagtatattcacatattcagaggntaggtnaaagacatatnagggccttaaggntggtcngttttggaggtnctttttccacttaccgttaactaagntccccatcctncttggcatccccttggaaggccactggttttacccctaatta

SEQ ID NO: 378915 - DNA, 467 bp, Homo Sapiens
  misc_feature (16)..(16): n is a, c, g, or t
  misc_feature (44)..(44): n is a, c, g, or t
  misc_feature (59)..(59): n is a, c, g, or t
  misc_feature (79)..(79): n is a, c, g, or t
agggggccgggggaantgggacctcaaaaaccctggggcccacnggttcccggggtaangcaataattttccaaaaaangtaccccatggctacctatgttccctcccaccctaataacactcaaaaacttccctggaaaaatggagaagagaaatgaaaaaatggacaagctgtgggaaagacaaatctctgatcccctaggtcaccaatttaaaatgggtgaataatttcccattcaatgtcttctcagtgaagttatccctaatttcccagaaaaccccatgcaaagcagttttaatattctatcctttcttcccccattcttctataatattcaccgtttggtgaccggatacacaaatccacaaaaagtgatgttttcagacaatcatatgtttgatccccataaatgatataaaagatttttaaaaacctgcttactgataaataagggaccgagtgctta

SEQ ID NO: 378916 - DNA, 580 bp, Homo Sapiens
  misc_feature (56)..(56): n is a, c, g, or t
  misc_feature (92)..(92): n is a, c, g, or t
  misc_feature (133)..(133): n is a, c, g, or t
  misc_feature (481)..(481): n is a, c, g, or t
  misc_feature (492)..(492): n is a, c, g, or t
  misc_feature (497)..(497): n is a, c, g, or t
  misc_feature (536)..(536): n is a, c, g, or t
  misc_feature (555)..(555): n is a, c, g, or t
agagaagggatactcccgcccaagggccaccgagccgagagaagcccgggccaggnttttcttcgcgtatgtgggaatgcaggcgcgacctnttggggggcacagtccatacgggagctgaggccgaagccgnagcactaactgtgctgtccaggggatcgagacggcactagagggctggactccttactgcctcagtttccccagcactacctttgttgaggaaacggagatggggatactggccgaacgcgcgcctgctgagacacagtgcaactgtatttagacgccccgcacctccccaaatctgatcgaggctccttttttcaagcacccgctatctctcagccctttaaaatccggccctgcctttcgagtctcttcgggcgttccattgggaaagattcgggggctccagctcccttctctagaatgaactgctctgactgccgcccggcttttacccgagctttaactgcgnaggcgaaaggngcagncaacccggtaaaacgggaaggagttgggttgttgacggncgttggggggttcaagggncgagaagcttgttaaccattgattt

SEQ ID NO: 378917 - DNA, 410 bp, Homo Sapiens
aaaaggaaagccttttatataggactaaaatgaaagcaattgccccagagaagacacaggtatactgtcctaaagagctcctcggtaaaaactcctatccctaaactggaatcctatatttaatttcctatccctggcaactgctcccaatattatatattccttactggctctggcaaagtagtttctgaggtgcctaggaaggcttgcctgagaacattactgcagagcggccctcacacaggaaggagcgagagggtgaggaggagagtggaggagacaggccacaagcccagagaatgaacattttcaagcactcaaacctgaagaggacccagaagtccatggatagtggctacagtggaacccgttattagattctgctctctaaataaacacggaagaaggca

SEQ ID NO: 378918 - DNA, 523 bp, Homo Sapiens
  misc_feature (38)..(38): n is a, c, g, or t
tgacagttcatggctgtgacataatataccaatattanatacttaggactatcaaacactgtaacatggaattataaatgaatctttgttgtgattttgcatagtttactagctaggtattcttcctgtttgcagtcttggcttcatcaggaatctttcccgctataatttggttgaaaaagttgaggagcaaatgaggggtccatggcaacaatggttcctaggaacaacaataatctttaatgttgcctttttgcccaaagtcccaatttcccctaactcaatggagagtctgacccaaaagctttggatagagggaagtggttacattttatattatgaaatatgatttagcagagaatggggataaaattacttaaattagttattatggatactcaatctggtttattgaagcttcaaggtgaatattttggctttgactgctttggtcattcaacagtcagtgattccgcatgaatgagagagagtgatcagatctttttgtttcctcccatcaaaa

SEQ ID NO: 378919 - DNA, 395 bp, Homo Sapiens
gggagccgttccacctggggattccataccccacattgtgttcaagaccccagatgatatcttgccccggttggggttcattttgcaaattccttccaaggacggttggcttgttatgcagcctgtgccctcaataaggagaggccagaaattggatttttaaccaccttgggtttcctagcattttatcagtgcagctatcagtatagatgtacataggaagaaatacagtagccaaaatcttcttggcaggtatcgattttagaaaatcaatattcttgcttttttaaattacagaatagcttaagggcctactcaccttcccagtggttccaaggagggatttttaagatttgaaatctcaaaggccagtgtctttctgcctttttaagtgt

SEQ ID NO: 378920 - DNA, 432 bp, Homo Sapiens
  misc_feature (403)..(403): n is a, c, g, or t
gaatctgaggagaatagtagagactctgaaagtgacttcagtgatgattttagtgatgattttgtagaaactcggcgaaggcggtcaaggagaaatcagaaaagacaaattaactacaaagaagactcagaaagtgacggttcccagaaagagttttgcgacgtggtaaagaaataaggcgagtacacaagcgaagactttccagctcagagagtgaagagagctatttgtccaagaactctgaagatgatgagctagctaaagaatcaaagcggtcagttcgaaagcggggccgaagcacagacgagtattcagaagcagatgaggaggaggaggaagaggaaggcaaaccatcccgcaaacggctacaccggattttagacggatgagggaggagagtttnttacatgctcattggagatgccaattcag

SEQ ID NO: 378921 - DNA, 395 bp, Homo Sapiens
  misc_feature (14)..(14): n is a, c, g, or t
  misc_feature (32)..(32): n is a, c, g, or t
ccataaaagtccanccaccccctcctcccctnatgtgtcctgaaccattccattaaacatggatgtccaggccataggagaagattcctagggaaggaataacggaaaggcatgtcatttgaccacatggattttgtaggcccatgggaagatcactataccaagaaacataatttggtatttgcagaaagggagaattgtgtaaggtatggcgagtacaggggaaagagtctacaatcttcttgggaaaatggcacatttcatgtagtgctattgttttaagttatatttgaaagtgcagaataaatttgcaggtgtgccgtgtaagggaaatacctatgcacagcatgtttggagatcagtgttgcttagagcaaagtaagtgggactgtgag

SEQ ID NO: 378922 - DNA, 443 bp, Homo Sapiens
  misc_feature (350)..(350): n is a, c, g, or t
  misc_feature (404)..(404): n is a, c, g, or t
  misc_feature (422)..(422): n is a, c, g, or t
gaccaggtgtatgctgggagctagagagaagctgagttcacctcacagttctgcaggtagtcagaatatctgctgatagtgggggctagccatgttggcagtctgatcctctctactctgaacatgctgttctggagaattcatggcttccaaccctggtatatcttgccagcaaatgctatatgaatggttattccacaactaagctataggtcacccagaaacccccaggacagctgtcaggaggccaagactcagtataaggaggctacagggcagactactgggtttgacatgtaatgtggctcttatgctgacactggtaccccatgtttcttgccagaggtggnagtaccattccctccagggaggttcttcacctagtgaccttcattgccatgttncatggggaattcccacanagcctttactgccagttgggg

SEQ ID NO: 378923 - DNA, 426 bp, Homo Sapiens
  misc_feature (22)..(22): n is a, c, g, or t
  misc_feature (212)..(222): n is a, c, g, or t
gtcataaagaagcacctaggcngggtaacctatttcccaagacttttctcccacactttgtatcctattgtacatgtggggaaaaggcatcctatccttacccaaaatttcctacccaagtactcacaggacccaatcacatcttaataatcaccctaacattttatgactaagtatttccagcaaaagtataaactaatgttactgaatcnnnnnnnnnnngtatttcagaaacttagcatagtattttaatctatatagcaccaattctccaaagagctcaaaggatgcaaagcagtaagcaaacaaattctgcagaggccacacttgacaggcaagatttggcaacaaaacatttagcttaccttctttttggagatggagatctggactttgatcggctgtcaaaacatgagaaattctatt

SEQ ID NO: 378924 - DNA, 496 bp, Homo Sapiens
  misc_feature (463)..(463): n is a, c, g, or t
tcactctgagggagatgggaagtgggaggaagaaggactaaccagctccctggagtaagaggaatttgctttccctgtctgcccaccaggggctatatgtgccacctttcaggttggggccaaggaagtgatgtcagtgtgacagaagggagagttagacctccagacgtcagcctccctcccatggggtacattttcaatctgagtgttgttgccttagctgtgttggtattagcttgattggttggtccgctggttatgaggtgtagggaggcagtttttgtttagtttttaggactttgcctcttcctttgtccttagcataatttctaggcagagcatccacgaagtcggttttccattgcccagcttcaagagcgacaatcatttacgagttcctatgttatgttaggtgccttatgtatattatcccaaatccactgcatgggttaaatacaggcangggatttaaatgaaaaggtcatacagtcactga

SEQ ID NO: 378925 - DNA, 469 bp, Homo Sapiens
  misc_feature (80)..(80): n is a, c, g, or t
  misc_feature (101)..(101): n is a, c, g, or t
  misc_feature (116)..(116): n is a, c, g, or t
  misc_feature (370)..(416): n is a, c, g, or t
cctcaaagcctccatcaaatgtccccagttccaaatactttcctggggtcctaactccatattccccggggttccctgancctgcaaaatgtgtggaagcnaaccctgatccttgnatccctggctttttagtcccccactcaccctcctcaacaatcccgggtacccaagagtcagttagtaaaggtcattgataaggtcattaaagttcacgtgaggctttgctgtcattctcctttcccatttaaatcattttagctggaggctaaatgtcatttagcctctctgggctccagcacctgccatcctgtttctcccaggaaagaaagagaggaaatgatccaaattgggatgccagaagaggaaattnnnnnnnnnnnnnnnnnnnnnnnnnnnnnnnnnnnnnnnnnnnnnnnagaaacacttctgagaagaccagtatttggtgctgcaaactaggcacatgttt

SEQ ID NO: 378926 - DNA, 359 bp, Homo Sapiens
  misc_feature (37)..(37): n is a, c, g, or t
  misc_feature (53)..(53): n is a, c, g, or t
cttaggattttcccccccggggtggaccggcccaagnactaaaaatttcaggnaaccgggtttaatttcttttgtatctttgaaaagttagttttatatcctaagatttccttcacataggttataaatcatctgtatgttcaagcttttatgtaaaaatatatagtgccttcagttttaacatagtttcacatgttctcagaactgctaaattcagtgctaccagtaaggcttaataagtagttcattgaccctgtaagataggagcactcagctctgtcacaatttgttgttaaacacatcactcaatgtaagtataaaaatatttattgataaaaaataaacttataattcagcaa

SEQ ID NO: 378927 - DNA, 324 bp, Homo Sapiens
  misc_feature (33)..(33): n is a, c, g, or t
  misc_feature (223)..(223): n is a, c, g, or t
  misc_feature (261)..(261): n is a, c, g, or t
ctgaagagttttagtaacttttttaagattacncaataaacaatgatgaatcaagctttgaagccaacctcaccaaccacaagatcaaccaacactcttcaccaatgtgtaatataaccacgttaatattcaacatagtacgtactgctgaaagaagttgatacttattcatattaaccccgtagttttgtgtttcctcatctgtaaaagtatgtattataanaccttctctccaccttacagcgtgtgaggttcaaatgnccattcattggaagatattttttatatcggtataatgcattataaaaataaatcatttttcct

SEQ ID NO: 378928 - DNA, 533 bp, Homo Sapiens
  misc_feature (204)..(204): n is a, c, g, or t
  misc_feature (468)..(468): n is a, c, g, or t
  misc_feature (484)..(484): n is a, c, g, or t
  misc_feature (491)..(491): n is a, c, g, or t
  misc_feature (510)..(510): n is a, c, g, or t
cagttcatgaacgactctggatgctgtggctccagtttgtacgtactttctaaacccttgaaaatggttttttccttagaaataaaatttatgtaaaaagttatttctgaaattctatttttcctctatgtatatatttacaggcaaaataaagtcaagtcacttctcacggagtcctgagctgcaccgtgctctccgcaggcntctttgtctgagggccaccccccactccacaccaggggtgcctaggactagggggaggcctgctctttgggtcctgtgacttgttgcccatactggtgcttcctccatggaggggtctgcaaagtcacgtgcaatgggaaagttgccctgcaggatgctattagccaccagtctccacctctttcatgggaaagaggacttggggcttatgcattggtcaattggatcttttgtgatttaggtcacattcctgtgtttattcantgagtggggcgtggcncgaggcntgatggctttacgttttanttcaatttccctttccccctggt

SEQ ID NO: 378929 - DNA, 563 bp, Homo Sapiens
  misc_feature (17)..(17): n is a, c, g, or t
  misc_feature (78)..(78): n is a, c, g, or t
aggctgttccctgtganagtgagccggtccccaggagacctgaaggttttaataaagcgtccgggcatttcccactgncgggcagtcattttccatccggccgccctgtgaaaaaaggtgcctgccttccccctttttctgcccatgattgtataagtgtcctgaggcctcacccagcaatgcggaactgagtcccattaaacctctttcctttataataattacccagtttggggtatttccttcgtagcagtgtgagaacagaccataaacctcccattttctcatctgttaaatggagataacagtcctggcttaacagggctttttgagttaagtgatatattccacgtaacctgcttagcataagaactggcactagaaacagaacattttagattatggaatagaacttaggggaaaatagcaaagtctctgatcatcttgaactactcaattgggacttatccctgaattaaacctttctagtagtgaagcacaagaaaataaacttggaaaaaaaaaacctaaggccagtcatgcactgccctacttccctttct

SEQ ID NO: 378930 - DNA, 691 bp, Homo Sapiens
  misc_feature (36)..(36): n is a, c, g, or t
ccctggtgtaataattaaaagagggtaaaggcctcncctaaaaatgccccctagtcccctcagaggtaggaaaaataaactcaaccctgccttggacctgtgtatttaccttgggttggtttcccagaatcctcccttaatccctgaaacagtatgatcatgtagttaaactactccctttatatcctgtaagtactgtgcagcccaacatgttcttttttgtccccaacttctgccatctttccaacctctgaggcatgctattttatagtggtttgctctttgaaaaattgtttttgtgccctctcttaatagtcacagatactgacacaaaacttaaaaatgaccagaaaacaatgtataaattatttaaaataaaacattctttttatatcacattatcaaatttgtactctttattcacttttccattaagtgtgatatcaatatagctaggctgttttgagcttgcacagtctgtctaccaagctccttcctaagtactttgagggtaaaatgaagaaggcagtctaggaaggaacacaattacagagccctgtaggaaggcagactgcttacaggagctgtataagggaaaattaagcccaacattatgtgctgtgttggccatcatgcaaagctggattgcaaagccctgggttacctccttccattcatcttccctgggagg

SEQ ID NO: 378931 - DNA, 470 bp, Homo Sapiens
  misc_feature (39)..(39): n is a, c, g, or t
  misc_feature (134)..(134): n is a, c, g, or t
cttttgggtgaaagtaattaacagttggcaaattccaantagggcagagaacacaaatgccataacaaacagccaataaaacccagtcccatggccagttgccataagcccactttggggaagagaattcccgnagcactgatgccttagagttgtcattgttaggacagttgttactcccaaacacagttcttgcaggcacagattctctgttaagccagaatgaaacttgggagagaatgacagtcatgatgcaaggcagataggtttgaatcacaaaatacccaatttttcttttcaggtggaaatgagctgtcattacagtatattcacctgtactggatttaattgtctcctttccgattgattggcccagcaggtcatattgatttaacctagagccatcaggagcaacctgtactgaatcagatgcattgtaagtccaaatataagtgacctctgaagttgta

SEQ ID NO: 378932 - DNA, 446 bp, Homo Sapiens
  misc_feature (21)..(21): n is a, c, g, or t
ggaaaatgtggagttaaaaanaatcaacccctttttttgttggggttcaagtaccacccctgaagtaccctgtccccaggccctatcaagccctcccccacccatactttggcctccctccctggcctctgtggggcggctctcacattacctcccagaaaggctgcaggctctcacccagggacacctatagtgacaggagtggaagcagctcccctgactctgaaatcaccgaactgaagtttccatcaataaatcatgactgatcttgtagcggatgattcttcaagagacccttcaaacttgggtagagtttacagctctgactttacactcggctttggagactttctttaaattatgtttttattaagattattttattatgcggaaaggtatttgggaaacttgtcacttgcatgtcccatcacgtgtactggctcctc

SEQ ID NO: 378933 - DNA, 642 bp, Homo Sapiens
  misc_feature (458)..(458): n is a, c, g, or t
  misc_feature (579)..(579): n is a, c, g, or t
gagcggccgcccgggcaggtacgcgggagtgatcgaagggttagttttaggtgcagcatcatctctacctaaatgaatgaagaaatggaaggatatttgtagatatggggaaaggaatgaagagaatttttttctgttaaatgaacagcaaatccttcatcaccatcaccatcatcattttcaggaactcacaatattaatatttagagataattttgtgtcagtttttattccatgtttttaataatccacagtattttagataagcaaacccaaggcacagcaaagaagaaccatactcaaagttttacacactctagaaaatggtggatgtgagattcatacccaattcacagtccagtcgtgagccttctgctgagagaggagtggagcaacattgggaaggagggacttaaaatgtatagggtagtcactgtggggacattgaggggacttgnccagaaacaggatgaaagagttggtttaatggtactgagggtcttattaacattacttacttgtagggccaccagttcacaaaaccatgtgctataaatgaagtaacctgccatggttcanggagaaaaaaagagagagggttacattaatgaaaagttacagtgtgttcactagcaaaaaaaa

SEQ ID NO: 378934 - DNA, 561 bp, Homo Sapiens
  misc_feature (44)..(44): n is a, c, g, or t
  misc_feature (147)..(147): n is a, c, g, or t
  misc_feature (157)..(157): n is a, c, g, or t
  misc_feature (461)..(470): n is a, c, g, or t
ctcgatcagactgtgacatgcgacgaagagtggatttaatatgnacaacgagtgatgaccagctcagtggttggactgaagaaagaagctcccaaagcacttccccaaaagcccaaaattgccaccaaaaaaaagatcacggtggtnctctgcctgnccggtctggatcccactacagctttcctgaaatccctggcgaaccccatgacaactgaagaagtatgcctcaggaaatcgatgacatcccactgaaacctgcaacacctgcagccagcactggtcgacagaaagggcccaattcttctccatgaccacgcctgaccacatgctgcacaacctaaggcttcaaaagttgaacaaattgggctgcagagttttgcctcatctgccatattcacctgacctcttgcctctcacttagaaggaaagactatatttttacaccgattcacaaacaggannnnnnnnnnaaaaaatggattttaaacacatcagaactagactaagttttagcaaccagtattttcatcagaaatggccacttgcaactgctggttcttg

SEQ ID NO: 378935 - DNA, 543 bp, Homo Sapiens
  misc_feature (45)..(45): n is a, c, g, or t
  misc_feature (441)..(441): n is a, c, g, or t
  misc_feature (482)..(482): n is a, c, g, or t
  misc_feature (513)..(513): n is a, c, g, or t
  misc_feature (531)..(531): n is a, c, g, or t
gctttggaacagagtaccccaggagaccatcctgttggcctgtcngcgcccggtgactgcgttccgtgtgccgttgctctcctcctgtcctgggtgcccacccgtgagcaggagtggcaaggcgggtgccccgagcacttgagttgccttgtctgcggtcggccgtgcctggaggggcgtctgtgtcctgctcagctgggtggctccacgcttggtgttgggggctcctaagctcttgctgcgccacactctgggcagtctctgcatgccagcttttctagtcgcctctctcttcctgtctcatttatctctgtccttgttttgtgtttcttttcacacttggtctctgcccagccgtcttgtccacgcagcttcgtctgtattaactcctccagccgcagcccactcactccccgccgtcggtgcatggccggcgtccangtggttgcttccctcctcgggcgggccaaggcggcttcggnggcttccttccagcaaggggtttgcggtttntgtcgggtctgtggccgntggggagaactt

SEQ ID NO: 378936 - DNA, 500 bp, Homo Sapiens
caggttttccacatgaaaaggaagccaaataagtcctgttaggagattaggtgagaggaattagcaatgtagggactctgaaacccttccccttcccaaaacagagttcatatgcacttccaccaaagtaatgccaatgaaagtgctcgtgttaaggctgcagcaagcttgtttttcagtagtttaatgtcaagtgcctgatacagtcgactgcaagtctaaacaagcatgtttagtttttctcaatcctggctttaattcacggagggggagatgtagagaagtggttgtgaaaacatgtacaggctttatgcagagcactgcgcatggctgttctgctgcaactgtgctccacgaaacagaaggaaaaggtaaggtgttgtgttcacaaagaggccccagtctctttcttctttacatccatgcctctttactaggatgatacatttacaggttggggcagttttgttctccaaaaccggggttaaggagactattcc

SEQ ID NO: 378937 - DNA, 411 bp, Homo Sapiens
ctgtgtgcaagccacggaggcaagtggagtcctaaggaatacaacagcaacaactcaccaagcagagaatacaatggttcttcatcactatataaaactaacacttttccttcaaaggtctatgtataattttcttcaatgattagctttttaatgagacaactcctttcatccagacattcagatgctttatataagttggcaattttcctgttaaccaaactgaattttattaaatgtttattaaaatgcacccagaaaacttgtctcctcctgatgcctgaggggtttgcatgcctgatcccaagctgcattttttcagaatgcgtgcatgatgccccagttctgtactcatgatcaccaggtggcgttctgaaatccactactggggaaagatttttaacagatatt

SEQ ID NO: 378938 - DNA, 520 bp, Homo Sapiens
  misc_feature (53)..(53): n is a, c, g, or t
  misc_feature (72)..(72): n is a, c, g, or t
  misc_feature (223)..(223): n is a, c, g, or t
ttccccccgacatctccaactcctaaaccttccctgagggaacaggaaatccnggtaatccttccaaaggcnctctggccatgaagttaaagagttaaagtaaaatatcctggatgaatgaataaataactccctgcaaatccctgagataaaaaggaaacttttaactcaattccttaaccacaggcaacccaaagactatagctttccccctggtgtgggnattggccaaaagtgtgccctgaaattcccctgccccacacccacaaaaaagcatcactgtgagatgatacggcagtttttcaagttttcagacatctaatggaaggacaacatggtacagcctgaaaactttaaagactaaacttaaaatctgtcttttaaaagtggcctacctggatgggacaccagctctcaattttaaataatgtttgactggttcaattaaatcattgttttcaagtggttttacatattttgagtaattttatttttacacccagtggcttgaaaatgcaat

SEQ ID NO: 378939 - DNA, 545 bp, Homo Sapiens
agcatattatggaggggaaatacatccagattatgaaatcattgtgaccttaatgctgtggcccagattttcacccatcgcagtaattactcacaacatgtatattaccgacataaagactattatgatgatttgtttagaagccagaaagtagcaaatgagagactactaaggagtgaaaaggtatgtcaaacagctgatactcaggggcatgaacatcagaccacccaggagatcatttaatgctaagtctaaaaaatgtggcttaatcaaagaaaagaaagccccaataagttttaaaaccagagctgaggccctccatatgtgtgtggagcactctgagcacacacagtacccctgcatggttcaaggatgcttatctgtggtgaagttggagagcagcattgtgaggcattacaaacgcactcatcagatgagtagtgcctatttagagcaacagatggagaatcttgttgtttgcgttaagtacggtaccaaaattaaggaggaacccccttctgaagcagatccctgtataaagaaaa

SEQ ID NO: 378940 - DNA, 569 bp, Homo Sapiens
  misc_feature (31)..(31): n is a, c, g, or t
  misc_feature (39)..(39): n is a, c, g, or t
  misc_feature (48)..(48): n is a, c, g, or t
  misc_feature (69)..(69): n is a, c, g, or t
  misc_feature (83)..(83): n is a, c, g, or t
  misc_feature (104)..(104): n is a, c, g, or t
  misc_feature (124)..(124): n is a, c, g, or t
  misc_feature (474)..(474): n is a, c, g, or t
  misc_feature (480)..(480): n is a, c, g, or t
tatgggctgcccaatgggtgaggaaaaggtncagatggntttacctcnctgtttcttccacaagatgancccaaacctgtttnccagaactacattccacccantttaggatgaacagtgtggnttcctccagagttaactactgggatcacctcccaagttcctgcagaacaatcacctttcaaccctatcctactgaacatgggccttcatgatcacacttttcattatcctaatagtttgtgagttgctctgtcactgccaatttgatgtttatttttataatgaatcctaaggtgtgtttttcttgtaaatgacctttggcaaatatgacactgaaatggggaataccgatgttggaacatggttaactgaaggactttttcttttgaataattatgctttttaagataatgcattaacagagcctctctggtcacaaattcatatttgcatccttgaagctcacagaanaatacnttagccgccaactgtgcaacggtactgacttggcatgttttcatcttgattctgaaaattaaggtctgagatagataaactgactaaga

SEQ ID NO: 378941 - DNA, 443 bp, Homo Sapiens
  misc_feature (27)..(27): n is a, c, g, or t
  misc_feature (61)..(61): n is a, c, g, or t
  misc_feature (63)..(107): n is a, c, g, or t
  misc_feature (179)..(179): n is a, c, g, or t
caaaccgtagccccagggtatttgaangagaaccccccaaaaaaccccaggccgccgccgncnnnnnnnnnnnnnnnnnnnnnnnnnnnnnnnnnnnnnnnnnnnnnggtaaactgatatttaaaaaaggaaaggagaaaaatcacgactactgtttacagactgaaaaattattgccnttttatactactgagatcctaagttaagactctccaaagcaaacatttggtttaaatcatttatctgatgtagataaaaggtagagaaacttgtagtgttctccacataatggaaaatgtacaaatgcctagttgtgttgcccatcaattttgtatattttcataattttaattgttgaaaattgcattatattttgcaatcactatgttcaatctggatttgtctttcattttaacttttaatataaaaaggggtttcaatgt

SEQ ID NO: 378942 - DNA, 452 bp, Homo Sapiens
  misc_feature (26)..(26): n is a, c, g, or t
  misc_feature (39)..(39): n is a, c, g, or t
  misc_feature (358)..(407): n is a, c, g, or t
tccctgttaaataaccccataaacgntccaattgaaagncaacactttgttccctgtaagaaaaaaaatgcccaccccacagaatcagtgaagcttacaaattgcccaccccaccccatcatgccccacatgtccttctgcctttacaaagactaggctagtcagactgtgctccagtgagctctgggcagtgtctcagaggtcatgtgaattgatcttgataatggggtgtttggtgctgtgtttggggacaggggtaagtctataggaaatggggcaaagagtgaccagagggaataagcaggctctaggcttcaaagcaccaaactcttccacacagaagctccatcaccacttnnnnnnnnnnnnnnnnnnnnnnnnnnnnnnnnnnnnnnnnnnnnnnnnnntcacaggacttggccaagttatcctgaatcaagacataacaaaaa

SEQ ID NO: 378943 - DNA, 427 bp, Homo Sapiens
  misc_feature (16)..(16): n is a, c, g, or t
  misc_feature (29)..(29): n is a, c, g, or t
  misc_feature (61)..(61): n is a, c, g, or t
atgaaattccaaattnaaatggaccaaangaaaaataccctacctccttaccttacctaantccccaacctattagcaccttttattgtgatattccagtgctaatgaaggcatggtgaaactgatgatctcatgcatgcttttgtggcattgtaaattagtaacaatctttctggaaaggttttggcaagaggttttagttgtcataaaaatgtttatacctccaagcccactaatcccatttttgggaatctctcctgaagaggtaagttagaataagcaaagcttcattgcaactttatttgtagtaatgaataataggaagaaatcaacatattcaacaatatgaaaatgaagtaaatgaaatttcaactgaatttctttttagttgtgatttaaaacgagcaaaaaatatgagcatggaaaa

SEQ ID NO: 378944 - DNA, 217 bp, Homo Sapiens
  misc_feature (76)..(76): n is a, c, g, or t
ccataatgtttgggtgaacatccatcccatgttggagaactgcctgtgatttccattttccactgcagtataatantcctttcatatgaatgtactccttatatttatcccattcctactgttgaacagagatctgtactatttcctagacaatgactttaacataatgttgtacacattcttttacatatctcttggtactcgtgatgcacaaatg

SEQ ID NO: 378945 - DNA, 745 bp, Homo Sapiens
  misc_feature (122)..(137): n is a, c, g, or t
  misc_feature (675)..(675): n is a, c, g, or t
  misc_feature (710)..(710): n is a, c, g, or t
  misc_feature (713)..(713): n is a, c, g, or t
aagggtaagcaagctttatcccacgtaaatggcaatgcagatattataataagcaaattaatataataagcagattgatataataagcaaattgcaatgggaagaggagaaggaaaaagacnnnnnnnnnnnnnnnnttacactcaccagactatggaggattcacctccagactgggaagcaacgacctgggctccagagccggccactcgtcagtgcacagacgaggagaggtctcatgaagctttttggcgtggtctgggaccctagatctttttgtaacatgttgtctagcatgaggcccagtcacgagggccctttgcgactgggctcaaggaacacaaaaaggtcaacttgtttttgccgattgttgtttttcaataactgacgtataggagtagactgaaatagagatttctccgaaacagcgctggatgaaccgcctcaaggggcttcccacaacctgtttaggggacttggtgaccattggttggtgtccatgtcagttggaaatttaaatatttagttcttcctcctcagtgttcaagtcaacttttatgggcatcttattttacacaaatgttaacacagacaacagccacgactctggtccacggaaacgttctatcgccgcccagcctttacgcaaacgtacacagctcgaaaagctaagtngacgtccccgcacgccacgcccgctaaccccgccnctncactggctcccacttcagacgctgtgccgaac

SEQ ID NO: 378946 - DNA, 388 bp, Homo Sapiens
  misc_feature (319)..(342): n is a, c, g, or t
ctagaaaagtaatacacctaaaaaaatgtctgattctaaatactggttttaacctcactactatgctgccattctatacttattttgaaactttaaaaagaaattgtaatgacaagagtattcagttatttaagaaactattgttttctttaattggtctgtgattacatgcatggaagtttcaaaacatctgaaaagcttcagtgtggacaaagcacaactgatgcttttgacattttgtccattttgttagaattcagcagccagctaaacataataggaaatccaatagagcttgagctgtagctggcaaaagccnnnnnnnnnnnnnnnnnnnnnnnnaatcatcttgtggaaattctactggcagggccatcgggggttgccg

SEQ ID NO: 378947 - DNA, 296 bp, Homo Sapiens
gatttcagactgcagaggggaaagacttccatctagtcacaaagactccttcgtccccagttgccgtctaggattgggcctcccataattgctttgccaaaataccagagccttcaagtgccaaacagagtatgtccgatggtatctgggtaaggaaggaaagcaaaagcaagggaccttcatgcccttctgattcccctccaccaaaccccacttccccttcataagtttgtttaaacactttatcttctgggattaggaatgccggttaaattccatatgctccaggatctttg

SEQ ID NO: 378948 - DNA, 408 bp, Homo Sapiens
  misc_feature (55)..(55): n is a, c, g, or t
atttggtggcccccaagaagcccttaggactgggttcacccctgggcttcccctntctgtcttcaagtgactccccactgcaaaggggccttctcctatggcttaagcaactggagccctgtcactgaataattggggtggacaaggctgtggggtatcatttcagatttcgtcgaaggtggctttgcatcatattccttaacaggcttttctaaaaggatagaacaattttatctctaaccaggacatttctttcctgcttccaggcctagcaggatcaggagatgaacttagtatccccactgtcgacaccaatgtctaagcaaagaggtgttctttccctgcgcctccccccaacgcagcccgtccaggaaagagagagttgaggaaaaattggctgagcgcggt

SEQ ID NO: 378949 - DNA, 542 bp, Homo Sapiens
  misc_feature (349)..(357): n is a, c, g, or t
  misc_feature (423)..(423): n is a, c, g, or t
  misc_feature (434)..(434): n is a, c, g, or t
  misc_feature (449)..(449): n is a, c, g, or t
  misc_feature (457)..(457): n is a, c, g, or t
  misc_feature (473)..(473): n is a, c, g, or t
  misc_feature (478)..(478): n is a, c, g, or t
  misc_feature (529)..(529): n is a, c, g, or t
gaaaatggaggtgatctcagatgtcaaaacacttccctgtgaatattactattttggacactggccattttaaaaatttcaatattcatttttttcctcaactgctatttcgtattcctgtggtatttattcaccaaacatgatgttaagattatgaaaacgatgaggagtcaagggcttaattttgctctgacacggaatctattcctatttcatatacaggttggctgttattttctagcagatgctttcaggttgatgcatataaaattcacacactgtgtaggaattaagtagagggggaaaggggaataggaaaaaaggatgaagggagaagtgagatgcttannnnnnnnngacaccaaaattgaatctttcagtgtaagggtttccaaagtactgacaaccattctcccctttgcnggggtgagctncctttgtgggttttnttcccccngggatattgagggtcntttcngaggtggggccccaggaggcttattccccaaccaaccaaggggaggttggnaatgccggttcct

SEQ ID NO: 378950 - DNA, 526 bp, Homo Sapiens
cgtaagaacaggggaaaccccaaggagtttgccctgtttttatggggcagtagggaagaaagatggtttaaatagtgcccaataacacaactacctgccctactggtcagtaatctgtcataagctctatgccctacatatcccagtataatccagtgggggctgttcccaagcccggtgggactcccaggtgggtcccagtttgcaactttgagaatttactaaattttctctctgtgtgatttgaactcccaccaagtgattgtttttgtggtaccattatacagttttctgctccgacaactaagtcatcctacgcggtgagtgaattcttttccttctctagctatgcaatattgtttaataattgaggcttttaggatcagaaattatcagggtgattcttttgagccaggaattcatcaggtactgtaggtactaattctcaggcttcccatggccattgatctcttattacagcttctccacatacataacatgaagtgacattgagagactgggctac

SEQ ID NO: 378951 - DNA, 497 bp, Homo Sapiens
  misc_feature (13)..(13): n is a, c, g, or t
  misc_feature (32)..(32): n is a, c, g, or t
  misc_feature (52)..(52): n is a, c, g, or t
  misc_feature (60)..(60): n is a, c, g, or t
  misc_feature (66)..(66): n is a, c, g, or t
  misc_feature (99)..(174): n is a, c, g, or t
aatacatgtaaangcctggtaaatagttgttnaacgtttattgccttggggnaataatgnacaagnaaacaatactcctacatgttccagtacaaatgnnnnnnnnnnnnnnnnnnnnnnnnnnnnnnnnnnnnnnnnnnnnnnnnnnnnnnnnnnnnnnnnnnnnnnnnnnnnctttaatagcatacattaattcctcttctgcaatgaccccagataccaacaatgcccagggacatcataaagaatacaatcatggtctctgcctctgaggaactgaaggtctaatggaaagtcagatcctaagtaagtggaaaactagaatgcaaatacaactggaataattaaggaaatgaatgtatcatgcaagtatatggtccatgtgacacatgttaatatgtcaaataggaaataattatgtgcaaactagtgacaactatataaaaattgtatataacagaaaacaattacacgaaatcccagaaaccaaattctcc

SEQ ID NO: 378952 - DNA, 490 bp, Homo Sapiens
  misc_feature (20)..(20): n is a, c, g, or t
  misc_feature (32)..(32): n is a, c, g, or t
  misc_feature (40)..(40): n is a, c, g, or t
  misc_feature (54)..(54): n is a, c, g, or t
ggcccgaagaatggatcacnggctcctcctancacccccnacccctaatccaanggagtggtaaacgggatatccaccactgcccaacccattctgctaagagcccattaatagaataactgcaggcaaaactctctgtctggacccctacaggaagctttggggtaggggtgagcggcttgagtcccattccctatgcaggtatatgaagaaattcatccccaaaaattgaaaccagtatgaaatattcctgaatatcccatcatgttgattttgtgtagggaagaaagagaagcaaactgatcctttcacagagcctgggtatccaaaatttctgtcccatcatttctttgaatcatgtctagaaattatattagattaatagataaatttgaagagaataacttcacaatgttgattcttctcattccaaagtgtggtacgaatcttcatttaaataactcttttttgtggtcttggagaaaaactt

SEQ ID NO: 378953 - DNA, 442 bp, Homo Sapiens
  misc_feature (16)..(16): n is a, c, g, or t
  misc_feature (47)..(47): n is a, c, g, or t
  misc_feature (261)..(261): n is a, c, g, or t
  misc_feature (388)..(388): n is a, c, g, or t
ctgatcctcgtgcagngcttctggttcactggggccaggccccagtnggtttgcctgggtgccagcaggggctgggcagagagatccacaggcccaggctgatctcttccctgctcagaggtctttccagtccagatcgtccaagctgcgtccagtggctcctggaggagtcagtgggtactgtggcctggcgcctgggtagctggccgtttggtgccaagtgaccttgtccttgctgtgggcgtggctgccccagcactntttccaacacggttgggagccgagcctgtggaaagaggcccatgccccttggttgcctgagggtccgtgctctaccgcttttgcccaaatgggtgcagtcagatgaaggagacagaaggccagggcnattgtcaggttggaccagtcctttcttaaggtcagcaatttaccatgaaatggg

SEQ ID NO: 378954 - DNA, 456 bp, Homo Sapiens
  misc_feature (25)..(25): n is a, c, g, or t
  misc_feature (56)..(56): n is a, c, g, or t
  misc_feature (74)..(74): n is a, c, g, or t
aatctggagttagcctgcctaaggngggtgagagaggtgagtcattgccagctganggacatcctaagatgaanccaggcccccagtgccacaatgtatgagggacacccagtcaagatgaatcaagcctgtccgtattagcagaattaccccaggcaatcccatagacttacaggaagtatagaagtagctgttgcttaaagccactgttttgggatggttttttaaggcagcagtcacggatacaaatctatgccatgattctcagtatcaattgtatcatgagctcctctttgttttgtacttttggaggagaaaaataaaagagggatcagactcagtaatccaatacaagaacatccattctgaaagcaagtctctgggctactaagctggccaaagcaaatgaccttggttcaagtcccacaggaataagtgagtacttaaaatagccag

SEQ ID NO: 378955 - DNA, 524 bp, Homo Sapiens
  misc_feature (17)..(17): n is a, c, g, or t
  misc_feature (50)..(50): n is a, c, g, or t
  misc_feature (61)..(61): n is a, c, g, or t
  misc_feature (84)..(84): n is a, c, g, or t
ccccaaatgaacccccncccctaaaagtgaccccaatccacaaacgggangaaacatcacnccccagattaggttattatgtanggaaaaggtggagggattttgcctgaatgtaaattaaggatcctccaaatccagttgatttttgaagtaacccaaaaatggcaattattttgggtgggccctgactgaatcagaagaacatcccataaggaggagttgggcccttcctgaagaggaacattctcttgctggtcttgaagtaagtggcccacgttgtgagaggatctgccaaaggatgaggaactgcaggtggcctcaaggggctgagagcctgccccaggctggtgatcagcaagaaagtgggaacctcggtcctaaaaccacagcaactaaattctgccaacaacttgaaggagcttgaaagaggaccctgagcaaacggaatcgagaaagaaacatcgaaactgggaaagatgatggtttgactgatcacagcaacagttttcagtgaaagaaacaaa

SEQ ID NO: 378956 - DNA, 408 bp, Homo Sapiens
  misc_feature (46)..(46): n is a, c, g, or t
tgtgttgagatgtcctgcattccctatgttccactgccagccattnatttaatagtaagcccaagataatagaatcatcctagatgtcctaacaacaggtgaaatggataaaatgtgctgatatagatgcacaatggaatactattgagcctttaaaaagacaaagacatttctgtcatttggaggaatctggaggactttatgctgagcgaaataagccaggcgcagaaagacaaatgccacctgtgctcacttatatgtggaatctaaaacattgagctcacagaagcagagagtaccatggtggttcccaggcctggtcttaggatggatgggaagagtctggccaaagggtacagaagtttggttgtgagatgaatcaccacctcggtgaaaaacaggatggtg

SEQ ID NO: 378957 - DNA, 452 bp, Homo Sapiens
  misc_feature (425)..(425): n is a, c, g, or t
  misc_feature (438)..(438): n is a, c, g, or t
caacacgccacaatttgagaacatttccatttataactactttgtttggacacactattactcagtcaaaaagactttccttggggtaggacaggaaagctttggtgaagtggatttctctcatgagggaccagcttttctcacatggcacaggtaccacctcctgcgtctggagaaagacatgcaggaaatgttgcaagagccttctttctcccttccttactggaattttgcaacggggaaaaatgtctgtgatatctgcacggatgacttgatgggatccagaagcaactttgattccactctaataagcccaaactctgtcttttctcaatgggcgagtgggtctgtgactccttgggaaggattatggataccctgggggaacactttgttaaccaggcacccgaggggtggggggccanttaggggaggaantcccagcttgggaa

SEQ ID NO: 378958 - DNA, 494 bp, Homo Sapiens
atgatgctgaatttcccattaaatcggatcattttaaataactgaggaaggatggttcacaaaccttacactgtgactgaagtccttcctagtctgggtgacctgatttatgttaatgggaatggaggtatatggaagcaggacacccaggaagtttatgacaacttgtcagctctcgaaatcggctttactctctgagcagtatccactttgtatgacattaggcccccaatgcatgaagcaaaatgtgttattaagtcagatctcctcggatcacaaagaaaatagtatggcaacagtgatggaagcagagaaaaagcaataatcgagtgagaaaataattgggtgccagaggcaaaatctatgacagatccaaatggccttcattatttctcagttggaaaattccaataacttcctaaattgccttcccatcttaagtgcttcactattcaaatttatattataagccacttccaggtgacagactaaaa

SEQ ID NO: 378959 - DNA, 686 bp, Homo Sapiens
  misc_feature (526)..(526): n is a, c, g, or t
  misc_feature (553)..(553): n is a, c, g, or t
  misc_feature (580)..(580): n is a, c, g, or t
  misc_feature (592)..(592): n is a, c, g, or t
  misc_feature (604)..(604): n is a, c, g, or t
  misc_feature (609)..(609): n is a, c, g, or t
  misc_feature (630)..(630): n is a, c, g, or t
  misc_feature (640)..(640): n is a, c, g, or t
  misc_feature (676)..(676): n is a, c, g, or t
agatgtcatagacttaaaaaaaggagtggctcattttgaaaggattggaggagaatctgttggggatttgatgataaggaatattcagttacatcattcaggaatatctctgcacagtacaaacaaccctagaaagtttatctgcagtagccgatatcattgttagaggtccaccaggtcctcctgaggatgtgcaagtggaagacatttccagtactacttctcaactaagttggagagcaggcccagataataacagtcccattcaaatatttactattcagactcggacaccattttctgtgggttggcaggctgttgctacagttccagaaattctcaatggtaagacatacaatgcaacagtggttggtttgagtccttgggtgggaatatggaatttcgtgttgttgccggcaacagcattggggattgggaggaaccaagtgaaccatcaggaattgttaaggaacttaaaggcattcagtccctgttgtgggcaccagttaaacatccatgggaggtnggagggaagtcggtctggaacttcgtncatttacatgggggagttcaatttccnggaaggaacttncaggaatggggngaggngttttgggatatattcctccntgtttcccgncccattgggcttccgacaacccgggttcccaagggnggaaattgtc

SEQ ID NO: 378960 - DNA, 369 bp, Homo Sapiens
ttaagttccctcaactaaatgccatatttggccccatttgaaagcaatctctgttcaaactttcccagggggcattttgtcccacggatgggactggagacagaatggtgaggatgccccatgcccactctgtgcctgacactgatcatgtggacattgttccctggatgcaacacaccactgcgcaggtggcattgccctgcaggatgaccaggcaggtaaatgcacgtaagaggaagcaactgtaaagcagaaacaggattgctatggaaaatcggcgccttcccagggctcactttctgggatatattgtaacagctcctctgacatccacttacaatagcaactatttattaagcacttctattt

SEQ ID NO: 378961 - DNA, 1139 bp, Homo Sapiens
  misc_feature (275)..(275): n is a, c, g, or t
  misc_feature (467)..(467): n is a, c, g, or t
  misc_feature (775)..(775): n is a, c, g, or t
gcaaggatgtggaccctgacaaatcagattcctgtgcttgggtatttaataaaaatactaattgactgaattagaagtgtaaagagaagttgcaaagatactgtagtggtttgaatggtggccccccaaaagacatccacccagtacctgtgaatgtgacctaatttgaaaaatgtctttgtactggtaattaagtgaaagatttaaagatgagatcatcctgaattaagtgggtggtcataaatccaatgagcgtgtctttatgcaatagacanaaaggtagaggacacacaggagaggttcatgtgaatgaaggcacagacagacagtgcacatatgtagccacaaaccaacggaggcctggagcaaccagaggctggaagaaggaaggaaggatcctcccctggagacttcagagggagtgtggtcctgccgacaccttgatttttgaacttctggctttcagnactgtcagagaatatgtttctgtttctttcaggccccacactttgttacggagccttaggaaactaatataaatacctagaaagaagaaatatataggagtaaaagtcatgaacggcagcttgcaaccactgatgttacattgaacaaggaactgaataaacaaaaagctttgcagtagggaaataacacagtctggaggaaaatactgagccagtcagtggtaaaagacacatagaattggatcatagagagcagccacgtcacttctctggttaagttctggtgtaaaggatacacagattcccgnccctggataatcccgccgccttggaagaagcttttatttcccgcctatcccattaagaagtcaggcatgtttggggtttatatttgtttaatccttacaggaaacttcccatcatttccctaaggctgaaacattttgtaaagaattgtaaatagaaaattgcaatataaaacagaaagtagtaaacaagtccagcatgccaatgaactaatggactccaaacaggaacacttggtctggctagaaatttcatgaaaagcttcctggatgaattcattaaattatccctggcatatcttgaaagtggagtgggtacttttcaactgactaataagagatgaaaggacaagaaagaaaaattttc

SEQ ID NO: 378962 - DNA, 1163 bp, Homo Sapiens
  misc_feature (643)..(805): n is a, c, g, or t
  misc_feature (918)..(1079): n is a, c, g, or t
ggtaagaagatagatactcctcatagaacttatcacaatgaaaactgatcatttgtgtgattatatatgtattcctcctctttaagtctaaaaactctattgggatatggaacctatctcaatatgcatcatcttaaccaaggcatctaactgtactgcctgtcatgtagtaggtactaacaaatgtttattgaatccatgaatgaatgaatctttaatgtttcagtttaaaaatacatattaaacgtataacatatacaaagcacaatttgaaggcactgggattacaaaatataataagataatccctacttgtgtgggaagttcccggaattctgatgggactaggatgggacacttccagttatgtcaggctgctgaagccatagcctgccctgccaacaggcaccatggaaagagctgagcctcagcagccatgttaggtatcatgtgactctgtgccttgaccacatttgaatggactgaggtgaaagagtatgaaagcaggaactggcggcatcctatcatctgagctttagcaagaagatgtggaccctgacaaatcagattcctgtgcttgggtatttaaataaaaatactaaatgactgaattagaagtgtaaagagaagttgcaaagatacnnnnnnnnnnnnnnnnnnnnnnnnnnnnnnnnnnnnnnnnnnnnnnnnnnnnnnnnnnnnnnnnnnnnnnnnnnnnnnnnnnnnnnnnnnnnnnnnnnnnnnnnnnnnnnnnnnnnnnnnnnnnnnnnnnnnnnnnnnnnnnnnnnnnnnnnnnnnnnnnnnngcaatagacagaaaggtagaggacacacaggagaggttcatgtgaatgaaggcacagacagacagtgcacatatgtagccacaaaccaacggaggcctggagcaaccagaggnnnnnnnnnnnnnnnnnnnnnnnnnnnnnnnnnnnnnnnnnnnnnnnnnnnnnnnnnnnnnnnnnnnnnnnnnnnnnnnnnnnnnnnnnnnnnnnnnnnnnnnnnnnnnnnnnnnnnnnnnnnnnnnnnnnnnnnnnnnnnnnnnnnnnnnnnnnnnnnnnnaatacctagaaagaagaaatatataggagtaaaagtcatgaacggcagcttgccaccactgatgttacattggaacaaggactg

SEQ ID NO: 378963 - DNA, 465 bp, Homo Sapiens
  misc_feature (404)..(404): n is a, c, g, or t
cagacataccatggcagttccatgtattcacacatgacaggcctcaggaggcacagctccagccataagtgtagggatctcctgacagtgcattttcagtttcctttcaactagacaggtttttagtagtggtgattgtgtgggacaaaaggcaaggcagaaaaggtaactgaagacagctctggggtgttaagtgggtgtcccggtcatcattcttctacaaagcagggtgcatatggcttaatctcttccagcgcaggcaaccctagatcctagccactgaagaactgttctgctcccatgggaaggagggcagagactgtgaccggtgaacagtaggggcggggtgttaggggagggttacctcttccagcgctgtaaacttcggagccttctgggaggtngctgttcggtgagttagatgattggggaagacgacctttttgaagagggtttcgggggtca

SEQ ID NO: 378964 - DNA, 443 bp, Homo Sapiens
  misc_feature (276)..(276): n is a, c, g, or t
  misc_feature (413)..(413): n is a, c, g, or t
  misc_feature (419)..(419): n is a, c, g, or t
  misc_feature (430)..(430): n is a, c, g, or t
cagatccagttggtgagattgtcactagcatacttagacccaacatactctgatacctagaactgggacatgtgcaggatttttaattactggaccttcctgcaggtgtgattgtgacatatgtctttgttacacacctgagtggtttgatgttcctgccttggttcaacccaaagtgaagattgtgatgtgtcactggacccagcatctcagtgatgtgactcttctttttggacaccacaaattttgggtattgtcaaatattgctgggatccngtacccatggttatgtgactctccaacctatgtcctgtcatgtttgtgccatatttgcagcacaatgtgttcacattaggacaacattacatattgccgggggtcaacaccccagtgatgtaacattttccgggggncttgantacaggggggnttttggacataac

SEQ ID NO: 378965 - DNA, 432 bp, Homo Sapiens
  misc_feature (391)..(391): n is a, c, g, or t
  misc_feature (396)..(396): n is a, c, g, or t
  misc_feature (407)..(407): n is a, c, g, or t
ttactagggatggacactaagcagaaagatttctgagtatctattcatcttccccaatcagacagtcctttaaatttaaagaagaatgcctgacccttaagacagggaggttcatcatatttcccattctgacagtttggaatgaaaggacacataaattattattattattattgaattagaggtatgggtatgatgactgaggtttctcagcagaagatttctgattccatgctttgcatcattagacagccaacagaagctgcacttagtgggccgcgtgatgtgattgattggttagattgggaataaaacttttttgttgttttttaaatccaatattactttatttttatttaattaacttacattcaatgcattgatcataggntttcntattttagggntaaaatatatatggaggtaggttgg

SEQ ID NO: 378966 - DNA, 542 bp, Homo Sapiens
  misc_feature (394)..(394): n is a, c, g, or t
  misc_feature (432)..(432): n is a, c, g, or t
  misc_feature (440)..(440): n is a, c, g, or t
  misc_feature (450)..(450): n is a, c, g, or t
  misc_feature (483)..(483): n is a, c, g, or t
  misc_feature (517)..(517): n is a, c, g, or t
gatgtgaaatgtgaaaacaatacagaacaaaggtaacctaaagtacaatcactattctgagtcctctggccagtttctccaatataacattcagattgttctctcactccctaaagtaagaacataggattatagaatttaaggtagattgccttgcattcactcattcattcattcattcagccactcactcttaactagcttgtgccagggaactgtgctgagcactgggggctgttaaaacggatggggacagatgtaatctgactttcaaggactccttttagtctttctgggctttctaaaatgcagtagtacttattcatattttgggctattttaaaagtggattttttctccaaactacagcaacaacttactacttaataataangtctcaggggtagtgtaggaaatgctgttcaccctttnccaggtantattctacanttcagtggcccacgtgtttttttccatttggangttgggggttttaccctcacattaggggggtgcngaggtgggcggttaaggctggggcc

SEQ ID NO: 378967 - DNA, 356 bp, Homo Sapiens
  misc_feature (330)..(330): n is a, c, g, or t
ccaacaaagatgtgtctttcggcttagtgaaaaacatttaacaagaaacaatgtgtaaccaagtccccacagtaaaatgtgtcttcagaaacatgagaatcacttttatatagccaacctcatttgaattttatcatgaacataaattatcggtgagactggtgtgcggggctggatctgtgagacaagctcacactctcatgtgtgcattctctattaacatatttgggaagattgcccacattttctctgcagacctgccacaaatccttaccttcttactgaaggaatgtgactattgtaggcattcgtgcaattatgccaggcagngggagggcactaggacagtttatagg

SEQ ID NO: 378968 - DNA, 468 bp, Homo Sapiens
gagattgtgagtgcaacagggagcaaaggaaacagaaccgacagctgttgctggtatccgtatgtcacttactcatttgtaatcaagcgcctgcctctcttttataccttgttccttataataccctgtattgggctctcatttttaactgtacttgtcttctatcttccttcaaatgaaggtgaaaagatttgtctctgcacttcagtacttgtgtctttgactgtcttccttctggttattgaagagatcataccatcatcttcaaaagtcatacctctaattggagagtatctggtatttaccatgatttttgtgacactgtcaattatgggtaaccgtcttcgctatcaacattcatcatcgtttcttcctcaacacataatggccaggggggcctttgggtccgcaaggatattttctttcacacggtttcccaaactggctttgcaggaggaggtcagtagg

SEQ ID NO: 378969 - DNA, 392 bp, Homo Sapiens
  misc_feature (67)..(67): n is a, c, g, or t
  misc_feature (114)..(114): n is a, c, g, or t
acccacccaatccggctgttgaagccctatgtgcccagactttttaaatttggtggttgtaaatttncccacttcctaatacttcaatttgggtcctcccttaaagtcttgtanttatttgcctaagactttcctacttgtccatttatttcaagtgtgctcataattactcgctaaatcattttcatcaggcttgcttgctttaaaatgtttgtcagacaatcccagcgcttctctcattttattgccagtgtgtgcttgctgcctattttcattcagtatgagattttcctggttcttggtatgatgaatgattttcaatggaaacttggacttttgggtattatgttatcagactgtcgattttattgaaaccttctgttttaactacc

SEQ ID NO: 378970 - DNA, 397 bp, Homo Sapiens
  misc_feature (28)..(28): n is a, c, g, or t
  misc_feature (51)..(51): n is a, c, g, or t
  misc_feature (216)..(345): n is a, c, g, or t
ctgaaatcaaaaatcctaattttgcccnaaatattggaatcaggtaagggnccccatatcaaccttggttccccatcagttgccccagttccatggaaaagcccttccttatttaagtttaccttgggaataattttgccttaactgttgtgggatatattgctgttgtactctttgtgtagaaatgcaggataacggcttggcgcaaggtgtcannnnnnnnnnnnnnnnnnnnnnnnnnnnnnnnnnnnnnnnnnnnnnnnnnnnnnnnnnnnnnnnnnnnnnnnnnnnnnnnnnnnnnnnnnnnnnnnnnnnnnnnnnnnnnnnnnnnnnnnnnnnnnnnnngtgcctctagtcccaactactcaggaggctgagacaaggttcgcttgaagct

SEQ ID NO: 378971 - DNA, 195 bp, Homo Sapiens
  misc_feature (99)..(99): n is a, c, g, or t
  misc_feature (140)..(140): n is a, c, g, or t
tctcctagggctgtttcagtaccgagaaactcagcatttagttggaggtctcgtagccccttgaggtggagaaaaggactccaggctaggaagcccaantcctgcctctacttcaccttatgactttgggcaaataaccntgttatcttaatatgttaacctctaagatattaaatatttgattaagtttgtacc

SEQ ID NO: 378972 - DNA, 303 bp, Homo Sapiens
  misc_feature (22)..(22): n is a, c, g, or t
  misc_feature (42)..(42): n is a, c, g, or t
tcttgtgagccacttgactccnctgagccttgattcctgcancccgtaaaatggggaccaagaatgcatgccccaatcacgaggatttcagtgcttgacaactcccaacgaggcctttttatgcccaagtgataggaaaggcttgactctcctgagaaaggagcatcctctctcttcatgaataatgagaacacctaaaccgacctgacttccttttcactttggactcagaaaagcccaatttgtgatgtataagaacaactctccaggacagcactgtccaacaggaatgcaacgtgagcc

SEQ ID NO: 378973 - DNA, 415 bp, Homo Sapiens
  misc_feature (21)..(21): n is a, c, g, or t
acccccggcatttgcctgttncccccgttgcccctactgaaagtaatccagccatacccaaagccaacatattttggggtggcatttgctgaactcccttccagtgccatatgccatgtgagtatgtgtatacagtgtgtttttgactgtctttctttaccagagattttacatctataaagtacctgaaaagctgaacacctaagaagtatttatgatataatagacatctggatgaaatttaaaaattaaattaaaactcccagtagctttgtctgcagatgccacacttctggaaacatctgtgtctttgtgtgtttgggtgtgagttcatgtagagtttttcctcctcatttttatgtgattcttaggaattgagtagacataagcttacataacaaaatatttcaactgc

SEQ ID NO: 378974 - DNA, 424 bp, Homo Sapiens
  misc_feature (17)..(17): n is a, c, g, or t
  misc_feature (34)..(34): n is a, c, g, or t
  misc_feature (81)..(81): n is a, c, g, or t
  misc_feature (137)..(137): n is a, c, g, or t
gagccagctgccccaangggaaagtccaccgtantccatgtcccccacgaagtatgtgggtaaaatccctagaaaaaggangacaaaataagggggaaaccttttccccccctgaattttaatacctatatttttanggtaatttaagtaagttactttgtttcctgactcccaaaaatccttactaattagaatggaaagttcatacacagacatgaatgatacagggtgttttattccatcattattttaagaataggaaatcaacctaaataatagcaggagattctttaaaccattcttagcacattaagctcgtggagattgtggtgttaagaggcttctgaaacaggtgtttttggtaaaaatagttactatttttctcaactatgggagaagcacttttgtatcctagaagatggag

SEQ ID NO: 378975 - DNA, 490 bp, Homo Sapiens
  misc_feature (15)..(15): n is a, c, g, or t
  misc_feature (41)..(41): n is a, c, g, or t
  misc_feature (49)..(49): n is a, c, g, or t
  misc_feature (112)..(112): n is a, c, g, or t
gggggtgttccctancccctggaaattgtaagaggaaaaantaatcccnccttggaaaacatattaaagccagaaaaactcctttccatgaaaagtcccttagccacctcangaagagccacaactggggaaataaagaagaatccagagaagcatgaatgctgggtactccatagaaacctcattccatcattttcactaactgcccccagaagagtttacagtgatgttcttgaaatggttgggcaatattgtttttgcaacaaccacaaacagcctacaagggattctagacagggaaacagaaggaggctctgtcccaatctacgtgagcatgttgctgtaaccctatcaggtctaggaaaagtacacattttaatgcacctagccagctccctcaatcttcagattgttttacaaatttaaaactcttgttaatcttaggatcctgtcactactaaataaggagggagtcaaaattactagacaa

SEQ ID NO: 378976 - DNA, 583 bp, Homo Sapiens
  misc_feature (26)..(26): n is a, c, g, or t
  misc_feature (31)..(31): n is a, c, g, or t
  misc_feature (45)..(45): n is a, c, g, or t
  misc_feature (242)..(242): n is a, c, g, or t
caactagagcaagtacctgcattagnaaggnctccagcagtaganagggcagatttcagaaccctgcaattttccatagcaatgagagacccactaaaggtgacgccaccaatgtaagtgccgaggtaggccacaatcttggtgagatttgctgctgcatccgtagcaaaatgtggatattctataatgtactcagctatgcaagtaagtacagctgccaaacccactaaactgtgaaaaancagcaaactaattgaggtaaaatcaagaaaatctggatgcgtttggcaaattgtcaaatcccaatggtaccacccaaagccatcgctccagacatctgagctagtaattctgggcccggttttaggactccgagggtggctgccagtcctccagcaaccccaatcatgcccagtgcattgccaagacgtgctgttccctgggtggagaggccagccaaggcaccgacacagcacaaacccgagcctaggtacatgatctgttcaatgttataaccactgtagagggcagctaaatatccaccaacaaaggtgccggcagggagcaggtacaggtagttgta

SEQ ID NO: 378977 - DNA, 423 bp, Homo Sapiens
  misc_feature (46)..(47): n is a, c, g, or t
  misc_feature (393)..(393): n is a, c, g, or t
accagtggaccagcgtgactccatgcggccggccagtcagaggccnnggcttgcctgctggagaggaagatctacatcgtcgggggctacaactggcgtctcaacaacgtcacgggcatcgtacaggtgtacaacacggacaccgacgagtgggagcgggacctgcacttcccggagtccttcgcaggcatagctggcacgacgttcctgctgccccgggccgggaccaggaggtagcccccaagacccccgggaccctgggcctgaccgcatgttgtctccaagtggggcttggcgaatgaacgtctgcctgagaaccccagtgcccccctttgcccgggctgcccttgaggggccttgctggcgtttgataagccccccttccaggggttnctttccttcccttctttcccaaagcagatt

SEQ ID NO: 378978 - DNA, 532 bp, Homo Sapiens
  misc_feature (457)..(457): n is a, c, g, or t
  misc_feature (464)..(464): n is a, c, g, or t
  misc_feature (475)..(475): n is a, c, g, or t
  misc_feature (490)..(490): n is a, c, g, or t
  misc_feature (501)..(501): n is a, c, g, or t
  misc_feature (506)..(506): n is a, c, g, or t
acagtatcaagaactaacattcggttccaggggacattttaatcctaattgttgaaggtagagttttcctgttaacagaagcaacataaagcatggtgtctagtagagggatgcaaaaagggagagaattggttagctagggtgttttggtaaaggaccaatgatgtgcctcatggaaaagatccctattacactaggtggggctgctggccttgaaatgtcatgtgcttttcagaccaagggcagagagagatgctccctatggtgagggtgaccctctgttccttgaaaatcacaaagatgccctcccttgagctatatccctgggttactatgacattccctcatctttgccaaacaaggttacctccctggaactattaaattttcccttacattggcttacacagagggggtggaataagttttgacgatccgagacagggaggggagggantttttgnttaaaaggttnggaggttctgtttanccgacatcttnatccnggggtagttcagaggctggggttctt

SEQ ID NO: 378979 - DNA, 295 bp, Homo Sapiens
  misc_feature (197)..(197): n is a, c, g, or t
  misc_feature (251)..(251): n is a, c, g, or t
  misc_feature (270)..(270): n is a, c, g, or t
ccaagtaactggaattacaggtgtgcaccaccatacctggctgactttttgtattttagtagagacagggtttcaccatgttgggccagggcaggtcacaataggaacttctaaaattgggagtcagtcctctcaaaccctgctgctactttatcaacaatgtttatatagtgttctaagtcctttgttgtcatttncaacaatattttcacaggcatcttcatcagggagtaggattccatcttcaaggnaaccacttttttttggctncatccataggggaaggccactgctt

SEQ ID NO: 378980 - DNA, 556 bp, Homo Sapiens
  misc_feature (84)..(84): n is a, c, g, or t
gacctcaaaatacaaatgttctgggccaaaattatacaatgtcaacctcagactgtatgtaattatgtaatgttggcaaaacangcccacttttgggggcgcccacagctttaaccctagcatcctgtgccctgcctgggttccccatcgctgtctccccaaaccccatgaatttccttggatttggttccagaaaggcagacaagaaacaaagtcagttgcacaagcccacaagggaacagggcccccagaggacttgaaatttcctaatgaaacttaagagtaacacagaatgtgtgcctttgcccaacaagccgggactttctgaaggttgatctgagatgggggcagggagtggggacaagatcaagtgtgctttgggccagcctccgctaagggcaacaaggcgggaatacaaagctatctagaactaaagcaactggccagtgcttcctgtggcctctatccagaactattccctcagacagctgacccctttctcagagcacttcagtggtgcttccaaggtgccaaagggatccatccaaataaatgc

SEQ ID NO: 378981 - DNA, 553 bp, Homo Sapiens
  misc_feature (455)..(455): n is a, c, g, or t
  misc_feature (464)..(464): n is a, c, g, or t
  misc_feature (537)..(537): n is a, c, g, or t
cgcccattggaacataacggcagtccggcgcgacagaaagagaatgggctggaaccggatctgtttccagacgcagaatgagtggctctgtgtgaccataggcagatgctgactctggaagactccgtgccactcctttctagtgccaaacaccatccaaccacaggactgacgtggaagccccaaacaactgagaatgagtggcatgagccccctaaaagcaggcgagagaacgagcaatcaagttctccactgtgtacagacttttcctccccccaatccaaggtcaaagtgatgtgtcttttagaggctttggggacactttttagtaagtatgagcagacaaatgcaatgaatatgctattgaaaaaaccctttcttgaactgaggagaggggctttttcactattattcccagcttaaggttttgtatttttgaattcatcttgttaaangttcggcantctttaccaacaagctttttggggttttttaaataccctccgttacaggccaggtaaacgtttccccgttttnttgttcttcagtgttc

SEQ ID NO: 378982 - DNA, 398 bp, Homo Sapiens
  misc_feature (359)..(359): n is a, c, g, or t
  misc_feature (365)..(365): n is a, c, g, or t
  misc_feature (377)..(377): n is a, c, g, or t
accttgtctccctaagaggtgatcatgaatttcctatacagggcaaaaaagggaagaatagcctattcatattctgtattcacagtttgaaggacccatcacaaatgaccttcaaagactgacagggggcaggtagaagggaggcaaaaatgcagagaaaaagatgttaccttgaaaaatgaagtaagaaatcctaatattcccgtagttgatcctaaagtttgttcccatgtctacggttatttctaaataacttcactacactttggaaattccttagtgggtgggttaatcagttaatactttaactggaattttttcccgttttctatttctttggctgcccaatggaatgttantctccncggacttggccntttcgagttgcacggcacagg

SEQ ID NO: 378983 - DNA, 477 bp, Homo Sapiens
  misc_feature (18)..(18): n is a, c, g, or t
  misc_feature (23)..(23): n is a, c, g, or t
  misc_feature (36)..(36): n is a, c, g, or t
  misc_feature (125)..(125): n is a, c, g, or t
  misc_feature (302)..(302): n is a, c, g, or t
cttcccgtcctcaatganggggnaactccctggccnaccgtggaaggaggcccagctcccccctgggcccaaaatcccgggcctgaacaaattcaacaaaaactaagagggaaaaggtgaaatgnccccacgagctccctgggaatggctcgagagccccagcctcgccccagcccacctgtcccacatggaccccttcatctgtgtgtccttggcaactgtggcccatacggggagtggggatggtggtctaatctgatccacaacaggaaggattgtcataaaaggcctgtgactcaggncagcaagcctgttcctgggcaaggcacagagactgtggcattatggctcctggaggtagccctgcgtttgtgctaagcttcacccccttgtcaagctacaggacacaagatcaatatacaaaaatcgattgtgtttctaacactagcagtgaatgacccaaaagcaaaattaaga

SEQ ID NO: 378984 - DNA, 486 bp, Homo Sapiens
  misc_feature (431)..(431): n is a, c, g, or t
  misc_feature (463)..(463): n is a, c, g, or t
acattctgtcccatctccacagtactgaaagtacattcatttatgacacctcaatccatttccactccaaaaccctagtgaaacgaagtcacccactcacttctggaagatggctttcttctttccaaatggagcttcaggaatgcacgggaaaagaggcagcctaagcatttacatgtatccgtgctcccaggctgattcacacaaagcatcagcaacctgcataaatttagcctgtgagggcgattgtgatagttgtgagagtgatgactgatttcaatatgcaagtatttattggggtgcctaaatggggcaaacattgggggttatagtggatggaacacaacagatgtagtctttatgcatacttttggggatttttactttttaaaagtaacaatttgccagtttgaggttgacaggtgttgtcntttctttcccttaggggattataagggggggncaaagattgagcttaaaggaaat

SEQ ID NO: 378985 - DNA, 504 bp, Homo Sapiens
  misc_feature (19)..(19): n is a, c, g, or t
  misc_feature (37)..(37): n is a, c, g, or t
  misc_feature (53)..(53): n is a, c, g, or t
tccaaccaacccccgtaangcaaccctcgtcccccanttccccattaataggnctccccgggtcaatctgcccttcaaccctcaaaagttcctgaatttcccaatagaaatgcaagccttggagtcctaaatcctcgaggtggtgtggaaactggtctgaggttgttcaaatgccttcttttggaattttaaggcccagggtttcgcttcttgcctttcgactgagacattttcccctttcctttgatgggggaggggagcacaaaagactttgccttgcttctcttctgtagctagttttgcaacaaagatgcaagctgcaggcgtgcaatcttcatgcaagtggagtttctcttgaccgatgcagcagatggactttcagggaatcaagatggaaatgcacaccttgcaaaacagactggaaagtgatttttcccccagttgcaacgttagggaaggctgtgctgcagctacgatgatgggccagggctggcagctaaaagc

SEQ ID NO: 378986 - DNA, 678 bp, Homo Sapiens
  misc_feature (25)..(25): n is a, c, g, or t
  misc_feature (124)..(124): n is a, c, g, or t
  misc_feature (147)..(147): n is a, c, g, or t
  misc_feature (161)..(161): n is a, c, g, or t
  misc_feature (167)..(167): n is a, c, g, or t
acacagatttcctgtgtgcagtaanccctaagataagaggaaatgctacggaagtccagtgtaatccaaagacaggtggatactcatagattttctcatcccacagagctggaatgagtcatgnctttgctgtctcacctctaaganacagttgaaattantattanatcatggatgtgaaagcagttttacaaaggaaagctgatctgtaatagtgtgagaaagagatttaatcctcaccaaatattacatgtgttctccctaaactccctagcccatacttgaattgagattggagcccatcaagactagttcccagcaagtagacgcaagcaagagtggtgtgtattaactatgggacaagatggttaaaagctagggtaacacatccattagtccttcccttcaccatggtctttgtgacctcagacacccggcattcccaggtggctaagctttagatgaaggaaggatgcctcatccacatccaattataatgtgagaaatacattgctgcattcaacattgagagtttggaagtttgtcttccatgaacagttagtattaattacttagactagtatggaaattggtagcttgaaatcaagtgcttctacacacacgcatgcacatgttcattgcagcacactattcacaacagcaaagacatggaatcga

SEQ ID NO: 378987 - DNA, 612 bp, Homo Sapiens
  misc_feature (11)..(11): n is a, c, g, or t
aggccttcccnttgcctccccactccctccctaaatagagtttaatgccgtactcagtgccataaagtaaggtatggactgagttggctgtgaataccttaagaactccaagatgtggcgttagatgaacccaagatgaaacataatttaaatcttttgggggaaaaacggctggcaggatatgaccatgctgaagggtttgcctttattagtggacagagaggctgaaccagcagcagcagtagttgtgatctcattcacaccctgttcagggttccgtgagggtttggaaaaatagttcactagaaatggcctaacagtttctcttctcaaattatgattttttcaggtggcacaggaaatagaattagtgcatcctctgtgtcagaaacaacgtgcagtgtctctgggggcagactctaggttgctcttgctaaatctccaaatgcctacacagtggaattttatttttctgctctccttgccaaactacttgtttttttcagaccctccccaagagtcctcacttacccccttttcatgcagccccactcagagtccttttctttctaagccctctcctgatccttgaaaactctctctcaaggcttt

SEQ ID NO: 378988 - DNA, 443 bp, Homo Sapiens
  misc_feature (397)..(397): n is a, c, g, or t
  misc_feature (420)..(420): n is a, c, g, or t
actaaggtatgagctgaagctttaggttctccgtgcttccctcaagacctccttcttgctaacagaagcagtaggcaattgctgcagtgcgtttctcaccctgccaataggtctgtctgtatctctgttaaggaaaatagcctggtccctcctggcagtgcttggaagcttgatgctaatttttatatagcgtggcaaactgaccagcagtgccaggccttgatctgtattctgcactatccctttacttggttcctgggcactgaatgggtctccagccctgaagaatcacgtgtgatcacagcagctgacctgggctttctccccgagaggaagggggcatgtcatttttatttgacagagggaaaatggggagctgtccttggactgcctttgntgtggttttcccgcgttaagatnaggcactgtgtttttaaactgtt

SEQ ID NO: 378989 - DNA, 446 bp, Homo Sapiens
  misc_feature (353)..(353): n is a, c, g, or t
tcgagcttggctcagatctgccatggagcacagctagtctaagagctagaggcctggtgctttcaaaagacttcatgtgagatttttgtgtactttactcaggaaagtgtgaatctctaaaaaataataataataagcacatgttttcatgattcattaattctcctttttgttccattaaccatttcttggttgtgctcccaagctttcctgggagcctccacaaaggagagtagccagggagtaatgaggagggacggtcaggtggggcacttccaaaagctgggagagacccttcttgagggaccctccaccatcagcggggccttcaggggaacctgtccttaacacangggtgtgggctggctggggccagacgcttcacctggcacaggaacttcctccctggttccccactctggaaggggcgtttttcaggaattgga

SEQ ID NO: 378990 - DNA, 513 bp, Homo Sapiens
  misc_feature (18)..(18): n is a, c, g, or t
  misc_feature (32)..(32): n is a, c, g, or t
  misc_feature (42)..(42): n is a, c, g, or t
  misc_feature (63)..(63): n is a, c, g, or t
  misc_feature (93)..(93): n is a, c, g, or t
  misc_feature (109)..(109): n is a, c, g, or t
  misc_feature (133)..(133): n is a, c, g, or t
  misc_feature (153)..(153): n is a, c, g, or t
  misc_feature (466)..(466): n is a, c, g, or t
  misc_feature (470)..(470): n is a, c, g, or t
ggcccaaaatcctaaggngggaaaaaacgacnggtttgaaantgtgcctccctgttttatcangctttttccccaaatgaacaaacatgaaantccctggctccccccnatccctggccctggaactgcccanaaagccccaggaaaaagcanccatccctacaaacccaggagggcccaaagtcgcctgaacgaactgcctgcctgtgacccccaggacaggtccccatccccatctcgtgccctcagtaaatgtgggaagaggggagatgggggcccactgagcaatatttaaagctccctttttgctctcaaaccgtctatattcaaactctttaaagcattcagaggctccagcttgggatcaattcagagctgccttgtcataagcattaaggcacaataagggaaggaacagtttgtctcttaatgaagtgtgattccaaaccacccatggcctcggganactncccagcgcggggtagacattgcatctgttcattgcatcttgtt

SEQ ID NO: 378991 - DNA, 518 bp, Homo Sapiens
ccactctcccagctggactcctgcatgctcctccccttgggctctcagatgaaggcaaagctttgatccgacatctgagctctagcctaagaaggagagttgagatttcctcctccctctggctgggatatggagctttggaggttcagagaagagaaccctcacctctgatctggcctctacgagaggtcctcatctccatctggcccaacaattcccagattctgaagcttgggaatgcaaacacaggcttcatggggctgtggcctctgcagcgacctgccatccccaggccttgcctgaggggtcaggctgcctctcccaacacacactcagatagcacaaattctaccatccccttccctggctgctggaaatggaccccgcaaccctgtcctctgctgggcccccagcaaactctagcaatagcagctgctgccgtgtcattatgcaaagcctctgaccagtttgctgcagcatttacatctgccctaatcagaggggccacctctaactcc

SEQ ID NO: 378992 - DNA, 489 bp, Homo Sapiens
  misc_feature (444)..(444): n is a, c, g, or t
tttctcatctaatcaaatagagttactctctaagccagaagttactctccctttattcaagctgtcaatttttgtctcctaaacatcttctagttatattctcatttctctgttcacattgcattaataatgatgataaacatttgcattcttattctgtgccaggcaacatgctaactgctgtatatatattattatatttgtactttgggcaagaatcctgtgaagatttttatctttgggactactaggaagagaaagctgagttgtagagagagtatgtatttaagtccgtttggggctggctataacaggaataccacaggactggggtaacgtggatggaaccaaaaatttatttgggctcacagttctgggaaccggggggaaatcccaaagggcatggatgcttaggcattctgggttgaggggccctttgtggcntttgttcatcccctggcccggagggcaggaggggtaggagagggg

SEQ ID NO: 378993 - DNA, 484 bp, Homo Sapiens
  misc_feature (44)..(52): n is a, c, g, or t
  misc_feature (448)..(448): n is a, c, g, or t
  misc_feature (458)..(458): n is a, c, g, or t
cgacatgtaatcaatataaaaattattgagatattctacctgcnnnnnnnnncatattcagccttcagataggttgtgtgttttcacctgcagactggttgaatttgggctaatgcattttaagtgctcagcagccatacgtggctcgtggctgtgatattcgggagtacagctcagctctggaaccacctatcagaaagagaagcccagccgtagcccattagatagagtgaaatttttgttttattttattaaggagcaaaatattgggccagggtgcagtggcttcacatctgtaaatcccaacgctttagggagggctgagggcagggaggggatccacttggaagcctgggaggtttggagaaccagcctgggggcaacatttggcaaggacccccgttttcttacaaaaaaattaactttaaaaagtttaggcgggggcccntggggggctnccccctttttttaggcccccgtttac

SEQ ID NO: 378994 - DNA, 530 bp, Homo Sapiens
ccatctaaacaaatatgggggcaaagaatgggtcagaacatgctttgactacaggcaagcagcggtgcccaggctcccttgagacaagcctccccacgcagtcaccttccactttgttctcagtgatcactccagaagcactaagtcctcttccctcgtctcacaagccttggtaaagctggaaccacatttagggaagaagcctaactcataagcccccagcatcatagggtccagttaagctccacaaagcgctactagcaacaccaaaaccactttcctcaatgctgtgtgacttccacaaagagggggccgacctgggcggagttcaagcttccacaattcaaggaacgaattccacatttaaatgacgggattccctcaacagactccctgagttgcccaagcctgctgcgtatttgctgaaactgagggcaaccagcgtctggtgcgcctgtaaagacatgggaagggaagcaagggactgctcccaggtggtggccaactccaggggctgtccaccagccttt

SEQ ID NO: 378995 - DNA, 429 bp, Homo Sapiens
  misc_feature (407)..(407): n is a, c, g, or t
tgtttccacacctactgagtcaggtgtcccctcagctgaagaagtatttggttccagccagccagagagaatatctcctgaaagtggacttgccaaggccatgttaaccattgctatcactgcgactccttctctgactgttgatgaaaaggaggaactccttacaagcactaactttcagcccattgtaggaagagatcacagaaaccacaaaaggttttctggaagtatatgggataatcaatcatttgcaactggaaagtcaggaagggagttgggtttggggacattcacctttcatcctatgtggaatactaaggaaatgctaaccaccaatccaaagactgaggaaattttgaaggcaggacacaggaccacagggacaacttcttttcctgggtgctggngtccacagcagggcgtgagcct

SEQ ID NO: 378996 - DNA, 480 bp, Homo Sapiens
  misc_feature (262)..(262): n is a, c, g, or t
  misc_feature (271)..(271): n is a, c, g, or t
  misc_feature (333)..(333): n is a, c, g, or t
  misc_feature (381)..(381): n is a, c, g, or t
  misc_feature (416)..(416): n is a, c, g, or t
  misc_feature (433)..(433): n is a, c, g, or t
  misc_feature (448)..(448): n is a, c, g, or t
ctagcagtaatatggatccacaccacgccctcactctgtggccctggctaaatccagcctgctgcctgcttgtgtaaataaagttctgttggatcctggctgctaccctttggtcatatattgtctgtagccacttttatgttacagtgacagagctgagtagctcagaagcctgacctgggcccacaaaactgaaaatacttgttcattgaggccccttatagagaaagcctgacacctgctcagggtgctgagaactttnactcctatntttgagatttttaaagttctaagggaaaagtaagtaacttctctattgctgtaattcttcanccacttaggcctcagctcactgggacatttttacccaggatgggaacntttgatgaaggaacaagtcaaacagactttccctntgaagggcttccttagnttggatttccaaaanaggttggcaatggaatgaagggaggccattcc

SEQ ID NO: 378997 - DNA, 438 bp, Homo Sapiens
  misc_feature (21)..(21): n is a, c, g, or t
  misc_feature (35)..(35): n is a, c, g, or t
tcctcaggtcagaggaacaanaacttgaagggttnaggtcaagaagatttgggaaccaagcaggggctccggggcgccgcttgcggggtggtgagccccgtattggctcccatgactccttcaatgggcctcccagcccacgcccttcgctgggcctcgcaaacctcccgggatccggtgagtccagcttcctttgtagccttgtcgctttagaaatgttattactcattttgacctgacagagtttaccgccttctgagccagcctttcacgcgattggccaggtagggccctgaacgcctgtgtgggtggatcagtgcacacacgcgcggtagacgtgatctggggcttgcagggcctcctggtcctgctgcacacggctggccgacccttcctctcagcgttcccctctcagactccatagataatgatgcttat

SEQ ID NO: 378998 - DNA, 255 bp, Homo Sapiens
aatagtgaaaaatatgagtttagaaaatatttatagtaaaacatattcaataaagaaatcttggaaaatatagaaaagtgggaagaagggtcatcaatgccccaaaccaagcataattggcattttgttatatttccttttagatttagttttcatcctaaactttgactattagtgtttcatttgctttaaatagttatatagtaaacatgaatttgtaacctgctttttgatgtagcattattcataatttta

SEQ ID NO: 378999 - DNA, 390 bp, Homo Sapiens
atcaatacaatcttggagtcaaaaggcaaatcatttggacaatctgcaaaatggagagaatacaataactactacagtaaagtctgtttctgcttccttacacatagatataattatgttatttagtcattatgaggggcacattcttatctccaaaactagcattcttaaactgagaattataggatggggttcaagaatccctaagtcccctgaaattatataaggcattctgtataaatgcaaatgtgcatttttctgacgagtgtccatagatataaagccatttggtcttaattctgaccaataaaaaaataagtcaggaggatgcaattgttgaaagctttgaaataaaataacaatgtcttcttggaaatttgtggtgggcca

SEQ ID NO: 379000 - DNA, 785 bp, Homo Sapiens
  misc_feature (17)..(17): n is a, c, g, or t
tgaacccctacaataanccctagccccataagccctgggaagagtgtttcctgaattgaaaagttttcaagttaacccctcctgcctgaggccttaatatttcctgaataccctggcacagggtgctgtgtctcctcagcatcactggaactagttaaatggagggatattggaattaattaggtcctatttcctgattgtaatgtctgtgtttcagtaatggggtcataaggcatgatattctgctgataaactcccctcaaatattgtctctcccttctatgattcaccagaaccatagttaaatctccacctacagaaatgaaaatttaagagaattatataatttggccaattttgggatttgagtgtaaacagtgcttgaaattagtgaaatactttttagggttagcaaaactggaggcaaaggggcatttccattgtaatccatgcccttttgtgaaagtattttggacacacattccccattcatgcaaagaactaccttaccaaatttagtaatatagtctataattcaaagctataacttttttgaaaaataagtaagatggggccctgcctgaactcaatattagtagtggggaagggaatttttaagcttaggcataaccatgaagcttgatgccttttttatctttgggtcagatggagggcgggtgctaggacatgaagtttaaatgttactgccttaggtccacctcacgaggacattcccaatccatgatcttcacagcaaaaggaaaaagcaatgagtagctgcttca

SEQ ID NO: 379001 - DNA, 336 bp, Homo Sapiens
ttgagagcctatacaaaaatctccgtaaagctaataaggcagtggattttacaacagtcaaattcttgcttcaggattctagaagtttgttacatgctttcagtacaaggtcaaattatgatggtattcttccacagacctttgctcaagtaaacaacctccttcagacatttgcagaggtcaagacaaaacttaagccaaattcttcagaaaacacagtgactaaaaagcaggaaggtacttcattgaaggaattctcataatcaagaaatcactgttttctcgagttctcatcttccccaacccagcaggcatcaaggaaatctgggtctatcc

SEQ ID NO: 379002 - DNA, 397 bp, Homo Sapiens
  misc_feature (327)..(327): n is a, c, g, or t
cagcccctgccctgcaccaagcagaggggctggacacctctgtcatggcaccagctgcctctccttccccagcacagtctggacctgggcggactttttggaaaagcttctggatgccacggactccacgaccaaccaactaggttgctgctgcttgcaaacatcgcctccattgaaggattcctgcagccaccagctctggaactttctggaaccaaacatttccccagactgcctacaaggaccaattgggcctctgggatgtaggtgtgggcctgcaggggtccggcagggcttccccagagtcaagtgggacccagccctttnggacccccttgcccggtcctatttgaccttcttgctcttttccctggcaggcatttcctggggagggcgt

SEQ ID NO: 379003 - DNA, 487 bp, Homo Sapiens
  misc_feature (375)..(375): n is a, c, g, or t
  misc_feature (390)..(390): n is a, c, g, or t
  misc_feature (425)..(425): n is a, c, g, or t
  misc_feature (446)..(446): n is a, c, g, or t
  misc_feature (452)..(452): n is a, c, g, or t
  misc_feature (463)..(463): n is a, c, g, or t
  misc_feature (475)..(475): n is a, c, g, or t
gatctttacttaagattcggactggaacacaatacttgttccaaataacctccccaggctattcctgagagagggggtaccttggtttttggagtaggccagaagtttgtggtaggaaaggtgactgatttgcagctagactcacctgctaaagtagacacgggtctgttgcactgcaggttttgagaacagcctgggaccaaaccacacagtgaccccaaaggcataaaaatgataatgaaggcagcgatggctcaactaatatcatgcaagtctatgcatgaggctgcctacttttgattttgcagtagttgatacttttaaaacttcagtcctggcttatctgcctgtcccagggattcctggggctcccantagttgagccagggntgggggaagagcttagcttccattcagccacacantacatgttgggacatttgganttggantgttttttttnaaaagcacaaanttcaacattttt

SEQ ID NO: 379004 - DNA, 495 bp, Homo Sapiens
  misc_feature (273)..(273): n is a, c, g, or t
  misc_feature (440)..(440): n is a, c, g, or t
  misc_feature (449)..(449): n is a, c, g, or t
  misc_feature (454)..(454): n is a, c, g, or t
  misc_feature (470)..(470): n is a, c, g, or t
aagtaaaacagctataagagcactgaggttcttgttgaaataattttaccttaatgaattaccaagaccttgtaagaaccagaatggggaccttacaggtcatgcactcaggaatattaaaaggtcatcttctgggggactttataatcaaactttaagaaaaacaaaagttgtattcctagtgtctgcacacagccagaaaaagattttctgctttctggcaaagttgagatggtaataacatttctcagcatgtaacatctagttagtagnaaagagtggttgacagctgagactaaagatattaacctgaaacaaaacacatcataaatgacaaaatagttttatccattaatggcatgaaaactttaaatagtacggttatttctaaatactgctttttaataatattgtggatacaaatttttaaatttaggaantatggcaanggacntttattggtttaaccntttacccccactggaggtggttttt

SEQ ID NO: 379005 - DNA, 538 bp, Homo Sapiens
  misc_feature (378)..(378): n is a, c, g, or t
  misc_feature (495)..(495): n is a, c, g, or t
  misc_feature (502)..(502): n is a, c, g, or t
  misc_feature (526)..(526): n is a, c, g, or t
aggttacagtgtaggttttccagagtttttgggctgggcacacacactcttaagttggcagctttctttttaacagtggtggtgagcttctttaaataacgacttcctaaatttgtgaaagagtgtgtgtactgggagggagagaagtgctgttacaaaaccccaaggcttcttgtctgtgggttgagcacagcccgctacggttttggaaagatggatttcctggaagacaactttgctactgagcatcatctagtaaataaagtactaagacacagaagtctataacaaatattggaaattattgttaatccaaacaatctcagatatatttggacatccatatgttttaattgtatagcccagttatgtccaagncaggagtcatgttactggcattaaaggatgttttgggtccaatggatccaactgccatattatggatgggtgggtactgtggaggtccttatgggagctggaaaattccccttgccnaatgacntctaggcgtcctaacttcttggcncacctgtccctc

SEQ ID NO: 379006 - DNA, 459 bp, Homo Sapiens
  misc_feature (432)..(432): n is a, c, g, or t
  misc_feature (437)..(437): n is a, c, g, or t
ggcagggaagcatggtccagccctgttatcccccaaaaggacacatacaaagctcagttcttgagctgtgcttatgcaatactatagtgatcagtaagctgaatgtatttgcttcacttctaaccttttttaaaagtgatcttgaggaatgctttgttgatcttgaattaataattcaaaaggggggtgggggaagatggggtatttctaagaaatgcagaatatttcagttttgaatattaaatctcttacaactacaaaccccttcatagtctccatccattcagaaaaacaaagccaaaggagaatttcttgtgggaaaaaaactaagggaagttccccacataaccagccgaagagggaaaggctttccctgttcctcttctccaagagggaaggccacagcaggccgttttgttcatgtttactgcntaccnggggctttttaaaaaagtggac

SEQ ID NO: 379007 - DNA, 598 bp, Homo Sapiens
  misc_feature (43)..(43): n is a, c, g, or t
  misc_feature (50)..(50): n is a, c, g, or t
  misc_feature (83)..(83): n is a, c, g, or t
  misc_feature (108)..(108): n is a, c, g, or t
  misc_feature (131)..(131): n is a, c, g, or t
  misc_feature (141)..(141): n is a, c, g, or t
accctgatgggcaaccccaccccttaagtaaccagtgacaacnccttaanaacgtgggtgttagccaaaccagggtaaaaggnaaaacctgaaaactgtgtggaaggnacgcctaccaagaaagaaaggantttcccccantgtgccagtggtagttccaagggacatggtctgaactgtaataacccgaaatttgtgtaaacaagaaaacttgcccataatggatgttttccctttccataacaacctttcccttgggcatttcctgaacaggagattcctcattttccccctattgaaaacatttaattcactgccgtatttggaatatctgtttatttgtggggcattcaaaatacgaaatatctcatagttgtttttgtccttaccatcaagaaggaggtgtggcttggtagaaaacattaaaagagtgttttgaatgatcaggtcagtagaaacatactgaagaaaactgtacttgcaaaagctagttaagcatgccattaagacaattatatgaacttagttccaaccagataatgacattttgcagaattgcttataatctgaaaacctggaagcaaaatccatcactgaa

SEQ ID NO: 379008 - DNA, 433 bp, Homo Sapiens
ctgggggcccttctcctggatccaacccctttgtcccttttgtcgtctttctcccaggattcaggttgggcctgctggggaggctggactgatccccactctatgaatccctggcaggggttgtgcccctggctggccagatgctctccctcccaacccaccagcaggaagacttacaacccagtgggggacaggattcatctcaggacagggggcagagatgaaaccattcacagccactgcctgttcctgttcccgggtcccacatccatagccagtgaaggctggaggccatggtaggctgtgcttcctgcctgtgggcctctcactcccagaacagtcgacttggagactgtccctcacagcatcctctcctctgaccagatccttgtttcctccccttggtgctcgaggctctccaacatcctcatct

SEQ ID NO: 379009 - DNA, 479 bp, Homo Sapiens
  misc_feature (437)..(437): n is a, c, g, or t
tgaagaagtcgagctccttcagcaagttcttgagcgcctcgcccatggctccacgtaaaaagacaaagatccgcggtggtctgccagccttctcagaaatctctcgtcgacctactccggggcctttagctggtctagtgcccagtttgcctccaacaacctgaaggtccctggggctaccacctggttgatctatcgtggcctgctcgtcgcagtccaaacccgcccaagactgcagcccaatcaacgcctgggagcctcattctgtttccagctttgtccagggcagcctgttttacccagatgggcctgcacctccagcttctttctgaagcatgacccatctccagagatgggatttgagaaatcagtgaggagcttcctataaagaacttccgggggacagggcttgaactcttagaagggactttgaaatncaggggtcaaaggttaagggggcagcagttggttttggccct

SEQ ID NO: 379010 - DNA, 421 bp, Homo Sapiens
  misc_feature (340)..(340): n is a, c, g, or t
  misc_feature (359)..(359): n is a, c, g, or t
  misc_feature (385)..(385): n is a, c, g, or t
  misc_feature (408)..(408): n is a, c, g, or t
caacttgttacccaataacaatttaatgttaaatttggctttcttctgtgtcccagcctcttaaattaatagatgggcctttccattatcattatgaccggacattgtaaagtacttaaggtaacacccagttttctattacttgccctcagttccttaaatcacttgccttattccttaaatagctggaagacatgtatgtgttttcaaaatcaaaagaaagggaattcagacaaattatatctgataattcaagggagtacttttaggaaaagagttattaaaagtgatcttttaacatatggcattttgtaggttgtaggccaaaagttaacacacngagggtgttttattatccnctaataactattcttgctttttggangttcctattactttttaaatacnggatatttttacc

SEQ ID NO: 379011 - DNA, 231 bp, Homo Sapiens
  misc_feature (181)..(181): n is a, c, g, or t
agaaaagtaactctggtgccactctggagagtagattggataagaaagaaactatagacaacatacaagctctgagacagtttcaagagtacagataacaggtgctgatgtaacatggtactgagttaatatagtgggccttgccctttaaaaattctggggatcctaaataggaaacttncaaacttggaaatgttagtctttaatagatctttacaattttaatttctt

SEQ ID NO: 379012 - DNA, 497 bp, Homo Sapiens
  misc_feature (19)..(19): n is a, c, g, or t
  misc_feature (81)..(81): n is a, c, g, or t
  misc_feature (182)..(182): n is a, c, g, or t
  misc_feature (316)..(316): n is a, c, g, or t
ttgtgccctgtccttaagncccccccatggccatgccataggaaataaggctgtggtgggccaaagtggggccaattcccnaggcccctggttggccatgcccccagccagccagcaggctatcctccagcatgtatgcaagtgtgtggcaaccttgctgctggaggcggggtggggtttcngccagtggcagccagtctaggtaggtggctcctcaggctctgtggagctcatgctacagctctctggcagtgataacagcagtggtagtgggtgggaagattctaacaataaaattttatgagcttatattaantggcgctagcacaccactggatcttggcttcattctctttaccagggttgagcccctgggagatagtaaaacatgtccaaataaatttggaggaatcaaaaaatattgtacattgaactgtgattccctggacatagactaaagactttacgggtcatgcagagaaaccatgaattcagaa

SEQ ID NO: 379013 - DNA, 548 bp, Homo Sapiens
  misc_feature (41)..(41): n is a, c, g, or t
  misc_feature (97)..(97): n is a, c, g, or t
  misc_feature (318)..(345): n is a, c, g, or t
ggagcactttttctgggttgcccttcctggcttattgaacngggtcattccaaaaagacaaattcgcatcctagctagtagggaaatggaaaactangattatttttggtcataggatttaaaatggtacaaactcccaccaaaaacagggactaattcagattggattcctggggtggctacccccatagaaggccagaaaatattctaaccttccccccacattatctagagaatgccactgatttagttcattgtacaacttattagaacaagtacattttgaaaacccaccactgataaccaacttattagttnnnnnnnnnnnnnnnnnnnnnnnnnnnnctgaactgaacacagcacatgctgacatttcaaaaatgggctgcaatttttattctacttaaatttcctgtgtattgcttggatttcaaaaaaacatgttaacccacgtgttgattataaatataaaatctcgcccctccatgcaacaccacactaagatccactaccccccaactcaatgtataaaatgcttttttggcaat

SEQ ID NO: 379014 - DNA, 475 bp, Homo Sapiens
  misc_feature (380)..(380): n is a, c, g, or t
  misc_feature (398)..(398): n is a, c, g, or t
  misc_feature (429)..(429): n is a, c, g, or t
  misc_feature (439)..(439): n is a, c, g, or t
  misc_feature (462)..(462): n is a, c, g, or t
gagagccagtaacttaatgagtgatgcccttggaaaatgtggtggccaagacagattattgcagggttggccccttggttctttcaatccaggatcttgcttctgacaggtcccagggatggggagaggaccttctggctgagctgggctccatgagaaacgcctgacttccaagagcctttcctccccagatccactttgatggctggagtcatggctatgatttctggatcgacgctgaccacccagacatccaccctgccggctggtgctccaagacagggacatcccctggcagcctcctcttcgggacccaggaggaggcccagctcttgccttcccctggggggcttgttccccttttcagctattagggagcntgccccacattagggacntccaaataacaggttttcaccaccggaagtngcccccattntggggttgcgaaggttttgggcntgttcacagggca

SEQ ID NO: 379015 - DNA, 476 bp, Homo Sapiens
  misc_feature (361)..(361): n is a, c, g, or t
  misc_feature (393)..(393): n is a, c, g, or t
  misc_feature (402)..(402): n is a, c, g, or t
  misc_feature (442)..(442): n is a, c, g, or t
  misc_feature (459)..(459): n is a, c, g, or t
ccaacccctccttatcagttcagtgagggtgaatgagttaatgtcgtgaaagcacttgagttctccaaaacaaagatgttgtgataatattactacagtactttgtgattacaagttagctttgtaaataattaccaatgtgccatatccaatcgtgttctatcttggcctaggagtgttaggatttaccctcatttataagtaagcctgttaaggcactatgggatgttgagccagggaattaatatagccctcctcttcccaccaaataatctctcctctagggttaaatttctaggaatttaaaaacacaatgaggaacctgattagggggcatgggcaaaggatgattttttggggngaatgtaagtgtgtttgagggtattgaatttntggggcttnaatatggctttttaattaggttttgtggattggaagctcntggaaactttccggggnttttttgaatttttctt

SEQ ID NO: 379016 - DNA, 429 bp, Homo Sapiens
  misc_feature (368)..(368): n is a, c, g, or t
  misc_feature (374)..(374): n is a, c, g, or t
  misc_feature (392)..(392): n is a, c, g, or t
  misc_feature (405)..(405): n is a, c, g, or t
ttaggaatggccagagcaaacagttgagatctgtaagttcatatttaggaccaagtttccatgctctgtgtagagactgagaagcgttctgagcctccatcagcagctaaagcgtccactgaataattcattcaggaaacaaggactgagtacctttcatgtgccagattatctcgaaggctctggtgaccttaggatgaacaaaaaattatgctttcacaagtaggaaggaaacgagtatgaatttggggaattgtctgcctttacattataggattgcctctattttctgggtggggagtttaggccttcatggatattgggtgaggagccacaggatccctggaaggggcatggattttaagggntcagcntatggcttactttccccntctgggggaactngctgttttaaagtcgggtaaatgg

SEQ ID NO: 379017 - DNA, 400 bp, Homo Sapiens
  misc_feature (369)..(369): n is a, c, g, or t
cttattgaaagtaataatacagttttattttttccactttataactgcccaagggtcccccaaccagctatatataagaaaaccataacatgaactagggtctttctattcaaaaaagaaatattaaactaacataagcaattctgaaggaagacagtggtaggttttcagatggtttgttaagaattatatgtaaaaggatactaggatattatgttttggatgttttctaagtatctatgaaaattattttttcctaaacgatttcataattgattacttttgacctcagttattttggggggcataatccttttactactctattaaagaagttctacttctaccccatatggaatttgtattttncccatatggcccaaacacacacacataaatt

SEQ ID NO: 379018 - DNA, 417 bp, Homo Sapiens
  misc_feature (26)..(26): n is a, c, g, or t
  misc_feature (104)..(104): n is a, c, g, or t
  misc_feature (114)..(114): n is a, c, g, or t
acacccccccggacataaaccctaanggacctagaaagttagtttaacaaggcccaacattaacattcctaagtttagaggagaaaggaactttaatatggccnttttaaatgnatgcaaggtgaacgattgtgacagtcctcagcccattgtaaatgtagatacccaaaatagaacttgtcttaagggacctatgacctcaacgtatgaaatatgcttttccttaaaattctgaaaagtcttggctctagctgatgctgagaaattggtttctagaaagactatatctcaagtaaaaattatatacaattacaattcagaacacatgagttaaaaatagcatatagcattttatgctttcatataactatggaagttcaaagagtgtttctagaggcaaaactgactcatgaaaac

SEQ ID NO: 379019 - DNA, 441 bp, Homo Sapiens
  misc_feature (346)..(346): n is a, c, g, or t
  misc_feature (370)..(370): n is a, c, g, or t
  misc_feature (390)..(390): n is a, c, g, or t
tcttcccgttgctgtatgtggagcccctctagattgtcagtgatagaaaccacttcaaactggctcagccctaaaatagcgatgattttgtggctcacgtaactgaggattccaatgggcacagctggttgcaggccccgctggacccagctctctgctgggccccaggcatctatgctggcagcttcccacccactgtcagagcctgtccccccggtggtggtctcacaccatctttcaccccttcaactccagggggtgacgcttcctggggcccacctggggtttccttgcggcctttccctgaaaccaccctcggtgaaccaggggttgggttgaccagacntgggaagttggggtttgccttgtnggaagcctgttggaaggganggggagaaggttggtttcccttgtttgggttgggcaaggggcccttttttt

SEQ ID NO: 379020 - DNA, 495 bp, Homo Sapiens
  misc_feature (32)..(32): n is a, c, g, or t
  misc_feature (39)..(39): n is a, c, g, or t
  misc_feature (63)..(63): n is a, c, g, or t
  misc_feature (70)..(70): n is a, c, g, or t
acctcactttaggtcccttttggtataagccnattgggnaaccccttagaattaacctaagantatttcngcaaagcatcctaataaaatccaaattgtgaatcctgggaaatatcctccccaaccttgaatgttaaatcaattccctgaaaatatgaatgccacaattcacccacattccatccccacgggagaaggcagccagtagtagcagagggttggtgcctacagatagcctagagatggcggtacctagataggattctcatagctgaggccagcaaagacacctcttcttgattgtccaagctccaagctgaggttcgaaacacagtcttacatgcagaaatggtgctataggaaaacatatgtccaagttatacacagcttacttacaagcttttggaatctaactttgttataatagggagaatacctctatgatggttaagtttcactgagagttaggcaatcaaaagttgtctacatttgctt

SEQ ID NO: 379021 - DNA, 487 bp, Homo Sapiens
  misc_feature (20)..(20): n is a, c, g, or t
cttgggtgcctgggcccaanccaacttgaacacaatgctttcctcctaggccagggtaataggaaaatgggccccacaataaactgggtgctgggaccccagcaaatatgaacacccatcctcacgtggaaaaaaaccccagcccaagttaataagagcccaaaacaccctacataatgggtcccaagatatgtcaaaatacattcggtggctcccagcacaggcaggagagtcacatcataagaatgctgggccaagaaatatgcaatatgccacaatttcctcttttgcagaacccaggcagaagagtaacatcatctcgatgctgggccctgcaataggtccaaattccttttttgtgggcatggttcagcaaaaagaggagagtaacatattctgagtgctgggctcagcattgtgtcaaaatcctcctattgtgaaggctgaggcagaaaaagagggtcacatcatctaggtcatggggtca

SEQ ID NO: 379022 - DNA, 483 bp, Homo Sapiens
  misc_feature (40)..(40): n is a, c, g, or t
  misc_feature (53)..(53): n is a, c, g, or t
  misc_feature (61)..(61): n is a, c, g, or t
ggaccctcctaaaccccaagggtcctactgcaggccaggngggccgttaaccngaaaaaantaaaaactccccatccccaaatgctcccctaagatggaacaaattggttaccttcctcccagaaggtcctaatccaaggttaaacaaaataggtaagttccgtggagttagaatgccatccttcccctggagttccagaggtatttgggatgacccaaaggagtctgctggacagtatgtgtgttttacaaaatggcccccacagtgattaaagaccagagacttatatctctgcatttgtcaagctggaacagtctttagtgaacacagcttacctcttttaaaactgctggtttctactgaaggaaacatggatgacatttagtgttctgtgactggtctggcaccctacttttgttgacaaagatgggaaggggtctaaaagtcatgtcacttataaaagaacttgggaggaacttttt

SEQ ID NO: 379023 - DNA, 451 bp, Homo Sapiens
  misc_feature (39)..(39): n is a, c, g, or t
  misc_feature (43)..(43): n is a, c, g, or t
  misc_feature (70)..(70): n is a, c, g, or t
  misc_feature (396)..(396): n is a, c, g, or t
  misc_feature (407)..(407): n is a, c, g, or t
  misc_feature (440)..(440): n is a, c, g, or t
aaggatcccatgtgagaagctcactggggcccctggggnactnacgggcagctctcgttcctcacctgtnccatccctcttgcagttcaacagcatgatcctttactgtgtgcccaagctgcggctcatgggccagaagttcagcgtccgggagaagatggacatctcaggcctccaggtgcaggatatcgtcaagccaaacacagcacatacattcatcataacgggaagaaaaaggtccctgggagctgcagacgcgatcatccagggccaccatcgagaagcacaaacagaacagcgaaacctttcaaggcttttggtgggcgccttttagccagggattgagggaccccagcctcttttccagacattgcctattcacggaggcaccagccnttttgggagcntgttggttgaccaccgaaggcagtttcgggttncagcagggttt

SEQ ID NO: 379024 - DNA, 446 bp, Homo Sapiens
  misc_feature (16)..(16): n is a, c, g, or t
  misc_feature (22)..(22): n is a, c, g, or t
attatggtatcccccntgcccnggcccaactggtttggcctcgggggaaccccggttccctacacctggaaaccccataggcaatcccgcctcaccccggaattatccccgcccgaatggaagccaagagattccaggatgtgtaagagaatttatgaaagccatttggattacccaagaaatgtgaagtataaagatcaagaatgattattacaaacactgatggtaaagaggtgtttcgaagtcgatgcaaaaaatgagttgcttatttcagtctctctttgatatatctgcctttttagtgctgactctatcatgtattcactatttgattttcagtgaatcacattttttaaagcttttaatctgtttcctcaaaaaatatattttttaaaaatatttactcaggattgttgtgagaataaaattgattcgattgatatttc

SEQ ID NO: 379025 - DNA, 473 bp, Homo Sapiens
  misc_feature (319)..(352): n is a, c, g, or t
aaccctgttgggccaagggtcaaagtagatttatcctgaccttggttcaaataacctaaggcctccctcaggtggtaaccccagtcccctccccaatcattatcctctggagggtagaaattatgcctaacccttgagaagacagaaaagtaatgtctgtgatgagagcaaagtatatcacactgaatgcccatgttcaataattaagggcaggaggagacaatcctatttttctgcatctgttacagtcactccctggaactgaactggccaaaattgacatgatcatattccagaatctctcacccttcctgatttnnnnnnnnnnnnnnnnnnnnnnnnnnnnnnnnnnctatgattgcaggaatgtcaaaagaagtcgtctcccaatctatcaaagaatgaatagtctagtatagggccgatttaggggttctgaaggacagaggtccaagtagcctcttcaaaaaaaa

SEQ ID NO: 379026 - DNA, 487 bp, Homo Sapiens
aatgaatttccactaaaattaattgtcactttcaaaacgtagcttagcaaagctgttactaaactggagagatcctttaatacatagaaatgtcaaaaaaatcaaataagtattccctaaacgatgtgagtgataagcaaaagtcattgcaaagtcagtatttttttgttcatcattgctactgaaattcagagttccattgtatatgtgtgtccttgagtgtacccttattagaatatcccaatacaatagcttttggatattctatgcttttgtgtccttcagaaatcatgagattgaaggaatctgtgttaaatgtttttgttttggttgctgcctgaaaaaagttaccaactcatttagtgaaatgcaagatttctttatgaaaatttcaatttctaatatcgaagtcagataatttttcttgaacttttattttggaacagatgtttatttcggatctattaaagtgtcaactttgcattat

SEQ ID NO: 379027 - DNA, 515 bp, Homo Sapiens
  misc_feature (50)..(50): n is a, c, g, or t
  misc_feature (160)..(160): n is a, c, g, or t
ggaagggatcagggagccaaaggtgactgggaagctaaagcaacgatcanctaaattacagtcctccaagaaagttgctttcctcaggcagaatgcccctcccaagggcacagacacacaaacaccggctgtgttatcccccatccaaagactcaggccnaccctgaaacctaaggaccatcatcagccccttggaagggccaagggggttgagaagcagcagttgccagagcagccttttgagaaagctgccttccagaaacagaatgatacccccaagggccctcagcctcccactgtgtctcccatccgttccagccgccccccaccagcaaagaggaagaaatctcagtccaggggcaacagccagctgctgctatcttagatggttgaaaactagacgggtggctcactgccattgtcaccaggttggaactcttgcctctgtgaggatgccttctctactgtgcatacccatgaaatttaatacacattttaaaacctctgaaaaaaaa

SEQ ID NO: 379028 - DNA, 462 bp, Homo Sapiens
  misc_feature (60)..(60): n is a, c, g, or t
  misc_feature (72)..(72): n is a, c, g, or t
  misc_feature (84)..(84): n is a, c, g, or t
  misc_feature (90)..(90): n is a, c, g, or t
caccctaagtgtatgtgcttttcagggtggttgagagaggagagaagcccagtgcagacngggacacacacngaaacagagacnggagtngataacccatcccacggggctgctgactaaattttcataaaagcaaacccctattcaggcctattcaacatgggggaaccggctctctcccctgagaggagagtgagtgtgatgctgtcctaacagtgttgaaatgggtcataactggcctgtgctcagtgaagcaggcaaaagacggatgatgcacctcaacgtaaattctagccaaaaagcctaaaataactaaaaagagaccaacattgaaacaggagatcaaaaaatatcttaaggcaaatgaaaatggagccacaacataccaaaatgatgggatgcagcaaaagcaggtctaagaaggaatttaatagcaataaatgcctacatgaagaaaaaaaa

SEQ ID NO: 379029 - DNA, 458 bp, Homo Sapiens
  misc_feature (427)..(427): n is a, c, g, or t
  misc_feature (441)..(441): n is a, c, g, or t
aaacagaatacaagaaagccttattgatctagaagtttcagctgatcctactgccacactcacagcagcagaagaaagaaaggagaaggtgccaagtccacacctcagtcacctagtggttttgacatctggggatacgctgtatgggttggcagaaagagtggtagccacggaatccttggtattcttggctgaacagtttgagttccttcagccacatctggatgctgtgatgcctgcagtcaaaaagccctttcttcagcagttctattctcagacagtctcaaccgccagtgaactacggaaaccaatttactggattgtaggctgggtaaagcccttgattatggaacagatgctggcttctcatgggctaatgtggaaatggggatgttaaaagaaaattattgtccacaggcaccagcanttttgtaggttgcnctttttaagggattttg

SEQ ID NO: 379030 - DNA, 459 bp, Homo Sapiens
  misc_feature (47)..(47): n is a, c, g, or t
  misc_feature (73)..(73): n is a, c, g, or t
  misc_feature (75)..(93): n is a, c, g, or t
ccaaccccggaaaaaggaccgggcggaacccccccaagggattccanaaccccaaccatccaggacaccgaangnnnnnnnnnnnnnnnnnnngggcggcatgaaccatggaaagaaacctccccccgcctttttaaaagagcaacctagaagtatttacctttttgaaaatagagtaacccatttgttaaactgtataaacccattgaagatgttttgggtataaaagggaatttcccataataattacatagtaatcttttagagcccaaagttatgaagaagatcaggatttgggaaaattgtggtcaatatttgattttccttttctgtttgatagccttatctaaattcccctagcttgaatgtagtaaatatgagtgtgtaaaaatgtgtatctaattcacctcttgggggaggtttaatgtaactataaataaaaattctttcccccaggtt

SEQ ID NO: 379031 - DNA, 432 bp, Homo Sapiens
aaataaccagtatctttactgaatcagatgtttcattaactgttagcagttatttcgagttatttatatatcacagaattttgaacctaaagatcatcctagctgaatttcctttatattaaagaagaggagaaaatcttaatactaagtatgtgtgagcctggagctgccatggagcatgtagagagagtctcctagttgataccaactcaggaaagcagaatcaagcaataaagagacattttgggcctgatgacatcatttcagcacctggatccagcgatgcctaaagatgtgactcctagacttttcacttacatgagccaaaacggttcctttgcatcaataaatcgctctgtgatgcattttataatgtacaaccaagaatctcaatatttattattttgcattaaatatcagtaagtttgatat

SEQ ID NO: 379032 - DNA, 467 bp, Homo Sapiens
  misc_feature (15)..(15): n is a, c, g, or t
  misc_feature (99)..(99): n is a, c, g, or t
  misc_feature (114)..(189): n is a, c, g, or t
ctggggactaacaantgtgtacccatccaggccccagccaaatcccttttggtactttgggtaagtgaagaagagtttccactatgttgcccccagganggtcctcaaactccnnnnnnnnnnnnnnnnnnnnnnnnnnnnnnnnnnnnnnnnnnnnnnnnnnnnnnnnnnnnnnnnnnnnnnnnnnnntgcaattggttttgactgcacaagaaaaaacataaaaaggttccatgaaccttttataacctcttataattgttacggttttatttctttcctcaattttctatgtccattcagttttagggccttaaaaaaatagcagagatagtgtaaacctgtctaacaaatagacccagaaaaatatctaaattaaattcagaaaatgtttctattttattttaccccaaattttaaactatcttcatttaccacagattactaatgccctgtgaacttgaaaa

SEQ ID NO: 379033 - DNA, 508 bp, Homo Sapiens
  misc_feature (20)..(20): n is a, c, g, or t
  misc_feature (83)..(83): n is a, c, g, or t
ctgccacacccacttcaaanagccatggtaaaccagttttagccatttaaccattttccagaagagcaatttccaaggaaaanaccattggtaccaccatagccaagtcctgaaagagttaatatggtaacaaaggctgtgtgtcctgcctgaggaaggccagctgtctgtgccaggcaatgccattcaggggcagtagaactctagtggtatagacagagactgggtctcatgagtctgtgtcttagctctgtgggctgagaaacacaatcttgtcagtactaccagagggggcagattcacactaagcagactcataagagatggatgtacacatcagaatgtcagtttgttgacatgcaatgagaactgtaacagataaaccatgtatttgtgttcacagatcaatgcattttcttccactaggaaaataaatctaaatgaggcatgagtttattagcatgactgaggtcaggaggtcaagtgattagagtggaaggaacaaaag

SEQ ID NO: 379034 - DNA, 427 bp, Homo Sapiens
  misc_feature (245)..(281): n is a, c, g, or t
caggggggaaccattggtttgcctcaaagttggcacccagcagtgagcctgcaaagctggatttgaatgtcaaaatgtcaatccgtttgaattcaaaagctcacatctgttagaaagtgcccacatctgcctgttaagctgatatttctgcctgttaagctggtatttctaatgatgacccaaagtctagagctgcgttaccttcagtgtccagctgttcaagatgttcactttaggaatagttnnnnnnnnnnnnnnnnnnnnnnnnnnnnnnnnnnnnnaatacgtgctttttaacagtgatgaaagaattgagtaaccatccgggaaataaataaataaataatacacgttatttcccagctcacaccatttgtcaaaatgaataccagatggataaagaaggaaatgaaatcataaaggtact

SEQ ID NO: 379035 - DNA, 189 bp, Homo Sapiens
  misc_feature (47)..(47): n is a, c, g, or t
ccgggaaaaatccccccccgtaaagggcccctggttgtggaaccccngattgtctgactcctaagtcacctttcaaaagcaactcctatggggaatcctgttttgtttttggattacacagatgttgtctgtgttttaaaagttttaccacagaataaataagaaagaaaatacaggcccactcacgcc

SEQ ID NO: 379036 - DNA, 471 bp, Homo Sapiens
  misc_feature (25)..(25): n is a, c, g, or t
  misc_feature (40)..(40): n is a, c, g, or t
  misc_feature (48)..(48): n is a, c, g, or t
  misc_feature (56)..(56): n is a, c, g, or t
  misc_feature (79)..(79): n is a, c, g, or t
  misc_feature (96)..(96): n is a, c, g, or t
  misc_feature (109)..(109): n is a, c, g, or t
  misc_feature (451)..(451): n is a, c, g, or t
gccccttctacccccaaaagccttnggaaagccaaaattnccccaatnccccgggngggggcaacttggcaaacatcangggtccacaaaaggggnccaacccctaccnatttcagcaaaatgtcctcccctatgtccaattaactagggggaactggcctaactcccatacgctttttaaaagggttatttacatttaaaatgaaattcaacagcttttcctacattcagaagcttctataaacagaggctgcggccctgggaagactgtggttctaccactcctgtttctaacaggaatcaagtactatttccttttgtaccactcagcagcacacactggacatcattgttgaagagacagagattttcttgtaaaagttgatgtatctattatccccaagaaaaagagaagctcccattctcaggccaccttcaaaacaaggcaaanaaaaaccttcacaaataact

SEQ ID NO: 379037 - DNA, 413 bp, Homo Sapiens
  misc_feature (56)..(56): n is a, c, g, or t
  misc_feature (72)..(72): n is a, c, g, or t
  misc_feature (332)..(332): n is a, c, g, or t
  misc_feature (339)..(339): n is a, c, g, or t
  misc_feature (344)..(344): n is a, c, g, or t
  misc_feature (386)..(386): n is a, c, g, or t
  misc_feature (395)..(395): n is a, c, g, or t
cggcagccgggaagcgagaagtctctggcttctctgcgtccaggtcggcgcgcganacccggaagccgcttnggccttcccggaagcggcgccctctagcgttctcgagtcgcatgaggcggctgctgccctcgcggtgcggaagggcgagctgcgcgttggcctgggctccttccgaatggtggcgcctctgagccagttttcgaggaggagtcggaggaggagcctgaatgtttggagatagacttcaagtcccggaccttatccgtgcgccgcttcggtttgcaggtgacctttgcgtgcgggcgcccctttctgattgaccctgatgnagctgtnagctntgaatggccccttcctttcgggaatgattaaggggtgacggnttggccggngcttctttcgaatgggcc

SEQ ID NO: 379038 - DNA, 552 bp, Homo Sapiens
  misc_feature (39)..(39): n is a, c, g, or t
  misc_feature (55)..(69): n is a, c, g, or t
  misc_feature (87)..(87): n is a, c, g, or t
  misc_feature (93)..(93): n is a, c, g, or t
  misc_feature (113)..(113): n is a, c, g, or t
  misc_feature (140)..(140): n is a, c, g, or t
  misc_feature (162)..(162): n is a, c, g, or t
  misc_feature (178)..(178): n is a, c, g, or t
aaaaaccccaaaagtccccccggggaatcgggtaaaaanactaatcccccggtgnnnnnnnnnnnnnnnggggggctctgtttaaanacgaantgaaatctctgttccttggnctcccctggcccccccttgtcccccanttcctgcccaactcctgcctantgtcccccctggggancaatttcccttaaatacaaacacacgcacttgaaacccttgtctcccaggtctgccccctggaaaaatccccactccaataatgccacccattccattccttccaagtgtttgttggcctctcctacccatgtacccatgcactgtggttggagcctagggatggagcagtaacagtagtaggtatggctcacatctctgtgtcaattttggtgtgtttggctataaaagagagaaattaaacagtatcttatcatctcactttggcgggaagtcagagggctctggaactggttgctatagctgctcagtggtgtaattagggtcctagttctttccatctctctgcttggctgtgtttggggttggtttcat

SEQ ID NO: 379039 - DNA, 337 bp, Homo Sapiens
  misc_feature (29)..(29): n is a, c, g, or t
  misc_feature (124)..(124): n is a, c, g, or t
caggtgggtaattttaaaggcaccccatntcaacaatagccataaaatgtaaatagtcctaaataccccaattaaagggctgatattatccagactggccagatatgagagagttaaaaaaaanaagacaactataacctgtttttaagaaatcccactttaagtataagaacacaaattggttgaaagtaaaagtatagaaaagatacatcatggtaacaaagaaggataagatataccatgaccaaaacaaagctggatgacctgggcatggtggcatgggcctgtagtcccacctactcaggacactgagggcagaagggatcgccttcagccc

SEQ ID NO: 379040 - DNA, 429 bp, Homo Sapiens
  misc_feature (16)..(16): n is a, c, g, or t
  misc_feature (101)..(101): n is a, c, g, or t
aacccacctaactagnaaacatatgaaatgaatttaaacaggaaggcaccgtcctattctgttacagtcaaaccttactttgggtttttatttttaaacanctaatttgagaaatagatgtatatttacccacatacattggttctggaaaacttaaaaaaagttatatcccagggtagaaagttgtcctgggcaaagtctctgagggtggaagcagaaccagccatcaatccttttttccaccatctgggaggtggaatgtctatctacgctgggggctcagtggacctgagttctcggtgaggtacacctttgccatacagtactgtttatttctatttgatttggattttagaatatgaagtggcatctgaatagctagagtttagtagtttccagcgtaggaaagaaaatccacacgagatcctg

SEQ ID NO: 379041 - DNA, 522 bp, Homo Sapiens
  misc_feature (392)..(392): n is a, c, g, or t
  misc_feature (398)..(398): n is a, c, g, or t
  misc_feature (421)..(421): n is a, c, g, or t
  misc_feature (431)..(431): n is a, c, g, or t
  misc_feature (441)..(441): n is a, c, g, or t
  misc_feature (457)..(457): n is a, c, g, or t
  misc_feature (467)..(467): n is a, c, g, or t
  misc_feature (485)..(485): n is a, c, g, or t
  misc_feature (491)..(491): n is a, c, g, or t
  misc_feature (510)..(510): n is a, c, g, or t
aagcaacaaggacataactcacaaaaaacttctaaatgaagagcggaagacaaaggagtatggggagttagagaagacagaaatcaacatactgcaactcaggaatgacctcagtcaacctgcacagatggaagagtcagctatgacaggtggagggagatgaccctggaaggtcaaaggtctgagacactggcctcccctcttcccaggactcacttaaggataagtatcagtaatctgacagcctccactgccacatcatacttctctgtccatgaccatgggaaaccatccggtcctgcagaaaggagaaagtcacttcaatattcttcatttacacccattccaaacatttctgtttctctttaggattcagaggacttcttaaaggngagttncctaccgtggagggcaggatgcnttggggttangcccaggacntttttaggaggctttnaggggggttnggaaggtttaccaggttngggggnatttgggggaccccccggnccaaggggcctt

SEQ ID NO: 379042 - DNA, 436 bp, Homo Sapiens
  misc_feature (57)..(57): n is a, c, g, or t
  misc_feature (416)..(416): n is a, c, g, or t
ccaaggtcggtcctttccccataattcctaaaactggaaatacccattcccattgtnataattaacatcctaggttaaaaattccattgtccttaatactgccatcttgaagaagagtcgttaagtgtttggagttctcattttaactcctccagtgctggcacattcagtgcatccattgccagcaatggatttggggctaggaaaatatacatccccagtacagaggaactcaggaagaatgggcattctcccaacagtggtggtccatctctgtgcatggatgggtgtgtgtgctcccttttgtaagtttttggagggagtttagggatatgttgagaagtgctttgtcgtggaggaacaggcggcccagcaatggaatgaaggtccacttcttgtgtcaatggtggtgatgncagatgccttcttgtgccgt

SEQ ID NO: 379043 - DNA, 203 bp, Homo Sapiens
catatggaagacaaagtggattaagagagaggactggcattgggtttgcccaatcctctgcagtttagccttagacatgagggccgaaccctaagcaaagtctggtaattgattatggtgttttaaaaggtattaatctttaggatgaagtccaaacaggatgaaaatttctacaaatgtttgtttcctatgtcatgtgtgag

SEQ ID NO: 379044 - DNA, 494 bp, Homo Sapiens
  misc_feature (400)..(400): n is a, c, g, or t
  misc_feature (405)..(405): n is a, c, g, or t
  misc_feature (440)..(440): n is a, c, g, or t
  misc_feature (448)..(448): n is a, c, g, or t
  misc_feature (456)..(456): n is a, c, g, or t
  misc_feature (466)..(466): n is a, c, g, or t
  misc_feature (475)..(475): n is a, c, g, or t
gaagaaggagatgactcagccagttctgctacacagctatttctagccatgaatgtattaggtggggcagcaaaaaaattaattttttaaaaaacacatgtgcctccatagaacctgagggtatctactgaattagaagttcataaatatagtaaatttttgtaattataacccatgtatcaagaagagagtagattacagtcagttttcaaaggaggcaagggcaaatataatacatttcagaaatgcttttcaacagtgggctaaagctgcttccgtttgacccttaaaagactaaggcttccattatttgaaaattttacttactgtttataaaagcaaagagtagggacatacagtgtgtgtgtcagggttttcaaatgtggccctctcttctttncatcntttaggcttgggaatccaggtcacttgaactttgnaatcttantatcccgncccctcgggnatggtttgnacccttaaaaaaaggtcaa

SEQ ID NO: 379045 - DNA, 502 bp, Homo Sapiens
atgtgtgatgctcttgcacctttccttgctccttccttcaaaatgccctcaggaactgaaatgggctgaaattctggccccgtcttcttcttatgaaagctaatttcttagacacagggcctctctcagcctccttcctcttctgagttccaatcctgtatggtgcacgagaatcacagagatagaatggcattatgcctgttagaaaaaggagtcactagggaaagagcagcctgcctgggttgcagagccagggggatgagctggatcatactccggcttcctcacgcctgccctttccacgaccccacagtgggactgtcaccccacctgcatgtgcgttccttgagagcaggaagaggctggacacttcacgaacatctaatgctctgtgagattcacaagactacgcacagactcctctttttaaaggctatttctttttcagtgaaccataaataagatatttcagaggctcttaccccagaaaatatatgtaaat

SEQ ID NO: 379046 - DNA, 519 bp, Homo Sapiens
  misc_feature (426)..(426): n is a, c, g, or t
  misc_feature (473)..(473): n is a, c, g, or t
tgaaatgacattgaaatctggggacctaaagtgctatgacctactcttgttagaatggggaggggtgtatgagactcagataattataataaatagagttctggcccagatttaactcacagtgtgtctctgttatcagagtcctttctctggttcctagttttgtaattgggaatcaacatacatggtagttgggcagaattctcaacttgggctccttgaccagtttggttaagtgctttcctagtgggggaagatcaagtgggaagcctctaaaactgtaccttccctcaccttgggaagggacagcatttcttctagtttggggattaacacatattctggggtccacatgtttggctttttctggcccataagtccacagccagcaccactatctgagggacttacagagtgtttgatccnctaatacggggttcttgagtaatatttgtctcttaaccaggagtcgnactttacagggaaagatgtttaggcgtggggccaaagttcatggat

SEQ ID NO: 379047 - DNA, 522 bp, Homo Sapiens
  misc_feature (391)..(391): n is a, c, g, or t
  misc_feature (434)..(434): n is a, c, g, or t
  misc_feature (486)..(486): n is a, c, g, or t
  misc_feature (497)..(497): n is a, c, g, or t
  misc_feature (508)..(508): n is a, c, g, or t
aaacatgttcctcaaacccaattaatgtcgatgaccagcaatgaccaacacacttccacccctctgtgttttaagaaatgtcattcatctctatggaaaagagaacaaacaagaagcataaaggtatttttgaagtatactgttatgaggtacttggctagtaatttgcagcctaggtacacagcataccttttagcacggctatttatctctcagggagaatgctgccgtacttacgataaagggctctgttgggacctcttcatcaataggcaaacctttaaggcacagcacatctcataaatagggagttccactaacacagactttcaaaagggtaggaactttggataatttcaaaaataggaggctattatttaaggtgtttccnggcagttcccttcccttaaaggccgttcgtattatttcccaantggccagaggtccttccggggccaacttggacgggtttatttgggattattnggccggggggnaggcttatttncaggtattcttggg

SEQ ID NO: 379048 - DNA, 490 bp, Homo Sapiens
  misc_feature (363)..(363): n is a, c, g, or t
  misc_feature (383)..(383): n is a, c, g, or t
  misc_feature (434)..(434): n is a, c, g, or t
  misc_feature (442)..(442): n is a, c, g, or t
  misc_feature (448)..(448): n is a, c, g, or t
  misc_feature (459)..(459): n is a, c, g, or t
  misc_feature (464)..(464): n is a, c, g, or t
  misc_feature (478)..(478): n is a, c, g, or t
tagtgtacatccttagaatttgattagaatgattctttgtaacaaaacaaaaatccttagcatcatattcttccatgactgacttaacatggccttcaaatgcttttaagctgtctcattcagctgttgaaagctttctatcacaggcactctgcctatctaagccaagaaaggcaaaaatgtgtcattttcccgggtaactctggaattactgggtgtgggctaaccgagtctaagggtaacgttcatcatccccgcttcctggggattcacacccttgtgtaaatctccttcctttgagtgtgggggcagggatatgtggacttggcttcttaaccaacagagtacaggcaaagggtaatnggggatgctcccgggatttncacaacattggtaatggtctggtctttgctagggaatactggttttccctngctggggnctttgnaaaaataaggnggccntttgtaaggccccnttgggggggagg

SEQ ID NO: 379049 - DNA, 479 bp, Homo Sapiens
  misc_feature (12)..(12): n is a, c, g, or t
  misc_feature (95)..(95): n is a, c, g, or t
ttgcctgtaggnagataatgagcaaaatataatatccaagtgaattcctcaaggaaataggagattttgactgagaccctagggggttatttgtnagtgagagaaaaaatgggcattcctaagtggaaggaacaaaaagaacacataaccccaaatgggaatcatctgtgggaaagataaagtaaagagaccagtctaactagaacagactattatgtcccaaatggttggacatacatccatataattaggtggggttagattatagaaggccttagacattagtttgaggagttgaggcaggattccaaccctggagctgtatatattccagagtactacagcaatactattttgtggctggaaaagaccttagaggtcatctaagtgaacttcattgtatacatgaggacacagaagcctagggaaataagcctctctctgaggagagagagtattccagacaaactcaaggccct

SEQ ID NO: 379050 - DNA, 413 bp, Homo Sapiens
  misc_feature (40)..(40): n is a, c, g, or t
actcaaaattaacacagttccactgtgttaacacagttcnactgggttccacaaaacaccccatcactcaaattcctgcttcattgtgtgaacaacttcccggcttcagggacatcacggtcaggaggtctgtgaaagaggtctgtgggtttctggtccctggcactaacagccagatgcaaactggaagcgttccctggtagcctctgagtggccccagctgtgggatccccagtatctcaggcaccacagaggcagagagggggacaggaacagaaacagagttatgcatttctttccacattaaaaaaaagaaattatacttttagaggcatgctgagcccaagatctacttcctcacctgtctttcacgacctgcccaccaaaaaaatctgaagaaaagctggctttaa

SEQ ID NO: 379051 - DNA, 518 bp, Homo Sapiens
  misc_feature (465)..(465): n is a, c, g, or t
  misc_feature (498)..(498): n is a, c, g, or t
  misc_feature (508)..(508): n is a, c, g, or t
tgaatttaggctccagttatattcactggagagcataatcccacacgggttatttataaatacagagcctctgattggacggtctcctgccaagaactagtaatacccttgttttaaaatcttcacaaggtaaaacttaaaaagccaaccaaacaaattgctctccattctacttttaattgggccaaacagcatatgctacagtagtaacatgtttttcggagagtgtaaaaaactctgtttacatttgcctcctccgtgggttgatcgaaaatgtataaaactgactgcttctcgccagcctcagacaaggaagagtgagttgctgggtactcgctactcttttacttcttttgtaaaagtattggactcttgggaagggctacagtatacaaaggtcttcaacatgttttttaaaaaggaataagggggcaggcgactgcccggctggaattcacaaaccgntttttgtggattattttgtggcccggggtttantttcacggantccggaccgg

SEQ ID NO: 379052 - DNA, 531 bp, Homo Sapiens
  misc_feature (360)..(370): n is a, c, g, or t
  misc_feature (405)..(443): n is a, c, g, or t
accccatggtaaaacatattagcatagctaccttcaaatgacatgggttccctgactggcatttgtgtagtagagatgttcaatgattgaaacaattttagggccttgaatatcatgatagccttactactttaaaaaacaagaatttgacattgccagactaatattcctgtatggaattcactaaaagaacattctcctttagaatgaaaaatgactctgcaaagtagtcttttaatatggttagttcttctgtgtcttactagggtaagaatttcagtcatcaaaagggaaaggaaattttctaaataatggattatttcaacacaggaaagccagatattttatctggcaaacagnnnnnnnnnnncccctgcaatttcatctgtaaaaaacaggtaaagnnnnnnnnnnnnnnnnnnnnnnnnnnnnnnnnnnnnnnncattctgagcataaaggagttatttttgttacttatgcccttgatagaatcacaaccagttgcctgatggaatataatccacagctac

SEQ ID NO: 379053 - DNA, 552 bp, Homo Sapiens
  misc_feature (38)..(38): n is a, c, g, or t
  misc_feature (48)..(48): n is a, c, g, or t
  misc_feature (62)..(62): n is a, c, g, or t
  misc_feature (141)..(141): n is a, c, g, or t
  misc_feature (183)..(183): n is a, c, g, or t
ctcaggttcctgccttcccaaggaagtcctcaaccctngacccatatnatgaatagagactnaaggaagaggtattgggaactcaactgattcctcaggcaggggagtgtcagaagaaatggggaagaggaactagggatntcagtttcatccctggtcatgattcacagaaatgagtgcagngggaagacaaagtcagatgcccagactgcagtgttggggaaacaggaggcccattgaagtttaagattgcctaagaaaaggatggagggtaaaaacattgaagagtttccagtgagagtctattttctcccaaataggagaaaagcttatggagataccaacagaccttatctgaaacactctgagggttccatcttgctcttttccacattcttcatattttctaggtatctctggaggcataagagaacacttttctagcttttttgggtggtttcagctaccagctatcactacaatccccagccataatttcagatcttccatcctgtcaactttcttcaaaacacaaaaataactcctttctct

SEQ ID NO: 379054 - DNA, 411 bp, Homo Sapiens
  misc_feature (360)..(360): n is a, c, g, or t
  misc_feature (389)..(389): n is a, c, g, or t
tctactcctgtgctggctggtgtgtggtaacattcatcctgggagtatgtgaccgtcacaatgataatatcatgctgacaaagtcgggccacatgtttcatattgactttggaaaattcttaggtcatgcacaaacatttggagggataaaaagggaccgagctcctttcatttttacttcagagatggaatactttattacagagggtgggaaaaacccacagcattttcaagattttgtgggacctttgctgtcgtgcttataatattatcagaaagcacagccaactgctcttggaacctgctgggaaatgatgctgtatgcagggactgcctgagctaagtgggatttcaagaccnggaatatgttgtataattaatctttcgtnccaccaggacacagacccgggg

SEQ ID NO: 379055 - DNA, 508 bp, Homo Sapiens
  misc_feature (24)..(24): n is a, c, g, or t
cccagcacgacggcagaggaaggnctgtgtcccaggtgtctctgatgtgcctgcccctggggctgagccgctccctaggatacacaaacaaacaaaagaaagaaataaagggtaatggagctgagatggatccaaaactaatctgaaaaggcagttttcattgctctgagaaggctgctggctcattgatttctattctttcatgcaactctctaaaacaatcatctccaaagaacctatgtgctctactccaactgaatcaaaactgatcagcacttagtgagatgtgacctaataaaagccctacgtattcagacagattcttattcgtgggagtcatttcttcagattagtctgctgctaagaagagctaatttgtgccccatacagaaactcctgaataactgataatgcaacagtcatgacaaatgcttcaaatacagagtcaatatacctttgttgattggattagatgacctaaaatattacaagtgacatgattctaaaa

SEQ ID NO: 379056 - DNA, 459 bp, Homo Sapiens
  misc_feature (34)..(34): n is a, c, g, or t
tcccagcgaagccatccacagttccaacttagcntctttgtgccacctcatggcaacccctgaagggtgttggaaaccaccccgtagttaatggacccaacagagaacccactgctcccaggcctcatatcctcctcctcactcaatcctattgtccatacaaaaatcagtccctagcatatgcatatagtcggaaaaggaagaaatatttttagtagccttttcagataattttggatattctttttttaaaactctaccaacattcaacaagtggtaattttttaaaaaaattattacaatgtgaaaaaataaaatcatgttagtgaattgttcacatgcagttacattaagatctattgacctaccttgtactttgagtggatcttttacttatgcatgattttttcttagcctacattgctcatttagaaaatattagtaaatgcgttatgcaga

SEQ ID NO: 379057 - DNA, 385 bp, Homo Sapiens
  misc_feature (89)..(89): n is a, c, g, or t
  misc_feature (344)..(344): n is a, c, g, or t
  misc_feature (371)..(371): n is a, c, g, or t
ttttttttaatctgtgagtgtgtagcagtgaagaatacaatgactattggtataacttggtaccactgtctagattcatgcgaagtcancagttcaacttatcttttttttgcatctcatggaacccctgaagggtgttggaaacctccccgtagttaatggaccaacagagaaccactgtcctaaagaaaataaaaatcacaaaatagctttgtatggcctagagaacataatatcctcattctagccacctcttaaaagaagcatgtctggggattatagggcgtgacacctggctccagggcctcatatcttcttcttcacttcaatctattgtcatacanaaatcagtcctaggcatatggcatatnggtcgggaaaaggg

SEQ ID NO: 379058 - DNA, 487 bp, Homo Sapiens
  misc_feature (92)..(92): n is a, c, g, or t
  misc_feature (105)..(137): n is a, c, g, or t
  misc_feature (175)..(243): n is a, c, g, or t
  misc_feature (421)..(421): n is a, c, g, or t
  misc_feature (429)..(429): n is a, c, g, or t
  misc_feature (465)..(465): n is a, c, g, or t
taagagacagggtcttcttccatcgcccgggcaggagtgcagtgggtgccatcatggctttgtgggtaggccttgaagctcttggggctcangcagtcctttcannnnnnnnnnnnnnnnnnnnnnnnnnnnnnnnntgcaccaccatacctggttaactttttaatttaaattnnnnnnnnnnnnnnnnnnnnnnnnnnnnnnnnnnnnnnnnnnnnnnnnnnnnnnnnnnnnnnnnnnnnncgccttggccttcttcaaagcagtagggaatacaagcatggggccaccgtgcttgaatgggatttaggattcataggagggggcaaaaagatccatgagggaagtttttgttttcttctgaattttgaagttggctggtaacatttgcagggtttttcttagttttaggaggggatgntccccgtntcacttgtttaaggaggaggttgatgcccggggggnaacaggtgggggaagggacccc

SEQ ID NO: 379059 - DNA, 462 bp, Homo Sapiens
  misc_feature (19)..(19): n is a, c, g, or t
  misc_feature (61)..(128): n is a, c, g, or t
  misc_feature (166)..(264): n is a, c, g, or t
  misc_feature (391)..(391): n is a, c, g, or t
  misc_feature (399)..(399): n is a, c, g, or t
  misc_feature (411)..(411): n is a, c, g, or t
  misc_feature (429)..(429): n is a, c, g, or t
  misc_feature (434)..(434): n is a, c, g, or t
  misc_feature (449)..(449): n is a, c, g, or t
taagagacagggcttcttncatcgcccgggcaggagtcagtggtccatcatggcttgtggnnnnnnnnnnnnnnnnnnnnnnnnnnnnnnnnnnnnnnnnnnnnnnnnnnnnnnnnnnnnnnnnnnnntgcaccaccatacctggttaactttttaatttaaattnnnnnnnnnnnnnnnnnnnnnnnnnnnnnnnnnnnnnnnnnnnnnnnnnnnnnnnnnnnnnnnnnnnnnnnnnnnnnnnnnnnnnnnnnnnnnnnnnnnagcatgggccaccgtgctgaatggatttagattcatagaggggcaaaaagatcatgaggaagtttgtttctctgattttgaagttgctgtacattgccaggctttctagtttaggagggatgctccngtcacttntgagaagaggtnatgcccgggaaacaggtnggganggacccaatgtgttngcgcaggactggc

SEQ ID NO: 379060 - DNA, 423 bp, Homo Sapiens
ggaaaaggcctaaccaaaatatgggcctgcccttaaagcctcccctgtgaaattgaagttaatcctgaaaaaataccctgtaattaatgaaaggcaataatttgaagtggctgtcccactgtgatctggttatttggagctttacataaaacaggtggttcttccatctcattgacatttcttattatccagaattcaccatcctttttctatggctcatcatatgcaggccatcacagacagggccctatcctatggtttgcccgagtttatttggtttttcatttacattgtggtcttttctcttagacactccaagtttgcatgtttttggactttatcaaggctcttgctatatggttatgtgtttatttacactgggaataattcccaaaaggctttgcaatagctaattgtatttgt

SEQ ID NO: 379061 - DNA, 516 bp, Homo Sapiens
  misc_feature (380)..(380): n is a, c, g, or t
  misc_feature (395)..(395): n is a, c, g, or t
  misc_feature (410)..(410): n is a, c, g, or t
  misc_feature (431)..(431): n is a, c, g, or t
tttggaaatgtcttgacaccctgtactgttttgcctgtgaaattgtattctgatgccaggaatgttctatcaggcataattgattctcatgaaaacttaaaagaatttaaaggtgacctcattaaagtacttgtgtggatacttgttcaatactgctccaaaaggcctggcatgaaagagaatgttcacaacactgaaaataaagggaaagcacctctaatgttgcctgctttgaacactttgccacctcccaaatccccagaagacatagacagtttaaattcagaaacttttaatgactggtctgatgataatatttttgatgatgagccaactattcaaaaaagtaattagaaggaaaaacattcagttggaaaggntttgccagggtacanattttgtttattccngggttcagtaggattcacagnggggttggtgattcattctacagggcactgtttcccgaaaacggtcttttacaaggcgttcttttagggtaccccgctgttggtt

SEQ ID NO: 379062 - DNA, 462 bp, Homo Sapiens
  misc_feature (43)..(43): n is a, c, g, or t
  misc_feature (212)..(212): n is a, c, g, or t
  misc_feature (214)..(214): n is a, c, g, or t
  misc_feature (423)..(423): n is a, c, g, or t
  misc_feature (442)..(442): n is a, c, g, or t
ggcccagttcgtgctagtcaacgtggtgatcgccgttctgatnaagcacctggaggagagcaacaaggaggccaaggaggaggccgagctagaggctgagctggagctggagatgaagaccctcagcccccagccccactcgccactgggcagccccttcctctggcctggggtcgagggccccgacagccccgacagccccaagcctgggntnctgcacccagcggcccacgcgaggatcagcctcccacttttccctggagcaccccacgatgcagccccaccccacggagctgccaggaccagacttactgactgtgcggaagtctggggtcagccgaacgcactctcttgcccaattgacagctacatgtgttcggcatgggagcactgccgaggggcccctggggacacaggggtttngggggcttcccaaaagttnagttcagggttcctttttgt

SEQ ID NO: 379063 - DNA, 409 bp, Homo Sapiens
ctggtacatggagttcttccccatcccttccaacaccacctccgacttctactttgagaaaagcgccaactactttgattcagaagtggcgccccggcggcagcagcctacttgcccaaagccaaggtcctgaccatcctcatcaaccccgcggaccgggcctattcctggtaccagcaccagcgagcccatgacgacccagtggccctaaagtacaccttccatgaggtgattaccgccggctctgacgcatcctcgaagctgcgtgccctccagaaccgctgcctgggccctgggctggtacgccacccacatcgagcgctggctcagtgcctattcacgccaaccagattctggtcttggatggcaaacttgcttcgcacagaacctgccaaagtgatgggacatg

SEQ ID NO: 379064 - DNA, 398 bp, Homo Sapiens
  misc_feature (11)..(11): n is a, c, g, or t
caaaggagggnaaacatctgtccaaaaaatcctttgggcaaaagccctggcccctcattaggatttactgacccaggttcctcatcacccttgattgattgcggaatttcaagcctaagattttggttgaaatgatccccaagatccctcggcaaaagcaaatgcaaattattcctaaaagttatcttcatttaagcctcccaggactctccaaataattttgcaagggcagtaagaaagataaccaagcatacaaggaaacaaagcaacatgggcaaaaacatgcataattacaggacaactgaaacagacctactaagacttcagatattagaattatcagacacaaattataaaactacacttgcgtatttaaaaaattaaatggcatgattgaa

SEQ ID NO: 379065 - DNA, 510 bp, Homo Sapiens
  misc_feature (187)..(197): n is a, c, g, or t
  misc_feature (385)..(385): n is a, c, g, or t
  misc_feature (456)..(456): n is a, c, g, or t
aaatgattagtagaagaaattactcacatattgtctgctaaaataaatattaaaatttgactacatgaaaaaatatagtttcttgagctgatcaaataaattgatcataattcttcctcgttttgttttctgtgtctgtggaagtcatagcgaatccagaaaatgtatagcttgaattctgttgggnnnnnnnnnnnctttattacttagtttacatacatttttgtcttcctttgaacttactttctccaggacttgggggtatgtcaggggcataaatcaaaccactcaggatccacttctggaggttgatgttggttttaaagcaggtccttgtgggcatccgttccctttccattgctagtcagtacagagcttacctttnatcaaccaggataaaaggttctgatgcaaatgaatttggacaacccattaggctaggaaaactgtttgccnggataacttcaaattcgaccgaggccttcccccatatgtaacactgttttggcc

SEQ ID NO: 379066 - DNA, 213 bp, Homo Sapiens
  misc_feature (181)..(181): n is a, c, g, or t
  misc_feature (192)..(192): n is a, c, g, or t
ggccccattttctacatttaaatatttacgtttacctacatgtttttttaatgtgggctagtactgttccttccccccaccaagagacatattgggaaatataggagttctttatagggttattcaccgtggactgaggaagtcactaactgggtatttcattggcttcaggaaggccagnggatgttttgnccagagttcccgtagttgcag

SEQ ID NO: 379067 - DNA, 419 bp, Homo Sapiens
  misc_feature (365)..(365): n is a, c, g, or t
  misc_feature (391)..(391): n is a, c, g, or t
  misc_feature (400)..(400): n is a, c, g, or t
gactataatcctgcttgaagtttgcttagattcctgggaagtctccctattccaaccctttttgagaaatgcccacagctcataacctacctgaggttatttgggtctcaggaaacacacagcacgtgccaatgttccaagaatgaagctctggttcccagcttctgctgctccaacttctatagcagcaaggagaaaagagtaacagacatactgatcacatctaattaggaagattttccttaggcaacctgtgttgtgagtgttcttgagctgtatctacataagtcatgggcctttctcatcatctgggcactgtgggacttcaggggatacaggcaggacacagctatcttttctgggantcaaggaaaacctgtaaaggaagtanaaacaggtnaggcatatttttacgtggg

SEQ ID NO: 379068 - DNA, 485 bp, Homo Sapiens
tccttaatcccccacccctgtcaagagctcccaactgtgtgaaaggggccaacaatccacttatgtttaatgtgctgaagccttcccctgtcaagtaaaacccaggaagatgctactttcccgcctcacaagggtgttgtgaaaattaattagttcttgtttaccaagaactacgagtgtcttggtggagttcctcggcaggtgttatcatttatctttataatgatggccaccatcagctgctacttcccggagttgggggaaaaatggtcccagagaagatttctcatttttccatatccttgaactctctcctcttggttcttttgtggagttataccatttctttcccatctacagtatgtagtaagtgttacatcagttttgtttaatagatatccattgctaagtagttaaaatattactgttaatagtacggttcccctcactggtctcccaggtatctctccctacactacctccga

SEQ ID NO: 379069 - DNA, 579 bp, Homo Sapiens
  misc_feature (56)..(56): n is a, c, g, or t
  misc_feature (563)..(563): n is a, c, g, or t
ggggaatacagaggtaaaagaattgtctccaccctgaagcggggagtcccttcacnatttctggaaatggtgcagccactggggacagttctgccccgggcatggttgtttcttcaaggtcctctaaatataatccctattcttacataatccttggccctgatggttttaagcaagaactcctgtgtcccatggtctccaccactcaccatcaccctgctgtagcaagagtcctagtcaggggaggtgcattttagtagttaaattgcacttatccatgagataaataaaaggagaactgtttttatcagtggaggctaacctaaaatttcaaagtgtcgcctttttgaaatcttgggcctctctctctgtaggaaccaatggccctttgtggcttcacggccttcgcaccttaactgggagagttctgagcctcctgcagctcacctgagcccacagactagggttcttgggctccttccgcagcatgcctgctttaacccccaggaacccgcagctgtttggggaaggaggccatgttagggggagggctatttttcccnggggattacacttttt

SEQ ID NO: 379070 - DNA, 348 bp, Homo Sapiens
aaagtagaaatataaaaacataaaatataaacatgtttaaatcaatttgtaaactcattttttgaaatgttagaaatagcattattttgaaataactggaatatatggcataatatgatacatatcggcaacacagttatgcatccgtgtaccctggcacccctcgtccacttcttaggataactactatcctaatttgatgtctgttattcccacacaatttaatatacttacacttgcataatatatgtctacaccacatacaggttgtctttcccattttaaaattttataaattatcaaaattataacgtttaaaaaatttattccttgttatacatgtatatt

SEQ ID NO: 379071 - DNA, 679 bp, Homo Sapiens
  misc_feature (577)..(577): n is a, c, g, or t
  misc_feature (651)..(651): n is a, c, g, or t
  misc_feature (659)..(659): n is a, c, g, or t
aggtaacagaaacacggactggtcctcttggctgcagtaactatgacaacctagattctgtcagttctgttctggttcagagtcctgagaataagattcagttgcaagggcttcaagtacttctcccagactatcttcaggaacgttttgtacaagcagctttgagctacattgcttgcaattcagagggagagtttatctgcaaggaaaatgactgctggtgtcactgtggtcccaaatttccagaatgcaactgcccctccatggacattcaagccatggaagagaatcttcttcgaataactgaaacctgggaaagcttacaacagtgactttgaggaatcagatgaattcaagttatttatgaaaaggctacctatgaattatttcctcaacacatctactataatggcatttgtgggacaatgggattctaattttcagcgccgtttatggaaccaactggagaacagcatgaaacaacttttcctaaaggcgcagaaaattgtacacaagctttttagccttagcaagaggtgtcataaacaacccctcatcagcctgccaagacaaagancctcaacctactgggcttactcgcatccagtcttttctctactgcaatgagaacggcctcctaggcagcttttnagaagagncgcactcgtgcacgtgtccc

SEQ ID NO: 379072 - DNA, 544 bp, Homo Sapiens
  misc_feature (27)..(27): n is a, c, g, or t
  misc_feature (36)..(36): n is a, c, g, or t
  misc_feature (41)..(41): n is a, c, g, or t
  misc_feature (53)..(53): n is a, c, g, or t
  misc_feature (75)..(75): n is a, c, g, or t
  misc_feature (86)..(86): n is a, c, g, or t
tgttggccacaaaaacaaaagggtttnccccttccnccccncccctggaaccnttaaaaccatccaaaaagccgnctctcaaaccnttccccgaaaaaaggtttttcaactcccctcctgtaaaggaagtttaggccactgtcccagggtacccaacatggactgggagttccaggaagtccagttcctcaagaggtgccttttcctgaacaatgaggactcagagtacactgactaaacattaaaccccactagaagactggaccctctactgtaagggttcctgatccaatataaggcaatgtttaagctttttacctaaagcatcgtctccaaagtcaggtgcacaggagatcttttgagatttgggaatataatgttaggatttctgtgtatgattatttaccttcttttaaagttctactctttgtttatgatgtgtatactatctgcatgagggagcatgctcatatttcttctaagaggggcatgtgatctgttaagtttggacatcatagacctacaggtacaaagaacacatcgc

SEQ ID NO: 379073 - DNA, 342 bp, Homo Sapiens
  misc_feature (17)..(17): n is a, c, g, or t
  misc_feature (195)..(195): n is a, c, g, or t
gggatccgccccagcanacacgtaggcccgcggggtggccaactccttccaggaggcccaagccgcctttccctcccttcagcccagcgcagacggccccagcagaccaggcctgcgggcgctccctccacaaatgccaccttgttccccggaagcccaggcttccctggggcagggcgggggctgggggggtcntgtgcccggaccggcaccggctaggcacgcgggggagggaaactgtcgcatgtcggctgcaggcagtgccaggccaggcctctgggctcggctcacggttgctccctaaagcacaggggctgccagagctctcggatgcccaaaggc

SEQ ID NO: 379074 - DNA, 267 bp, Homo Sapiens
  misc_feature (227)..(227): n is a, c, g, or t
  misc_feature (232)..(232): n is a, c, g, or t
cgaaccacttgttcttttttgcttgtttctttgtcttttgctttactttgcatcatagagatacgggtgaaaatttctttaaccctttaagtgtttctactttgtctcatatgctatacctcatttgttacttgggagtatactcttgggccatgctattaggaaatgggatggatgtaaaaatgggcgccccctggaagtcaaaggcaatgtggaaacattttgtnaaatnctcttaccaaccaaatggcccccaaaattggtagg

SEQ ID NO: 379075 - DNA, 458 bp, Homo Sapiens
  misc_feature (299)..(377): n is a, c, g, or t
  misc_feature (396)..(396): n is a, c, g, or t
tccctaatggatggtacaggtcaacatttgccatctaatgacacttacattccagttttttccttttttgagtaactgggaaaagggtggcataactgctggcttcctaaaattgaaaagtatactagggtttttaaacctgtgtagaatacatgatatggtagcaaatgtgctgtaggaagaaaagcaatgaggaactactggcctgactaggaggcctaggaagtccctcccagggcttgagttgttctgacttgggcatgattacataggctgcggcaagtgacgtttccttcaannnnnnnnnnnnnnnnnnnnnnnnnnnnnnnnnnnnnnnnnnnnnnnnnnnnnnnnnnnnnnnnnnnnnnnnnnnnnnntaaagcacctctagtggtngaagatgtcccatcctatcccccacccatagctggggagctatgtttgggctcattctttcc

SEQ ID NO: 379076 - DNA, 443 bp, Homo Sapiens
  misc_feature (355)..(355): n is a, c, g, or t
  misc_feature (372)..(372): n is a, c, g, or t
  misc_feature (381)..(381): n is a, c, g, or t
  misc_feature (407)..(407): n is a, c, g, or t
  misc_feature (414)..(414): n is a, c, g, or t
tgtgatattaacaaacttattaacacctgttgacaaagatctttgaagacaaatctacacgcaagcttttgccttagcgaacaacaggaatagtttccttaaaaggatacagctattttgaaatttcctcaaccattgcatcccagtgggggggatacttacatggtaggactgtttggccaaagtgcttgaagcattaggacacaacaaagatagttttgaaatgttttcttgctcaaaatacatttgttcttagggacacggctagtgcttcattttacattccatgcctggaagtgtttaaaaacactgtgggtacaggtttctggattctgtgttgggtcaattttgaaantccatgtgttagtagtnaggtgtgcnggattcgtaggagtggggtaactttnggggganctccccctttccttttatttggacatttc

SEQ ID NO: 379077 - DNA, 472 bp, Homo Sapiens
  misc_feature (45)..(45): n is a, c, g, or t
aagggggaaccctgggctctctctgtcccaaagctccccagctgnaacccaacctcagctcacagttgtggatcaccctgaccttcccagaagttcccctcccaaggggcaagacccagcatcctggagtccccaccccgagctgtgctgaaggacagctggggcggtagggccaggaccagaccaggcctctgacaaagtctcatcgaaatgaaaccaatgtgccccgggccaccttaaggggccctgaccaggaaagttaggcctgaagctgccaatgccagatcctcagggtgttacctgtgtccttacgtggctaggcctgaccccaagtgccacaacccccaacttggggagggcagggccacctggtggggacgggccagccagagcccttggtctcagctgtggcagccacatccctggcccggccgtatgctgagggcctttgggacatctctgggcagaggca

SEQ ID NO: 379078 - DNA, 420 bp, Homo Sapiens
  misc_feature (142)..(142): n is a, c, g, or t
  misc_feature (144)..(144): n is a, c, g, or t
ggggaaacagcagtttccagctctcatttgcacagtcagtaaccaatgtctaagggacctcaagttctggcataatcaaagagttccaaccaagttagtccatgctgctctgtggctcccatgcccctggccccgtcagttnancaagaaagccacctgatggtttttgcaagagctaattctgacctaggagcccacttgccatgagctagcagagtgaacatggttcaggtctcccctgccataggaccccagggcttcaacggagaaagtgggaaggagaaacttccgtatccacccttcagaggtgtttaaggacatgggggcagttgcaggaggacacagggaaatatttttgcaggcaggctgggcttttttcaaacatgggcctgggccccttttaggggcccacgttattgg

SEQ ID NO: 379079 - DNA, 521 bp, Homo Sapiens
  misc_feature (20)..(20): n is a, c, g, or t
  misc_feature (26)..(26): n is a, c, g, or t
  misc_feature (37)..(37): n is a, c, g, or t
  misc_feature (116)..(116): n is a, c, g, or t
gccaaggggttcggtaccanccgccngtcccccggcnccactagggggtcctccctaaaaaaccccccggagaataaggggggactactgtacctttaaaaatgaaagtgtccaangccctcctatggatagttactaacgaagtccagcccaagaaggaaaaatacctcaaaacttttattgttacaaattatgtcctttcctaagttatcctctctcccctatccctataatagcagcatatttccttacattgcatgaattactattatttatttcaagttcaagtgtatactttcaaatcccagcagaagaacacggggagaaataccgaaaaacacagtgtggaggtatccatagctttttgagtgaaagcatagggaaaattagtagaatgaagtaacataaatgcaaatagaagcatcattttgaaagggtatttagtattatgctatagacggttagctaggagaaagcaatgagttctttattcctaatgataatttcaaaaccagaagaga

SEQ ID NO: 379080 - DNA, 473 bp, Homo Sapiens
  misc_feature (354)..(354): n is a, c, g, or t
  misc_feature (420)..(420): n is a, c, g, or t
  misc_feature (436)..(436): n is a, c, g, or t
  misc_feature (444)..(444): n is a, c, g, or t
caagaactaggcaccctttctctctccaagagtttaagtggtttccttaggttaaagaaggggacagaccagctaaaaatggttgtaccactcactgtacaacctcatggaaattctcactataagatttagaggcaatgttccctagctataagccagggcaagaaatggcgcctctggagttggggaacattaggggaacattacaaccgggtagatgctggttccctgaagtgtgggggccatgaacatgcagggacccacggttttgaatgaaacagctactgaaagctaagtttcaaaccacccttgcgttaacaaagggagttacaggggtacacattcaacaccaantcaccccagcaccccacagcgatgggtcatgttcaccgtggcaggcaggtccctttaccccggggntgccacttccacaagnttgcagtnggcaattacggtggttcttgggtttaatt

SEQ ID NO: 379081 - DNA, 409 bp, Homo Sapiens
tgtcctgaaatggttaattcactgtccaaaaatagctttcagaatgcattagaagtaataaatagagtaagcttaagaaacacttgagtatgacaaattagcaagctatattaactcaattcaggtaatatcagtaaatctcatacaatttaagaatgacagcccaggcagtagctggacagaaatggccttggtgaaattaagaacaagggcataagtgacacaagaaagctctgggaagatatttcagatgggtattttagtggggttgaatctgggatgggatagggaaggggataaggaatgacatgggatgggtcagttgggccatttacattccagtctccagggatgtttgccctttctccataggccaaagctattcccgaaggtattatttgattattga

SEQ ID NO: 379082 - DNA, 396 bp, Homo Sapiens
  misc_feature (40)..(40): n is a, c, g, or t
taaaacagtgtggcccaatggtaatgaaaccctcaacctncccggccagaacatggcctatttcctaaaaccttggacctgcgggataatccagtgttccccccatcttggctgaagttggggttggggggaggtaagtgtgatgatacaactttcacacttctccctgccaatgggcaacccaccctgtgggctgcagtcttgacctgaaatcattgcatcatcacaatttgccctgcagagaggaacatttcctgtatttccccaatttttactgctaaggaaaatgtcatgcccattgctaccttgcaaggagcagcagtgatttcaaacacatgccagaattctgaacttcaccccttttgctaagcactagacaaaacactgttctatctc

SEQ ID NO: 379083 - DNA, 471 bp, Homo Sapiens
  misc_feature (288)..(296): n is a, c, g, or t
  misc_feature (413)..(413): n is a, c, g, or t
  misc_feature (420)..(420): n is a, c, g, or t
  misc_feature (439)..(439): n is a, c, g, or t
  misc_feature (445)..(445): n is a, c, g, or t
  misc_feature (453)..(453): n is a, c, g, or t
aagagcctataactacactgactcatcattaatacccaaagtccatagtttatgttagagttcactataggtactctacattctatgggtattgagaaatgtataatgacatgcatccaccattgtagtatcatatagaatagtttaccctaaaaatcctctgtgttaatccaattcatcctttcttccccttaattttagcgggggtggaggggggatctttttactgtctccatagttttgccttttccagaatgtcatatagttgggaatgggtacagtatgtannnnnnnnncagattgggtttatttacttaggtaatacacatttaggggtttttccatgtcttttcatggacttggataactcatttatttttaggcactgtattaataattgccattctctgggncataccncagcttatccctttcaccnaccggntattgtanttcatcgggggttttcag

SEQ ID NO: 379084 - DNA, 389 bp, Homo Sapiens
  misc_feature (296)..(296): n is a, c, g, or t
gacccttctggactacaagtctctctgactgatgattttgttgactggagcctctagcaaaaggaggtcatttctacccagagattcccccttgaggttttagactcatcacctccctgatgcagctaccaggaatgccccttttgaaaaagtggctattagcttgctatgtgctcttgtcaacactgagtgcctgacccttggaagccttgtgccttttctgacgtgatattcctattttgggggtgagtcttttgggattcaatgactgacaagttggggaaggacccaataangctttcactagtcaaatgtgatgaaaatgttcacatttaaggaacacaaccagcatgacttcagtaggcatctagggcttttacccagtaagg

SEQ ID NO: 379085 - DNA, 451 bp, Homo Sapiens
  misc_feature (383)..(383): n is a, c, g, or t
  misc_feature (407)..(407): n is a, c, g, or t
  misc_feature (413)..(413): n is a, c, g, or t
  misc_feature (441)..(441): n is a, c, g, or t
tgcatcatgacacagcctagcctgatcaaattcactccaatgagtcggaattctggttacttttcaccttccctgacagcgttgacatcttcaagcacccctcctttaccatccccatcttaaagtgctatggaatgccccgtgagagggtgtaaagaataagaaagtactaaatgtcattattaaccacacagtctccagagcatgtgccctgggttaaagcaaactttctgtattttcctccagggaagtttaggaaaacactttttccatgtgctgcccagatctgcctttccaggcatttggggaaggtaggcggtgggtgttggacagtgttataggggtggatgtttccagttaccctggaccccttcgtccaaaantggaactttttgccccatttttantgaggnaaaattgggcttcagttcgggggcggantttacccggg

SEQ ID NO: 379086 - DNA, 393 bp, Homo Sapiens
  misc_feature (323)..(323): n is a, c, g, or t
ggtccatgacttcattctccttccagccacgacccagaggccacaagtctgctccagcccctggtggcttgggtgaggacatgttcacatactcagtgccaaaaccggctctgggcctagtaacgatttttttctttagtttggaattgcgttggtgtgaaaacattcacaaatgtgtaaagatcaactcagttacacaggacctactgtgcagaccctcgcgtcctgttgccatagcaacacctacctgggttcctaccctcccaaccctgggaggccacttgcagctcttcatcccagtaacagagcaggaaccgggcgtnggggttgggggtgcgtgattccccagggtgctgggccagaggggtcccgcaggcaggctggggctcccag

SEQ ID NO: 379087 - DNA, 478 bp, Homo Sapiens
ggcaactttcccatgcctatatatacgctggtccaaaaactgttgcctgtttgttccacacttcctttcctcttgtgttaataatattggatatttaaataggaaaataaactacatagactttaatctgtatgcatccatttgcaaatttccttacaaaagaggacaaagcacataggcattcacaaattctatgccatttctgttaaaattggtatcatctatacattatattacagtattaacaactttttgttcctacccattgggtaggatatgtgcataatatattcaacttatatacagcaccttacaaataaaaacataagaaaagacagacaactgaaaaaagcaccattttaagtgaggcacaacaaaggtgggagcatcaagtgcaggagggggcggcttggttcctatatctgctgaactcagaacatgaggcaccttagttgctgaaaaactgacatgcagatct

SEQ ID NO: 379088 - DNA, 581 bp, Homo Sapiens
  misc_feature (530)..(531): n is a, c, g, or t
  misc_feature (565)..(565): n is a, c, g, or t
aaaaggccagctgaggggagggtagagggtgaaaagctcggatctgtgtttggggaaggccaggcttgcgctcctcgccgggttccgcgaaggttaaccttggctgacttggctcgcgagcaaagggcagcgtctgagctcccggcgttccaggagtggcctcttttgtaggagcacctgaaatgcagcgtctggtgcactaagccgtagcgcagagcagccacagcgacagcgctggggccctgtgtagaagctccatcccccttgtctttgtgcttgcctgcgtccccagactcagagattatcttagaagacctaggactccaaaaatgtttcccctgaaggacgctgaaatgggagcctttaccttctttgcctcggctctgccacatgatgtttgtggaagcaatggacttcctctcacaccaaattccatcaaaattttagggcgctttcaaatccttaaaaccatcacccatcccagactcttgccagtatgtgggatatttctaggggaaagcatgaacacnntagtggtcgtggctgaacattgtgaaacgtagtnctggaagacttgcttc

SEQ ID NO: 379089 - DNA, 389 bp, Homo Sapiens
  misc_feature (327)..(327): n is a, c, g, or t
  misc_feature (333)..(333): n is a, c, g, or t
aaaatatgactttaaattataaaaaagtagcattatacatttacagaaaatcccccataaaacaaaacaaaatttttttatttctttgaatagcttttctaaaatgattcatttactgaaatacattatataggcatctctgctgaattatgtcagcagagaacagtaaactatcgatataacttaatttttattacttcttcatttgaataaataccttttcataaatcttttattttaacttaatagccttgatctaaagaggattgctttatttcttctgagccctttttataaaaatatctaggcttttaaaataaggtgaanataaanggcaaattgtctgcctgcccctagttttctgcattaacgtgattgctccgtcatag

SEQ ID NO: 379090 - DNA, 526 bp, Homo Sapiens
  misc_feature (12)..(12): n is a, c, g, or t
  misc_feature (156)..(156): n is a, c, g, or t
  misc_feature (164)..(164): n is a, c, g, or t
  misc_feature (190)..(190): n is a, c, g, or t
  misc_feature (203)..(203): n is a, c, g, or t
ctgaataaatgncaagccacgaagtcccccgctgtcgcagttcaggtcaaggctgtcatggggcttggcattgaaggctggagcggctctgaaggggcatggctcctgcgcaagccctgccagcatgtccagctcctgcatgcctgccacggctgnactgaggncagtggaagttggcaaggcggaatgncgcggcgcttggnccctgcgagggcagcaagaagacagcaggcttccgggtcccactggctgggaagacacagaggtgctacggctggtgcggccacccggcgagacggctcccagggcttcactgaaggtgagctcatctgtgaactcatggcacgttgtcttctctagacagtgcagcaagtggtgatgttgctgttcaaaggcagaacggttcctgacacaaacagcctgttcctcgccactgccgctgtcctggagtagatggagcagagcgataagggcagcaccttcctccccgttatggctcaccccaaccctatccaggccccgaccc

SEQ ID NO: 379091 - DNA, 434 bp, Homo Sapiens
ttctgaacactatcactttacaggttaggatgctgacatgtaaattctgggggtatgcaaacattcagtccacgtgcactatgtttgtttgttttatgtatattttaaccctgaggtaactatgcctaccatgatgtattatattcagactgtagggttgaattattctcacttttttcatatgaattttcccttgaaggcaattcctttaaatatagtacaattttaatactaatttgtcaccttactataatgaattaggcatttgctgtcttttcttatagggaaatgataagggcattaaaagaggtaccccaggaggtctatggcagaggggggtgttaccataaccattttgtctttcggacgggatgtttcagggtgaccctaaggaatggtaattttaagggggtccaggggtagtgggggaacct

SEQ ID NO: 379092 - DNA, 425 bp, Homo Sapiens
  misc_feature (406)..(406): n is a, c, g, or t
attcaatggctttatgtcactgacaaattttcattttggacaacatgctagtgtgagtagtttctggtccagtgaaatccagttttcagatattcctatttttggattctcagctgtgtatttgaaatcatcacatttgaaatttgtttgttccagaacatatatgttctcattcttgtttgtacttgagtcatgtttaatcacatatatctgtagtatgcttaggatgtagtagtttccattttcataactacttttctgttgatccattatgggtgaattgcaggctacaaagtcatactgtgtaggtaggcggaaaatgctaacataaggaggtaaataggtaggccaggccaaggggatttttttaaaatatcccaccctgggtccatatataccccgtttnggctcagtagggtcttcgg

SEQ ID NO: 379093 - DNA, 360 bp, Homo Sapiens
  misc_feature (37)..(37): n is a, c, g, or t
  misc_feature (243)..(243): n is a, c, g, or t
  misc_feature (283)..(283): n is a, c, g, or t
  misc_feature (318)..(318): n is a, c, g, or t
  misc_feature (341)..(341): n is a, c, g, or t
cctggtcatccgtccattctcctggcctgtgcgctcntattctcttaccataaatgctgaagcatttttactaatacagttctgaacttgtacttcgaatatgacatgtagagctttatttccaagtcacacaatacaactcccatctggccatttttccgtgcctcagcacaagtgttgaattgtgggagtgactgaacctttgcagcagctgctcacgagggaggaaccgtcgtgcctttnctggttttgggccgcacccggttactttaggatttcttgntttggaactgtgtcctgagatccctgaatccccgnttttgttcggtagggcacaggtnccatataaggcatttttcg

SEQ ID NO: 379094 - DNA, 373 bp, Homo Sapiens
gactgagtgagtgcctccttaaactttgtatcctgtgtgcctcccttgccttaccctagtcccagccctgcagctttaagtaattcagacatggattagccatttcccagttctgtctcatacagtccagcctctgccaccttccccaccccttcctttattccatcctaactagttcagccctagtcaagactggatagactgatactgctttgtttcccccagggaaccaaccacccaaccccagtattctgggtaattttgacaatgatctatatgaaatttatttgattgacatttaggaatcatgagttaagcttctgctggaccatttatgttaggggtacaatcagagggaggcaggaaccactaa

SEQ ID NO: 379095 - DNA, 393 bp, Homo Sapiens
acatctccaggcatttcacagagtgtatcaaagctcaggccacaacagtcaagtctttgagtcaatgtgtgttacgactaccaaggctcattagactgaacatgttaagttggctcttggatgcagatgatattgcattgcttaatgtcatgaaagaaagacatcctcaatctaagtacttaactattctccagaaatggatactgccgttctctccaatcattcagaaataaaagattcagctaaaaactgctgaatcaataatttgtcttggggcatattgaggatgtaaaaaaagttgttgattaatgctaaaaaccaaattatccaaaattattttattaaatattgcatacaaaagaaaatgtgtaagggcttgctaaaaggacaggg

SEQ ID NO: 379096 - DNA, 417 bp, Homo Sapiens
  misc_feature (32)..(32): n is a, c, g, or t
  misc_feature (77)..(77): n is a, c, g, or t
  misc_feature (167)..(167): n is a, c, g, or t
gaaaataaagagcttgagaagaagctggcaancccaagaagaatgtcttaagcacagcaatcttaagtttaaagagnaatctgcagaatatacagcattggccagacaactggaagctgctttagaagaaggaagacaaaaggttgctgaagaaatagagaaaatgncatctagagagagtgctttacaaattaaaatattagatctggaaactgagcttagaaagaaaaatggaagagcaaaatcaacttgtttgcaaaatgaacagtaaagcacaacatcaggaagtgtgtttgaaagaagtacaaaatagtcttgagaagtcggaaaatcaaaatgagagtattaagaattatttacagtttctttaaaacttcttatgtaacaatgtttgaataaattgtcaaatttattttc

SEQ ID NO: 379097 - DNA, 463 bp, Homo Sapiens
  misc_feature (60)..(60): n is a, c, g, or t
  misc_feature (241)..(241): n is a, c, g, or t
  misc_feature (284)..(296): n is a, c, g, or t
  misc_feature (402)..(402): n is a, c, g, or t
gtcaggcgcgacgacagggctgtgcttgatttgtgtctgtcgagagcagtgccgggccgnagttggcgctctgtaagtgcttgctgaataaatgacgggtgtgtgtgtcattcattcagcaagcactgagtcttactgttgtgtcaccgggaccgatgtggagggacatttttagggtgtatttctggcgctttagtcctgttttctcctgggacaatttatgcttgccccgcaccccatncgtgcgattctccgcagtctttggggctttgtcttctctctcnnnnnnnnnnnnngggaagttgcagaatgggtgataaatgattttctttgctcctattgactgctagggccctgtggctagggtaccataggagtctctacacagggactaaaatcagnccggggtgttgcagggggagggcagacacacaaacaggaaaattgggactacagtgccaag

SEQ ID NO: 379098 - DNA, 516 bp, Homo Sapiens
  misc_feature (413)..(413): n is a, c, g, or t
  misc_feature (430)..(430): n is a, c, g, or t
  misc_feature (451)..(451): n is a, c, g, or t
  misc_feature (476)..(476): n is a, c, g, or t
  misc_feature (501)..(501): n is a, c, g, or t
ttagttcaaagcgatagatgatttgtatgtccaaattaaagaaaagcatgtatgggaaaaagattgtaatttttatgtaaataataagtgctttctgaattgtatttaaagaaaagaagattttataagtccaaagaatcacttaatacaatgaataaagggtaataatttaccacttttggattacctttaatttaagacataaatttttcaactcataagctatttaaaatcttttcacttaaggatacctgttgaaattttgtttaggtatctggccagggaacagtcttcacgggggacaaaggaattttatctattcccaatttgggcccccaaacctagggtatcttcacaggaactgtgtgtatgagggtacagcagggtacccaaaagtaggaaaagacagggtnaggtgttttgtaatacntttgggccgtctgctggggtnatcctggttccccttttgagggccntaaacctaaggttttttaaaagggnaaaattccccggggg

SEQ ID NO: 379099 - DNA, 520 bp, Homo Sapiens
  misc_feature (485)..(485): n is a, c, g, or t
  misc_feature (496)..(496): n is a, c, g, or t
acaccacgtattttacctttgcaaaaaacaaactggcaccctgagttctaactacggacggacgatatctttgcctccacacccagattcctggaaatggctaacgtttcctttctaggggaagggtcgaggaatactcaagtgctagcttagcagctttgttcagtccagatcagagctgttaggtaaaggcctaaccacctccctgcagtctcttatatctcaagctttaggaacccatttctaaatgtacactagcggagaatttatattgtcagccttgattaccatagggacaggcagaaaggcgataatttgtatcttttaataaaaggaagcttttaacttttccagcctattattaataactgagttatatttcactgtgggcttcaaactaattgggcattgtgggaacatttcttttacctttcaaagtttttctccacccaatccatttcagtttctattggcagtcccggggngccctatggtncccctggcaaaattgtggaaagta

SEQ ID NO: 379100 - DNA, 264 bp, Homo Sapiens
atttcattcctaatcaacttatatagccatacatgcatagtgcttactgtattagttaggtaacactgttccaaatatctcgcaaaaactttaaaaaaattggcattacccagcatggcagagagtgtggaaagacaggtgcccccatacactaacagtgggtgagtcaataactatggtcctttgtagggcaacatggcaatatttgtcatttcaaatatgcattcttcaagttctcagaatctagactaaaataaactcata

SEQ ID NO: 379101 - DNA, 467 bp, Homo Sapiens
  misc_feature (75)..(75): n is a, c, g, or t
  misc_feature (358)..(367): n is a, c, g, or t
aaatccttccttggcctgtcccctagtgcctccatttgaaaccgtaaagcctagtttccattaaaattcagttgncctttaatatttgtgaatcctacttaaatggggtccctagagtagtcaaattcatggaagacagaaattacaattgccttcccccaggggctgggggaagggaggaatagggagtcagtcttcaataggtccagagtttcagtttcagaagatgaaaagagttctggagatggatggtggtgatggttgcacatcagtgtgaatgtacttaaagtcactgaactatacacttaaaaatggttcaaatagtaaattttatgttatgtacatttcaccacaattnnnnnnnnnngaaccttcattttgcagtcaatcagcctgtgttcaagttttcactctatgactctaggcatgtcacttaaactacccatgatatatgactcacaactgta

SEQ ID NO: 379102 - DNA, 493 bp, Homo Sapiens
ggttttcctgggccccttgtgaaaagccagaaagggaacgcctaattttggtggctgacccagtacttgtttaacccattaaatattttctgcccctcctaaacttttgtataaccctttatggaaagttaatttcatcagtatatagttaatattaatagtgcccaaagtgctaccagtggcaaactaggtagatcgttatttattttcaacaagatgccaagcatgtcagagtttgaagttgagcttcagcttaagtacaaacggaggtaattttaaggttgccagtgatagatccagttccattaggtttagttctctagggctaatgattgtttctgatttatttctatatccctagcacctaaaacagtgtcacacaatagtcactaaatgtttattgaataaaagagtcgacaaacataattaaaagctatttttcttcctatatatagcatgaagattgtaattgcttctctagaaaatgtatgaa

SEQ ID NO: 379103 - DNA, 443 bp, Homo Sapiens
  misc_feature (28)..(28): n is a, c, g, or t
  misc_feature (43)..(43): n is a, c, g, or t
ctgggaaataaaaaacaaatccctcctngggatcaattaatancccctaaaaagttctttgcccccagtccttagaaacatggcacttttgaagcatgcctaaaatcatgaataaggacatatttctcttctcatttcacaccaataaaggaggaaaaaagccttgtcctataggcaccatcaaaataatctacccacccccaactatgccaggctcctgtctctgtggagttcagtggctcctcactagcaggaaagtataagcagagagaccattagttatgacatggagactctagctgataatgctgactcacttcaggagctattatactataaacagtgtgctgaaagccatttatctgcattttaggataaacagcagaaaagtctcaattaaatagattgcaagaaataagctgctgatgtcaaaccaagtgaag

SEQ ID NO: 379104 - DNA, 734 bp, Homo Sapiens
  misc_feature (24)..(24): n is a, c, g, or t
  misc_feature (47)..(47): n is a, c, g, or t
  misc_feature (54)..(54): n is a, c, g, or t
gactgaaaagggtggtcctgaganggccctgagggtcagaacaaaangccctgncccactgcgttggtggaagaatttgctgactgaagctgagatatcactgcaaagtccccattcagctgaaagcctgtatgaattggaatggatacatatgatgtctttgtaaaggtctgccatctgctaaagactgcctctctggcctagaaagagcatatggaagagctcctcatgaactggtttcacccacagaatttacaactttgcatccaggacagtggcagagggaatttccaggttcacaccagaataactactgcaacaggctacccacaagggcacagtataacaacattggggaggctcagagcatcctacattagttcattttagggcaaactgacagtcagaaaattaacaagaccttcatccctccccaacaccccccatcactactctgaggatcccccaaattaaaaagagactacttaatgtagaaagcacccgggcacagaatccactcaggaactgcatccatgagggagagcctaccagaaatggtgcagacatgctctcaccccttgaaactagactagtttcaatgtgtgggaagacacagctccccacttctgatcagggggctttatggtccaggctggagactgtattcctgagtttgttcccaatatagtaaaataggacatagagccatatgactctggttttccacaggtgtt

SEQ ID NO: 379105 - DNA, 509 bp, Homo Sapiens
  misc_feature (468)..(468): n is a, c, g, or t
  misc_feature (476)..(476): n is a, c, g, or t
  misc_feature (485)..(485): n is a, c, g, or t
  misc_feature (496)..(496): n is a, c, g, or t
gtaagcactaacagatgccaagtgaacctgactccagaggttattctgcaatttaggctctttttttagagggctcgtgggttatttcagcaatctaatctctggtctgatgcgtcctttccgttttcaccataattaaactactcattggcaagtgaggaaaagagaattgttggatttatgtcaccaacttctatgttaaagaaggaaaatttcaacatagtatagtggcatgagcactaccatcatcagtgtctatcatatttatctattgtgttctgtttctgtttttatcatatttattgtgttatctattatgttgttccctttccttcaaagatttcagggtgtcatatattatacaagaggcaaagtgggcaaattttaaacccgtttttcaggtagggaaaactggaggatgttaaaaataggaaagtggagttcagtacaccaatttccgtggaaacnggggattnccctttaanccttttttacnacgttgggtttcc

SEQ ID NO: 379106 - DNA, 478 bp, Homo Sapiens
  misc_feature (80)..(80): n is a, c, g, or t
  misc_feature (93)..(93): n is a, c, g, or t
  misc_feature (144)..(144): n is a, c, g, or t
  misc_feature (179)..(179): n is a, c, g, or t
tggtgccggtccaaacggaaaattccccacactccggaccccacgtcccattttccaaaccccggttccacaaatattanccttggattttgnaagtatctttccaaagaggtaagcccatttaccccattttgaaaaaagttnaaagtaaccaaatccaaggttgcaaaatgctatgnctccccagacccaaagggcacacgagtaagaatcctgagacccaatgtcaaagtacagctctttcaaggtgaatcaactcggcaatcaaaaggatgttttaactcttctttcttttctgttcttcctttctttttgagactgacttgagaatagaaaaacataaagatgcttcaaaaagcttatcaactttccaaagcatatcagaaaagtcttaaaactcatctttgaagagtaagataatataatactcattcattgatatcaatttctttatatttaaaatatggaataatacttc

SEQ ID NO: 379107 - DNA, 468 bp, Homo Sapiens
  misc_feature (346)..(346): n is a, c, g, or t
  misc_feature (409)..(409): n is a, c, g, or t
  misc_feature (420)..(420): n is a, c, g, or t
  misc_feature (427)..(427): n is a, c, g, or t
  misc_feature (454)..(454): n is a, c, g, or t
gagaaacttgcagtcagaagcccagtgtcctatgtatgcaggaagctgtgctctagcaatagacagtgttggtaatggttgtgctgtacggcgtttggggtggccccatgttccatgctcagctgaccggatgccaactcagatgaaaagaattcatggctctgggcaccccgtgagcaagtgcttgcaattgggctgggaatttgtcgggattgaaccaaacctagtgcttcaaagctcctgggacacctccagtgtccagacacacattctcatacatactgcccctaatttctaaagtccctaaagcactacattctgtaaccttgtttcttttactccattncccagattgagttatggcaaaatttcaactggcgttctaactttttaggagtgtttagggggncttttattttnctggttngaccctttcatctggaaaggattctcnttcccttgttaggg

SEQ ID NO: 379108 - DNA, 516 bp, Homo Sapiens
  misc_feature (457)..(457): n is a, c, g, or t
cgcggacaaggccaggctagccttgagctccgtcgggcagggcgccgggattggtgtccggcagagcgtgagccagcggtgcgaagtcggcgagcgggagtgaaagaagaaaagctagagagcgaaggcaaagccgaggagagagggccgcggtcggcgacggaatctgactgcacggttgcgtcgctcacttccggaggctccctcaggcgggcggctccctagtggctaaaggcaaagcattccggggcgcggcgcatgaagttgagcttcgtccctgctagccgccgctttctccccaaaaatacatcctagccttaatgtttattgcctccatttgccccagttcttattctgtttttgctcaatgtcttcatagctaacaagaagggcaattttctgacgaagccctccgtccctttccaaattggattattttttggccgggcttttccancccggacagttattggccaacccgaatgatttggacaaagtgcaacgggaacggttttc

SEQ ID NO: 379109 - DNA, 414 bp, Homo Sapiens
aaacacaaaaggagattacagagagatcagagataagaggtgtacctctctgtgttccttgtcacatagcgcgcgcgaccgagtacacacgcatctgtacacacatgcatgctcagcccgtacacgcacgcgttccttgctactgccatctaaatatatgcaccgacactctatgccctgcaacgtggccggtgtgtttgtcctgatcctacataaaggtaggcaggtatgtgggagagtccagggcaggaacaaacagccacgcgcaatttaactgcagccaaactcaaagagaccttgagccttgccgaattgttttcacttcaggccagggtgccccccaggaaaccggatatttttgcaatcagttgtgggaattcctggcatttatttcattaaaatgttgctggaaaa

SEQ ID NO: 379110 - DNA, 538 bp, Homo Sapiens
agggggaagtggcacacgtttgcattcagggagagtgtggcgtttccatgtggactcgccggaaggtctttgaagtaacattaacattaagacaagtttcctcgccctgtctttcttcttagatccccctagctcagtcggaggcgttcctaacggatcttttggagaaagtctgtgagcgaatgaacgactacaagcttgaggaagaccctgtgacgaaggagagaactttcaagagattcgctcctaggaaaggagacaaaatataccaagaatttaaaaaattgtatttttattctgatgcttacagacctttgaaatttgcgtgtgaaactataatagaagagtatgaagatgaaatatcctcacttatcgcccagggagacacactatctagctgacaagctgtgcagtgaaaaatcaggtactgtgtctgatgtaacatgtgctcgctgctcgcacaccctctctctctcactcagccttgcagcgtcttgtttgcagaccgagcctcgctgcctctgcgatccacggctct

SEQ ID NO: 379111 - DNA, 539 bp, Homo Sapiens
  misc_feature (443)..(443): n is a, c, g, or t
  misc_feature (449)..(449): n is a, c, g, or t
  misc_feature (464)..(464): n is a, c, g, or t
  misc_feature (512)..(512): n is a, c, g, or t
gcaccagaatgatgtgcggcctattcccaatgtcaagagctacattgtcaaccgggtgaaccaagggacgtagccatctcccagcccctatggtttcacatagacgtgcagtgtgaaccaaagcaagactgaatgtgactgtaaataattctgttcatcatttcactccgtgcagttctctgaattgagagatgcacctcttaaacctcgtcagtggttattcagggtctgagcagcagtaaaagtcaccctaaatcaaggggctttacagaaggtcattctgaagaaataaagaggcaaagggtcacagaagtgttcaggaagaaggggcaaagataaggaacaatattagctgttacggaaattttaactgtatcttccaaaatgagtgggttaactggggcaaaccttaaggctcacaagagtattaaaggtctctgggntttgcnggaattttttaggcnggaggttcccttttattggggggtgttctgttttttccaccctttctngggtttgggttaccttggttttggttt

SEQ ID NO: 379112 - DNA, 400 bp, Homo Sapiens
agcaaaaaagccttgaccaagagcttgggtctccttcggacctgcacacgactccccaactcccgcctgcaacggcgcctcttggatcccgggcaggcagcgtccacccagcgtggaaccgtggcagccgcagcccccgcaggttggagggcagacactagcaggagaaaggccacaaggctgacgtggtgggaaagcatgggagacgtcgctttcctaccgggcgagaaggtctccctacagtctttggagacaagatggagggaggcaccccttccagggaacaaggcggctgctcctgaggcctggctccgcacggaggcttcctggggtcccgcgcgccctcttccctacccgctgttagccagagttgctttcacattattttcaaccggcttcc

SEQ ID NO: 379113 - DNA, 432 bp, Homo Sapiens
  misc_feature (239)..(239): n is a, c, g, or t
gtctccatgccaacctctcccctgaactccaaactcacgtaccagctgcctgcatggatgcctaatggatatccccaaaccgaatgtgtcccagatggaactcaagcccattcctcctgccactttcctgacctcagcagagggcaatcccattttggcagttcttccaaataaaaaacaggataccactttgacccatctgtcatgaccttcagcagactccgttgggttccacctgncaaaccataaccaccttccaagccagcattttgctctttcccactgtaggccagctttggcccttaaggaacatcagtcgggttgggtgtgttcccaggggcggggggaattttccagggggccacatgacctgaggtgttccgtttcggtaagggcctttggggcccacagaggggcaagggaaactttttt

SEQ ID NO: 379114 - DNA, 504 bp, Homo Sapiens
  misc_feature (14)..(14): n is a, c, g, or t
  misc_feature (97)..(97): n is a, c, g, or t
  misc_feature (99)..(99): n is a, c, g, or t
  misc_feature (101)..(101): n is a, c, g, or t
  misc_feature (103)..(103): n is a, c, g, or t
  misc_feature (385)..(385): n is a, c, g, or t
  misc_feature (425)..(425): n is a, c, g, or t
  misc_feature (457)..(457): n is a, c, g, or t
  misc_feature (473)..(473): n is a, c, g, or t
  misc_feature (490)..(490): n is a, c, g, or t
gcttgactgccganattcaatggcctgaccctgaccggtcgaccccgtctttcccgacgtcacagcaccgaagccctgaggacccgcccccatggangnananagtgactagcgggggtcctctctctcgccgaaacacagcaccagaagctcaggagtctggtcccccttcagggctgaggcagaaactgagccgcatggagccagtggagctggaacacccctgggacacctttgccctgactcgcctgagtccagccgcctgtccctgggagcgccgccgatacagcgcctccccgttgaccctccctccagccggctcggttccctcttccgcgccagtcccagggagagtctgccaggggattaattcttccgcttaagngaaagggagggcggagtccgggggcttgcttggagcgganggggcttgggggaagtttgcttctgggaccanatttttcgcaaaacgnggccgggtttttcttanccctttttaaagtt

SEQ ID NO: 379115 - DNA, 480 bp, Homo Sapiens
  misc_feature (39)..(39): n is a, c, g, or t
acgggaaaaatccaaatggttgagtttaatacctacacngtgtaatccacaggcatatccccacaattttaggtaaaaaattatgacttgtaaagaatataacccaaaataaatttgttttggaatgcccacatggatctgattccatgtccttaataagaaagaagatataaacataaaaagcatgtatagcgtttttccagaaattattttttcaaatgtattcaatctatcccagttgttttaatgttgcttccctggcagtttcagttttcctgtgagtcaagacacacagaaagcccttatttcccatactcaacacattaacaagaaaatcatataacaaatcaaacaagttggcactattctaacttatccagatgttctttaatgtaagaaaatagaggggttgtgaaaaattcagaaataaagtgagatgcattttatggaactgaccatgaattttagccctagagtctt

SEQ ID NO: 379116 - DNA, 557 bp, Homo Sapiens
caggcacaacaaggaacagaatataaaattttgttaccttttatgtcaatcccaatgtgaaaatttatcatcactgaattccacataacaaagaccctagaacccacaatattcaaaataaggtttaagctttttcccccccacttcctgaaatttccccttctcttttttcaatctctaaagatctgctaccagcacactctgctagcacttatcacacatcttgagaagggaacacttgataaaatctctttctttgaccaatctgaagcatgtcatgagccagtgctaagaaaagaaaaagcactccaggcacaaatggtttcacaatggtgcttcaactcctgtgccaagacgtatgcagtgggtcttttatcatgacagttattgttccagtgatgctttgttagggagaatgggtaggaaaagaaagaccccaggagttagcacaatttccacattgataagaggggcatttgtacaccactgcagcagatctataagagctgatggaaatgtgcccttttcaaataactttatattgcctcataaacttc

SEQ ID NO: 379117 - DNA, 191 bp, Homo Sapiens
  misc_feature (46)..(46): n is a, c, g, or t
gtcccaaacaactcccaaccccggaaaccccccaaaagaggccccngcttttaaccccccccaacaactggttgggtgaaccctgccctctgcaagttccactcctgcctgccttccagaatgaaaaattttccaggtcctgtcctgcccactgtagtgaagcactgctttgggtagtgtctgtggagaaa

SEQ ID NO: 379118 - DNA, 482 bp, Homo Sapiens
  misc_feature (21)..(21): n is a, c, g, or t
aagaaaggaatgccctgaagnccccggaggttgaggctgccagcgaagcccgagattgtacccactgtactcccaaccctgccagacagagcccagaccccgtctcaaaacaagaacaaaaaagaaggtagccaagggagaatagaaagggtaagtgccctacctgttccttgactgctttgatggctatgtttcccattttcttacttaattgtaaatataaaatgattccatctattcaacctgcattcgtatagtcctattctgtaatatacagaagtaatataaagcacagtccctgagttcactacaagggccttacaatttagctgagaagacaagcataaataacaattgaagaacaaataaggttgttaggaaaggtgctaatggaagacaggaagaggagagctcaatgtcgttaaaaaaagaaaagttgggagagaatataacaattcaagaaaaatgaaatgattagaaga

SEQ ID NO: 379119 - DNA, 417 bp, Homo Sapiens
  misc_feature (301)..(301): n is a, c, g, or t
  misc_feature (320)..(320): n is a, c, g, or t
  misc_feature (368)..(368): n is a, c, g, or t
  misc_feature (390)..(390): n is a, c, g, or t
tttacttgtcctaatttcttcatgagataatgtctatgggaggactttgcaaactgtaacaaaaacaacagatttcaatatgtattgtctgaaactctagtaactggtgggattgagagtaggtagatatgaggaagagttccccacttagtttccttttaggtattgtcatgggcactttttctagttatgagagtaagaacttaggggaggaaataggttttctcaagtatcaggggctgttgagtctagttaggaactgtgtaggtagtgaattttgttttcttactttttggtgccntctctctccaatgatgccncttattctctgttctgtgggacatatattcctatgacccgggactcantcccgatgtggaacgtgttttnccgaatcaaaatggggacatgaagttt

SEQ ID NO: 379120 - DNA, 429 bp, Homo Sapiens
  misc_feature (401)..(401): n is a, c, g, or t
  misc_feature (415)..(415): n is a, c, g, or t
aaataaaaagtagggaagagcttctccatgggatcagatcacagctttggggagtgggatggggcctctatgctttgatctatgcatgagctggggtgagaagttcccacctgcacctgactgcaatgactgtaatggctggaattgtcacctcttctccctgataggctcttcctcacctggaggatcggggctggtgggagggcagggaaggggaggccatcagccagaatgtattttctttcagttccatttcctgaggaagaacttgcttttaaaggaggaaagggacagaatcagacctaaataaaattcctgagtatgcaatatttctcttttagtgtctcttgcacctccctttctggagtttcttttcctacatcctggcttctttcattttncccaatggccccantataatcatgggtt

SEQ ID NO: 379121 - DNA, 483 bp, Homo Sapiens
  misc_feature (28)..(28): n is a, c, g, or t
  misc_feature (404)..(404): n is a, c, g, or t
  misc_feature (451)..(451): n is a, c, g, or t
  misc_feature (459)..(459): n is a, c, g, or t
ttggcattttcaagaaggatggttattnttagttctggttatttggtgttggaggtctgtgacacttccttatacatttaaagccccctttgaatagttgtatcaatagttcaaaagcctgtagatatcttgcttttctattctgacagcccagcttctgcagactcaggccaaccttaggtatgtcacatcagttccccatctgtgtaaattacctgaacctctctgtggtattcactgagagttgagcttctactaagggatttccttgacctggggcttttaacaccagatttgtagtgggagtgtttattaggtaaaggcaaagggagtaaggtcaggaggatggctaggcccctgcctcttcaggtttaaacaggaacttattcctcctttcctggaantattttaaacattaaaatttaatttttaaactactattaaaaatccnggttcccntggcttggcccaattcttattacc

SEQ ID NO: 379122 - DNA, 475 bp, Homo Sapiens
  misc_feature (181)..(181): n is a, c, g, or t
  misc_feature (409)..(409): n is a, c, g, or t
  misc_feature (445)..(445): n is a, c, g, or t
tagcagatttgccccaggactggatcctcagccagcagcctcacagctcaggtctctcttgcctgtcacagtggaagtccgtgctgagcccaggttccgcagctcagccttccagctgcagcatctctgcttcctccacaggcagcagtctccagggtcaccaggagagggcggactcgtnggtggttctctggccaaggtctcctcctccctggagccggtcgtcccccaggaaccttcctctgtggtggggctaggacctcggccccagtggtcaccacagcctgtgttctctggggggtgatgcttctggggctaggcaggagacgcctcttccttccagggctgagtactggggcctgtgtgctgccagattccctgcctccatcacccgaccgccactcccctntttgggaacccaaattaaagagtatggaagatctgnttgattataattaacccattgagggcccgg

SEQ ID NO: 379123 - DNA, 511 bp, Homo Sapiens
  misc_feature (24)..(24): n is a, c, g, or t
ttttcctcattttacacacatttnactccaagagactcagagtggcagatagggaattgggccaacacatttcctcagagagacatgagaactgaagacacacaggggcacccaagtccgaattttgcctcctcatctctgctccccttcgcccccactagagtcaactatacggttgatactcgaagcaaataaaaagataatttttaaaaagtgtcaaggtcgcaagcatactagaatgctcacaaatgtttgctgacttgaacgtaaggttcagctttcctgatgcttttcacattgcttctcctcaagacatgagcattgctgcaggcatggccatcttccaggacatgggcgggtagtggcacataggaattaaatcctagcatggctccaggaaaaacaagacaagtactatactcaaaaagtaaagttaaaaaaagcaagcatgcttaagggatgggtcatgaacaccacatcaggttcatttatgagtcttatattaaaaata

SEQ ID NO: 379124 - DNA, 658 bp, Homo Sapiens
  misc_feature (629)..(629): n is a, c, g, or t
ctccctttgggaacagtaataccatggggcagtacattattttccataacccttaggcccatcaaatccaattaaatacagatgccttggacacatttaaattataccaaaatcaatttgccttcaaggatacaaaattaatgttgatatgtaattaatgaaaaaaataagatgttaaaaagataactataagaatatccagatatatgctgtattcccacttatatagatctgatcaataaaacatcaacacattcacttagatactgatttaatccatggatcaaggccatattttcaaagtattttaaggatgccaggacactgcaaaagctggagaaaagagctgaggaacaacatatgcttgctaaacaagaactatgtttatttagctagtgaatacctagagtaataaatttttacttcatgatagcaatcaggctcgcaaacacccagaaataggaattaagggttttaaatgtagttataaaggtcataaaaagtctgattagactgaggtacatttactcaaaattttgagattcattaagtggtagcaaacaaaataattcctcagacaaatgcacatttttcagtatacatattaatggggggaggagggaagaagnatgtgcattaactggtgaaatccaccaag

SEQ ID NO: 379125 - DNA, 497 bp, Homo Sapiens
  misc_feature (393)..(393): n is a, c, g, or t
  misc_feature (419)..(419): n is a, c, g, or t
  misc_feature (442)..(442): n is a, c, g, or t
ctaagtgctcaacttggtttgaatatgggaggaagcaatgttccccacaacgtcaccatctccaccgtggaagcaagtcgtgcaactccgttcaccatccagttcagtgcatgaagatgaaggcgatgatacctctaagatcaatggtggagagaagcggcctgcctctgatatggggaaaaaaccaaaaactcccaaaaagaagaaggaagaaggatcccaatgagccccagaagcctgtgtctgcctatgcgttattctttcgtgatactcagggccgccatcaagggccaaaatccaaacgctacctttggcgaagtctctaaaattgtggcttcaatgtgggacggtttaggagaagagcaaaaacaggtctattaaaaagaaaaccgnggctgcgaaggaagggagttacctgnaaggcaactcggcagcatacagngcccagccttgttttccaaggagctacagtggaacctgtttgacgttgaaggact

SEQ ID NO: 379126 - DNA, 468 bp, Homo Sapiens
atggaccacatgtgggcctggaaacaaggggtttatgtccctaatatccttatccagttcaaaaatgaaaactccccaaaatcccctacaaacacaaatgtgtttaaaggataataatcccagttccttcagttcctccttgggactctcccctgcagttatgtctctgaaaaaggaattttacaagagaataaacaaaccactcaccatcctatttctaaatataaagattcttccaaccagcctgatcttgcaactcagagttaagactggggacgaaatatttggctttaagaaataagagatggcctaaatggatattttggaaaaagttagctattgaagtgttatttaaggtaagggggaaaaaaggacaaactcatgccttctgcaatatccatcctagtggacactgaatagggctattgctttctttccaatactctgggcccacatttcatcatacta

SEQ ID NO: 379127 - DNA, 377 bp, Homo Sapiens
  misc_feature (154)..(154): n is a, c, g, or t
gaacactgacacccacccaatgctggtgaggatacagagcaacaggaactccttattcccttgcctggtgggaaaagcaaaaatgctaatgcccactttggagaacatttggcctatttgttacaaaactacacatactccttactatatgatnccagcgacccacactccttggagttaacccaaaggagttgaaaactatatcccacagaaaaacctgcacacatctttctatagcagttttattcataattgccaaaaactcagaggcaactaagatgtcctgatatccttcagtaggtaaatgcgtaaataaactgtggtacatcagacaatggaatattattcagtgataaaaagaaatgaattatcaagcc
